United States Patent Application Publication US 2013/0034624 A1 - sequence listing, part 12

SEQ ID NO: 41818 - DNA, 4031 bp, Bovine  19866880912893
  misc_feature (1)..(1): n is a, c, g, or t
natttctttgattatctcctgcaggtctgattccacaggaacttgcttaatagcaacaatctgaccggtctctttatgaatagctttgtacacgctgccataggacctgtaattggggcgacaaggatacttacaaagtcaaaacaagccaagagattaaaaagtgcttaaatacaaacaactcaccattctaatttacatccccaggtgcccaagacataagtacttagctacacttgcaaaactgagatagctaaagtattgatactttgggggaaaactgtcccttaagagaactaccatcttataaacttcccatttaaagtttactgaatgtatgagtatgaaataacagtcataaggacagtagctaccacatctgctgtctgctggaagcagcatcctctgaggttcacccttacagaaaagccatgaaagggtcattatctctattttacaggcaaatgagaaaaggttcagagaagttacacgacttgcccaaggttacattaagtgataaataagcagtcagtccaggatatgcatccaggagtgtcagaacacaaagcctatattcttaaaaaaaaaaaaaaaaaaaaaagcctatattctctctacattcgtatcggggcaaaaatccatgggaggggtcttctttttcttgcactcattctagcatcacaaggtcttttagtccttgctcctcttactcacaataatctttaaaatattgggaaatttttactcctctttaactctttttatctttcacttcatctgcccttaagagtttattgtcaagataaataaaaggttgggtagcctttcaatttgggggctataagagcaagacatttagaatctaaagacctagggctggagtcctaccaccacaacttatccacattattacagtactacatatcagacatattattaacctcgtacctcaattttctcacctgtaaaatgacaacaacattacaagagaattgcaatggttaaatgagatatcattatcattatcttacatagattgtattttcacttaaatcctggatggctgtcagtgaaataatgagcaaactgtctttcatagtttccaaacacacctgtttcttcatactcccttggtgaaaagaaagatcaaaataacagcacctaatacatcaaagtagctgagtgctctagctaacaaaatgctactcaaggattgtttcaatgtgaaagtcacacaaaagttttttttaatgtctatgcaaagcacataaaaaatttccattccatcagactttttcattggcaaaactaatataatgatatttaaatgttgcctaaaacttattttttgcaagggaaagacaaccactgaccatgtgtggaagatccaaccactgcctcttcttccttggccactggaaaaagctgccatcatgtatcttatgcataagacaaaagaaactgctaccaaaaaacaaaactgctaccttactctggtccctccaatcaagaaaaaggagggttttagccagttgcgaataaccacaaaagtataatgaaaaaaagaaagggggacttccttggtgggccagtggttatgactgtgtcttcccatgcaggggatgcaggttcgatccctagtcagggaactaagatccacgggaaacatgccttgccttatcttccttgataagataaccccaagatttgtaagcaaatctttgtgaccaaatgcttggtcccaggagataaaggctggtggtccaagccagtcccagaattctgatccctttctgccagtgactgaactagcagtaagtctaagacctagtacacagaccagtgaaatctgagaggaattctttagaagggtccctgggaaagaccttcttccctgataaaaaaaaagaagcaaacaaggtggcccattttctcctgccacttcctttcctgcttctaaagtggccatcttgagactgtgagacttacacaaatgctaaattgttatcaaacacttagccattctggaatctttcacccccagatttttctgctagttattaaatgcccttactggttagccactattggttgggtagtctgtaactttcatccaaatttattcttgataccctaggtcaggggtccccaactccctgataggaaccaggttgcacagcaggaggtgactggtggagggcaagtgagtgagtgaagctccatctgtatttgcagccgctccccaatgcgtgcatgaccacctgagctttgcttcctgtcagatcagcagtggcattagattcacaagggagcacaaatcctacctaaagtcaaggcagaatagcctgagattgccacagatgagaagtaaagtgaataataaattcaatatgcttgaatcattctaaaaccattcccctcattcccggtccctggaaaaaccgtcctatatgaaactggtccctggtgccaaaactgctggggaccactgccctaggtcccatatgtgtaaaaaagttctttatttcatcttcactttggaatgagttttgctggatatagaattcttctttgacaacagctttctctcagcacttgtactgtagtttatcagcttctattgttgtagagaagtcaattctcatcgggttatcatttttcatgggtaatcatgggcaatctctcccgtaattttaagactgcctctttatccttcacattctgtaattttactataactagaagccgatttattcggcacttcataaacttcttcagtctgcaggcgtatgtctttcttcaagtctggaaatttcttagtattatctctttatttcctgtctcttccaactttcttctagagctcctactggacctagagtggaccttgtcaatccatgctgtctccctagtttccaacactgcatttccgtcttgcattttgtgatcagtctcatttctagctttcaactcccaaattctcttttcagtttgtccagttgacagcttttgcaatttactgggcattagaacttcaattgttgtagttttcattgtcaggcccctcagctgtttctttctcatggggctgtttatgttaataattttgtgtttgtcttttaaggattattattccctccttttatctttttgaaaattgtaaacaaacatgaaattccagactgctccattatttctatttccttgggtgggaatttcctacttgttacgtctgttgattatttaatggcactggatttcctcatatgggtttcattttactttgaatgattcttttctatacagtgttcactgttcttgagcatttcatgacatcatgatggtttcatgattcccttagctcagttatcgattaaactaggtcttgcattaggatttagggttttcagccctcaagacaccatacctgaatacactccaggcccagttcctatagtcagaatagtccctctttttccccaggccacaggcaactgatacaaaaatttcctgcaggaagcccaatctcccgaaaacaacatggcatgctttactttcctattactatgataactatcttttctatccctggtctatagctggctatgtattcttatattttaaaaaagtaattttcattcattattcttatatatttgaaatggaaaggagaggttcctgcatgcactgagaaatcttgactagacaccctccacacctcactatgctatcttgacagccaagaaaactccaagagctcatatgaacaattaagattcacaattccagactgcacttagagtacaatttagaaggcttcagcaagaacccctggctgaaggtaagttcaagacctgactctctacaaaaaaacactacattttaactggcagagaacaaaacaagtaataccacaaaggaggtgcttcacacacgctctgcaaggcaagggtcaatgcagagaaacagaaattagacactatctgaggccaaattaaccaggtatcagtcttaaccatatcactcactag

SEQ ID NO: 41819 - DNA, 3332 bp, Bovine  19866880995190
  misc_feature (1)..(1): n is a, c, g, or t
ntcccagggagaagccccaagctctttccactttccccacaagtgaaacactcggcttccttcctcttcaagctctttgacttgttttcctccttggataacgtgatccctgggatggctccggaggggaggttctgtgcgtccccctctgcacagagcacgggctgagaccctccccgtgccgggggcgaccccagagcatccctagggtgcctgcctgctcagagcgtttagccaccatctaaagcttgagagctcgttgcaggaaatcagcaccaaataatatgaaacgctagagtgctgtaggaataggaacagaaatacactattaatgctacaggagtattaacagtttagtgcagtaataaagtgctgtagtaataggaatggagtatactattaatactctaggaatggtaccagtatagtatagtgtagtcatactaaagtgctatcgtgataacaggaatgtgttgttttttactgaagcataattgaggtacagtgctgtgttagtatcaggtatacagcaaagtacaggaatgtattcgtgctgggaaaatggaaacagtgcactatattgcttctgtggtggctcagatgataaagaatctgcatgcaatgcaggagacctgggttcgatccctgggtcaggaagatcccctggacaaggaaatggcagcccaccccagtattcctgcctcgagaatcccatggacagaggagcctggcgggctgcagtccacggggttgcagagtcagacacgactgagcgactaggcagggcacagcacccacagtatagtgtggcgacactaaagtgctctggtaactggaacgggagtgattactttttattggcgtataattgatttacagtgttgtgttagtttcaggtgcacagcaaagagcagaaatgtgctgttggtgctacagtagaaggaaaacagtgctaaagagcaaaatcaggactgaatctcatggtggtgacaatatattttaagccttaataagatgtttttcctcgtccgggctactttctgcttcacatacaataactttctacagttcctatgctgttctattgaagtttttaaaagagagctatttttaaagtgttggtatagcaagaatataactgggattttgtagcttcaccttcaagatgcttaaaaggacacagaactcttctgacacatttgtattaaggctgtgttttgatatgggtgttatcagtagggatccctttggtggcacggggtggagatctacctggacccagcctgggtgatgtctgtcttgctcaggagggttgagggggtgggggacacagctgggcctccaggagatgtgcaggcaggggttccagaccagagggcttcctcgtccctgcggtattcagtgaatgtcatgcccgtactctctctcatgttcaggcttttgcctagcggccgagagacatggcctcaggcagtctgagagttttagcttctgataaattctgccaccgcagggacttgcctggtggtccagtggttaagaatctgcctgccaatacaggggacctgggtccgatccctggtccaggaatatcccacatgctgcagagcaactaagaccatgtgctacaccttctgagcctgcgtgctgcagttacggaagcccgcttgcctagagcctgggctctgcagcaacggaagccgccacaacgagaaacccgtgcaacgcagagtagccccagcttgctgcaaccagagaaagcctgtgcagagcagtgaagacccagtgcagccataaataaataaaatgcctctctgaccctctcctctattgccctctttttgatcataggctccagacttcaggcttttcctgaaacacaccaggggttctactgctttatatctgctgcccccactggtcataacaggctctctgaaagctcccagttccctccatcatctccaacaagtttgttcaaatgctgccttttgaaaggtcctgtgataaaactgcaacacaactccctgctgctccccatccctactccgaattctccttctgttttctttttctccaggtcacttatttcctgctaacattttacagggaatgaaggtgttgaatgaaggtgttagtcgcttagtcatgcctgactctttgcgaccccatgaactgcaaaccaccaggctcctctgtccatgggatttttccaggcaggtatacttgagtggtttgccatttccttctcaagaggatcttcccaaccagggattgaaccctggtctcctgcaggttctataccaactgagctaccagggaagcctttttacagggtatacttgcttttttatttgatttacattcactagcatctacaggtggcattagtggtaaagaactcccctgccatcacaggagacataagggatgcaggttcgacccctgggttgggaagatcctctggaggagggcacagctatccactccagtatgtgtgtctggagaatcccatggacagaggagcctggtgggctcaggtccatagagtcgcagagtcggacatgactgaaacaacttaggacgcatgaatgcacagtatataaaacccatcagagagaaatttttgttgggtttgtttactcatggagcatcccagcacctacagcagtgaaccgcctgtgatagatgctcagtgactatctgttgagcagatgagaacaaatcaaaggatggataagcgaatagcactgtgttagctcaggggctccttttcagcttcctgcagagcttgtcatatctgggtatcaatgtatccctccccccagcacagggcacctacctcagaagacaggggtgacacaggacaccctcccgcaaccattgacgcagcatttcaacgcgtcaggacactggctgtccacctggcactggtcccggcagaggccgagctgggggaaggcgatatccacattagggcatgagcccggcttgtctgggtaaaaaaaggagtaagaggtggtgagcagagccgaggcaggcggctgcacacgtctccacagcatgtctgcccacctggattcacaaagaagacagctgcttgcctgagcgaatctcagggggcttggaaggtcgtctgcaaactctcttcctcctgttctctcctcccaggggttttgagatcactgcactccagtttgagtcccagctctgccttctcctaactgtggcctcaggagggaaatcccccagagccctgtgtcttcaggtgtcagatgagatcagcgttgaccacaccacaaggttgttatggaagcaatggaggcaacaga

SEQ ID NO: 41820 - DNA, 1424 bp, Bovine  19866881002825
  misc_feature (1)..(1): n is a, c, g, or t
ntcctaccttgggattgctttcccttattatgaacacatgccatctgaatctctgaaaagacaccagtacttttccaaacacaaataagggtgtcatgaagtcattactcactggtctggctagctcccaaacctctttctcccatcttgtaacttttgtaaggtccattttatttatatatacctatactctttccatgcagaattcgttatgggttacaacaaatatgtaagataaatggatggagcttttcaatgaaaataaaatatacatgcccaccccaacctcctcaaactcatgttaaagtcttaacgctcaagacctcagattgtgactgtatttagagatggggcctttaaagagctaattaaggtaaaaatgacatcatatgggtgggccctcatccaacatgactggtgtcttcgtaagaggagatgaggacatagatatagagggagggccatgtgaagacacaggaagggggcagccatctgcaagccaaggaccgaggcctcgaaagaaacaaccctgctgatgcctagacctcagacttctagcctccagaactgtgagaaaataaatttctgttaactcatgccatctgtgagatcaacaatggcagtcctaacaaactaatatcacaggtaataaagttaactggccgaaaggcagttcactagctatgatgagcaggaaagcacctgtcattcaaggattcaaccctgcagaggatgggatgatttcagagaacagcatcatcgaaacatacagtaccacatgtaaaacagataacggacgaagcagggcacccaaagctggtgctctgtgacaacgtgggcgggacagggtggagagggacatgggagaagggttcaggatggaggggacacatgtacacctgtggcaaattcatactgatgtatggcagaaaccatcacaatattgtaattatcctccaattaaaataaattcaaatattaaaaaagaattcaaccctgcaacacttttctcttgcacatttaataaaatttttaaaatccaaaaggcacaggagtgagtgtcaaaaaccaaaacggtttacttttttgcccaagactgtacagcataaagtaaaagcagaaacaaaactccgattcctaatcctctcttcaattaaaccagcacgtccaggaaagaacgaacatatttcagaaggaaatataaccagtgtccatttatagttggatctatggtgcaacagcaaatacctgctaacatacacaaggccctgtgaaacaagggtactcccagagaggcatcagagtgatacagctgagagcacagactttggaccagactgcctggattaaaatcccagctctgtcacttagtaactgtgcaacttctgcccaatcgctaacctctctgggcctcagtttcatca

SEQ ID NO: 41821 - DNA, 839 bp, Bovine  19866881075788
  misc_feature (1)..(1): n is a, c, g, or t
ncacttctgccatagatcatccgcaaagtagccaaacagtgtgccctcctcgacgtggatgagcccatctcgcaactccacaagtgtgcattccagtttcccggtggtcctccaggaggaggcggcacctacttatgtctcgctacagagaaggtggtgcagtttcaggtgagaagcagagactctcagcaccaagcatcccagaaaatcagaaccgcaaagaacagtaggatgtaagatcaccattatcagcaccatcgtggttgctactcactgagcaacactgcctcctatggaatgttagacatgaagactatcaggatagaatcagagaatgtagaaaaaaatagtaatagtagcattgagcaatgctccttcccaaaggccattaatgtcagaatgttgtgatataaaattgtagggggattccctggtggtccagtggttatgactctgcacgtccaccgcagggggctggggttccatccctggtctgagaactaagatcccacaagcccagaggcacagggccaagaaaaaaaaaaattgtagaatgcaaataaaaatcagtaataaatagtacttttggctggtggctcagaggttaaagcatctgcctgcaatgcgggagacctgggttcgatgcctggatcggtaagatcccctggagaaggaaatggcaacccactccagtattcttgcctggagaatcccatggacggaggagcctgatgggctacagtccacacggggtcgcaaagagtcggacacgactgagcgacttaactaacttttgagtattactgagcaaagataattatggactgttaagacataag

SEQ ID NO: 41822 - DNA, 1561 bp, Bovine  19866881096768
  misc_feature (1)..(1): n is a, c, g, or t
natctttttgtctttgctagagcatctaagcagaggaggtattcctggatggtagggttgaagggtctttcaaatttacttgactgtgactcacaattagaaatacattttatatcataatctggtaaggccacctacacacacacacaagtaaaacaaaaatttcgtaaaataatacctatctttatcatgagaaaagcattctgatgtgttttattctagttaagtctattttattctattttgatcacaacctactaaacagattatttagcatattaatgggccatgactcacaatttgaaaaataatagattaaaatgtctttgctctcactacatgctttgaaattactcttcagaatagctatgctaatttacaaggcattaggtttttttctctacatcctactcagcacttggaattatctctttttttttcccccagtctgatgaatgtaaagcagtatgtcattgttgttttactttttctttctttagttactaagttgagtttctcttcatctgtttattcactacttgatttcctcggaaagtgcgtttgcctatttttctgctgggttgctagattttttttcttgctgaattactcctgagtttcttgagcagcttaggttttcattgtttaatgattgttgttgcaaataggctgcagataccttttcccaatttgttagtcatttgttaactctgtctgtgatgttatttattgaacagaatcagtcattttctttatgtgttttatttaagaaatactttcttcacttcatatcataatgatttgccttgaattttttatagctgcttaaaccatctgaggtttgtcccactgtggtatgagataggatataattctgtttattccatacagtggatccactttccccaataccatgaaaataatgtagcctttcccctactgacttctgttgccacctctattgcataccaaatatccatacatgtgagtctgcttctgggttcttccatcccattggtcaagcactaatagcacactttgaaaatgagaatttatgttttaatatctggtaggggaagtttccgccctttgagttaaatgttttaattttttattttatgttggagtatagctaacagtgttgtgatggtttcaggtgtgcagcagagacttagccattctccccccaaacccccccccgcccaggctgccgcagaacattgagcagagttccctgtgcttttatttttgagatgacttgtcttagctatttgtgaaaatttattcttccatgcacattttcaaattggcttatccagttcctctccctcaaatattagtgagaataccatgaattgataccattacaatgttatgcctttctttccacacacatagtatatttctctattgatccaggagataaaaatctccttttgtaggttttacctggcatgcttgactaaattaaattctagataataattttctgttttctaaaaaaatactctgcgatctaacaaatgggaatggtatcttctttcaggggagccaagttttt

SEQ ID NO: 41823 - DNA, 1004 bp, Bovine  19866881141395
  misc_feature (1)..(1): n is a, c, g, or t
ngctgagggagatggccccaaggcctaggacacccccttcctcttccttgggtctgcctgggagctttcagacctggaagttctgtcccaactggggggtcgtcagacagccccctactcaagatgcagagctctgctaagctaaggtgttctgatccccatttgtccacaagtatcagagtcacagccagaagggggcaaggcggttgagaggtaccacgggggtcatccctggggtctaggcagaaggggcaagaatgggtcacatcgcttcagctactgggtgaggatgggacccctagatgtcattggataagtaggttcatgttgctagaccacaggcctgtgcccaggaccaaggatggcaagacacagccaaacgcttttgcccaaggtaagaacagaagcccaggtgatggatgggaaccacatccctcagggcagagacaggcccatcttgctgaggctgcggaccagctcaggatgcaagatccaagtcttgcttgggccagggctcccagggtgcccctcagtctcgggccaggccaccctgccacagcccccacacagccctccggggggtcactcactcagcctggttccaggggatcggctccaccttggagttggccagcaggtgtgggctgtagcgcacctccacatacaccacgccgtccttggccttcatctccacaaactcgtaggcaatccttttgacagcctcccggcagcccctgggaagggaagagagggattcgagagcactccccttgggtgctccaggagtgacaaaagctgtccccaacccatgacagaccaaacccacgtggggcccccaatctctcatcccccagtcacaagctctgggcctctactgcagaagatcccagaagcccagaacatcctgtcagctctacttcccaactcggtgccagtcctcgccccctccagcctggttcgaccacctcaccagcctctctgtctccacatttgtcccagtacag

SEQ ID NO: 41824 - DNA, 1594 bp, Bovine  19866881151238
  misc_feature (1)..(1): n is a, c, g, or t
ntgtgacttgatgctgtccctagggccagaaagcttcctctaatctaaggttgtctacagtcttccaagccagccctgcgcggggaggggcagtcacaagactcagctgcgaacatggactgaagaagcagagagatggttccagtctgtccaatgctatccagctgctaaggagtggcccagagattcgaatctaggtttgcagtctttttctacacttcacaacagtgccagggagagagatttctgccgtagggctcagaggaccttctctgggggttcctgatcagctgccccaggatggagggagggaagccagccagcgagggctctgaaggggtctggcaagagataaatttctctgtctgaggcctgaggctgtctggaaagccagagttcctccctcccttccctgatgattgccagttctgactgttacaggtcacttcggccttccgaatctatggttctactatgcaccaggctctgctcaaagcacactgagggtaccgggtgagctagacagacagacgcggactccagcttcacggggcagctaacctattctggaggcctcatggagcaagagatgcttgaacgcagatggacaagataagaagctgtacgccacattcaacaggagtgggcagggcagaggctccatcctgggatgaggcagaaatgaatttaccaggcttaccttgaagctccgaagcttaaactctagagcccctcacttgccagatgccttccagtgatctgggaggggcccaagcaggacacattcagggtcacatgctgatgcagagtttgccaaagtaagctagtttaactgcggatgatgaagaatgttgcctctttactctttgacattccccttggtcatacttcccctcatttgggtgtcacgggcacggcggtgacatttttggggatctagctaaggggaagctgtcatggaatgccacatcgatgaaaaataaaactcaaagtatatcactgctaagaggacatttgcaacaaactgcttaataggcagcatcttagtcaaagggtttttaagatgcatgatcaaggaaataggaaaagtcctgaaaccttacagctcccctatgaaagaaacttatacatgtttttctaaatttgacaacagtcctaaaaatttatgacctcatttataatgagttgtgaagctgggaagaaacttctctaaactatcaacaattaaaaaaaaaaatcttttggtcaacatgtgctagagaaaagacaaaacgctcttattttctctaaagaaaatgacactaaaaaatcaatgtcatatgaagaggtgatcctaaaagcatacagccaaaacttaggaataaaaaaaaaattttatggatgtatatcaggcaataaatataaacattattatttttctagatattgtctagggtctatcagcttgtttaaaaatattcatctatttggttcactgggtcgtagttgcaggacacaggaactctttagttgtagcatatgaaccctttgggggcatggtggggatctagttccctgcctgggggatcaaacctggggctgtctgcattgggag

SEQ ID NO: 41825 - DNA, 1403 bp, Bovine  19866881164740
  misc_feature (1)..(1): n is a, c, g, or t
nacatcaaaaagcagagaggggaaagaaccatggaaagggggagatgcaacagccatctgtctagatacattagtaggagagtgtgcatgaatacagggcaaagaaaagaagacagtgtgagaacccagcacggctgcatgattccagaaggtaaacttaccgttttatttcgtaatcgaataatatcagatacagaaccagccccacagtactccatcacgatccacaagtctgtgttcttaaagtaactgccgtaatatttgactacatgagggctagggagagagacaatactaatcagtggaacaaccttcaaacatccctatgaattcatgctgtaaaatacgtaaaaatccatttctcagctccaaagatcagttatttatgtttaaggttcaaacgggcaccctcttggtaagaaattaaagtagtattgatttctgaagggcagtaaataacagcggtgcaaaaactgtgtaggttccttaacccagcgtttctaagtctgcacctcaccctaagaaaagacacacagatttcaaaaagaaagagttaccatggtcacagaactgcttaaaaaactgaaaatttagatacgatccaaatgtctgacattagggagtttatttaagaaataatgatatatccgtataaaggaataaccacaagtccatggaaaatgtaatagaagaatacttgatgagaagattctgcttaccaaaaaacaaacaaaaaatgcaggttacataacagacagcacagtataactccaaaaagacatacggaaggacatgtatgccaaggagtatttaacaatgattatctctccaaaggaaaatgtggttttcctttcttatttgcattttcccaagaagtcacatatactttgtaataaggaaaaataaaactacactacaatctattgtaagggaaaaatattcagaatcagacctgaaatatagaatcttgaagaaagatttcaggaaaaagtcaaaatccctttaaaatgaaataattaaaaaaaaaaaaagaatgtgtcttctgaagctaccagctctacctagctagatcattatcagagctaagtaatattgcacaatgtagtaacggaagaggcaaaaaccaactcagctgatctaactctcaaaatttcaaatgccccttcatccttgggaaacatgccaaaatgacaggatatcaggaaaacacacacacacatgcaaaatgcatattaatgaagaaatggatgaataactctcttaagatacatatcaccacatctgtgctgccgtctctgaatttctatagtatttctatagtactggctccataaggcaattactgccaggtattcactgctggaatatatcctataccatcatgcatcatcaactatataagc

SEQ ID NO: 41826 - DNA, 1675 bp, Bovine  19866881172759
  misc_feature (1)..(1): n is a, c, g, or t
ntgtcctccttccagcaagatcctcctggatcttctcctccggcaggactggggaatgtaaaatggtgcagctgtgaactctcagacctgagggggctgtgccatttttaaagtaagtaatcgattaatgtagttatttatggctgcactgggtcctctcttgtggaacacaggccctagagcatgcttagcgcacgcagttgtggcacacaggcctagatgtcccagggcatgtggaatcttcctggatccaggatcaaacccacagcccctgcattggcaggtagattcttaaccactgagcccaccaaggggtatccaagggctgtgcaatttgatgccacgctggcatctggggaagacaagaggtagcttagcattttaaaaggcaggttttgaacttagacatgagttcagtcccagtcccactgcttaccagcagggcctcagtttgcttctctgaacacagaaagaatgatctgactttctccactggggcacggaggaacaggaagggggccatgcccgtgatgctctggagtcagtgccaggtaccacggtcaggactcaaaaggcaccaggtatccacccactcattccacaccaggtttaagcacccacctggcaccgatctctgtgctgggtgctgggatggagctgtgaatggacttgtgtggccccagctcttagagactggaggggcagatttcaccaatttgttgccattgtgactgtgattagggaaatcaccccctttccaatctcttaaccttccgaccttcacccctcaccttgaccttgaagcaccctgagcaggatctaaatcagatgtatctccataatcttagctcctcaaccaaggcctggaggctcaacaagtatttaaactgaaaagatttctgtaacaaacacagcactgagtgtgtgcaagccacggttctgagcactttacaagtatgaaatcctgtcactatgcctggcaaggatgcactattatcaccacccccattttgcagataggcaaactgaggttcagaaaagttaagcaaactaacttaagttatatagccagagaagggcacaaccaggatttgaacgcaggccacctggccccaggggccactcgctccatgcctctcccgagttgatgccacttcccagcagggtccagaaagggcctgatctgaagacctcacctgtctctaccacttgctaaaccctaggctcctcactctccattccccaggtgggctctggaggaaaacagggcccccgctgcagccttttgatgtgccctgccaagttggcactgtgaggcctcagggtgcctcaggggatcccaggccagcagctgggccggcctcggggccagcgttttccgtaaacatccccgcgagccagccccgcgtggtcagaccttgggccgctggcttcgagggctgaggtttggcgggccctcctcggtttcctccaacacagccacttccaccccctctgcctggctgagcttccagtaatgaagtgttttgctctggggctggtggggtcgatggaatggggtatcggggccttgtcggtctcacttgccccacttgggctcctggaagctggttagatgcccctcactgcagcctgggcagcttattggcccccctgggggttggaggaggaattg

SEQ ID NO: 41827 - DNA, 1469 bp, Bovine  19866881199384
  misc_feature (1)..(1): n is a, c, g, or t
ntgactgactggtcaggaatttagattcctctgaccccagagctggggtgtatttattgtttctttggggtggctgagagccctccctccaggatcatcactcacctgctgtctcttctccagtgtctcactataggctcttccccaaagccttggggcagttgatctccaagtattctctccgggaactacacctgtccttaacccaaggcttctggaggactcgatactgggggacacccttcttgcaggccccatcaggggcagagctgtgggcttggttccaagacactgtcaccgagtgagtgcccaccttgaggcctgtggcaggctgtggcgggaacgtggcatggcaagtgttgtcatcttaccactgccctttgggggaagcagttccatgggggtaaagctgcactggaagtaagaagtattatggcctagtggcattcttgactttgcttaatatgtttccttcccctgatacatccagacctgtggttgcatgtatctgccgagatagataacagttatctgcagcctacttggatgtaaggcactagaaagctgtggcaaaccagacaaccttttaaagacattcattcacataatgataaaatgccacaagagccaaataaaatatatgtgggctagaattggcctgtaagacatcatatctctgtattcgagaaattactgttttttaggagaaggcaatggcaccccactccagtactcttgcctggaaaatcccatggacggaggagcctggtaggctgcagtccatggggtctcgaagagttggacatgactgagcgacttcactttcacttttcactttcatgcattggagaaggaaatggcaacccactccagttttcttgccaggagaatcccagggacagaggagcctggtgggctgctgtctgtggggttgcacagagttggatacgactaaagcgacttagcagcagcagcagctaccacattgcaggcagattctttaccttctgagccaccagggaagttactttaactcaatagcctgtgttttgttgaagaggctcccaatgcacacggcgctggcaaggagaatccagccctgtcccccaacctccaccccttgcccagggatgcactgctgtccttcatattctgccagagtgacagctgctgctggcctgtccacactgtgaccactgatgcctgacccacacacagtccctgggagggaaggcgtgctcttctggtttgcagggtaactgtgtagctcttcatcacacaggctggacagcattttttgatgataggagccaaatgacttgattgcatgccagtatggcttgcactgcagagatccaggaccatgacagggttacacgtccgcctctacagcttgccaccttgtttacactcttgtgctggtacgctggcactcctggatatgcctttcattattgggatgtgctttg

SEQ ID NO: 41828 - DNA, 1620 bp, Bovine  19866881216338
  misc_feature (1)..(1): n is a, c, g, or t
ncatcatagctacttgcaggctaagcaaaagttgtgatgcactgagcactttgcatgcattatcttgtgtaattctgataacatcccattgcaggatacgatcatccccctttcatcaggtggcgcaagttcaaggaagtgaagtccttgcccaagaccacacagcttggtggaggaagtaagattcagttcaatccactgtctttctgtctccagaatctgcattcataatcacctatgaatcagtgctaggggcttagataggcaaaaagcacagacatggtgatgttacgagggagtaaaaactagagtaagtagaatggatttatcaggatgctttgttttcaagttatagaaaccaatcttgaactaaattcaatgaaagagttcttcactggttcaaattcatccctaagatgagtgctactgggcccttaaggctgactcaaagaaaagtctggaatccaaaatgaagcaatttctctctctctgtccctctctctcccctttctccccatatctttctttgtttctttctgcatgctagcatcctacaaggaggggctaagcgaacactgttccagccattccgggtccccagccccatctgattgcagatggcagttgttcaaggcatctagaaggtcacgggatccggaaccaggggatacatgcccaagtgattctctgatcaatgaggacacagctcattaagactatgagcaatcttatggataggggacagttgccaaatttcatcatctttccccacggttggaattttcacccacagttcttcctgggcagcatgtgctgtgaggtccgatgtcagagtcctaggttcagagtggcattcccatgcgcacccagtacgctatctgagtgatatgtgatggctaactgactttgggtaattcgcttctcttctctgagtctcagtctccccatctataaaacggaggtgaccactgtacatagctataagacttgtgaagattcagtgagagaggtgaagcaccaggaacacagatggggcttagtcaatgttgagtgcctcacttgcttttccagtggaatcagctctcttctgttctgccatttccagctgggctaaggaggtggcctctatccttacccaggactgtagggtaaagggaaatatatttaaaatatctagatgagaccctaattctttgctagcagttacataaattctaaagtcatctccatctttctctgccctggctagcctccagagcaattaaacattgatgttgtagctatacttatctcctcttccctcttccagcctaggacatcaattctccttatcaaatgaaaaatttaaccctcacatttgtggacatcttgggtttatgaagcactttcagattcacggttctcacatacttattataggaattaaagtaatatgaaaaagtacaaggaagaaagttgaaagaagtcaagtgatcaaggtcaacatcaccagtggtgcatcatattgtgatcatgtattgctgataggatgtcaggagaaaaacacataacttctggagtcttcttccctcaaacctacaactccagtctaatcttgagaaaacatcagacaagccaaaa

SEQ ID NO: 41829 - DNA, 1229 bp, Bovine  19866881262794
  misc_feature (1)..(1): n is a, c, g, or t
nagcctcgtgcgcaccgacggccttttctaccccagcgccttctccttcacctacacgcccgagtacagcgcgcggccgggggccccgggcgccctggcggcgcccgccgctgacgccgacgcgctcctggagagcatccatcacgagttcacgcgcaccaacttccacctcttcatccagacgtaggaggagcggcctggacgctgagacctggccgggggagggttttctgggtcctgagccctgccttccgcctcggtgctgcgcaagtgaaagctgaagaccgacttgcagaaagctctcgccctagaaacctggccctgcgggtctttcaccggttactccctcgtcttttccttctaggaagaccccgcctgagtgatgctccctttgtatccggtcaggagtgtggttttctctatcattgtctttttcactctgacattctctctcccgaagtaactatagtttttttgttttttgtttttggccatgtcacgtggcctgtgggatcttaattcccagaccaggagtggaacccgtcccacatgcggtgaagtgcagtcttagtccctggaccaccagggagtttcctgtagatctctcttctttgtgcatccctgtccctgcatctttgtttctctccatctctctgggtctggcatacagtttcacacattgtaaaaagcctagagcagtgaccctccaggcagctgtatttcctgaaggaagaaacgggtgatatttcacacacatggggcatgggctcacgcttgccctgatggccccaaagcaccaggtcctgcctggaacattgggtcccactccaagcaccaagtcccttctggagcatggggaacctgtcctggagtgctggcttccaccctgcagtacaaagctcagtcctttccttagtctttttctggctggagccaggcacagtacccattcagatgtttgccctctggtccacaactttggtggctgggtaggtccctggtgtagtggtcaggtcttgccatcttaattgtctacccaggcatttctttcgcaggcctggtaagatgcaatcagtcctaagggtcggagattgctctgctgtgttagcatcaactcccagccagggcagggagtgtggtactccctgtatctgtatgacccacctcctcccagagggaggggcccagtgtgcttccccccacatacacacagagtagaggacaacatg

SEQ ID NO: 41830 - DNA, 956 bp, Bovine  19866881405446
  misc_feature (1)..(1): n is a, c, g, or t
ntgtacttgattgtaccgaaggagataggaatttgctaccaaggtttttctttgaggtggagtgtcctctgtgggggggcttgcagttgcccttcctgtgtacataaatacagtattttccacggttctgcctgcgctttattttataatgccatgcttgggactgggaggggtcagcacagtcagacattcattagagccaggggctataaagaattattaggccacctttttttttttttttcccctttttgagcccaggtgttcctccagttggttaaaacatggagtgcagggaactcctgtgtcccaccccgaccctgcagccttctccgctttgccttgggcaaactaccatgactcaggatgcctttcccacttgccagtgatttctgactgtgcccagtgaaacacaccggtctagacccacttcctcatagaaaccactgctgttcccctcgggccctccgcagcctccctgagcgagttgacggagttcctctttcagagttagggctacgcagatgggaacttgtgccgtctcccccggaagcctttccagcctcctggctcccagcctcgcgggataggtagtggaggctgacaggatgaaagctgaagagtgaacgtgcccgggcagaagctgggaaaaggctcgggtgaggcgcctcagaaacagggcaccctggccaagcagggagggagcgggttgttaatgggccgctaatcctggctgcagagtccaggaggtgagaccgggctgagatggcttcccctgtgtcagtgggtttcctccagacaccagagacaccacaggcaggtgactccctttattttgaggaaagcctcagagccctcccgtcacgtggccagctgtggtggttgctccagctgtggtggcgcacctctttgggactttcccacaagggctcgtgacaccctgctgcatgtcttct

SEQ ID NO: 41831 - DNA, 1231 bp, Bovine  19866881468051
  misc_feature (1)..(1): n is a, c, g, or t
ntaggtgctccgggggaagcttcaggcgtagaactcattggtgggggcttttttgtagatgggtttcttgcccaggtcgtagctgccctcatccttcttcttcatgcggtacaccagcagcagcacgaggaagacggcgaacaggatgcccacgacaccgcccacgaccagagctggagaggagagagggggcagcgaggtgagggctggcggcccgtcgggacctcggggcgcacgggccgcttctgctcggttggttctctggcccccggacatcctcaccatcacgcccaggggcatactctgctaatgccttactgaatttgatcctcaccacctcattcatgagaagggagtcactctaaaggactaaaaaaaccacagaaccagagtgacaaaggcatccttccaacccacattgctggagtccaaagccaggttctttcccaacacgaggccaactccccagcaacagctcagccctgagccaggaagcagaaaaatcgcaggctgtggaaatcccccttagacctacttaccccacagtccttagcgcagggagctctctagttgaccttgcgtgcacacatccctatgcagacctacacttatacccgattgggtgtacacactctgtacacacgcaggtatatgctactatacacagttacaacatgtgcgtgtgtccacactcctatgttataaagaattacacatgtggtttgggactttctggtggtcctgtggttaagactccgtgcttccaatgcaaggggtacaggtttgatccctggtcagagaactaagatcccacatgccagctggtgtggcaaaaaaaaaaccaaattatatacgtgatatatgtccgcacatatgaagctcagtgcttaaggcttacattctattcctgtctctgccacttactggcaatggaatctaaataatcaagtttcttcatttctctcattataaaatggaaacaatagtacctttcttataggtttgtccctaggttgaaataaatcaatccccttaagagagctcagaataatgcatagcatatactcaatattcattaattgtgactttttgtggtttgtatctgtgtccctgccaccctgaattgttctggcacaacagtgggtgtttaataaattattccattgggctcagagaggagcaatggccaagagcagacgcgagtttctcacatcgggtaaacgtatattct

SEQ ID NO: 41832 - DNA, 2184 bp, Bovine  19866880412393
  misc_feature (1)..(1): n is a, c, g, or t
ntgataaggaatcccccctgccagacaggagacacaggtaagatccctggatcaaggaagactccataggccttggagcaactaagcccatataccacaactattaagcctgtgctctagagccagggaatcgcaactactgagtccctgtgctgaaactactgaagctcacatgctctagagccatgttctgtagcagagaagccaccacaatagaatcctgtgcaccgcaaatgaagagtagcacctgctcaccaaaactagagaaaagtctgcacaacaaagacccagcacagccaaaagtaaataaataaataaaattgttttaaaaataaaaaaataaaaaggagtaaaatgtgttattagttatagtaatacagtttatttgctccaccataccaaatgtggttaatataaaaaattattaatgagatattttatgttttttaaaaactaattctttgaaattggtgggtattttacacttacagaacatctcatttctgactagtcatgtttcaagcgctccatagccacatgtggttggtggctgtggaatcaaacaacacagttttatattctcttcttttgttaatatttggaattttcataatgaaaagtattaaaaaaaaatctaggtctgaattcaaacctcattttcttgacacctactctctcccattcccggcagccttgccctgtaattcaggggtttcttgggccttgcctagtaaaaggtgacagacacagatcttggaggaagcatcgccaccctctggtttctttgctgctgctccttgcatgatccattatccagcgctgtccccgctgtgtttttgaaggtcagataaggcagatccaggtgctggttacccttcagcacctaatacaatactcaacacatagttcatgctccatagatatttgctaagtaaataagtgtcaagacgtgataagagatcctacatatcgtaaagtgggtgacagtagaaggatattgaacacttggaatgtgttaggcagagtcacaggtgttgttttattgaactcttgctaaaatatgtgcctcagtattaccattgtcaccctgaagataagataattcagtgcctgagtaactaatcagtaagtgttaaacccacacttctaattcagatctgcttgacaccaaagccacatcacaccatctcccaggaatttgcccaacagctagaatgaaatgcaggaactgaccaattttccataatgatgggcccttttatgccttacttgtccccaaggagacttctataggcttgtggtgggcagaatattgggtcccaaagatgtccatgtgctaatcccccagaacctgtgaatatgttaggttagatgacaaagcagaattaaggtgcagatggaattaaggttgctaatcaactgatcttaaaatagggagattgtgctgtgcttagtcactcagtcatgtccgactctttgcaacctcatggactgtagcccactaggcttctctgccagtggggattctccaggcaagaacgctggaatgggttgccatgccctcctccaggggatcttcccaattcagggattgaatccaggtctcccacgttgcaggcagatccttcaccatctaagcccccagggaagccctaaaatagagagattatcctgcattatccaaagtgttaatcattcagtagtgtccaactctttgggaccccatagactgtaacctgccaggttcctttttctgtgggattctccaggcaagaatactgaagtgggttgccatttccttctccagaggatcttccccacccagggattgaacctgggtctcctgcattgccagaagatactttaccatctgagccaccaagaaagtccttggcagtgtttgatttgaattcccgcaatgatctgacatgtataccaccattgtgtccacttggcacaacacagagctgtctgcctcctcttgggacagaatcattctttcccctgcagagctgtgtagggtgggagaaaggattttgtaaccagtgtcaggagacctggtctcatgttctagaatcacgtgacccaaccacctatccattatgctcccttgtggtaaaataggggatgattataatagcatccatctcacaggattccaagtttatttttaactcacaaaca

SEQ ID NO: 41833 - DNA, 1585 bp, Bovine  19866880421657
  misc_feature (1)..(1): n is a, c, g, or t
nccttcgcacagcatgcgcccgccgcgcccgcctcacccgccgggcccgcggcgccaggggagctgggctggctgtccatggccagccgcgaggacctgatgaagatggtgcggccgccctactcgtactcggcgctcatcgccatggccatccagagcgcgcccgaacgcaagctcacgctcagccacatctaccagttcgtggccgacagcttccccttctaccagcgcagcaaggccggctggcagaactccatccgccacaacttgtctctcaacgactgcttcaagaaggtgccccgcgacgaggacgacccaggtgagggcggacaggtgcttcccggccggtcccttacccacacccgccccccactacgcccaccctgcaactcacgcacacgcagaggcaggccagggtgggataaaggtaaaaagcctgaatctttaagcggaaagtcagtcctgagtggtgttccttaggcggttggaagggagggtcgagttaccggtaaacggattaggaataaaaacacgggtgggctctcagataacggatggctgtaaagagattcagatgagccgagaatcccatcacatttcaggagagtgaggtggggagagatggggaagttggtacccgctgtacgtagatgcgtttcgaaccttacctgtttagaaacgtaatagtgtaaatcccaaatgtgcttcgtgcggatctaagcccctgaggtgaggagggctgggtgatagtgtcttgttaatggtttccctcttagctgaggaatgaggtgaagaaaagctcaaaaatctcagaaacagattcttcttggaggttttctgaaggcgctcaggactaggggtgtggggtgagaatccggttagggaaaagaggaaactgtttccttgccttctgcagcaggaatccccaacctctgggatctaatgcctgatgatctgaggggggttcgatgtagcaataatagaaataaagtgcacaataaaagtaatgcactcagactcccccccatcccttatccccctgcgttggtggaaaatattgtcttgcaggagaccagcccctggtgcagaaatggctaaggatcagtgagggatacaggattctttgtaaattatgtaaatgctctgaagtagttgtgttattgttcagtcgctcagtcatgtccaactcttttcgaccccatggactgcagcactccaggcctgtctgtccttcaccatctcccagagcttgctcaaactcatgtccactgagtaggtggtgccatccaaccatctcgtcctctgtcgtccccttctcctcctgccttcaatctttcccagcatcagggtcttttctaatgagttggctcttcgcatcaggtgccaaagtatcagagcttcagcttcaacatcagtccttccaatgaagagcagtgctttccatttgaaatgctgtacaaactacacgtagttgaaaaattgtctagtagccatgtgaaaaaaagtaaaaagatggtgggaattttttttttttttaaagaaaaaagaaaaaattttaatagaggtgaccatatctgacttcagg

SEQ ID NO: 41834 - DNA, 1322 bp, Bovine  19866880484235
  misc_feature (1)..(1): n is a, c, g, or t
ntgtggtgctctagttgtagcactcaggctctctagttttggcacctgggatccagagaacagacttagatgcccggcagcctacaggatcttaattccccaggccagggaccaaacctatatccactgtgttggaaggtggattcttaaccatttgaccaccagggaagtcctggaattactgtttttagcaaacatatcacccagacagctcaggttatacaaggaatgaggtgggaccctccatgtgttttccaatgaggtttgatattctccattaagttcttgtgcaactgacttctcaaacttaaagggaaaattttgtgcttgagtgtgtgactctgtatgtgtgtgtgtgtgtgtgtgtgagagagagagaggatgtaggtatccctggaaacctctggagctctgctcctgccaagcagacttgggattcagcccacacctgtgagatttggatgtcttttgtcccctgagagtctcactctgcctggctaatccaggcagagcttcctgctgcctcctttcaggacgcagttcagaccagaatattaatggagattacagcaaggagaagaagcaatctgagcgagggagggggctgccgggcaggaagcttggcatcctggcggaatctttccatacatgatctcgaaccacttgtttggaagcagtatgtgatgcaggggggccttccctggggtgtctggagctcgtctgtatcctctccccaggttgttccgaggacaaatcgtctcatacctttttcaggtaattgacatgcacgcatctttcatccccccatgcatatcaaactctgcttactatagagtgaccttacagcccagttggactgagacaggtttacatctactgtcctgacgttttactatctgtcaccatcaaaagtgaacatgaaagtcgctcagtcatgtctgactctttgcaaccccatggactgtacagtccatgaaattctctaggccagaatactggagtgggtagccattcccttctccagaggatctccccaacccagggatcgaacctagacctcccccaatgcaggtggattctttaccagctgagccatcagggaagccctggtcaccatcaaaaagtgtccctatttggattttcttccaagaataagcatcaaagaagacagggaacaagagctaccacatgtgggggttgccatgtagattactgggaagagcattagacttggaagcaaaggagggttagaccactttctacctaagtaggactcagatgtgtcatctgtaaaatgggcataattataccaacctcccagg

SEQ ID NO: 41835 - DNA, 1326 bp, Bovine  19866880912127
  misc_feature (1)..(1): n is a, c, g, or t
ncccatggagagaccaaggaacagcaaagaaagtgaaagtgagtcactcagtcgcgtccaactctctgcgatcccatggactgtagcccaccaagatcccctgtccatgggattctccaggcaagaatactgcagtgagttgtcctttccttctccagggaatcttcccgacccagggatcgaactcaggtctcccatattgcaggcagactctttaccgactgagccaccagggaaatcaccaaagaacagcaaaagactgaggaacagcaaggaacaccgaggtacaccaaggaacagcaaaagaaaggctaatgcaagccagagaagaagagaactcgggaagtgacggactgagcgggtagggcaaccgggagggcgcggctttcgtggagccgggagactgcgcaagcgcagtagcgcgcctcgccgccatggtccccggttccgtccagtcagccgctggtggtggcggcgacttcccctcaggaagtccggtctccgcctcctcctcctcctcttaccccgcctgttcggcagcggcggaggcggcggcgcggcagcggttgtccctgcctctccgccacctccacctcggcctatccccgggctggcggcgctggcggggagggggacagtagttgtagacgctgcccctgcctcagagaaggtgagttcccgccccggcggcgggggcggcccgggcctttagcccctcccatcctgcgaccccggtaaaggcccggcgcgcccggagagtgcgaaatggcggaccggacaggacctgaggctctccgcttcccctccccacccgtcacccctgggaaacgggcgccgggctcccacgtggatcgcggagggagaagggacgtctcccgctgccgggggagctgaggttggagcgggagagaggcgacccggccgaggctgtagatagagagtgacagggcgagggaaggggaggatgtgatggggacagaggcaaggagagaaaaggccccagacgcggaagggcgtagacctgcgcggggtgaaattgaacatcccggaaagtggcgacctcactcacaagtagggagaagtggagtcggaacttggggagaataggaagtaaacacgcgagcccaaggttcctggggccctggaggaagagaagagggggttaagttttgagggatcacttcgcagagtttccccgggttttttgaggataacaccctttaaaacaagcctccaagatgtacaagctcatcttgatagtggtgtgagttttaatagatacctgccagtgtcaaagcaggacttcagttagggcggcgaaaacaa

SEQ ID NO: 41836 - DNA, 1328 bp, Bovine  19866880913559
  misc_feature (1)..(1): n is a, c, g, or t
ntatagcagagactgtcacaatattggaaatcacttatacatcaataaaaacacatgtggttttgacatagactgagaatcataaactataatggactaagaaaatgtgtcctaaaacactgtgtaaatttgaggatctgggaatatatcgttaaaaagattgtttattcacttttggctgtgctgggtctttgttgctgtctagttgcagcgagcaggggctactattcgttgtggtgcttgggcttctcactgcagtggtttctcttgttgtggagcgagggctctcgggtgctcgagctttagtaatggaggcacttgggctcagtatttgcagctcccgggctctagagcacaggctcagtagttgtggtacacaggcttagttgctctgaggcatgtgagaccttcccagaccaggggttgaacccatatctcctgcattgacaggtggattctttaccactgagccaccagggaagccctggaaatatatcattaatgtctaaaatttgtcagtggttatcactaggttcagggattatagatgatttcagttttatttacttgtactttgtgttttttgccataaataacactacttgtataataaaaaaaagaaagtcaagtcattttaagaaagcagagagaacatcaggcaaacaaattattcataaaatctacaaaaacagaactggctagtccttgtattacgtgccaagaaagagataaaagagatcttcaaacatgttctcacacatacgcacgcacacacacacagacacgtgtgtgtgttttaatctcataggtggggtaaaagaacagagaaagattctacttattgtgataaagtctagacctgttcttctttttttttttaacaaatgagaaactgagttagagtttaaataacttacttaaagtcacacagccagaaagtggaagagccaaaaattgaaccaaggcagaggatccagagcctgctcacttaactactccaatattggtaccaaccttctaggtcctatgaggactagaagagtgatgtctgcagagacactggtcagtgcccatcagctattaatattctcattaggaagctggaatgatggctagcagcatttaatgtgttacctgcgtagtctattctgagaactttgtctcttttttatgttagtgttttgtttttctagttaattaaaataaacacctatttgtgctgaaagttaaaaaaaaaaaaaagtcacagcagcaatattcactgtaaaatcaaatagtggattttgggcttcctaggtgggttcagtggtaaagaatcgatccctggt

SEQ ID NO: 41837 - DNA, 1049 bp, Bovine  19866880927230
  misc_feature (1)..(1): n is a, c, g, or t
ncgctcatgctgctgcagctgctctggatgctgtggtatgtgcgccgcagctccgcgcaccgccgcctcatccgcctcaaggacacgtacgccggcgcgcgctggctccgcggtgagtccccgacgcagcaaaccagcgggcgggcggccgagcgcacagcgaaaccagcctgctctcccgctagctgcagccccgcggtatctgcgccctcgctcccttccacctctctcctgtagtcttctctgcctccgtcttcctgtccatcttttctgtgcccccctccccacaccttcacttctcttctctctccctccgctttcaggctcttgccttatattccgacgttggagctacggttacagaaacctattcacatctttctttccttatttaaagccctgccatggttccactgaccccgtgacagaggccacactccctatcctggcgttcaaggctctctctgatcgggtcccaggtgactcttcagttttatcttctttgtcctcattctgtgctccaggctcaaaggctttaagttcccgtcacagtgtctcattcctccaaagatctggccccaacgccaccttctccacacacttggcaggaattactcctcactcccatgggccatggacggaggagcctggtaggctgcagtccacgcggtcgctaagagtcggacacgactgagcgacttcactttcacttttcactttcatgcactggagaaggaaatggcaacccactccagtgttcttgcctggagaatcccagggatgggggagccctggtgggctgccatctatggggtcgcacagagtcggacacgactgaagcgacttagcagcagcagcagcccatgggtcaccatggctctatgtagagcccttttggcctttgtgaatttctgccttgtcttatgactagttggatatgagcctggtcatccagatgagatttgaggtttcttaggctcagggactgtgtctagatcatcttgccttggaaaaactacatacaactccagggggcccaaattcctgct

SEQ ID NO: 41838 - DNA, 2419 bp, Bovine  19866881006627
  misc_feature (1)..(1): n is a, c, g, or t
ntgtcagcactgtgtcccacagttaccctttacatcttagccaaatgggaaccatttttctcttcaaatcacaagctggtgctttcccatctctgttagcagtttcctcagtcttcgaagcatgagtgtccatgatggcatcatgatgctcccgtatgtgaattaagcttgtgctctggtgcagtgagtacaatcagggcttgtgtctcctaggttgtgaagttatgccgggagtgcctgcagaagcaggagccagtgtttgccgacaccaaacatctaacacgctgcgactgctgagcattgtttccgaggtcctctcctacctgcaggcctttgaggaggcctcacactacgccaggaggatggtggatggctacatgtaggtgacgatcctgggtctcaggtagtctccagaaatgtgtctatttcagggatggtaagaagatggcaggcatatcactatatccctccctctggcacccacagcaggcattagtaatctatcaccatcctctttatgactgaacctctttatcatggtgtgcccaccaataatgtccagataatcagatctgatacttgagatgaaatctgtgtgtcaacctttgtcttgcccacctccaggttgtctattatttgggtggcatcttctgtttttggtttccttaaggctaaatctggcttgcttttaagtgcctagaaaggttccccccacccccaaccaatcaaccaatcaacagaggcaatcttgcagctttagagtttatcaaaagaaaaaagaaagggacttcccctgatagtcagtggttaagactctgtgcttctactgcaggggataagagttcaatccctggtttgggaactaagatcctgcaagccgcacagtgtgataaaaaaacaacaaacaaaaaaacagagagaacgagaaggaaaaaaagaaagaaaataaaagaggcgtgggccatccttgcttataaactgtaaaaggcaacttccttgcctttcctctgctaatgtcttctcttgccatatgtgtccacattggtgtgtgaatttgtatttctggccaaatgaatacttttgcataagaaagttgtattttttgaatggagggtacccttttcaatccatggagggtacaaaaggagggtaccagggaggtaagaataccacttggtcccacgaagagcattcaaattatttttttcccctaaacttcttagctttttcccaaggagaggttgggtactcctgaaggctgtcagctcccagtactcaagttccaagtacaatcctgcccccgtttccctgtgaggacttggctcagtggcccaggtcagagtctccacctcacagtctcaccatgtggggtgtttggtatctgactgcagctctgtgtgcctcaatctatctttgatggcggatacctcccagggctgatgggaaagcaaatggacttaatcagtgaggtcacttttatttatttatttatttatttatttttgactgccctgggtcttcattgcagtgtgctgaggcttctctctagttgtggcacacaggctctctagttgccccacagcaagtgggatcttaattccccaatgagggattgaacctgtgtcccctgcattggacggaggattgttaaccactggaccaccaggaaagtcccatggttgctttataagctgtcaaatgctgtgcagatgcaaggcaggttgggaatatgggttatgattacttgctatgtccccacaggaagctgtaccatcacaacaatgcccagctgggcatggccatcatgcgggcagggctgaccaactggcatgctggcaacattgaagtggggcatggcatgatctgcaaagcttatgccatcctcctggtcacacatggaccctctcatcccatcaccaaggacttagaggcaagtggcatcttgtggctgggctgggctctctgaagatgaaagctgagtactagattctgcttttgcaaagaccctagttgcctgctagaccaggagggaattcagacatgcttagtccctcctctcattttacatctgaaaaaactgaggcccagggaaggagagtaacctgtccttagtcacaaagctagtggatggcaaagctcagacttgaaccctaggatgctccaagcctagactgagaaaacctaatggtatgcatgtgtgtgtaacacgtacattagaaaacctgctatgtggagtagagtcagagagcacaggctctagaatcagactgctgctgctgctgctttaccactttccagctgtgtggctgctaatactgaatgtatgggcctcagtctccttatcagtgaaatggaggaaaaagacagggttggcacaagggtttgatgaattggtgtgtgaatggaatgctcttcatag

SEQ ID NO: 41839 - DNA, 1308 bp, Bovine  19866881129411
  misc_feature (1)..(1): n is a, c, g, or t
ncatcagggaagcgcaagagcactggagtgggttgccattcccttctccaggggatcttcctgacctaggaatcaaccaggagtctcctgcattccaggattcttcaccagctgagctagacagaaacattactctgttaaaatacaaacaagatgctcatgtctagagatcctccagaactgtttcattccaatcccttaagatgtgggcaggtagaacaagcccaataaagaaactgggattgggggagaatatgtatatatataaccgagtcccttcgctgttcacttgaaattatcacaacattgttcatcggctataccccaatgcaaaatgcttttggtgttaagaataaaattttataaaagaaaaaaaaaatcaattgcttgctctctcaacacaaaaatccggtagcagtttctgtgccatgctgcttacagctctattcctttatagaaagaagttaaagatagggaaacaagatgcccaaaaaggaaccagaagtcatcccacttcaagtttattttatgtgatttccagcatgcagtgtgctttcttggggaaaaaaaaaaaatcatcccagttcacattataaattaatttacaaatatagaattgtgttagaaacaatatttataaaagtccatacaatttttcacatacaaaaatatccatagaaagtggggtttttgtacatacagtatgagggtaggtagtttctttggttgtcttcctgtatatttaaaaagtaatgttgacattatttatacctcaatagactatttaaaaaaaaaaataattttctatatgtattatttcaaacttccaatttaacgataatgctgtgaatctcaaataatatacagggaaaagttaacaattttttacaattaatttgtgttccttttcctaaaaaaattaaaaactagcaatgttcccatcaaagaccaaacatggtacaagggtaattcatagaacattaacttcatcttaatgcatcactattccaataaaatcacactttctgcactaacactttttggataagttcaaactgtggctgagtgtctgccacatacagacattctcttgggcaccaagatggtgaccataaaaagtattcaaatgatgacacctcctgagaagtaaaagggagtgttaaaatatattacattagaaaaatttttgaccacaaatgttttcttttaaaaataaaaattccatttaaaaactatttttaataaaatactaaaacttggtttcaaagatgaaaaacccaggacatatgctaaaaaaagacaggatac

SEQ ID NO: 41840 - DNA, 980 bp, Bovine  19866881252001
  misc_feature (1)..(1): n is a, c, g, or t
naattagtatttaaaatatgcaagttccatctgtccagtgctcctttcataatctttctcatgttttatttctatgaggagactcctactatcaagtatagattcaaataaccaccaggagaagtccttttttaattgaatgtctactgtctatactagatactattctatatggaatattgagtgtgaaatacattgaattgcatgaggaccaaaaagggcttggacacagtttgaatgatagctggggagatgctacatagtggcacatattttaataatacagtttgggaagtctgacatccctgttttgtcttcctgggtttattcctggatttgaaactgtctgggttgtattcagtggtacataaacatctgcttgaaggaagacctttgaagagatctctgcattagtgtcattcacatagaaaactgagcagtcacaaggggccagaagcactgttaggagaagaacaaataaagccgagaggtttatgagaagcactgccagtttgactgttgcctagtccacctgacattctggctgtgtctcctcttccatcactgcaagctgtcagggtgtttgtggataaacagagtcctcctctgggtgatctatcttcttgccctgcttggtttgtgcacggatcactgcctatccttggtgaagtggcctagaaacttcaacaagcattttttaaaaaatcaaatgctgacttaattgctctacaaatgcaagatactgtctctgtatctctgtatggctccctttagaccctgagtgaactgatgaggtctcatcaccaactggaagcatcctggcttcttacagattagaaaatttggacatcttaggctcttcttggcctggtcccaaccttgcctctccatttctccaatttcatctaccacttccattcattttccaagagattttttctccttaccatctgtcatcttccttttttaaaattctgtcc

SEQ ID NO: 41841 - DNA, 1550 bp, Bovine  19866881565501
  misc_feature (1)..(1): n is a, c, g, or t
nctctgtgctttaatgtgtaatagatacttgctgctgctgctgctaagtcacgtcagtcgtgtccaactctgtgcaaccccatagacggcagcccaccaggctccgccatccctgggattctccaggcaagaacactggagtgggttgccatttccttctccaatgcatgaaagtgaaaagtgaaagtgaagtcgctcagttgtgtccgactgttcgcgaccccatggactgtagcccaccaggctcctccgtcaatgggattttccaggcaagagtactggagtggggtgccattgccttctccgaatagatacttggtgagagtaaaatttctctgcttcaagcaaggcaatgcagtccagcaagggttaaagctggcttcttgtctccgctggggagccaggcaggatggggttcctcctgtaatgggcccagatgccgccatgctttgttgattacaatctcccacaccatggaagctttgactaggtttgacataatcagctcacagcctctgcctgcactctttcacaaacaggccattttcacatctttttcatggaatccgacaagcggaaaaataattaatgttacctcagcccaacaatgaccctggctctgattcaaaaaggaggcatgttgcataaactgccctttaattgagggttgggggcagaccccacatactcctatatcggttctgcctccctgaccaaggctgattaaggctttcctaagactgcagacccctggtcactgagtactactcagtttcaggttcaaagagtttccgtgaaagaattctgttcatggtatttagcaagcacaaaccagtttcttctgtcagagaatttcagatgatactgttggttgttcccattttatagatgaaaacaaatgacttgctccttgcaggagacataaaattagaactcacaactacttttcaatattatttctttcttttgaggaagagaattattgttgtttttcagttgctaaattgtgtccgaatctttgtgaccccaaggactgcagcatcccaagctttcttgtcctccactatctcctggagcttgctcaaactcatgtccattgagtcggtgatgccgtcctcgtctccttttgccttcaatcttcaagcatcagggtctttttccaatgagtcggctcttcgcatcaggtagccaaagtattggagctttggagaaagaaaatacaaatgttattttattatagaagtctacatggtcttttacacagtttttgtgaatgctgcggccattcaagtggcaaaaaaaccactttggaaaagaatctggcggttcattttttgttttatttatttatttatttggctgcgttgggtcttagctgcagcacatgggatctttgatgtggctcacggactctctagttgaggcatgcaggctttctagttgtggtacactgtagttgctccatctatgtgggatcctagttccccaaccagagatggaatccacgtcccttgcattgcaaagcagattctaaccactcgaccaccagg

SEQ ID NO: 41842 - DNA, 1137 bp, Bovine  19866880348953
  misc_feature (1)..(1): n is a, c, g, or t
ntcagtgatgccatccagccatctcatcctctgttgtccccttctcctcttgcccccagtccctcccagcatcagagtcttttccaatgagtcaactcttctcatgaggtggccaaagtactggagtttcagcttgagcatcattccttccaaagaaatcccagggctgatctccttcagaatggactggttggatctccttgcagtccaagggactctcaagagtcttctccaacaccacagttcaaaagcatcaattcttcggtgctcagccttcttcacagtccaactctcacatgaccacaggaaaaaccatagccttgactagacgaacctttgttggcaaagtaatgtctctgcttttgaatatgctatctaggttggtcataactttccttccaaggagtaagtgtcttttaatttcatggctgcagtcaccatctgcagtgattttggagcccagaaaaataaagtctgacactgtttccactgtttccccatgtatttcccatgaaatggtgggaccggatgccatgatcttcgttttctgaatgttgagcatacagaatagcactgatcaaatttatattcgtgatttgactaaagacatcaattttgtaggagctggtggcaagaacatgtttaacatggcacttgatgcctagtagatccacaacacaagtccaatagacagaaaaggtagtaaattagtatgttccaatctgctatatctagaaaatctaaatttatttggaaccttcagaagtataatttaagattggtttgatgataattgaaacatacggaaacaatcaaaaccctagctttgactttacataaaaaatattccctaatcaaggactgtcaaactttgtaaactttcctattgctgtctcttaatttttacttctcaatccacatagctaaactgtcaaagtcaaatgtagactggggggaggagggggaagacaaaaaaagatgatattttcaggctaaaacttttaaattattgttttaaattacttcagaagaaaaccacattaacatcataaatcatcaggaacaacaacaaaaaaaatcccactatcctcatggggattaacaccctacttcaaatgaccacaatcaaaaccagca

SEQ ID NO: 41843 - DNA, 3010 bp, Bovine  19866880543701
  misc_feature (1)..(1): n is a, c, g, or t
ntagatattctttagaggtagatatatctttagatattccttttcctctaccaaattgcaaacacttaaatcatttttattgttagagaaataggtcctttattgtttgtgaaaatataatttggaacatatttgtgaaagtcagtttggagatacatatacgtaagtacatgcacatgtgttatatatgtgtagatgtgtgtatatacacacacgcatatgctcatacatatttggagccaatttcctaagaattttcctgtagaaatatgagaaaatattattcctagttttttaaaaggctgtttactacattttataggtgtttataggtaaaaaagtgggagcaatttaagcacccaaatctaatgggaaagttgaataaattacattatattcatatcatggactatcatgtatccgttaagtcatttgcagaaaaacaccaaataacatggtaaagtgttgatatattgtaaaaacatgttacacaacactatataaagcataataatgctatgtatgtgtccagaaaaaaatgactagaaaactatctgcctaaatactaacaattactatacttgagtgatggggttatagatggattttttttcttataatttttttgcttctcgagttttctgtagtgaatgtctcattaatatattttatgaaataactaaccaaaataaatgttacaagtttcttgacatatttatactttgacccagcaattttatttttcagactacatcctaatataaggaaatacactgtaagtacacttacagatgtacttacagctttgttctttctgacttgtttatagtaataaaatactggaatctactcaaatgtctagcattagtgaattggttttaaaaaataacaatgcattcatgcaatggaatattgctcagtctttaaaatcagattcttgaaaatatttaataaatggaaatgcttacaatatattcagttaaaaggcatatggatagagagataagtagagataatttaattacaattttgattacctaaaaaaattagaatatccattagcatgttaacagggcttaccaatggatggtgaaattatttatacgttcttttgatttccctttttataatttctatgctttcaacatttgtaatttttataaacagaaaaatatgtaaacaataaagaaactttattctatagtgtatagaattgttttattgctagtaatattaatatatgctatctatataaacatgatccctccaaatattttttcaaactatcatttctagtctactcagtttaatactataccacacaataagaatgttgaaatattttattgtaatcccttggtctttctgataaacagcagatagcattttgacctaaagatttgctttgctctataaaatgcttcaaacaacatagggatattcagagggctggccttaaactttctctaaacagtgacataaggtttcttttttttttttttttagaatataaatactttttattgtatataccaagtttgattgagtgtcaaagatttgcttgtacgtttttagttgccaactttagtttgagttgccaaattttaagggtttctccattcttcacttgttcagaatctaagtagggtaaaagtcaaaacagtttcaagttcagtggtgcctcaggtgtaaccttcctcttctgatgcaagaaccatacccacagggtgaagtttttttaattcattgagagagtttatgtctttgacatagctctaagtaatggcctctgactaaatgaaagacaagtaactatttgtctcagggaatgcaaatatatatatacaggtgtacttggagggctctttgtgtggggatatttttatgtctttaattgcttgatatatcttttttgtcacaaaagactgagcataactactgcatactgcatgatagataataagcccaaagatttatccatgtgctgctactgatgcatggactcaatgagtatttattgagtaaaacatagttctggccatttgagataaaaaagacacagctgttcctttcttaagtgaaaacacaaagacagttacatgaattttatatactctttttcaatgtttagtctccaataaaacaaaaaattataattgatatttactgattttcacttaaatttagtatgatatcattttaaaagttcagcttaaaatcattgccatataacccacaaatatcaccagtgaaagttaccaaaaacatatttttaaaggttcaggtagtttatataaatattaaggataaaatgcagtatattatgatttttcctgatgaaaagaaggacttacactgattttttggactccgtgcagctcattcaatagtttcaaattttgtgataggctttgaaaatacaacagggcaagagtttttgcttcccagaggaacaggcagaaatgaagtcaggtttagataaagatcagaccatgaaaataattgaaaggtgaaaagagaaaaggaaaggaagagaaacggaaagcaaagataaaagctttggaagaacaaagcaaaaaaaattttgtttacttggtttgtcctttctccacgtatgtcgttctgtaaaatcccacgagcgagccgttcagccagccggcgaactccaggatcaggtggtagggaccctcgccagtgttgggctcaagctcttcttctgcttccaccaccacatactcctgcttcttgtattcgaagcactgcctgacttgaacctgctccccagacggcctcctcagcaccgggagcctggtgatcctcgtctcccggagatgtagccacaggtaccgggtggatgagctcacgttgatggagatgtccacgctgcccgtgtacgtgtcctgctccatcagcggcttcacctccaggtcgtagtgcactggtttgatgaagtccggcagcctgaagtctttccagcctccactttcatcctcacggcagggcagacccc

SEQ ID NO: 41844 - DNA, 1828 bp, Bovine  19866880586707
  misc_feature (1)..(1): n is a, c, g, or t
naaaaatataagttaacttcatggggtgatgtgttaataagcaaataaagtaagtatttggttggctaaactgaaccttacagagttaagataggagggagtgtagaattgttatctgaaggaaacaaacaaacaaaagtcttaaaacattcactagtgtgtatgtcttaagatattttaaaaagggaataagtggttcaacttctctgaatgttgtctcactatctgtaaaatgaggataaaatcaacttcacaagatttttatatgtgagattattttctaaaatacaaaaatgaatattagctattgttatggctttggtattgtatccatcttttactctgaaaacatgaatttgtcactttatagatttgtaagagccacatacgagtgagtgcaggcacatacacgaacactttttcagaggaatattctctcatttcaagagcaaattaacttctctctcatcattgatccatttgagaacgttttaaaaagagagaaattttgagcgaatatttctataaaggaatgtaaccagcagtcaaataaagcattgttgattgaggaagttatttcagtaaaatcaacccatcctattcaagcatctcaattatttgaaggatgaaactcaatgtcatataagcaacaagaactttgagagcttagaagttgatgaaaacgttcagttatcttgcaactctagttacatctgttttcttatgagactcaataaaaccaagataaacagtattcacaaatgacaggcactttcattttattatttatgtttatatatggagtatctttttatgcttatttattattttatgtttatttatctgttaaaactttatatatatatttttaagggagaaaagggttactaaaattcaaaagtttgcttttatagacacttaaaaggcatctgcttttctagaagataacgttgagtcaaaatttgggattggcaaagcaatattttgttctctgtggtagatctaataggtaaattattgcattaatacttaaagatacagaactgctgctgccaacgtaacttctgtttgataactgaaatttcttgggagaagtggaatttattctaggtgcaatttggcagtgtgaaaacttgctaataatggaccattcttaatctgctcccttaatcctacttaaagtgtttttatgatgagaagtgattaagtacagagcacttcctacattcacaacatagtaattatttgaattcaagtcactaaaactgaaatttatatgttggaggatggcatggagctgatcacccaagattacaacttaaaatgccacacatatttgctatggtatacacttagtaattcagcaaattgttgccttctcctttattttccaggctcagctcaaacatgaaaaggaaatttgacccacatttaatgaccagatctgttaacagttttgtcatggtacctacatcctagttcgacccaaatgtaatacttgaccagcaccagatgccacagccttagtttcattagcatgaaaaggcatgcatggcagttgttaacagagactgtttaaataactgtatttgtgtagttagaaaaaaaatgtgtcttactacggagatttgaggcagagctaatataaatcatatcaactgaaacattcaacatatgtgaaaagtactccattccctgatatggtcaatatggaacaatttatgtttgtcaacagcatttgccaagaaaaattgcaattagatgtcattggtagattctctttttacttggtttggtggggggatttgcccatttgctctcataaaag

SEQ ID NO: 41845 - DNA, 1422 bp, Bovine  19866880633913
  misc_feature (1)..(1): n is a, c, g, or t
ngaaatatgaaatgatgagagaaaatggagttgtattttctagagacagtataaacatcttttctcagtttatttaatttaatggatcaagatttcaagggatagtacagggaagtaacagatacaaataaacatctagatttttccatgaaagacttgacctagtacaacactctgtatatgtgtgtttttcccctaaatactaaataacatatcttcaggaaaatactctacataaaacaagaatgataacacaaaactgcaaaagaaatttcccataattttatatatcaccaaagaaaatcactgtttttaacactttgatttatgctttccaatctttttctgtgtatatatattttacaacaggaatttcacattgtatatatcatttgttatcttgcttttatcatttcatgtaaggacacatatattacattttgtgcattttcttttttttctgtcacaaacctatgttagattatgactaaaacagttatatgttgtattccagcaaaattggttaatgttttagagagaaaatctgggaaaatgctgttttataaacagcttaattttaaatttatgactaaaagaggaaattagtttctctttcaacttaaattttatgtaattatcacttagccactcgttctacctgtgtaatatcttatatgaacttggcgctgtgtaatgctatgcgcatggtgggaaggggactctcccagtgtcctgacaggcctgaggaccagataagcaagcaggtctcatgtgttggttcctgtggaacattcgcacctaaaaacaatattataaataagatttgtcacttaggctagctgcaaagatagtccacgatgtacctaaaagacaaaattattcatggagaagtctggactagcccataaatagtactaaattccttcgactagatttggagacagcatgggttgttagtagcagctgggacccataataactaattcatagcatttctggatgcattaaaaagacagcaaataaaagacatatggcacgaagtatgtaccatgaatgctagttccttttcgttccatttccttcttctttccttccacctgaatgcaattacctttacttacacttgtttctatggtcttctgaagtgccaataaaatgacctttggaaaataggagctgctgtacctcagccatccctagaagcagagcaggatccagagtaaatcactcgagtgtgcgtcccgttcatagtacgcgtctgttcaggagaaatcaagttaaagtaaatatttagagcagcagtgatggaaataagcataaactatgagcatgtaggtgaataatttttatatgtggatgaagaaagaaggcacttttgccttggatatatcctgaggacttaataaaaataatagcaactgt

SEQ ID NO: 41846 - DNA, 2255 bp, Bovine  19866880656421
  misc_feature (1)..(1): n is a, c, g, or t
natgaaggcggtaggttaagataactaaaagtccagtatgagtttctcatgttttcttctcttcctacggccaccttggagtcacatattgaagacagaaacaaaacaagatggaaggaacctaaattcctgacttagtgcttaatggagtgccatccaggggagtcacgaacaaaaatatccaccttggatatagcctaagtgagaaataaacaacacagcagatagatgggtactgcttgtttgggtagttggactgcgtttactaatacacagcgtaagtggccatttggggattgtactaaaaataaatgacaaatgaatgacatcaagtgcgtttacaggaggtaaagaaggattgaccaatttggtccatttggatcagggaatgtttgtttacttgagaagagaggtaagctgggtcccgagaatgactcaaaggagaagaggcaggagcatcagcaccagcaaatgcatcatgacagccatggatactgtgtgttcgcaaaacaatcaattggccagtctggcttgggggtaaatttgaaaaaggattgtaagatgtcaggaaccttctggagttaagtgaactggggcttggaataccatgccatgaacttgatcctgtcagtgaatgggacacactgaagatttttgcatagtgcgatggcaacatgagatgactttagaaagttgtgaggagataggaaataggagagtctgctccaccttggcctacccaccccccacctcgccctgcactccccccagaaaaaacaccccaacaaaaacaaaccagaaaaccaataaagatgttgggaggataaaggcagcagatagaacatagtaagaagtacaaactctttgcccttctcagatttgtcctgatcctctccagaggacttccctggtggttcagatggtaaagcgtctgcttacaatgagggagacccgggtttaatccctaggtcgggaagatctcctggagaaggaaatggcaactcactccagtattcttgcctggaaaatcccacggacggaagagcccggtaggcaacagtccgtggggtcgaaaagagtcggacacgactgagcgactacacttcttctccagagataagatctattgaggctgtgcttgtgcctcgccaatggccgtttctcctcttatttgccaacaaatatcctgagtttgcaccagcaatgtgtgctgctgtagagataagttggtgttgattcgggtcagtaatttctaccacattcctctccggcaggtaaagctacagaagggccaagtgaatcaggactcctgcatgaaattttagatgcagactgctgaggacttctgggaaattactgtcttcactgataaaagaaaaagatactcttaaggggaaaaaaaagttactcttccttcctctgtccacttcttaaccttgaaaatgattttcatagccagaattgtgacaaccagcttgggaccacacaataaaggttatggaatgaatagataagcacatattagtttcctgaagacattattgagcttccaaatcatgatgctactctctaactccagacttcttgttactagagagcatcatggttcagttactaagtcgtatctgactctttgcgagcccatggactgcagcatgccaggcttctctgttcatgggattttcccagcaagaatactggaatagttgccatgccttcctccaggagatcttccccaaccagtgattgaacccatgtctcctgcactgcaggcaagttcttttctgctgattcacgtgcaaagtccaacccttacaacatatgcatataaaatatcttagccacaaatgcaaaagatagcagataaaccaagaataaaactcactagaacccctttaaaagctaatgaaaatcaagatatcaaaggaaagtatctaaatgcagaagctaaacaattcaccagattactatcaatgacaaaagcagaaataaatgaggcaaagcattcagaagatagaagggaatcactccatccacaagatatagtattattttgcctcggatttggaacatcactgaccaaaaaatggatttagaattaaagcttccaaatcaaaagcaaatataaattttcccaagatgtaatttaataaatgattcagataaattcagtgggagttataatgtttatacagaaacacatatattctattcactgaagaaactatttatcaatcctcttaacaaatgttcca

SEQ ID NO: 41847 - DNA, 1278 bp, Bovine  19866880657499
  misc_feature (1)..(1): n is a, c, g, or t
nctgctatatcttttatgccccagccttggaagccacacattatcatttccacaaatcctacatagattaactttatttaatgtgaaaggggactgcaagatgtgaattagaggagcctggaataattgggatcatcatgaaggctgtctgctttattcactaaaatccctgataacttagcttttaggagtttctattaagccaacttcatcactttgggtgtttattgattttttttactataataattacctatatcattaaattccagcagtagctttaattctatatttcgacctattcagatctttttgaatgttaattctgtcgtatcagcaagattcctcagctttgaatgattgataagtgggttatattgtggaattttaaaagtacaacttattgataaaagaacttgctaaatacttgtgcctctaggcctatttagacttttaaagttgataaagtaagtacatatatcttaacctgcaccattatagaaataacacatacattattaagttaattttctataaataggggtccagtcctcccatgcaccatgtcgatatagtatgctaaataatgggcagctccaacttcatcaggaaactctaacacattttgaaagactgatgaatcagatagacaaagccctcaagaaatacatactaaagattataatgttttaaattttctaatttggaaacccaaaacatgtaacctatttgctatggatgtacacaaaatattagcctttggcaaaattatgaggtgaaataaattcattatcctttgcccactaaactgttttgtcattgttttcttcccctgtatttagcaagatgccctatgcccaactgatccttaaaaatagcttttgattaataaattattaagaaatcatgaatttccctccctcaagtttcttggtacccagttcctcttgtctgtatcaacaccttacctaagtccaagataggagagcttttaaagctatcaaattttgactatttttgatttttaaaagaagttggacaatctaatgacatttaaggagcttttgttttcgaagtctgaatccatatcaagctatctaatggtatgaattttcttatacagttgacaaataaatgaaaagtttttgtcaagttttggctgccttaaaagtcagaataggttgccaccaacttgctgctgcttctgctgctaagtcgattcagttgtgtccgactctgtgtgaccccatagatggcagcccaccaggctcccccgtc

SEQ ID NO: 41848 - DNA, 2270 bp, Bovine  19866880866250
  misc_feature (1)..(1): n is a, c, g, or t
nctttcttataatgcaagctccttctttcagggatagtgtcaataattctgcttttccctagaaatgtagcaaggtaaaatcagttccaagtcttcaacttattattgatttttctttgttcaacatataaacttgcctgttaagagctttccagaatgtcaggtattgagtgaagggaacgacaatataatatatctattcataaaagctttcagttagaattctagacaaaaataccatttgagaacaatatatttaacttaaagaagtaaaagggatactattagtagataaaaggtagagtaggaatttaaactggagaaggcaatggcaccccactccagtactcttgcctggaaaatcccatggacggaggagcctggtgggctgcagtccatggggttgctaagagtcggacacaactgaacgacttcactttgactcttcactttcatgcattggaggaggaaatggcaacccactccagtgttcttgcctggagaatcccatggaccgaggagcctggtggactgcagtccatggggtcacacagaagtcagacacgactgaagcaacttagcagcatgggctctatggttttacaataggtacagcttttctagatgtacctgagatatttattttcaatggttattttgaaagatagagtgctttatttgatattatttacaaaaaaaggatgatctgacattttatgcataataacttccaactgagaacattttaatgtacctcctgcaaatacagtgtgattttctgaatctacactttgtaaaatgtgtgtagaagtcatggcccgtgtgagtgtctttgttccacctccttctgcaggcctcagcctggaacactgtacctatcatgtcatttctattctttcacaggcagaaagggaaatcaactcacaaatgcagtgcatttcatatattgggactgagtttctttgcagttatgtaagcatcaaaatacttaaggttttaagagttctaattttatacaaccaagaaaacaggtgagaggaatgtatttgccttctcataggtctcagagctgaaaatatgattaattacatacttaccttctcttttttttccttatgcaataaacatgatttgaatacttatttttaacacaattgtgtttgcagatactcaattttaatcaaaatactaaaatgaatatagttcaaggggtaagtaacagcaccacttgccttaactttgagattttaatttatgacttcttaaattttgcatctttcccaaatatctgtttgtattttcaataataccaattccttatagtattaatcctataaaaagacttcttaaaaatgcatatgtttaattatgtgtattattatatgtttattatagatagtgattctcctaaaataaatgtgattactttttgaggcatatgttcctgtcagtgtatacaacatggaataatggatgaaattctacaacaaaacatgtttcaggtacaaaatagtgaatggaaattactatcgtcgagaacaacaacaacaaaacgtgttctaaaaccttaagaccttgagtacgtttcctaatcccctggtgccttttaacaagtgaaactattttttttttataaaattgtcaatggcttttctttagatttattgggatcctgcttaaatggaatatctgtcttttgtgtttcaacaatatccaaagctttctcatgtattattttcccagtacacatgcacacacatgaaaacgcttacagagaagttcatcagtgtgaaagcctgatcaccttcatgtaaaatgtgatctgctatgtctggtgaaaatctaaaatgagtaaagcatacatacattttttttctttgctgatagcctcttagtaatgaatgctttcatattagaagtgaaatgtaattcatccttatcattctgtatattttactttatttgcaattaattctcttgctatattacatctacgttaatatatgttttcctagaaattctaaggagagtactgcctctaatttatttcccatcttgccgttgatttaagcaggatttaataccagtgatctcctttcttagttacaaatatacacagtgagtgttctgagacttaggaatgaacctagaattcagaaatgggtttttattgctccttttgatttaaaattaattaccaattattaatttaaaaattcacaatgagaattagtagtctcaggttgctatttagttcattcctcttattt

SEQ ID NO: 41849 - DNA, 1638 bp, Bovine  19866880887073
  misc_feature (1)..(1): n is a, c, g, or t
nttttaattttatggcaggcttcctttccataaattttttaatgtgtatgtgacaaactattagtttttatcttcatgatttctgctttttgtgtgatactttttaaatgtaaaatttctcctcctgtttaattctttatatgttgatatattgcctgtatcctttcccaacattccaaacattcaaggtttatagataattcttgtgattgtttttttacactgtgattaactgggatgaaattttacctgtatcactgtcatttgcattttggtttgtaaggatacttgtgattcttactttttaagagagaaaaatgcaaaaggtataggaatagaatataatcgctaaagtgctatctttgcacttagcttcaaatgtctttgcttagcaggctgatacagatcataatgccaaatatgcaagtagccaataaagctttatggaagcagaataaatagcctatattcaaatttctgtatctgtaggaagacacatcgattattagttaagataaaggtgacagagctattctgctgtaacagaaacacagaaatacagcagcttaaaagacataagaaattatttctcatttggatcggtctcctgaagtgagcattccaaggtgttaaggtggttgtgctccatgaagcctaaggccttatgctgtgtagttgaaatctggaagaaggggaaggaaaaaaagaagatcgaaggcaagcaatcttcctttacttccctaacaagaagatggaagttgcacctaccacttctgtttatgttccattgatgagaactggatcacctttttgcacctagctaggaggaaggctgagacaagtaatctgactacggttctcatgtgtgtaggaaaaaggagaacagatttggggaatataacaaccagcctaccatttctgggaaagtggtgtggatctgtctacaaaaaaaaaaaaaaaaaagtgaagaagttgctgcgaatttctcctgaatagaattattttaaattaaataagtttacttactgttttatacttactgtactttgaaaattactttaaaaaaactctcaaaataaaaaggacatgtctgcatctagaggaaagatttaaagttctgagaacttatgtagccttttccttccctaaatttctcttcaggtatacactcaataacagaaaccttggccggattgtcactatagcagagccattcaacactgaactacaactctggcaggtaggaagataaattcctctatacttgtcagagaagggacagaattaattttttttcaagtagaaatgatattttctctattcagatcccagaagactgggaaaaagtaataattcttatatataattaaatgtacatctatttttttctaaactaaaaaaatttcaaataaccaagagataaagtttaaaagttgagaaaggtgaagcctggggaggcttaggctcatagtccttgagaccatacagttcagcaagccatgagcagtccatctcccctttccaggtaagtgtaatcctgggataagctggtcaagatttgattcctttcagaactcatagttttggaatttcaaaactaagcccaaatctttcagatttcggatacctcaattcctg

SEQ ID NO: 41850 - DNA, 870 bp, Bovine  19866880914186
  misc_feature (1)..(1): n is a, c, g, or t
ncctggagaagagaaaggctacccactccaatattctggagacccagtttgtagtactttgttacaatggtcccgacaaactaaaatggtgcatttgtctaaaacaaaggctttattaatcatttcttaattccctggtctatttctaacctaaaatgtggtgggaagacacactttattttgatgagaacatgttctgatggtaagtaaattgtttttaaatataagttaatgcaatttgtcaaaactaaaattgaaatgccttctaattaccaaataattccctgaagaagaaacttcaaagtaggggagaataagcaaatatttattaatgggtcttgtgtttcctctcggaaggtttgtctgcctgtagatgaactggatgcttgttagagtggaccagatacagaaagtggaaatgaacacaccagggaggtggaggcagctccaacacctcccaatccattcagctgacctatcctaaaacacaaaaacaagccaaggaaaacctctcttgactgcacttcccctcctctcagcttcattacataaataaatgtttaaaaagagcggtctatacactgtgttcccttcctcctcttctttttgttctttgtccttctccaatctgtctccacctcttgttgtttcgctgaaactgctcttgcccagggctcagagactgtttcagcaacatctccccctcatcttacttctcctttagagacgtttggtcctgctcaccatctcctcctattgaaactctcccggcttctatgatcctgagctctctggttttcaccacacctctctggttgcgcttctgtctttgctgcctatttctcctctatctggccttccctggtagct

SEQ ID NO: 41851 - DNA, 1430 bp, Bovine  19866880934096
  misc_feature (1)..(1): n is a, c, g, or t
ntttttaaagaaactgcatttaattgcaatatatgttgaaaatgagtattctccattcttcttactgataattaatattacctcatttaccaccactacaaagagtggaaagcctatttggaaagccttggccctttgctttttgtgtatttgcagtttataaatgttaatcccagtggatcccaaggataagtgtagattcataggctagaaacattttgtaagaagtaagaaaaagcagacattccctctcagttatatagcaaagaacttaaaaactttgaactacaatctaaaaatcttgccatattaattaagattttgaaaggcaagtatccatgttcaaatgttgatatatttataaatactttgccttatatatttttcttcttaatctatactggtaatataaaataaaaataatgatgatagaaaaatagctcgggaggcttagcctggaggatcattgataagatgttaaacatcagctttttctaagacggcaacctaagaatgggcttttacattccctgggaagggctcaggacactgagcctgtgtaacataaaaaaaaaaaagtttactttagacttaaggttggcattttaatatgcgttattcaatgaacatatgatgcactgtcttaataaatttgggaaatgaaaatttttttaaaaagtatttcacagttatcagaaacatcttcaaagcacaataaaaaatcagtgtttgtgtaacattcgtgtatgttgtacataagtattaatcccaatttatagataataaaactgagaaaaggttctttaataacttcagagacaattggtgaagagtatagttttgtttcctatgtttctgtttaaagaaatattattacattagacaaaattatctaataaaatgttacaagcatattgtttttataattgcaaatattttgttagcaataattctgaagttatttaaggatgaggacatcagctcacccatcttctgtatattttttgtttttcttctttaattatagttgatttacaatgttatattggtttcagatgtacaacatagtgattcaatgttttttatagattatactccatttaaagttattacaaaatatttactatattttctgtgttgtacaatatatgcttgtaggttattactttttacatagtagtttgaaactcctgtgtagttttccttcttattactctagaaaaagtaatatagctcttaagaaacccccaaattgtgcatattacattaagatttaagaaacctcagctcttttcacaactctgttatcaacaattatatgactgtgcttagtttattgaaagcttaacagttacagatacatatagggcacatgatggatcccccagatgtccctcaaacagtagataatgaaatgattctcagtgcag

SEQ ID NO: 41852 - DNA, 1194 bp, Bovine  19866880977622
  misc_feature (1)..(1): n is a, c, g, or t
ngtgacatcatgtgagcagagaagtaagtgcttctgaggaaaccacaccatggacttcctaccaccttagcaaagcctgaaacatcagctaccaacactgtcacttgactgatcaaccatcttcatctcgttacctccaggcatagcaaatgagtcctactaagattcttgcattatacctgcctccaagtctccctgaaatcttactctgtaagccatcctcagccaaaacatagtatagacagatgatggatagatagaactcacctgatgctcagtccctttcagagcacaatatgctctttttttgtgtcttaacttttaagagtaactgtactcttaaagatactgtcttcattcctcatttccaagtcaattgtcaacccatttagagctgttttctgtctccacttcaaccctactccaaaaatctccggtgacttcctttgttgctgaatcagtggatcctttttaatatcattgcttaattggcactgtcaactagcccctccttggaaaaacggcctgtgatttctaaaattttgagtaactgcttacttttctctgttcttcaatgtaccctctcctctgttcactactgaaacacttgtgattctcagagtcctgtcatcagctcattggtttattgattttaaatgctttctctgattgacttcattcattctgatggtttcaaaatgcaaatgactccccatctctctctttctctctctcacacacacacacacacacacacacaacacagatgtccctagccagcccagtcgtcttccccaagcttcaaaattacatatttaacaggctgctggagatctccacctatatatcttgtgtatgtgtgcacattcggtcatgtctgactctttgcagccccatagtctgtagcctgccagcttgggggggtgtggaattccccaggcaagaatactggagtgggttgcattttcctactccaagggatcttcccaacccagggatcattccttgtctcttgcatctcctgcactggtagacagattcgttaccacttacccaggaagtcctgctgctaaatcgattcagtcatgtccgactttgagtgaccccatagacggcagcccaccaggctcctccgtccatgggattttccaggcaagagtactggagtgggatgccatcaccttcttcacctgg

SEQ ID NO: 41853 - DNA, 3527 bp, Bovine  19866881033808
  misc_feature (1)..(1): n is a, c, g, or t
nattcttgcctgggaaatacacggaacagaggagcctggtgggctacagtccatggggtagcaaagagtcggatgcaaatgaacacatatgcaaaaaaaacgcaaactgtgaggagataccaccgacgcaggggatgtggagccagcgatcccctcccagacagaactcccaataagggaactgccttcaccaagagatgagtacactgacatgctgatccagcacctggcctgtttatagcccctaaggagcctgtgttagtccagtaaatcaaagtggtatctccctgaagagctaactgaaagggaagcagtgcaaaccacgcattccaatccttactgggccacctggaatttaaaactaaagcactggcttttatttcaaatgcataaggagcctacctcctcagtgtgacctttccctcattttagagaattaaacagagcttaccaaagggtaaccttctctctttttcatgcacctgcacacatcccaaatcaggagtgccgaaactaaatgatccttgaaggctgggaaacagcaatgaccttttgtaagtaagtcttcctggaaaacatctgggaggaaaggtcttggtgatattagaatcaatgtcaaaagagctgataatttgagaaaacatttaaaggtgcagaatctatttcaatggaatctcaaacctccaggaagggacttgctgaaaatgaaatgaaaaatgaattatattcttgccttgatcttcatggcttgagtgaaaaacccaagctgggtaattattgggagcagtcctaagatgcatattctaatcatttcattataacctgctctcttcagtgagagagcctctggaagtatgctgctcacaattattcaagtcagaaatccagggtaaattgttttaatccgttcaagtcaaattaatatggtgtggatgtcctatggatacagattctcagttatctttcttgttgacacatatgagaaaattctggctgggcatacatgatttattctttatatctggagccgggctgtaatcattcaccccgtttcaagtcgagtttggcaactttatctcgcttgcagtttgcatttttgtgaaagtgaaaatatattctgcagcttttgatgtgttgatgggtaggaaggtaaagacagccacacgcagtctctggagacgggctcagtggctaaatgaagacctctagtgctttcttgttagccaagatagatctacatcctgatgaaccgcaactagtcaatagcagacgctctcaacgcatgtgctcagaagccacaaatcagttttccctgggacttagttatcggcatattgtgccgtaggccatgccctgctgctgcttgcccgactgtaatttttcccccagtgaagtttttaaagtcacaggctgagaccgtaaccgtactctcctggcaacaaggctgttgctagacttccagatatcaattgcttatcaaataaattgctactttaatgtccttagcctcttgctattaaaggaggttcagtgccagcaggatttcccactgttatgtttttctcttccaaaatttatttccaaatgtttccttacctatgtgtctgagttggcgcattacatttttaattctccatcacttctacctgaagtattgcaaaagcccccctattggtctcagcataattggcctcttggctatcttaaccaccttgcttccagaggtgtctttctaaaatacacatctagtcacattgttattcctctttttagaatttctccttgtctttctgcatttctcaccagggccttagggaagttccctgggttagagcctaggatacactaagaaaatacgacttgattaaggagaattgctttcctgggataccagcgtgtcctctgaaagtggcccagtgcctctttgtaaaattataatttgagtttaggccccaaagctatttttgaaatacctgtgctgtcggcttgtgctgcagctttcaaaaggattaatgggttctttctatgagggcagccctggctctgcccagcaggccacccctgaattgctctgggcagaccaacccctaaatgtcagttctccttcttgatgaatagacttctctccccgctgtcaatggggcctcttcgcaaagatcccaagtctacacggtgcccactaagaagcagccactattgttgtgcacctgattctggatgggggcagttctcaccctcctctgctccaatgcagttgccgagtgaggttctcagggcaacaccctcctcctactttgccagtgggagccgtcttcagcaccctatacagtagtcacgcaacaccagactcttgagagcagtattgatagcacatgtaacctgctctcagactgcccactttccctccctctccccaggacactgcagcaaccccaaacgactcacaggtccctgcctcttggagcctcaggacgtggcaggctacctgctgtggttgccttcacccgggttcatcttctttatctgcctgctaaactctaactcagtctctaagtctgaactcaaacatcacctcgtctctgacatttacaaaggctaaaggaaaaaaattgtctttttttcttccttttttttttttaaatgagagaggcttggacctgtttggaagagaaggcaatagagtgggagggattgataggctgggataattgacaaggcccagtccagacggagatgatagaagggaagatcaaagtgcagaagaaaagcatggtatgcctacccttagacaacccccccatggattgtaagcatttgtttgcttgtagctctccctgctgcaatgacatggtagcccagaccaccattgtctcttgctcaggtcacttgctcagcctccaaagtggtctccttgtttacatttagtctccactttagaatcatctcaataaggcagccagagtgagtctcaaaatgcaagtcagatcttgttactcctctgctcaaaatctctccatccctttccatgtaaacaccaaagggccaccagcccccagactatgtgctctgctctcttcccttggaggaccatttgatcttctaatacaatattttagttacttattagattgtttgtttaaactcctcactccaacaagcatgggagctgcttgaaggaagtttggtctgtttactttcctgctgtatcactcataactgggacacttagtaagtcctcaataaatatctactgaatgaatgaatgaactttcttatggatactcaaacatgcaagtaagtagagatcgaaaacctcatagaatttctgtcatccatgatgttgggaaaaatcttagatatctctaatataagtccctgtcaatactatttttgatttctgagtaaactttgtaaatttggattacttgcaaaggatgctatggcttatatgagaatattacataaaattatcatcctcacatatctcagttgattatctcttggtattttttttttttttttggatt

SEQ ID NO: 41854 - DNA, 2041 bp, Bovine  19866881042089
  misc_feature (1)..(1): n is a, c, g, or t
nagattaagtccccctctgcagttaggctttctctctttcgatatccatttcagtttctgatagttttttctatatcgccagaaaatgcaaacatttcatactcataaaaaggaaatggtcttacatttctttatttgaagtctaagacattcagaagctgatcaaaagacttctatatatccactgttaaaaatgaaaataataatttgatggccaattaaatcaatctttaaaataagcaaaattaattttaaaacgtattcatataattcaaattttaaaataaagttttagcttgaaatatgtagtgaaattataacaacaccatctttttaactaacattaaggcaaaggctcaccacgttggaggacaaaggcctgatctggccttctcaactctgctaagccagcactgtcttcagaaatgatttgaatttgaatacgtttcagcaggacaggctactctgaaattcccacagtatttcctactctttgttttcaactggtaactttgttccttgctgataaatgatttttaattggtgacttctgttctatgtcattctctgttttgtatagaatcagtttcaactatattgttcttgctttcatttttaaaatactaagcgatcataggtttttaaatttaagctgcccgttttcatttgaaaagtgtctaaaacgcttcagtctctgctagcaagggtttaacctgaatgccttaagtaaaaatattattgccaagatttgagacgacaagataattcatgaatgtcttccagttccaaccacaaagcagttaacccatgttttcgaacatttgaaaatatatatatattattttcttagattccacttccttgaggcatcattcaaacttcacatgaggttcagaatgtagtaattagcagtaggctgcttacatttgccaatatatttgtacaaacatatgttggcactcggttccatatcagctacacatcaaagaagggtgctgaggaggaattattctacctcgggggctggattagtgtctctgcctgaaataggcctcatttaagggcatggtttgggggaaattaaagaacctgcatggcctgagtattggagtgaatccattaacaaaaagctgtgctgaatatttctgccattctttttccattcctgctactatgatcctggggcaagtcgtaacctctttcatcttcagtttgccactctgcaaaaggcagaccatataattctctcgcaagcacctcacagaagcgtgggcatggcaagcatccttctggtaggaaagccggtgcttccttctgctgatatcctttttcaggtatgcaccagccttctcagcgcctctccccacaccctccacacctcaccttaaaagatgaaagccctgagcccccaatatagccacaacaagcaccaaagacagaaaaatctccctaatttcacctcccaagagaggctggctttctttccattgctgtgaattttaatagcactattgccaaaatgagttcatctgttttacaggaaaactaaataactttaataaccttagggctgacaatgtacaaagttctgtccgtgtttccccaaattcagtcctccacagaaacacttgagggtacctacgatcgtcttcattttgcataggaggcaacagaattagattaagttgacttacccaaggtcacaccactaaggcacaaggccaaaattttagctcaagtctaactccagagccaggtgactcaattgttctaccagagctcaggattgaggaagaatcagcacaaactcatcaagaagagactgtcatcagtcagtaaggtgctggagccattactccaaaggtgggaaaaccaagtgatacattttcagaaatctcgtgagagtgatagtaattattcaaatttaaactatagggacttcctggtccaggagttaagactctgtgcttccaatgcaggtgtaggctccatccctggtcagggaactagaccacacatgctgtgcagcacagccaaaaag

SEQ ID NO: 41855 - DNA, 1372 bp, Bovine  19866881054196
  misc_feature (1)..(1): n is a, c, g, or t
naatttgagtcaaaaatcccagtaaatctgaggaaaacttttgtttaaatcattgagtacctttgatgtgcaactataaatttgcacaccagtacatgtataagcatccactttatctgtgtgcccaccaatacagtatacaattgtttcctcctaaaaaaatcaatatggctgtgatttcttgatggttcattcactgtttatggatagggattaatgtttgaccttcccttgccttcttgacttgaaccaattactttagaataatttttctggtttaactttttatcacatcttctgacattttagtgaataatatttgacagctatgaacatctgcaaaagttatcgttatcataagtggagctcagtggaacaaccgtcaccaatgctctgaagatcatattgtactacagaggagggacacgcttatattttttaaaaaattgtttgatttcttagcaggagtctttgcttagtttgctttaacaaatgcagattgtttcaaaaagtgacacctgggggtggaaagcacatttgcattccataccaaggaagcctcaaagtatttatttttcattttagaattttatgcattattgtcatgcctgaaacagcttttaatcttctctttacatatatctttttcttaaagaaataaaacaaaatctttggaaacatttagcactgcaaaccagttttatgcatcacaggcttgcaagtcctttctgatcaaagtatttcattttaacattctgatttcttattcagtgtgtacccagtgaaactggtgtattgcattctccttgacgaaagcaatagagacagaaagcgcagtcattttatgtgcatataacaatataaatcacaaagattaagggaaatcattttggggaacaccacaattttgcaagcaaaggcacttaaataattacctttttaagcaacttttattgactatgcagaaggataaaaagtaatcttacttgttttaaatggcataaaacaaccaaatgccattaacagagtgttacattccttattttactaagactgttgaagcttaccagaaagggataaaaaatgtataaattcaggaacactggctagtaatatcccaaaccattgtcagtggactcctactttcttctgccaaaatatgtggaagcatgcatggattgtactagattagtacgaggggctcgttttccgtggcattagccaggtatcttagcaacaagaccataccagattctagcagtgctctgtggtggtgcatgtaatatcctggacataatctgtcttttaattttctttggattgtcgtgatattacagatacatgtgttcagttatagatctttatttaataa

SEQ ID NO: 41856 - DNA, 855 bp, Bovine  19866881059784
  misc_feature (1)..(1): n is a, c, g, or t
nttaggaagagtttaggaaaggaaaaaaaaataaaaacaaaaactaattttcctatcaagcaaagggataacttgaagttgaattaatgtttttatgaaaaagatctttacatagatactactagaacatacaagctaactctgaccactaagtaagaagcaattcccttttaccataccatattccctactttcctttcacctgtgttcaatgcctcctgctccaagcaggcatttggtggtgcagggggaggaaactgagggaatataaaatttttataattaaggctggattagtcataagaatgcccagcaatccaaaggctgagcagcatttttgatgtttaaaagaagtgtgtaatgtcggattaagtgacaagaaaccaagcctttttttcctccaactaggctttgatgtcgggggtggagcaggccccttgccatttgcagtcgcctctgcgcattgctgacatggtgctccgtgttctgatcctctgtagcagagtccttgaccaagcaaaactgacactcggtcttattaatgtgttcctctggattgctttttttgttatttcttgctactctgatttttctcactttaacattttctagtgactttgattgatctaatgtaatctctttttttccactgattttcaaagcatgaaaatttccctgccaggtggatattccccaattctcacaactagacgtatatatatatattcttttttaaaattagattgattccgaacagtgagaactcataactcatttgaatggaaaacagttggggggttgccacacttcatttgtacttgattgttgacactggtggcagctgttactgccaat

SEQ ID NO: 41857 - DNA, 1092 bp, Bovine  19866881060380
  misc_feature (1)..(1): n is a, c, g, or t
ngaatgtatataaactgtacatgtatacacacatacatacttctccagaacaatttactgggtgtgctggttccctccccaaaggagtaaacctgagagtcattccaagctaaggtactttctatatttctttctcctttcttctttctctcttatattatttgctagctagcaataatggaatcccttgggtttcagccaaagaaaaatctgggcgacaagaacagactgcagcttttttttttttttcctgagtgcctcttttttcttttgagtttctgatgaatgactataatttatttctaccaaatttaaataagtcctgctgccttgtgtatttaactaggcaggcagagggaactggtttgtttaggaagtagtgactgagaaaccctggccaggtgacagaggagggcagaaagaatccagaccaatttgtatgcagtatattttactcccatgaaataaaacacatttttttttcatatttgctgaaaagtaaaacaataatattgtacgaaatgttatacacagggtaggttgtacatagcagtttcagaaacatcattgcatccaccagagaaactattctaaaactgatattcacacatttttttataataataatatgttagaaacatacagtgtggcatttagtatatacattcctttgctcgcaagcgaaaaatcctaatcgcttctgtataacatgctttattttaaagcctaacctttaaaaacactgttgtgatattactaacaactgctttttataaaattaatttgacatttcgatatatatacatcctttcagtcattttaatgttaacaatgctaaacttaaaaaataacaagcttatagtaatgttaaaatgtcatatccagtcaaacatttgtgtgtcctcgaaactgttggaaatacttttagtgaaagatgtcagacgttgagaaaattcctttgaaatcaaaggagctctctttaattcagtggtttccttttctccctatatcttctctctctctccctttctttctttagtgcccacgaccttctagcataattcccagtcttttaagggcagagctgcccca

SEQ ID NO: 41858 - DNA, 439 bp, Bovine  19866881116464
  misc_feature (1)..(1): n is a, c, g, or t
ntcatcagacagttcatactggagagaaaccttacaaatgtgatgactgtggcaaggcctttcgtttaaagtcattccttttaactcatcagacagttcatactggagagaaaccttacaaatgtgatgagtgtggcaaggcctttcgtgcaaagtcaacccttttatctcatcagacaatacatactggagagaaaccttacaaatgtaatgagtgtggcaaggtctttactcacagctcaaatctcaggagacatcagaaaattcatacaggacagaaattatttaaatgtcatatatgtggcaaagtcttcagctgaagtgaacaccttgctggtcatcagagcgttcattctggagagaaaccttacaaatgtaatgagtgtggcaagcactttaatcagccttcaaagttcataagtcataagagattacatag

SEQ ID NO: 41859 - DNA, 1396 bp, Bovine  19866881208326
  misc_feature (1)..(1): n is a, c, g, or t
ntttattatttctttgatataatatgcccattaagtttctctgttttccttttttgagagacttctattagttggtgctagggtttttttcatatttatcttctctttcacatttgccagttctgtgtatgcttgtcctgtacttttagagaattctccaaatttatttcgaattggcctattaatttctttgacaactgaaattttaatctttcatagctcttttatatttttagtttgtcctttcaaaaacaatctgctcttagttaatgtgtataagagctttgatctcaatatatttcataaattttttatttcaattatgtctcttattgagatgggtttattgtttatccatgtgagattttaacttttatgttttttagatttttttcatgcatcttgttatctttgattgttcattcatgtttaagaaagaaggactaaattgattattcttggtgtcttgtatgtaacccctctactgttgagaagagaggtgtatttttgagacagacttttccgctgaacaggaagtctgactagaggctctgtgtatgtatgagtggagctggcagctccagcccattcatcctacaaatgccacaaggaggaaagctttactctgagtgtacccaccaaatggaaattcttagctttcctccactgttttagtcaatttgttcaggggaaaaaaaaagccctctgggttttgctgggtcattgccagacttttgagagctctgtgcagaggaaagaagggcagtcagtgaagggaaagtggagggagaggggtctggctaatgcaatggtcccgagtgcagacttcaagttaacttcccttctttcaacctcgctttcactcctgccgtccactcagtgctgacactgagcccaggcccatctagggtaggggaagtcagcttccacctctgctcaagcctcttttcatctggctgcaccttctcagtttgttttctgtctatattcctccctctacttttcttcatctaggaacttcagagttcctctctgttttctttacttctctatttcttttagtacttctatttcctttttcagtcatttccgggaagaataagacttgcatgcacatgctcagtccaccattttgaaccagagatgactgagctatttctaaatgtctatttccataaagacactgtgcttatgaatcaggtaccaaagaacaagttctaaatgaattgctggtatttccatcaaatttctgcttcccctgaagtgcattatagagtcttacccaaaagctgaatgtggctcagaagcattagctctcgggtccaatagaaagcgtttctgtgtgatgttcttcatattgtccacggttaagtacaggggtaacccatctggattg

SEQ ID NO: 41860 - DNA, 812 bp, Bovine  19866881257743
  misc_feature (1)..(1): n is a, c, g, or t
nttcgtatctgggaacaacacccatatcttgtcctcagctactgacatttgtcataaattccaattgactttttgccagaagagcttcaggatgattttttttttttcttaatctttccacaatcttcagcatgattcatttcggaagtattgaatatttggggcctggatattctaggaaatgatcaagaagcaagaaaatcagtcctaacttggtgaatccaaagatagttttgtgaatccagtagaccctctggaagactatgaaaacttgctggtaggaactgaatacatcagggctcaagaggcaaaagtaataatgataacaataaggcaaagatatctatgcagtttagccatcaaaggctttatgtagaacataaatctggaattgtgttttgaagaatatgtgggacttgaaccaaaaaataaaaagtattttagattttaaaaaaaaaagagagagagaaggaaaaaatgataaataagaaggccataagaagaaaaacaaaatgtgctgacaaagagtactcccagatcttttgtacaacagagaaggagtagaactgtggttatactggttcagttcagttcagttcagtcgcttttcatgtccaaccctttgcaaccccaccaactgcagcacgccaggcctccctgtgcatcaccaactcacggagtttactcaaacttttgtccattgagttggtgatgctatccaaccatctcatcctgtgacatccccttctcctccgaccttcattctttcccagcatcggggtcttttccaggagtcacttcttcgcatcagg

SEQ ID NO: 41861 - DNA, 1315 bp, Bovine  19866881284228
  misc_feature (1)..(1): n is a, c, g, or t
ntcagacagatacccagtgtatatatgaaattgtgaagcatcccaaatgcattaccagtagaccttaatgtgctctatgctgtaaagaattactgatgatctttctgggagtaatttaaacattggacgagggcatcttctagatcctttctagttctttattcctttgaagcctaatttctcttccctgtttaggaagaaaatactgtgagacccacaggatagagatgaaaaataagagtgtgtgtcctcaaatttttctttcaaaaataccatggcatttactggagatagtctggattcctgtgacagaatgagttgagatcccccttgaaatgaactcacatgccactttcctttatatgaacttactcttcatgcttccttactctacacacatcccaaaggaatgggatgttcattgccagaaaataggaaactggatcgattcttccctttttttgtcttatataaaattgggactccatgcatacacttatatgaatctctcccttttggaaaaagccatgtggaatcaatggtggctcctttttgacaaagagacaaacttgaattgggaagaacctttggggtcagtaacgggcctgaggtgatgaaatggtcctggtggaaggttccttggcatcctctcctggcgaatgttctaccagcaactggtccacggatgttcccacagacagtgtccttgggattgttatttctccccttcatttgtctcctgacacccctccactcacggtttcttcttcagcataggaagtcatctcatttaaaatttcaagtgacttgactacagtaatagagctcttaggatacaaatcagacagaagtaggtaaagataggtaggaatccatctctcctttgagcctggcacagattagcacaacaaccagattcctaacaggtttttctagatttcactccccactccacctgcatgttgtccttattcttattacaacgttgggatgttcttattactcaatccttacattcatctctctttggttctgggataaaactactcaaaccttaatttagatattttatactcccttagaatctctgggaaaagagatcttataaactagattcccgggtcttattaggctcagaccaacctgaccattaattttcctactgttcacaaacatccctgaacttctttctctttcctgggatgactggcccatgacagaacttggagtttggcctttcttttattcagacaattctcttttcctcctctctcgcacttcagacatttctttctctatcccccaggtaatatat

SEQ ID NO: 41862 - DNA, 910 bp, Bovine  19866881304800
  misc_feature (1)..(1): n is a, c, g, or t
ngtgcagacaggatgggcccgccgtcacggctcgggggctcctgattggtatggagccacgtcactccagccggcgaagggtctgggaggaggcggaggcggggagggtcggggaagggttggggaagggtttggggagggcaaacggcccgagtgacgtctcggcaccaggaagcccgcctctggttttaagatgttaggccaacagggaagcttagagccgcagaacgggtccgtcgctcgtctgggtgctgggagctgagctgcggcgaggccaggctcgagctctactgcccgagggggtgtgcgtgtgcgcaccgcggagggtgagcccagaggcccgcgccgctgccgccgccgccgccgccgccgccgccgccgccacgggagatctaatatcagctacctgtccctgtcactcttgacacttcgctgtcagggctgccgcgcggggggcgggcagagcgcgaacggcgttagctttccttattggaggggtacgagggggagggagggagggaagaaagggggtctttgcccactcttgtttcgctttggagcttggaagcctgctccccaaagacgccccgaaccattctctcctacccacatccccatgtctctccattgacccgctgactttcggccgctggatcctttcgcttgagccttcgcaaggagccggggggcggctcggctccaggactccgcgcgggttgtgttcccggctccgcccgcggcggccaccgcgaggaaactccgtgcctggagcgggaagcggagcaggcggctgcggcggccacggggcttcggcggggcagcaacccaggactcgtagggcggcgcgctccttcgtccatgaactgcatgaaaggcccgctgcactggagcaccgagcagcagggaccaa

SEQ ID NO: 41863 - DNA, 673 bp, Bovine  19866881600943
  misc_feature (1)..(1): n is a, c, g, or t
ngtggattctattatccccttttagaggtgagaaatttatacttgggattacttgtatgaggtcctataacaagaagaaagtcaagacaagatttgaattctggaatcttgacttcagaagctgagttcataactacatgataccccttcaaagagtctgtgttttgattgaagaataaaaacattgacataaataaattctagctgcagtaatatttataaagtagaagatgcttaattgacagatgatcggcaaaagacaatgaagtagaaaggctttgttctagagaggagatagccccagttacttgtgtggcctgaagaaacctcatacaagaagagggctccaaacaaggatgggtaagaactggacaagtggtcattctagaaaacataagaaaaaccaaaaccctagtaactagatcaccaaaaaaaaaaaaaaaaaaaaaacccctactaactaatgagaagcagagccagtctttcatcccagcttcaaatactatttcactgctaacatccttcatatatttcttgattctaaagctgagagaaagaaaaacttcaaaagaccttttcgacatttatttctttgctctacacacagctgtaacattatcaagatttcattcgtaaagagattaatctctcatgtaagcagcactgcctcttg

SEQ ID NO: 41864 - DNA, 1406 bp, Bovine  19866881683292
  misc_feature (1)..(1): n is a, c, g, or t
ntcctcttgcctggaaaatccatgggcggaggagcctggtaggctgcagtccatggggtcgctaagagtcggacacgactgagcgacttcactttcacttttcactttcatgcactggagaaggaaatggcaacccactccagtgttcttgcctggggagtcccagggacgggggactctggtgggctgccatctatggggtcgcacggagttggacacaactgaagggacttagcagcagcagcagcagcttcttctttttgtctagcctccttcttttatattgaacgagtagtgtttgttttaggatataccatggattatggataggtatggccttccctggtggctcagtgataaagaatccacctgccaatgcaagcaacactggttccatccctgagaccagaagatcccctggaggaagaaatggcaacccactccagtgtccttgcctggaaaatcccatggacaaaggaggctggcagggtagagtccacggggttgcaaagagtcagactgagcatgcacacatggaatatgaatagatatatagtccattcacctgctttgtttctttgtctgttctctgtgcccaccctaaggcccatgcaggaatttggttgccttacttctgaaaatctgcacacatctgagtctgcgtgtgttttgtaaatccccaaatcattgattctcaaatttggctgcacaatgaaatcacatgaggaaatttatcaccatgggtacctaaaatctcaccctagagattctgattttattagcaaaaagatttttaataactttcctcgtgattctaataagcagcaaagtttgagaaccattgttctacactactcaaaatttccaggatgtttatgttctatgactagtattaagaatgaattctgctatgattgcaacactgaacacatgtagaaatatatattcttagtctgaaaatgaaagacaagagcttcctggagcaacaacaatctttttcaacctgtgtgtctttgctagagggattgatacactttccatttcagaatgtttcttccttgaccttttgcagtcgaccagatgcttcattatttcttattatgagttttacagaatcagatgagtgctatttgcattggcctctatcacttcctggttaggggcagattaaaattactatattacctttagaagaatttctctgttagcactagttatattcaggagaccttttaaaagtaaacaagacaacccttcctaatataatctattttggaggatgagatttgtggttgattgcattcacattattgtttaaaatgactgcaaaagagagaagaggcacaaaatataaaaaactaagataaggcattataaaatactaatactaatgtaaaatactaaga

SEQ ID NO: 41865 - DNA, 1620 bp, Bovine  19866881890586
  misc_feature (1)..(1): n is a, c, g, or t
ngccgtagctagaaacctaaaagttgtcctttacacacccatctttttaatcccaccccattcaatccatcacttggtcctgtggattttacccctgtaatatctcaaatctgccagtttatctccatctctgctgcctccaccctagtccgggatgccattgtctcttgcctggactcatgtcttctaattggcctgtgagtaatcactctgtgtgcacactgcagcaaagtgatgtgttcaaaatgtaaatctccctctacttccctgcatgaaactttttgctaatcttcagattaatggagggtgggggagggatcttaatcagacctggaagacaccacatgcagtctgctgctgaccccgtgaaaccccagtttcacgttgccggcacattctcctttctcagtggaggccaaatgagttcacctttcttttggtcgctcatacttgctgccacaggacttttgcaccggcttctcccctgcttctttctcttttttcgccttgtgaattctctctcagtttttaggtctcagcttgcatcagttcctcagggatatcatccctgacaccattaagttaaatttcctactttgaggctttcattgccctttatgaggcacttgttggtagcattctgaaatacgctggagtggttaattattagagtaatacctgttacttctcacttccttccctactagaggctactcattttatgagattggaaacagaatctatgtttctttatcagtatgtttttagtacttggtaatatactaggtatagagtatttgataaatatttattgaatgaatagatgatccatctatatctttggaaaagatattgactacatgtgccatggtattcttatctgtaaaatggaggaagatttaatctttttaatattttaaaaaaatctttcagagattttttttttctagttgtatctaaaatactgcttatttgaaactaagtatgtgaattagtttgcaaaaactgttagcactcactcattgtaccaatgcatgactattgggtagagaaagggtccagatagagagaaaaagagaaaggagacgagaagagagagaagatgaatacatgtacatatctggaaggaaagcaaagaagtcagagatgggtaaagtcgaaagtggatgaaaacaaggaatgatctttttctttactccacacattaaagagaaagaaaattttaactccatagatctaagtacttccaatcttgctcctcccccacaacacacacacacgtgcacacacgcacacacactcacatgaaggtagctctctgcttgactgaattggtgagctgagctaatgcaagatttgtgatctgaactcaggattcttgactcctggtcacttgcaccctggcctttcctttcatcaagttaaaatctctgcacatcttttgtgtttgggggtaatgagtttaacatatatttgagctgtcatttaaaaatttgtgatctataaggaaattaagggagaggaaaaaaaaagagagagagagaaatctggattgcatttccctgacccataagggattttactaagaaaacagactttaatgtaaacaacctctatatt

SEQ ID NO: 41866 - DNA, 942 bp, Bovine  19866881907888
  misc_feature (1)..(1): n is a, c, g, or t
ncatcatctcatcagaacagtgctcaggcattaggaagcagttagactcagatcagcaaatacaagtttttcaaaattcatattttcactggaaagcttgaaatttgtcactgggaacaaaagctgagaatcattttccttggagttacagggttcctttgtacactttcccccaagacagtgatagttgtagaaacaaattggaataaccatagcttgtcagttgttcattaaggaaaagtggtgcttcttgaataatgtggcaagttcagctcatgcattgcatcatccttgatacaatccttattatcatatttttagctttaagacccttgctggtgggtggggtcagtaagatcaacaatattttcgcaataatactgaattatttgtttactttttgttgtattgatagcttggcataagcagtagtgaggtgaatgagctgactggccccttagcaggagtcaaggcaaggtcttcatgctggatgggtagccccagtttatcaccaaagaaaaaaatacaattgaacttaggagtgtccttgatggaacagtagcaatcatatattttattaaatcttggccctagaatatgcatgttttcctattttaagtgaggaaatcgaaagcacacagaaaactttcttattttaaatatttatagctgaccatcttttgctttgtactcttatattgctttaatgttgagaaaactttaattcctcaacatacttgataaatattgtatgcattttattatgtgttttgaaaaaatacttaaattttcaatcacttaaagtttcatttgccttgttgtattaaggaaaatctaacatttcccctcaaattttaagttatctcaacatcactgtcttagaatgctttattttacatttcaacatataactgaagaaccacaaatcggaataaattcaga

SEQ ID NO: 41867 - DNA, 746 bp, Bovine  19866881926540
  misc_feature (1)..(1): n is a, c, g, or t
ntccattagtatcttccttcataaacaaaatgggacaatttaaaagctttgcaagacatataaacacagtacttggtgaaagcagtatctatatataaaactccctccatagtgcttgtaaattaggccaccaaatatttaacagagaaacgatagagtcacaaaattaaaatatgatatttggacacattaaccattcaaatcaagaaaccagtttcttatggtgtccctgttttgttttagccactcgatattgtttttcactgtttccagtacttgctccctaggtttttgtcccgctccagcttcaggatatctttcgaaaaagctcttgatctataaaagagaaagcaataattaagaaagtaattttaagcccacgtattcttcggggattttatttacattctgggtttgtttccttctttgctggaaattcagtatcactgaacaacattaagatacatcttctgatgcatcattcagattgagcccatctctcagattggtagtcattacccatggctttggatgcctggcagcatgtgccgcaaaagaggccctgctgtactggggaaggagagcagcacagtggtggctggcatgctctctttgcttttgcaagtttctcagttttctgcacgttctcccaaggtgtttcctgggaagtctgtactgtggaatgatggctttattagccttttgttccaagagtctggagtgttttatatacttcagttcactca

SEQ ID NO: 41868 - DNA, 1681 bp, Bovine  19866881982649
  misc_feature (1)..(1): n is a, c, g, or t
ncaataaatagtgtggtgacaactgcctccatcattttgaaaagaaaattactccttgtgtcaaaataaattccagatggatcaaagattttgaattacaaaatgaaaccataaaagaattcagaaaaagcatggggaaatacttctttaattttgtaatgtgaaaggccttcctcaacatgacacaaaactaagaaactgtaaaggaaaatgccaaaaaatataaacagagctaaaagattaatggtaaagggaaagaaaaagagtttttactattttgataaagagttaattttctaatttacataatgtttgtacaggttggcaaggagaagtccaaaggaggtggtggggggcgggggggactaatagaagaatgatcaattaacatgaataggcagatcttcagatatagaaacaaaatggtcaacgtgcaaaaagattctcaatctgattgacaacttaagaaatgtaaaacatatgtaagttttcacctatcagactgacacactttttaaaggttgtaatatccattgttaatgccacagtgaggaattctgacccttttgataggaattttaacaggtgtaaattttttagtgctatttagtaataatgttcaaaatcagcaataaataaatatcttttttctaaacattcccattattaggagctgactctactgaaaaaattaagttcccattgattaagaagttcttttcaggcttatgtatagtaagactaagcaggaaaataactcaaaggcttattaatggtcaagcatattattatggtcaagcatattgtgaaagggagttcccttggtggtctaacaattgggactcagcgctttttctgccatgacacgggttcaatcctccatcaagaaatgagatcctataagcctctccatgtggccaaaaaaaaaaggaaagaaaaaaaagcttcaattaaaacatgtaaatatattgtgaaatcatcatgaaacattataagccatgtaaaaatgacattatgtagccatttaaaaatttcatttctatagccatttgattaaatgaaaaagtaacatatatatcaacttttatactatagttcaaccatatttgtaaaaactttaaattatatatatatatacacacacacacacacacacacacacgcatagatatagtatctgtgctgatagatgcaactatatttttctacaaaagaatacatatgaagcctcaatggttaccttctttgaagagattactgggaacagaagtgggggcctgaaaaagagagggtaagttttagttctcataactttctgtacatttcatgcacacattatttttattttcatttttaaaaaattaacttaaaaaaaaaaaacaaagacagtggaattgttttgtttttcttggtttaaaattaaaaagtcacacttcagtcagtatgatgcacctctagagacccagacagctgcagctgccagcaaggagagaattttgtcaggcttagcctagttctaaattactggttttgttattacacatccctgatttcattttcatgtcccagacgacatctttgaaccctaactcaaactaattcaaaacctaagtaaaagtcagtggtctagaggtcttctccacttgcggtggtccgaattaagtcaatcggtaaaaagcat

SEQ ID NO: 41869 - DNA, 3656 bp, Bovine  19866880407601
  misc_feature (1)..(1): n is a, c, g, or t
naacaaacatttgtctgtcaaaataaccaaaaactaacaaaatgagaacaggcaaaggctatttattcagagcttgctatatcacaggggagtcagtcactgtcagttggttttggcagagactcaaaggcgggcacagaaggtggaaaggctttatagtggaaaaaagggaaggtttcagatatgccctggttggaggctggtgacctagggacgttgaaggcaggctaactagaagcaggcatgttatatgatagttaggaggggatatttgatttttttctggttggtcctaagtggggagcagcaacaaaagttagaaaagctggaagttattaatcaagtcctggctgtttggggccaattgttgcacaggttattgtttggcttcttagaccagttgctagagatagtaatctgacttcctgcaagtcagacttgtagattgcaggctgacattctgggctggttacgggagataatgcggttggtttcctggtctggttgctgcaggtttttgtggttcagaattctatttttattacgcactggccattgtccatttgtatgttcaacgtttaagcgattaacattatacgaacaaaaagtacacagagtctaagtgtgcacctagctcaatgagttatccagtgtaacgaccacccagggcccccgtttattctaaaattctcctcaatcagaatttcagaaacctgtcatcaaggaacattgtgagcggcctagtagattttctttctctttgcttctttagtcctggtgtccagggtgggactcaccacttgcaaacttctcaggccttctcacgaagtcatgccttcccagacacaatagacatgggcagtcccgggtttcccacagtcaggcttggccccatgagtcaccgtcctccacattcctggacaggttcatagagcatgccttgaaatccaggcctcaccacttccttggcaagttaatctctcaaaacctgtttcttcatctacaaaatgggggtaataacagtgcctattctcaggacctccctggcagtccagtggttaagactctgagctcccactgcagggggtatgggttcaagtccgggtaggggaattaagatcccacatgccttgtgggtgcagccaaaaaaaaaagtgcctcttaattgctctaaggatcaattaaggcgatggacacgtcaacacaatctgtcacacagaataagcactcagattctggtttattggatgtttaaaatgtctaaaaatgacagctgaacattagtgagaacctccaatgcgccaggccctgagcttagtgcttaaatgtaggatatgaataaacgttcctacctgagtcattagaaaaggccgtgatgctgggaaagattgaaggaaaaagaaggggcagcttttcactctcatgcattggagaaggaaatggcaacccactccagtgttcttgcctggagaatcccagggatgagggagcctggtgggctgccgtctatggggtcgcacagagtcagacatgactgacgtgacttagcagcagcagcagaggatgcgatgtttagatagcatcaccaactcaaaggacatgaaaggagatagtggagggcagaggagcctggtgtgctgtagtccatgaggtcgcaaggagtcagacacgacttagtgactgaacaagaacaacaaaaattaatcatccttattttacagaggaaggaattgaggcttagagatgttaagaaacctctctgcacttacctgcatttgttgtgagaattaagagatgaaggaaagcatgtctttagtgcagccccagcgcatcatagtcactccatcaatggggctgttgtttaaaatgacccttggattatccactgtggcagaccctaggcagcaattgcttagcaacatctgctctccttttcacccttagcaacaaaaaactcacttttttgtatggggtggcatcaagaggaatacgtaaaagtactcctcttttcaggctctcttacttctttaggaggttgtgagacccaattctggccagtgagaggtgtttaagtttctgaggtgggtctttttggaaaacttattattgtctcaagaaaaaggaaatttcatctgacaaatacttcttcccttttgcccccatctttgccgcctagaatgcacatgcagttctgtgaggtacagctgccacgggctgttctggtagcccagctggtaaagaatccacctacagggcaggagaccccggttcgatccctgggttgggaagattccctggcggagaacgtggcaacccactccaatatccttgccaggagaatcccatgggcagagaagcctggcaggctacagtccaagatttggacatgactgagcgactaagcacagcacagcacagctgccagcctgtaagcgtaaggaccaaaggcccatgcctgggatgccgaggcagaagagccccctgggacctccctggtgatccagagcctgggactctgccctcccaatgcagggggcctggctttgattcctagacagggaagtagatcccagatgctgaaactaaagacccagaatgccgtaacaaaaggatcccacgtccgcaactgaggatcccacctgccacggttcgacttcgcacagccaaacaaaataaataattttttttttttttttttttttaaagaatcccagacccctgatggccttgtaggcagactgtccaagccctggattgccagcctccaaaagttttcacccctgtaatagccagatttcagttgatgttatacacatttgaaggcaatccagactaatgcagccaccattagggtgataaggatatctgaatgaaatgaaatttccaaatgaaatgaaaattaggaatctttagtatcttctttaatctgtttacacatccctactgatgatcaagaactcctgagaatgagaagtcggtccacatcatctacatgaactcttctccagccttctgaggactggcatcaaggcctcagcatctgagtcccacgtgtccactaactctcccttctcaccaagtcacatgatgtcatagatgacgtcaccagcagggcttccatgggtcacgagcactgtgtgccaagggaccggaggattctgcagtcacttgttctcaaggcttggctccggaccagcctcacccagcatgggcctgaatgacgcttctgtaaaacctgaggcatctgctctgacatcttggtccaagtccaagggcagtaattgcattctgcctacttgtgtctctcctagacttctaaggtagtatttatgtctatccaaaaaagatgatgcccagtgttgctctgcccattaaaacaacgaggggtccaccttaagggataaaggagcatctgcacgagacacgacatcctgaagtgggggcaagaggctttacgaggagccggctgggatggcagctttcaactggaaagaagctaagtcaagaggggttaaacttgtggtttttcgtgccacttcaaagaaataatatgcatacatttccacttactttaaataactctaaggcagtgtcagatgaaaacaggatttacctccagcctcttttctcacagctttcctaacaaaacatatccc

SEQ ID NO: 41870 - DNA, 924 bp, Bovine  19866880532147
  misc_feature (1)..(1): n is a, c, g, or t
natttcttctttttcctccctctcctttctggccaattattttgctgaaagcaaccatagactatcaaaattccccaaacagttcaacccagttctgtgtacaagcaaaatatagaatctgtcatattgttggccaccctgaaattatgtttttatacactgtgcttttcaaattggggccaatcaacttgtcattcattggaatgttttcagctgagattgtgctgacacacgcagatgcatatgtcacatttataggaaaagttttaaaatacgatcattctgctggcatcaattcattgttaaccaaagacaaggttattcagatgcactgagcgtggtgcttttggatcactcagctacttgtgattttccccaggcttttaagaaattctcctacaagaatataaaccacaaaattgcatccttctgatcaagtaggagaaatggctaaatacactacagatagtagagacatggcaccaagctcaatctactagaatgtcacttcataaaatttcacctcatactgtgtctaaagttctggaatagtgtttctgccatatgaagctgggcaacgagctccttgattgagggccccatgaggtaagatgagggtgactggttatttgtcttggaaataaggccagtgcagatttgagggtggcagaagggtgctgaggatttaacatcactgccgcatttctcattctggaggagaccaagccatggctgttggaagtccatcaggtgggaatgagcacaggccaggagtccctggagcagccgaaggatgtttgcggaggtccacacttgcacaccctccagccttctcgacatgtcctccttggcggatgtcttacactctgctcataactgacctccttgttaggtctagaactgacctcctgtgtcttctctcca

SEQ ID NO: 41871 - DNA, 664 bp, Bovine  19866880552264
  misc_feature (1)..(1): n is a, c, g, or t
nttttcttctcattgtgcgtcgagtagtcaaattgcacccagtattgtaaaatgagagtggtttgttgctaggcaattccatgaatcatctcaaaccaagttttaagcagaccaatgacagtgtgtccccttaatttgtttttctcagtagagcacagtttttgcttgagcaataaaatatatgaactgatcatatgggaaccaaattttgtgaaacaataaataaatcttatcccaacactgactaatatttaatgataagcataatttttgctataatgcatggaaatcaaatatcagtgatctaaaacataggcaatgattgcacttggcattatgtcaacactgcagataaaagtaactctgggatcagcctgggagaagaaagaataggaagaagttctgaactgtttccaaaaagacctactagattcatgggccaaatcatgggtctccatggctcgagaaattgcactggcctctgttttcaaggagaacattgaaggaggcaacattccatgggattgtaggttttaatatagctgctataggttaatcttataaatcactgcatatggtggccgtagccatgaaattaaaagacacttgctccttggaagaaaagctctgaccaacctagacagcatatcaaaaaacagacaca

SEQ ID NO: 41872 - DNA, 1854 bp, Bovine  19866880559734
  misc_feature (1)..(1): n is a, c, g, or t
ntcacacggctatatatggctgaactgggttcaccctctatgtctaactcacttcaaagccagccccaactaaattgtcttcatcggcttccctgtcctcatgggaccagtgaggcaagcttgtcaaaacagtcattaaaaataaacaggaggtgcattcagttctgttaatgaattgttaaagtgttaagtacggtagaaacatcaaaagtatgatttaagaacagcctctgctactcatattgtttgtaggtgtgcagccaagaatcaaagctcttttgtggaagaagttcagtctggtacttactgaatgcaaataataataaatgatatttgttgtttaaacctatgatttaagttacctggtctttgttctttcagatctgaacatcaattcaaagaacagtcaagcattcattcctcataaacttgaagtttaagagaggttttttacagaggaacaaatttaatattttttataagggaacaaaaaactgagtgttctgaagtgaatgatttaactaggtaaaaagatctttcagagaatacattcctttttaataacctcattagctttctttatagatgcactgtctgtattataaagctctggacaatttttaactgcctgagtttattgtaacaagcaattctgtgctaacctctggaatcctggcattttttgagagtgaaaaaagagtctcatgtaacatttctgtgttttttttttttttgtacttatgtagaatagctccaagcgagctcttttagaatagaatctttttttttttttttaaagaagaaaaaagccttatagaaaaggataattattttaaggggaaaaggaaagaaaaacactaagtcagtggtgtgctggttattatttctgaacacccaaaatgaaaagtattattctaatgatgagacgtcctgtcaatatttctctctgttaaagcctagtacatattttggattggaaaaaggtaatctgtctgcgtgggcttcccaggtggcactagtggtaaggaatctgcctgcagatgcaggagatgcaggagatgtgggttcagtccctgggtggggaagatcccctggagggaaaaaatgggaacccactccagtatccttgcctggagaatcccatggtcagaggagcctggcaggcttcagtccatggggtcacgagtcagacaccaccgagcatgcacacatacataatctctctgcacaataaacttgatagaagagccaaaacaatgtcttttataaacgaataccttagaatattgtttcatgggaattgggatgacaaagagaaatttcattagtctcatttatatagtggggaggagagaaccttttcaagaggaaaggaaatgggtacatttctagaataaccgttttaaatcctaagctattatgaaacacaagatctcaagtctcagctgttctaagttcttcaaatttatttgctctagtcactctccctaccatagttcagggcttcccagatggctctgcaggttaagaaccagcctgccaatgcaggagacacaggagacgtgggctcgatgcctgggtcaggaagatcccctggaggaggaaatggccacccactccagtatccttgcctgaaaaaatccaatggacagaggagcctggcaggaatacagtccatggggtcgcaacgaaccgcacacgactcaacacaagacggtcgcaccatagttcaggcagctaaaacaggataactgttgactcttgggatctcatttcctgctcttttccactttgattcaagacacgtttgtctttggcttacacaaagttaagtcacacagcttaaaataaatg

SEQ ID NO: 41873 - DNA, 2193 bp, Bovine  19866880562795
  misc_feature (1)..(1): n is a, c, g, or t
nttgtgttgtcactcagttgtgctgactctttgtgaccctgtggactgcaggcctgctagggctcctctgtccataggattcttcaggcaagaatactggagtgggttactgtttccttcttaggagatcttcccaacccagggatcgaagctgcctctcctgtgtctcctgcattggcaggcatgttctttaccaccaagccacctggaaagccccacagacagccaagtaggctttaaactccagccaatcagtcatttccttgctttgctgctgccccagctcctgacaagaccattggaccctcctaaccaggttggtgctgcctgaaatgatttttgctcttataatctcttaaaaaatgttaatatacatcagtttatcttttaaccacagtcagggatgtgttgtagaacttaaggtcagggatcggctgggattcagagacgatcatagcaggaagcaggactcctgctttaatcccaggggatgttcttatccatctcttggtctctgttccgctgtggtttgtcttcattttttcctctgggttgatcggctctccctgctgctctgtctatggggcaaacagagccaaggccactgaaatctcccaagtacagatccagtctctattgttccttggccctctcgaattggaattctcagagaggggaccctggccctgcctacccgtagtccagccatctgtggcccaggttgaggggctgtgagaatgtatatgcgtgtgtgcccatgtgtacatggcagcaggccaggctgacaagtaccaccatgggccagtggggacagttgatgacccacaccaggtgcccttgtctctctgtttctggttctttttggggtgactccactagggattttcctaagcaggaagaggatcatgagaagcaggaccatgatggtgaggtctgggtgacacatatctttttaaagcaaagggaactcaaactattttttttccaaacgagtcacttaggagggtgttagtgtaactgatctggtacacagagttgacaagctagcagggagcagaaaaaagttgtgatctgtcagactgagcccaagatgcttccgagagctagactgaagtccgttcagcatttctgcatctatagaacagaaagatttggtcagagagccctctagaattagacccatcttagactgagtggtccgcataaggcagcctttattacagcaataatgaaaaatgtgaaggcagggccacgattctatctgtggctccttgcagtttcccaacgtttagcttctgctttgtcctgttatttcaaactctcttctccctctttttctcccagtttgttgcaatgaagttgcctgttttatgacttctgcaccatattttcttgtcgttctccaaagctgcaaacattttcttaaagctgtgtgatcaaaagccgaggaaggaaaaagctgcaactgagaagttataattattgctactatgacatgaattatcagaaaataatcaaaacataaatttctgtctcagccaagaaacaaggtgaaataagaaaccacaatggtgccagtgttcatttgggaacatggagttaatgtcattttcactgttctaaatcctgagtgccattgtcatggaagatgcctagaggttgccaaggaaatacaaacaaaaagggcctggctgtccatggaatttggtttctgtgtagatttcatgtctggctttctctctgatggtcctatagcactttgtctctttagtgccacggtgtattaagcattaaagccatgtgtcatcatgtcttattttccctgatagactgtaaggtccttgaaggcaggatatgtgccaaagtacacaatgtatgaccatataattaggagttggcttacttttttctctcctgtttcctctattcagatgctgtcagtatctttgagggaatctatcacacaacaccctcttctccatctgagttttggatccattggaacataagatacaaagagttccagtgggaaaatgcgagcaacaccttcatcaccaaaggaggctgggatgtggactggagggtgtaggttacctgtctgtgcccagatgggcaggcacctgcttttccctcagttgagcccttggacagccctcttggggggggaaagtcagagccttcagggtgtctaca

SEQ ID NO: 41874 - DNA, 1577 bp, Bovine  19866880632327
  misc_feature (1)..(1): n is a, c, g, or t
nctaagggtgtgcagacacccctgccgagttcatggttccatttgtttcttggtagatagagaatatatgtgtaaactgctgtccctagagattgagtaactcaccaaagaccatataaccagcaaatggtggaaactcattcccaagaagtttaatctcatagttcacattcttctattttaaagactttttttttctttgaagtggaccatttttaaagttattattgaattggttactatattgtttctgttttatggctgtggggctcatgggatctttgctccccgaccaaggatcaaacccacattggaagggaaattttaaccactggaacatcagagaactcccccccagtagttcatgttcttaaccacgcaatttttacagtcgtgccatggctgtgcatcagtcatgtccggctctgtacaaccacatgggctgtagccagccaggctgctgcattggcaggcggattctttgccacctgggaagcccaacttttacagtatctcactattaatcagcagagtgacttttagtgacagacttagaaatgtgaccaagaaaatatgctttaagaacaaccacagaatgtcctaccatgcttatctttgaatgtctggtgtactttattttgtatctgttttaatacagaatccaaaggctttattgggtagacagagtgaaaagcacacttatcctcaaataaacgaaaggcgtaattagagtcaccgataaggattctgccttgccacgatgcaggctcaccccctctgaaaacgctgatcaaatcaccagtgcgggaattgtgttaagttctatttcttccagctagtgaaatattaatttatcaaaatcgcacagatgtacataggctgttttcattagaatttgggacacgattcagaattgcttaggcagtcttttaaatgtgattttaattcaagtggagaaaacacagggtactgtgagcgatagatcagctaaattgttcctgtgaactttcctggactcagctgtttaacgattagatagtgaatcatttatgtctgagaataaataagtctgataaatatgtaaaatcttttcatattattattctggatgttaatatgagtgttactgttttaacagttcttatgataaagctgtttgttatttgcaaaaatgacccaagtgtaatatgctctggtttgaaagtccttgctaaaaattatagtgggaaaaattggtagcttaaacttgcctgtggtataaatgtttaatttgaacaatattatttctcacataaattttcttctttttgtgtgtattgtgtggtgggtggtgttcagtcgctcagtcaagtctgactctttgcgaccccacagactgtagcccgccaggctcctctgtccatgggacttcccaggcaagaatagtggagtgggttgccatttccttctccaggggaatcttcccaacctagggaccgaacccacttctcctgtgtcccctgcactggcaggagttagattctttaccaccaagccacctgggaagtatattaaataacagaataaatctacatttt

SEQ ID NO: 41875 - DNA, 3172 bp, Bovine  19866880702165
  misc_feature (1)..(1): n is a, c, g, or t
nccctgaagaaggaaggaacactgaggaggtgcggttaacgtcatgcccgggccagaatgtaaatggagcactactgaaaccggagctccctgtggtaccgatgacaggtgattattacatacaggtgtacatacacatacatgcatgtgccgtgtatatacccctgtagatgtatgtgcaaataagcacagcacatacatatctccgtctatatgtgtgtgtgtatatgtctgcttatcattatttgtttttctgtaatatttgtgtcaagtccttttattgaaaactaacttcaggaaactgcagccctacgcggcctgagccccaaacatcctgtctcctcccaaagtctggtctcaaagctggccctgcctcccagaccctgtccgtgaagggcggccgctggggagcggggccggctgcacccacccgtgacctgtccgccgtcctctctgcccgcagctctggccgcctggcccccgtgttcgtgtacgggacgctgaagacgggccagcccaaccaccgggtcctgctggacggtgcccatgggcgcgcggccttccggggccgggcccgcacgctggagccctacccgctggtgatcgcgggtgagcacaacatcccgcggctgctgaacctgccgggccgcggacaccgcgtgtttgggtgaggtctacgaggtggacgaacggttgctgcgcttcctggacgagttcgagagctgccccgacatgtaccagcgcacccgcctgcacgtggccctggagggcgtacgcgcgcccctggagtgcttcgtctacaccacggctacctacccgccagagtgggtccacctgccgtacctcgacgattacgactcgcaggggaagcacgggctccgctacaacccgcgggaaaacagatgagcccagcgggcgagggaggccagggaccagcccagaagggccacgctcgctgaacgagggcgcgataacacccctggaaaccggtacttgaaacaaacactcgatctgtcgggggtgggcgggggagaacacctctttttcagtggcagccgatttcccaaataatttggaggtactgataacaaggctgttcctgaaatctgtctcactatgctgctttcttgcttgctgcttaaagagcatcttgggtttgaatgtactggatgagaaaaactcaggactttaattcccctaaatgacatttgaaaactcatgttatcatgcttttctgattatgctgggtttttctttttccttgctctgctttgctttaatctgaagataacatttaaaatgatatcaagcctatgtgactgctagattttaacagccctgctgtattcatcctgacctgtagcaccgagaaaagaaaaaattttaagctgatttaagacatctcaatgtaataaaagaacctcaagaaacacatgctgtattttagagttcttttcaatatatatgacaccattctttataattttttagatcaagcttatacagagatgattaaagattgtatcaagtgagaaactgaatataaagtattggtgcgactgccggccctctctctgagtctgtctggtggtctagcagactacctcctggtctagcaaaataacaagcacgcacttgctggcagggcagctgaatagcccgatttcagagaggctcactggagccctgccccagaagggagagggggacgagcttttcagagaagaagcaacgcattagtaatttgttcttcaggcctgacaaaaagcttggcttccaaatacaaacagcacttaaaataattttagcacagcacgaagtaccaattactacccacctccatttgatactctgtcagggtggcctcaaggccgtgcacgactctgcctctgctcactcaccagcaagtaggagcatcctgagaattccagaccctgatgaaggtgcagctgctggtctgggtagcctcgttctccgtcgggagagcttgctcacgcgtcgacttaatagtagactgagatggcttactgcatctgcttcagaagcatgactgttatttttaacccttttttcgtaattggaaactcgcttcacaaaaacacaacaaaggcgaggatgggaatctgttgctgggttctgcagccccaccaccaccactgggccctgggaaccctgactggcgcccatgctggtgccctgggagggttggggggtcacacctgcaggctcaggggacccacactcactggcagaccaccatgaatggtgtctgggcttccggagatcatgaccagccaaccacaagcggggctcggagcctcaagatcatgaccagccaaccacaagcggggctcagggcctcaagatcatgaccagccaaccacaagcgggactcagggcctcaagcaggatgaagcaggtaatgagattacaaggtggcaaacgctcatttaatgaaactgaaggcaaagaactgggatttatatacatttttaaaaagcatcctgatgaaatgctggtatttcaaagcacactggcacagcccatagcctcttctgtacactgtcttcatgcaaaaaaagggcaaactagtattagacaggtgctgttttattgatttcatttgggcactaggaaatctcacagcagaagtacaaatcatatgtaccagtatttatatcaataaaaatttccattgctgatttttttggcagaacgttggttttgactatatgtagagtaaatatgaccatgtaaaatctgccgcacaggggtgttcctgctgaacgcctgaataaattgagtgtgaaagaataataatacaaatggctaattaaattgggtgatgactgaaaggctataaatacttcattccagttccacgagcaggtctccttctccaactgtgtctccagctttacaatgtaccgatttcaccttgaatttaagaaagaaaaaaaaagaagagggaagataaagaattactaagcaaaccaggaagaagcagtcttgtccggttctggaagggaaggtgcagccgggcaggcgctggagtgcaggcaggaggctggcggtgggggcccgtcgaggggaccttactgagggcgtcctcgtgtggtggggctggccctcgcccctccttatccttcggctcctagaagccactgctccc

SEQ ID NO: 41876 - DNA, 1702 bp, Bovine  19866880710493
  misc_feature (1)..(1): n is a, c, g, or t
ncgcgccgcgagtgccagcctccccgcgctggctgcccggccgagcggcgtgccctgggccggggcgcccggggccgctaccgagctgccgcttccctgcgccgggcttggagtttggggaagccgaacgggtggcgcagccgccgcctcacctcctgcgaactccgcggggcttctcgtcttgttgatgttgtgtctgtaggctgtgcgtattttcttccttctttttttaaccgcacacaaaagaaaggaggagttagaggaaggagctagccagagccccgtgagtcatcccacgctgctctttctcttggagcgcagatggatggggagtgtttcttgagaaacagttaacagaggactcacggggtcccccctccctgtcccctcagccccgaccgcgcctggggcgccccagagggaggtggggtgcagtatcacccgctgacttcgatgggaaaatgactacaagctagcaagctggaaactttctgggacagtggaactgggaatgtcgaacctcccgcagtcattctggctgtcggcaggcatggctctcgcgcgttactgaatcaagaaaccgagaaggtgatccgaagaggaagctactcggagtagcattgtattcagcgctgcgtggggggagggcgggagagatgagtctccagtgccttgggggccccaagagaggagcagccagctcaggtctccaggtgctaggtcaggaacggttgtgttctttattctggtttccaaacgcactctcattttaggctggcagagggcaaccggtgtgtgaatggatcaatactgatgagctgaaaaggccagtctgaggccagaaggcccttcagtgcagctgaaagaatattttttagtaggtgttcactgctgatttttccagggatcgtgtaggtttgatctgcatctgtcagccccttactgcagtccaggctgctgtgtcaggcgtcaccgagtccccaggttcagagctcagtgactgctgtgtgttcatttttgagggatggtgtgccctctctaaggtctctttgaccttttcattgacgattgattgatgggttttaaccccctgaaaatagaagcttggtataaggagtttgagatattgaaaataaagaggcttgtgcttcagttcccaatctaactacatacaggcgccactgaattctcaacacaatgggggtaagcacaggaatgggacaggaatcccatcaacagtgtggtcactggtagagctaactggagccctgcatgggctgaacctgaggccatgatgttgctcctttcttctctgtccatgaggcaaacttccttggctcaggagccagggctcgcagcaggacatcccctggggaagacgaatggggtgatgccgcccagggcccatccagagagagaaacagaacgtgccccttttcctggttcatgctgctgtttagtcgctcagtcgtttctgactctttgagaccccatggactacaacccaccaggctcctctggtccatgggatttcccaggcaagaatactggattgccattttccgtctcctggtacaaaaagacggaagggccccgtctccctccaggtgccacttcatgctggcagggcttcttgtacctcagcttccagcctgtcttcgatccttgcagaaaaaaagtccatctactgtggaggaggagg

SEQ ID NO: 41877 - DNA, 1933 bp, Bovine  19866880800765
  misc_feature (1)..(1): n is a, c, g, or t
ntacctgtagccctgcttactgtttgccttgaagctgtataatttgtggtcttctgtgactgtcttcttgcagttagcacgttttcaatgttcatctgtgttgtagcatgtattagtatttcatctgttttaattgccaagtatataatatgctgttgtgtggatatatcgtgttttattcagacagtcatacaatccatggggttgcaagaggcagacatgactgaagcgacttagcacgcacgcacaacagtggtttacttcagggcgtaataacccggctcctcctttaaggggatctgagtaggtgagatacttttctcagttccccttcatgtgccctaaagacagcgattgtggtttccttgtgagcccgtctgacttgaaattaatatcaactacaaattttaaatgcttatcattcaaaagctttctttacaacatctaactttctctttttaacaaacaaaacttctataattgattggtgagcttctctaaacttttaaatttagaattattttaaagcaatatttcagttttagaagacatttttagcatttactgtttgtaaaactcttacttttgagaacttcttttggaactcttttattgcataaggagatacttaatttgggggtgaaagctgaatagcatgatttaaaggatattagtgctgctttaatcaaaactgcagccttttctgcttcttacatctttatcatgtagtagtttaatagtaagtaatatatgagtaatatataagtaatatatgagatattattatctgaccttatttttaaaactattttaagggtaggacaataaaattattaagagataggggaagaaagaaaatatttatgacctaccctgacaagcatattggttgagactttcatatgttaacttatttagcaccctctcagatagccatttttactgtattatggtttggaactgaagctcagagaagttaaatacaccaacttagtatacaactttcatttggtaaaacagcaatgtcaagtgagtcccaagtcagtgattccaaagccgttgtttttttcttgcctgtaactgaattctactttgtgtgcagagaggccactaaacctggaaattcaagccagtgcctgatgtatgtcctactgatactttattacatagccagtaacctttgtttttagacttcatgaccacattagaggggaaatatatatacataaatggcttcccaggtggctcagtggtaaagaatccacctggcagtacaggagatgccagttcaatccctgggctgggaagatcccctggagaaggaagtgcagcccactctaagtatacttgcctggagagtcccatggacagagaagcccggcaggccaaagtccatgggttcacaaagagtccgacatgactgagcaactgagcacacactcaaataactatccaaatgtataggtaggcacatattcttctaaacagtacaagtctgtgtgtctttgattttagtgagtatcttttaataggattggtagtcaaagaattgttaaggatcatgtatattttcccttccctctcatattgaagaattagggaatgggtgaatgaaaaggaagaaatgaggaatgatactttcaagttagctttgagttgtttttcctttcaattgcttttatttacttggctattaaaatgtttctgctaagaatatctgttttagaagattgtgggctttgggggataactccatgaacaatgacttgatgaaattagtcatttatgatggacaataatatggcagaagtttgcaaagttcaaatagacttttaatattcaatgccaaagaattgtgcctaattaaagcttcggtttaattaagataacaatgcatagtccttcattaaaattaacacaggaaaagttcttt

SEQ ID NO: 41878 - DNA, 1790 bp, Bovine  19866880804740
  misc_feature (1)..(1): n is a, c, g, or t
nttagtataatgaatgttgtatgttgattaaacatattatatatgttagtatagtgaatgttgggcttcccaggtggtgctggtgttagagaaccctgcctaccaatgcaggcgacttgagagatgcaggttcaatccctgggttgggaagttcccctggaggagtgcatggcaacccattgaagtattcttgcctggagaattccatggacagaggagcctggcgggtggcagtccatagggtcacagagagttggacatgaccgaaatgacttagcacgcatgcacataatgaatattaatgtatatttctcttctcatggctaagttgcactgagatgtcattttactgggtgggggaggaaatgacttttcatcaaaaaatttaaaccagatatgaaaatcaaaataatgtaatttcattgaaaacagtccttggagaggcttgagatatatggtagatttttatcccaggtggaaaaatagttcaagtaagaattaatgagaattcatttaatcagcaaatacttactgcatgcctactgtgtactagataagtgtaaggctgttacactggagaaggtgacatttttatgtgatagtcacaagtaaatgagattaattcctgagttaaggttggtctccttggttgtctttctttttctttttttttaattggaatataattattttgcagtgttatgttagtattcttgcttatctttaaattttgtgattcatctatatgccagaattgctaaagcatttgttactaaaagatatttcactcaactgtcttaaaacaaaaactgtgatggaattaaaccatgttcttgtattttgtgatgaacttatatgattctttatatttctcctttctatatgatcatttgaaaaataactctgtaagtggacacttaactatgcatcaaattgagtagcaaattatatgtgttgaatattaaaagataatgtagtatagtattttcctaggggaaggttagctttgcaaaaatgtagaccttagcataattttcagttctgtactgagtcaccactgaagtgttactgttaatctgatacagtgtttttctaagcggtgccttgccttaataagaaaactgcccagcttatgtctatgagttgttatttctctatgcttgtttcagattccatgttggaaagctatagatcattggcacagttcaagtgatatctgtcgagttttcgttgtagaattatcccattttacttttcagctcatgatgtgtttaaaaaacccatcaaaattaatgcattaaaaatttccctggaaaacatccaccttgatatatagtacaaaaactacttcctgtatgtattggcttagctactatcagaagcatcaggcataataaaaattgagcattcctgatagtatatccctttttcctgaccatatttggattgagcttcatttagcgtcagtgttatgaaaggagacaagttgaatagtgtgcagtaagtaaaggctttcattggtattagattttaatagaggggaactcctgcttttagagtctcagaagggagagttgtgaccatttacttgtttttctagatcaccctctgccacatcagtaggaaattagccaagaggtgacagtctaggttaatgacccaagaggtaatacatatttgttttccttacagtaatgtgttcgtgttttctgaaagtcttttatttaattaaaaaatttttttaaataataagatattcaaatgaggaaaatatagcaaaatttacaaat

SEQ ID NO: 41879 - DNA, 1623 bp, Bovine  19866880884553
  misc_feature (1)..(1): n is a, c, g, or t
nacagccttcaggaagagccttgtccctgtggggattgagaaaggatcagagttaagcactgaaacaagcaattaattcccattagaggattaaggcactcatgttcactttgaatcagaaaaatgaattgcgaataaaatcctgtacaaccaagaggttacttgtcaaagttaataaattagagcatcgaagggcaaagtggaggcacggaagttgagcggccacaggaggactggtgagcaactggtggggttgtgttttcactggacgaggccacggccgggatgctgtagcagtgtggggtggggggttgggtgctgtctttaatagatatattcctgaagagaagcctgaaggggtttctaccctgttgtgtcaccaccccccacgcatagatttccctctagtgttttaccgttaatataaagaatcaatgaaaagggacacaaaggagttaacatccaacttggtgtgtcttactttcgggttttagagcggattctaaatgaactcacgcagtgtttctgtagacaacgttactgatgtttaaagcctggaccgggaggccctgctgtgatcaggacttagtcaccctcccctcgggaatcctgaagcccaaaagccaaacccttgtctcaagtccaacaggtcaggaataatgtggacgtccaggggtcagcccagaggtggaacaggctcagagagagtctcaaaaagtttcacttcagcaaaatttggtgagtttaacattgtcaatctttaagaaaacaaaaacactcatggaaatgtccatctggtctggcactacttgaaatgcctgtcacttattcagcagttttcttactgaaacacagtccatctagagtttcctgtttcattgctgaagcagaaattgaaagtaattatgagtcctccgcataatcgttggttttttccctgcttaatattttttcttagccacctggtggcaagagtgtaaaaaggcaggatttcatttaagagtttaatctggtttacgaattagaactgttgtacacactgggaccacatttagaaacacacgccaggtgaaccaaatagaaaagggctaatatttaactctccttagactgcaaaagggtgtaagtgggcaccagcgtctaacatgaaaaccacctctacaaaagaggcgtctctacaaaatattcatgcaggattaatattttatgacacaaggcaatgctaaagagttagaaacgaggacacagagatcttactcttttctctaagtgataaatccttaagccatgaacagcgcccaactgcctgccgtcagggttagatcagaccgcgctagaaaaggcaggagcaacgaccggcttgggtcgcacagttaggcgaagcggctctgccatggccggccgggcgcaggaccagcctggggacggccactcgccgcggcctccctcgcggccgtgtcctcagctctcctcggtcgacctcgtgcgtcacacgcggctcccaccaggcccgtgacccaggacctgcttcagccacgcgaggcgacgcctgggccccgcgcggccgcgggcctgtcacacgcgtgtgtgacgtgtgctctctggagggctcgtctccttgta

SEQ ID NO: 41880 - DNA, 1281 bp, Bovine  19866880889883
  misc_feature (1)..(1): n is a, c, g, or t
naaacgtgacataggttacttccccaaaaaagtactggtaaaggagatgtgtgctgagttgctcagatgtgtccaactctttgggacccccatggactgtagcctgccaggttcctctgtccatgggattctccaggtgagaatactggagtgggtatagccatgtccttctccaggggatcttcccaacccaggtatcaaacccagatttcccgcattgcaagcagattcttcaccgtctgagctaccagggaagcccactggtaaaggaaaacaataataaacctagttcttttcatttgccagttatttggattttcaacaaatgggagtttactctattcaagttcaatatccataaggtagttttcagaaagagtgaaactttttgatgatgttcatatttatatctataaatacaaatgatgcagatttgggacttgtgctatcagatgacaagatacagcccaagcttcagctcttgctaattaaacgaatcaattaagagactccagttgccactgtgtagctgctgttctatagtagcaataacaaccccgcggggaggtcttttactacattaaaatgctgtcctccacaactccatctgatattattagaaacagttatttgtgtcttgctgtcatattagtagcaaaggcaaattatggaaatatgcagaccagaatggtcccagtatgagaccaggttgggttttcagcctccaagggaacaactgctgaaattccaaagttccccaaagttctttaatggaactgataaatctatcagcacagcatccatttagaaactaggtaagggtcacatatttacatactttcctgctaagctgatacaattcaactagatgaattatcatattaagtttaccctcctgagttaaactgatggagttcaaaattgttttcgatggttgtcattaatcgctgttacttcgtaaatgctaactttgaaatctaattgtgctagcgtaccaagggtcatattaataccattcttaatggtaaatctttgtaaaacatgtttattctactgatattattactcaagctttcaaggctaataagaaataaagtatatttattatcaataaaaacttaatttaaaatgtacactttgagatttaaattagctttaagaagttcagcgtgatttggtttcattaagatccctggctaagcttcaaagacatataatttgatagttcctcgagagtccttgggtgaatgccagcagcacagctatgaaaaagctgctcag

SEQ ID NO: 41881 - DNA, 727 bp, Bovine  19866880892619
  misc_feature (1)..(1): n is a, c, g, or t
ntggaggaaaatcccatggaggctcacgttttggccatgcttataaagggagactgagtcggagaaaacggaggtcttggtgagagacctgggatggtgactgtcatgagggatgtgactgtaatcatgcagagaccgctgtcactgcttcccagcttgctgtaggtgatgctgggatttccgttggagacacatcagacttttgatacctgagctagttaaacagttaggatatacgtgtgtgtaattgtgtgtgtgtgcgcgtgtgtgcactcagtcagtcatgtccaactctttgcaaccccatgaacggtagcccaccaggctcctctgtccatgaaatttttcaggcaaaaatactggagtgggtttccatttccttctctaagggatcttcctgacccagggatcaaacctgcatctcttgcatcatctgcattggcaggttctttaccagtgcgccacctgggaagccccgaacagtcaggctacagggtatcatttgcacaagatgatactgttggaagctgtcaaagtttctttgagagccaagagatcaatttgtccactggtatttttaaaccttgattaatgtcgttctgtttattttggccacccctggtctttaattataaaatcatgcagtttggaatgagaatgttggtcccccattctgtgccgagtttaactgaacacatttctctctggtcttctgacatgctgcagg

SEQ ID NO: 41882 - DNA, 1656 bp, Bovine  19866880909391
  misc_feature (1)..(1): n is a, c, g, or t
naaaacactaaaaatgagtgagagaaggtgaaaagatctggcatgcatttattcactcagttatggattcagcaaatatttatcaagtacctactatcctttgccagcatgcctcaagttgggaatgtgtagctaaaacagttacagtttttttttttttaatagcttttcccctcaaaatgatttgttgttgtatgtgcagcaccttgcactgatacgtgtgttctgcaataaaaaacaaatctattcctaaaacaaaacaaaacgcattaggcattgtgttagcattgacaggcactaggagtgtgctaacacagaaccagagatggatagcattgtattttttgaaaattcacttttgcttataaattgatttccttaataagagctgacttgttttaggtgctagaactcccaattctgtacttaattatttttggttagcctatgcatatggtagtcctatatttcaagaaatagattgccaaacaggattttccattgagtttttaaaaaaggaaacgtgtagaccaaaattcagcataaactatgttaactcataagaaaaaatcatttaaacatcaacagattttgatcaaatgctcaaatttcaaagaagtttctaaaacaaaggtgtttacttctcttcatcagtttaatagcagggccttgcgctcgtttttgttggtggtgaactgaattttacaagctctgtaaaatgaagccagagtgaacagaagttgagtcaaaataatggataacacatctgacatcttcttaggctcttgttctgaccacacccccttttaacctaaggggagagtcctgaaggctcagggttcattagctcgcagctgtctgagattagtttgcaatggcttaaaagaaagtcagccccagaaagcagccggcagtggcctggaaaatggacaaaggagaggggcagctggtggggaaaagcatattccgctgagacatctacgcaggggtcaagggggtcctgggccactggaaacagaaccctggagaaagtcttgaaggcagacagcctggaatcaaaggcagcagatggcaaaacagctcaaaacagagcaaggtcatgattcaagaggacttatgaattgtgttgttgaacagggactgttaggcttgtgagtaaggaaagagaacttagcatttaggtagtacctgcattgggccaagcactgggagtggtacttttcacccaagtcagctagcctaacatccagggcacctctttcagtgtaacagttaccctacaggtcatgtgtagtttggcaagtgtaagcgccaatggtcatctctatttatacatatgtttatgagatttcctgaaatcaacctacttgttcatttcttatctgtagtctatactgtttcatgtggaagacgcatgcctttcgatcgtattccaaattgatcaatactgtatagatttcagtctctgtgaagctgtggacagacgggtgagatagtgatatcggcagggactggcttgtgcagaggtttaatcctttgaggaaaaggatagcaaacccaatggcagttgtccaaaacaaataaacaaaagaaccaaatcaaaagagaaaaatgctgctagagaacgaaatatattttaaatgtatttactgcata

SEQ ID NO: 41883 - DNA, 3255 bp, Bovine  19866880915278
  misc_feature (1)..(1): n is a, c, g, or t
nacttcatgttacaggtaagtccatgagcaagtctcaaagttgctgtgagatgttcaaacttcttagctagttagtggcagggctgggaaagtactctgagtgtcttgacagattttcttcctgaacagttgccttgactgtgggtagggagaggatcagagccaacaatccctttgtgaacatctacgcttataaaaatccaaatttacattagctgactttcctccaacctttttaactttatttttttttacaagttttaaagtgtacgctccaatgacagttattataaaatattggatatattccccacatggtataatacatcctcgtagcctgtcgtaccctcgatagtttgtactgcccactctgccagccctaaactggcccctgtcccaccactggtaaccactagcttgttctctgtgagtctgcttcttgtttgtcatattcactagttcgttgtacttttcagattccacatgtaagtgacatcatacagatttcgtctttgacttatttcacttactctaatgacctccaagtcccttcaggttactgcaaacggcaacattttgttcatttcattggttgagtcgtgtcccattgtaaacatacaccacgtcttctttgcccattcatctgttgatggacactcaggttgccttcatttcttggctcttgtgaatagcgctgccatgaacatagggtactttcctctaacctttaaatgttctatgcaggtcatacatagacttctgacaaacttgggcatggttttatggcattgcctcacaactgtgtttcatagagaggtaagcttttaactgtactcacttcaccgaagacaaaattgagagccagaaaatataagtggctggtctcaaaaggcaaatccatttatggtaggcagagtgatgctcaggcctaggtcttcatactgtcaattcagtgctccttctactggtctacgcaggctccgtgccttactctaaaatctgtcttcctataagactgcaggcatttatttctcttattgtttctcctccttcccctaatctgtatgccctggcagaggctaacatgtgcttcatcttttaacatgaactgtgacttgacgctcatgtttaaaattgaggcgagaaccataatatcattcctggcgtctctgggcatggcaaaatattgtgctgatgactttcctcggtgtttgcaatctgtttcattacagctaatgtggacctgacatacaatatatgagtcatttattaatccctccaaatttacacttgctgaggcttctgcagcctgctcagtgaacacatccgctctcacctgtgataggaaccatgctaccttagagaccgatcctacccccaccccggccatcctccgtgaccagctttctttcccaatgagaatcgctccgttgacaagggcatccagtgtggaacttccctctgaagtgattgcagtttatctttccagtcaaaatgggaacaatttgtgctgtcttaggactccagagctgctgtaaattcacgtaatagatttttcagtgcctagtaagataattgcattggggagaggactgaagcgaacgctgggagctgtgaacgcggggcccctcattccatgcggcttccagggtgacctagaaaccggggctggaggaagacagctttgaattcctcatgctaaattagttctgagatgcttctgggcagagactgccagctgaactctgttttgacagtgggaatatttataatgaaatgtaatgaagtaaaacttaagtcctaaattgccccaacacggaagcactaaaattgcaattctgggtctagtgacacctccagttaccggaaatgtgaagttattctctttggaaaatgacttcactttgaagaaatgaatactggctaagggttatgacacacacacggggagcttcaaatccgctcccttgggttattgctgacctcagatgagcaaattagactcaccgcgtctctctctctctagaggtagtcacacttagcaacaagccttgttctggggcttatgcattggctgtgaaacatagtcaaacatttctaaaaatgtgaatacgaatatgtttaaattcaatgtaaaccactgaatgtggtttgggagtgtttgaagcagtggtaacaattgatgggttgcaattttaaaacctctgtgctatcacctttatgtaaggacgctcattgctgttgcttcagaactaattcccaagagcaaagaaaatttctaacacaagttattggttgctttgatctttagtgaatgaattaatttcttcctttattcaaagaatacttactgtgtactcactgccatatcaggtgtcactcttggtaagaaggcctcaactgtgagtgtgactaatgtggtcatttcccatccagatattaacaaaataagcagttctcaacattcagggcagttttgttttatggtcactgccaacagagagttagcgaatactgcgcccatagtgcctaggggaaatacagggctaggttcctatgacccacagataacaacacttttgttaactgatcggtccataatcttgttttgtgtgtatttctgtttaaagactgtaactctcacttgaatgaacattgcatgcgagcatggtaagtcgcttcagttctgtctgactgtatgtgactatgggctgcagccagccaggctcctctgtccatgagattctccaggcaagaatactgcagtgggttgccatgccctcctccagggggtcttcccgacccagagagtgaacccttgtctcttatgtctcctgcactggcaggtgggttctttaccactagtgccacctgggaagccccagttcagtcagttcgttgcatctgactctttgagacccaatggactgcagcatatcaggcttccctgtctatcaccaactcctggagcttgctcaaactcatgtcctttgggctggtgataacatccatcttatcctctgttatccccttctcctgccttcagtatttcccagcatcagggtcttttctaagactcaactgaacacatattttctctgtaggcagtaagtactttagggctggagttggggccattttaaaggtgaagccaccaagagataacacaagggatgtgaaaaacaaggctttgaatatacagggacaaggacacctgcttacagcctgacctgaaataagaaggcagagcatcac

SEQ ID NO: 41884 - DNA, 955 bp, Bovine  19866880924175
  misc_feature (1)..(1): n is a, c, g, or t
nctgcagtgatttggagcccagaaaaataagtctgacactgtttccctgtttccccatctatttcccatgaagtgatgggacactacaaattattattatttgttctgcagcacacatgcttattgatgcatgaaaacgtactttcactctcttcactttttttttgaaattttacaaatgaatgcagttatagtctaatataactttctttacaaaaataggcaggaagctggatatggcccatgggccatgatttatcagctcctggtcgaaaccaatattgtagccactaaccacaagtggacatttacatttaaattaatacaatttaaaattccttttttcaattccagccactcaagccacatttcgggtcctcagtgaccacatgcagccagtggctgccatatggagtaacacaaatacagaacatgttcatcatcacagaataaatgcatcgcccaagatcttcaaattacattagaattcgctgggtaagagtaggggggagcattttatttcttaagatactaaaccctagtcatttttgacatcctgaatatgaatgatttataatagcatcaagtagtgtgaaagcttcatattctgtacaaaagtgccatggtgtgattttaagcaacattttcattttcactagagacaaggtattaaaaagcatgctagaattttatttagaaaatttaagaatggaaaaccaaaaccatctatacagtgaagattttaaagttggcctccatttatcttttttttttttaataaaaacctggacttccctggtgatacagtagataagagtctgcctgccaatgcaggggacacaggtttgatcgctgatccaggaaaaaccccggaaacacatgcccggagcaactaagctggtgtgccacaactatagagcccaaactgtagagcccatgagcccacaactgctga

SEQ ID NO: 41885 - DNA, 1053 bp, Bovine  19866881031323
  misc_feature (1)..(1): n is a, c, g, or t
nagtcctggtaactaatggccggatgggaagggttcacgtctaattgaactgttgaagcttaaaaagatgacttacaccagtgaagctggccataggatagctctcacactcctggtctctgttctttgcaccgtaccaccttgtttgctaaggtctgcagattcctagaccagtactataaaagctgtcatctctacccattatcagaaagttctagaaatgagcagttttgaaaatttttgagacaagtctcaagtctactcgtcaaaattaatgctgttgaagttaactgctgaaacaaaacttttttaagtagttcttttttttttttaagtttatttttgatgtggaccacttttaaaatctttattgactttgtttcaacattgcttttgtttgtttggccacgagtcatgtgggatcttagttccctgaccagggaagggtgaagtcttatccactggactgccagagaagtccctgaaactggttttaaatgataggtaaaactgaatttaaatctacagggaacgcattttctcaaacacttatcaccagtaggaagcagaaagctttattggcttcagaaaaatgccacatatttaaaaacaaaatgactggaaacgcaggacactcaagatggttttgataaaccgtgttaacaggtttcaagaactcacagaactaatcagacttagaacacaggcgataagactataaacctgagattgtttctgggtgacttaaggtcttgaggataaaaacctcaagtgagagttagctctccttcagttacttattgagtattattatgtgccaagcatgggtttagggctttatatatgttttcttatttaaactttccaataagtctgtgaaaaaggtagtattatccaccattttaagggcttccctggtggctcatttggtaaagaatccatctgcaatgcaggagacttgggctcgatccctgggtcagggaagatcccctggaaaagaaaatggcaacccactctagtactcttgtctgggaaatcccatggacagggaag

SEQ ID NO: 41886 - DNA, 1512 bp, Bovine  19866881260333
  misc_feature (1)..(1): n is a, c, g, or t
natcatatgtgataaagaaactatatttccttatacacctgataagtaatgaatgtgaacgtgcatgctcacaatctaactgaagggacagctcccaaatcccaaactaggaaacagatctgcaaatgttaagtgaggatgagaacatgccgaaagccattatatacctcatcagcccccaagcaacagacagatttctaaacaacatcaaacaaatgacagaaaaccataattctgaacagcagatgcagattctgttgatgctgtcattagatgagtggaagctgctgctgctaagtcacctcagtcgtgtccgactctgtgcgaccccatagacggcagcccaccaggctcccccgtccctgggattctccaggcaagaacactggagtgggttgccatttccttctccaatgcatgaaagtgaaaagcgaaagcgaagtcgctcagttgtccccgacccccagcgaccccatggactagagcttaccaggctcctccatccattagatttcccaggcaagagtactggagtggagtgccattgccttctccgtaagtggaagctagatgtaagtataagccatacagaggtagggaatgtctctttaaaccacagttcaacaccacagagaggtggaggcagacatgaagaatccttgttaccatgccaaacatactgttcacacgtaatttttcagctgaagtgactaagcagcagacacagaggctaaatggcatttatttcactagtgcaacactgagaacctggcataaagaaccaccctgttatctcagtgctgaaaactgaggggaaatgaaatcgagggcaaaggaagtaacaggtctgagacagagttagggtacccggcctgacaaggaaaagctgcaagcaacctatatgtacagccaaccacctacaccactgcaacataaataataatcagaaaacaatcaatattggatctctgcaaagaattttccccaaaattttgaggaaaaaaaaaaaaaaggtaaattaagagcattcaacacaagaactcctcaaagaaatacaggaagagttcagataaataattctccaaagtctcaaagacagtcataggaaacgtgacccttctttgaaaaaaaaaaaaaaatgagctcaaagaagaaaaacaaaggttcaaagaagagattaaacaacaacagaaggaaatgaaaatcaagctggtagaactcaggaaaaaaatgaagagaaaaataacattatagagataaaagcaacgttaagaagcaccaaaaatagaataaatgtgactaaaaagaaagacaaggactggaccaattctccttcaaaagtactacaagcaaagaagaatagggaattccctggcaaaccagtggttaaagctccacactttcactgccgagggcccaggttcaatccctggtaaggaaacgaggattccacaaatcatgtggtgcagcccagcccaagccactgaaagaaggaagaagtgtagattaaag

SEQ ID NO: 41887 - DNA, 2317 bp, Bovine  19866881300245
  misc_feature (1)..(1): n is a, c, g, or t
nagggaagacctggggattttggtgggcaaagatgacccagtggaggatgggactcaccctgaccagcacgctgtcggcaaaggaggcagggttgtccacctcggtgaagacgggtgggccggtgcccatgatcttccagcgtacatacagcaccccggctccgcccaaagccaggagggtcattctgaagaggaggccccctgtccggagcatgccagggctctgaaaggacagcgcaaggcccccagtgttgaggatttttcaaataaaagtgtggccaagccaggtataaatgtgcagcagttctggctgaacctcgctgacactgggctttaaaaggctgcctgttttagaattcaaagttgcacgaagtactttgaaaatggtgttttaagccagcgggtacgtgacattttccacatctcagctggagacaaaagcagatactcacctctaacgatctgtccttacggaggagcttccggacaatttccaggacatttagtttgcctatcaccaagatgtcaaagatggcattcagaccctaagaaagcaaagcaaggaatcagccatgggacagcctaactgatcaggtagccaggatacgccacaattctattgcagaatctagacgagaagtgtcctgattagatcaccatagataatctcttcagctctaaaaacaaaacaaatcctatgattcctatgaaattagctcatgatatttgtatcaaatttacttatttatttatttaattcttggttacactgggtctttgatgctgtgcacagactttctctagttgtggtgagcagggctactctggagttgcggtgtgtgggctcctcattgcactggcttctctcgttgcggagcacaggctctgtagatgtgacgcgcaggcttagttgcctgtagcatgtggaatcttcccggaccagggatcaaacctgtgtcccttgcattggcaggccgattctttaccactggaccaccaagaaagtcccatcagatttgccatctggtaaatcccctgttagtcacagggtccatagcctgcatgcaagagtatgataagatgccagagagctagagctttggggctcccaggagaagttctgcagaggccccccttaccatttttttttccctaaaactgtcccagagttgtagcagagccagtacctgtgcagtggccatgcctaagatgataaggcagccagcaaccttgaaaacccagccatgtaagtaattacacttcaggaacctggggtgctgcctgatgagggcatatgccctggaagagagggaacagaacatacagactctggtggggctgcagagacatcccaggctcagactcctcgtcacccaccagctctcccttcctgcctggcacacagccagccccacaggggagcgtggtcatgtgactgagttctagccaatgggatgttggcagaagtgattaggcacctcttggaggtttgggcacagaccagagcacaccccacccttggtttcccatccagttggctgtggaggagatgatggaggtgtctggagtagtactggaaaccaccctgaggatggcagagccccactgtgtggaggatggccacctctgcccatgacttttagggggatgaccaataactccaattatgaccacctctatccatgacctttagggagaaaggccagtaactccaatcaagaccaaccgtacccatgacttttagggggatgaccaataactccaattatgaccacctctacccatgacctttagggaaaaggccagtaactccaatcaagaccaactctacccatgacttttaggggaatgaccaataactccaagtatgcaaaacccctggccctaggaagtgtgatattgtagctgcactgatgctaacagcttccagcagcaccaccgcagctcctttctagtaggtatggctgctcttaaagctctgacacctgtggttacaagctgagggctcatctggcctggactctaccctttaccctgcagtggactttccataaatgtggctgctgtagacaacaccatgtagctgaactccctgttggaaccaggcagagcggtcagaatatacactgtatggatggttcaagctgcccttctatgacatggggccttcgaacacagagcttcatggcaaagaggatcaatcataagtcgtcagaagccagtggtaatttgtggttctcagcacaagggtgacatctctcctcagcaacccccatacatgctgggagccattattatccagtacacaggccagcgc

SEQ ID NO: 41888 - DNA, 1163 bp, Bovine  19866881562372
  misc_feature (1)..(1): n is a, c, g, or t
ntgtcgtgtgcaaaatgaacccccatgacggacccccgctttcctgtggctctgaggttaagaagtggtggacccggcagctgaccgtggagagtgatgaaagcggagatgaccttctggacatttaggtggaagccagcgtggatgaaagtccactggccaaaactgactttctgatgtgtgctttcattgtccagtgagcgatctgtaattcatgtataatttaaggctaacttgtaacaagattttttagaactaatttctggatcctgccatgggaaagcataaaattgggtccatcaaagctgtatttgtgatgagttattgccacaaattcaggagaatcagcacgatgacagtatccattatattagacactatactaatgccagatgtagatcattcaaaattccacactatctatgtaaactaaggtatatattcatgtatactcctatgcattatcaccaccccctcaaagagtgcttagcccaaaacagctgatattcatggtacaggaggcataggttttagtttgtgtttttcccacttcttctagaaatactttcctgggagaatttattatttatgattgatctgcaaaggtcagcaccgagctcatgctaaaatgatagtagttttacaaactacagattctgaattttaaaaagtctgttctttttctcatgttattttttaaaatctgcacaagctatttagagatcagaacaagtcagtgtctgtccccggtcactcagtggaactgtggcctgctcccaagagaactctgtgtacaggtatcaagcaaagaattggcctgaagagctgactgatttaaaacaaagctgtacatagatcactcagggggagcatggttacatgaggatgttgagtttctttaaaagccctttaatcacagtttagccacaaaaaaaaaaaaaagtaaaactacatgattccgcttaatttaaaaatcttcacatgtgtgatgttatccttggcttcatctgttacccaaggttggtccctttggccataaatcagcaaagacattataagttggccgcaacacaccattgccgtgttcaattcaaaatgatggccttgctgaaacttccttggtggtccgatggttaagaatccggcttgcaatgcaggggacg

SEQ ID NO: 41889 - DNA, 755 bp, Bovine  19866881963997
  misc_feature (1)..(1): n is a, c, g, or t
ngggatgcgtccaggctcacttggccctttggggattttaaggttgaaggtgactagcacacctcaaggtcaatgctgctccttgccagacatgtacaccagttgctgactggagggttttggcccttcggttggcatacactggccctggcgctgaagagaagttgcatttacagctcctgggaaatagaggctgcgttcaacagctgccgtcactttatataaaccaggcccgagatgttgccgcacgtacctacaatgggcagcctcctctctcgacagaggagggcctggagcttgtggacattacagactaagcgaggaggattaattagaccatgtccacaaagcacattgagctccttggagggaggccttttaattacagtactggccaggagcaagtgggaaaatagggaaataatatcagttttatcaggagtacaaaggaacactccatttggattcctttcttgcctcaagtaatccatctgtattttcccaccttcttattctagaacctagatatgttttgaataagacacagtaatcttatatcttcatttccttgtaggatgtgctgtactattctttttactgtcgttattcagacatattattattctgctcaattcatttttgaaaattgccttttaaaggcagagagatgtttcttttctctgcctattttgaactgtgtatgaaatggagaatgaaagaatacttaccctaacttggttgcaggatttggttag

SEQ ID NO: 41890 - DNA, 877 bp, Bovine  19866882155714
  misc_feature (1)..(1): n is a, c, g, or t
naagccttccactttccaggctaacccgcttaattggtttggtctaaagggagggaaagatagagacagaggctttgaaccatcatccctgtgtcttattctctctgcttgatgatgtgtaacacttacttcccacctgtctttcatgtctccagtcaaattttctttcttaaatatcatgccctttgagctgataacattttccaatgaaaaaatgcaccctgggcacctgctcagggtagaggtctctagggctgtgggcacagagtgccgagtgatggagtcttccctgcacacgggcatcactgcctctgtacgacccacagaagagccacagtaggtcggagtcaacccagccttcccatggaagcagctgacccagatcctagacccaaagtgaaaagagtccgttgtcagatcacaccacagtcagagagtttattttaacagatggccgagtctcatgaggttttctgtttctaaggatgcttttgtgtttccaaagtttcatgtacatgttttttaacataaatctttttcctctgcctctttgaaggttgctggtgtcgtcggccgtgcagacctcctgggcgccctgttttttctgctgtctttccttggctactgtaaagcgttcagagaaagtaagcaggatgttttgccctcttaattttgcatcttcttcgtgtttctgttctgtcgagcgtgttttaacaggtgggaaggtgtccgttgctataagtttatcactttgaaggaatgtaggccaaaggtgtcaactgtttttagtgatgtctgttactcggttgctttttcacgacacaaaggttgtgcttcaacattcacaatgttcaggaagcatcttgctgagtagtga

SEQ ID NO: 41891 - DNA, 961 bp, Bovine  19866880344258
  misc_feature (1)..(1): n is a, c, g, or t
natggactggttggatctccttgcagtccaagggactctcaagagtcttctccaacaccacagttcaaaagcatcagttcttcggtgctcagctttcttcacagtccaactctcgcatccataaataaccactggaaaaaccatacccttgactagacggacctttgttggcaaagtaatgtctctgcttttcaatatgctatctaggttggtcataacttttcttccaaggagtaagcgtcttttaatttcatggcttcagtcaccatctgcagtgattttggagccccccaaaatgaagtctgacactgtttccactatttccccatcccatgcttattttttaaaagtaacaaattacagaaaatgtattcattgacaataagactggagaaacagatagctttctctctggctaaaatgcttctagcaaccaaattgcttatctgtttttgcctcagctggttgctgaataattggtggaaacctgtcctttctctacttctctaagttaaactttaaaaaatcccagcaatcttcccaggaatgttctgtgcatcctgaaaagttattgatcttcctgtttaattctcctctgttctaagaaataagtgagatttaaaacttagtgataaagagacgtgacaggcatctgaagaggtgacagaagctcagtttccaaagagcagtctgtaagacttttgttactttcatttcaaatgtgagacaacagtgctctctgcccatgtgaatatccaagaccaacaaatgacagcccaagagaacagagtctgataaaaatgaagttgattgcctggagccacctgccagctgaaatctgttgataagcgctccataaattgtaatatgaacagctcatcctccagtttcagaggggagccggctacacccaccacacagataacagtctcaggttctccagtcggagggaaaaggttat

SEQ ID NO: 41892 - DNA, 3279 bp, Bovine  19866880347917
  misc_feature (1)..(1): n is a, c, g, or t
ngcagtgtctgacatatagtaggcatttgacaggtataaactgaactaaagagaattttgtggatgagggtaggtgctggggctggatgagacaggcatagccgcacttagcttccatgggccccagagacagtgggaaccatggtgaggcaggtcccgtggtgcagaggtgagcatgaatactggccttgcaccaggcactgtgtcaggtgctacgcatttattgagcaccgaccatgttttagaccctgtaagtgagtgcacctacgttaaatactttttactcagaactgctctacaaggtggtatcaggtccattttgcagagactggcatcaaagctggaggggctcaagcatagatttggagccagaacccaggtcatctggtttccaaagtccatcctccccccattaccctggcaacaaatgtgctggcagataatgtggtccaggcactagatggagtctgaagtaaagggacagagggggcaccatctgtgctcccacctaccccatccccagctgaactcacctcaggctccatccttgcccctggtggtacgccaactgctttgcaggggtgaaaggtcatgcaatattgtgatttataatacgtaatatatatttggtctgggtctcatttctggctcacagctcctaaaacccttggaatttcctaagtgatatgggcaataaaggaatcttctgttattcgtatcaaatgaatgggactttcaatgggagtttcagttaatataatgacttttaggaaagcttcacgataacctaagaaggggaactggttgccaggggaaaccgtgtgactagaggctggaatctctcagtctcaccgtcctctccccctgacctccagggaggagagagtggctggaggttgaatcaatcactaatggctaatgctttaatcagttatgcccacatgatgaagtttccataaaacccaagaggatggggtcgggtgagcctcttggttggtgagcaccagaggtgctaggaggtggtacagctggccagggacggaggctccacgcctcttcccacagaacttggcctacacatgtcttcatctggctggtcctttaataacctttacaataaactggtaagctagcaagtaccagctggggttgcagactcggtgacacattgctggatgtgtggaaacaccatgacacatttggtgattagacgcgctagaagtggaatggagtactgagagtggaggagcaccaggagggccttctcctgagcaggtaagaaggtggggcagagaaagacagtctggccatcaggcccaccttttggcagccttgctctcagatgctaaagtgagatgaggaagccccatttcagagcactgtcccaatgccactggctggttatgacccatcgtgtacagaatggaacagtggagaaatgagtagaaaaggctttggttccattgtacaaatagcattgtggagcccagccagcttcacaccagattccaccttccctgcacataagaggcaccaaaaactagggcagagaatgcacatgtattttcctaattgtctgacttaacgcttacaaagtcatttctgtgtctgactccacccctagcctgatcatatgccctgttttagagaaaggtaaagaccaccttaccaggtaaccggatgggcttccagggggcagagtttggcacgtaggcatgctttgtggccgtgacaatcagctgactgcccagcttatactggaatttgatgaaggcgacgccatctgtccccgaggtaccagaggcaatggagacctggttggtgaaaatctcaatgagcgcgtcagggacaggctgatgggtgctggcatcactgatgtggaccttcagggtgacctctggaagaaggacagagcaacagagaacggttattaactggggaactccaacagcgattctgtaataacagcgaaagggaggtagcaagtattcatgggatatgcttagaaaatctagactggggacttttctggtggtccaatggttaagacttcgtgcatccaatggttaagacttcctgtatccaatgaagagtgcacaagtttgatccctggtcggggaactaagatcccatattctataaggtgcagccaaaacaatgtttttaattagaaaaaaaaattctagatctacatctaaaatataaatcgttttaaccagaaacattctcttcttagcaattcttttttactttacatgattccttatcttcctcaaaaccactgcctataacaaactcctttcctcctggctcctcctggcggccccccgcccccaacaataataattaagagaaatatctctattcctttaagacactgtgcaacaaataccacgctttctgatcctgcccagtgttgctggtaaacacagcctaagcaaagctcaggctgctacacaaggaccctgcaggcactaaggtttgcagcaaaattgtgacctgcagcaaaattgttcaacaatctgtgatgaacatggatgtgtacagctcagggtcgctgtgctggtaatcatgaagacatgactgaaaagtagtccctgcacacagtaccacccaagggggtgggcagactatctaagcaatgtgtcctgcccagaccatggacccgccccagttgttactccatttaaggaacctcctcccttgggagggaggaaaagcacctattacttggttttgttggatccctcgtgctgcagccttcccaaaaaatcttgactgaatttctcttcctgattcctactgattaaagtgttcaagggctcggttggtatcacacagttaatgcgttttttggctagatgaccataaggaatagctaaagaaccctagacccaggagttacatgaggtctgcaccaaataaatctctcaaaaaccttgcagagaaaaaagtgctacaaaaactgaacctggttactccctactataggaggagaaaactactgccaaaagagggataaaatcaacatcaagaaaatcaggcatatggcattacaaagcatatctagtcgattcctgccaatcttatcagtgttatcttaatgcagattcgcagcacacatttgctttcttatggagctggtcttacttgcccccagttataaatgaattaatactctcatagcagaaaccctctacaacaggacaagtgggaaggtgctttgtggtgttgcacacggacgatttacataatcttgtaatgcaacattcacagcaa

SEQ ID NO: 41893 - DNA, 1723 bp, Bovine  19866880487221
  misc_feature (1)..(1): n is a, c, g, or t
nctgatgccataaagaagatgctttcctctaaaacttgttttgtggcttttcttttatgtctttattctccctgggattcgcatttgtgtagtttccgatagagatctaaaattgaacttttcccaaggtatatggtctgagtatcatttattgacttgtgcatttcttcccccactgatttttaacattgcttccatcctacaccaagctcctctagatttctggatttgtttctagtctcacttttgttccagcggcttttttttctgcgccagtcccaccatgttttaaatgctatagctttagaattgtcttgatatcagtaagatctactcctcaagttccttcttcagaaatttcttggctttcatttgctcttgttttttcatacgtatttttggatcagttcgtcaaatctgatttgacaaaatcttttggaatttttaatgagccctgatggctccgcagtaaagcatctgcctgcaatgtaagagacgcaggagacacgggtttgatcgctgggttgggaagatcccttagagaaggaaatggcaacccactccagtattcttgcctgggaaatcccatggaaagaggagcctggtggactacagttcatagggttgcaaagagttggacacgactcagtgactaaataacaaccatagaatttgctgctcttccttatcatattcccctaccattctctttctaatattagggctgctttgttccagcataagctctggtctccatctccttctcagcttgcttggaccacacacctgcccctttgagccagcaacatgggaaagcagctcctcctgttgcagagtaacctagtggatgaggctgtggaccagagtgagacctcctgggatcaaattgcctccaccatttactgggcaagttcactggcctctctctgactcagcctcttcatctgtaaaataggggtaggaatgtatctacatcagagctctgttctgagactggaatgagttcatccacataaaggactcagaatggtgccaaaagctagtaactaggttgttcttattgcctgtgcttcttctgatcgtcatctcttcactgactttggaccctgggactgaatatgattgttcagataggggttcaaactggaacaaagacacagatgcagactaccaaggagcttcattcaagacacatactttggttcttctctgtgctttaccaaagctgtccctagcatcatatcccagaggaggctggctatatgttcctatagggttagtgacattctcatattaggtgggaaatgctcatatttgagagtggaacttggtttcacagactggattgattcaaaaagcttatgttattcaaggcccaatactaagctaataggtacagcataagctctggtctccatctccttctcagcttgcttggaccacacacctgccccaaaccattcttacttataatatgaatttgttgtcacaatgcattgaatcatacttttttatttggtgggagggacatgtgcataggtgtggtagtggtgatattgtacataaatacacaaatacataatttctttgttccttatagtatgtcaagaattcttgagtcgattctacaattccttgatagcaagaggagtcaacttttctctggacaccatagaaaaagaattgatcaacttttgctggatgtcaaaggaaaagaaaaccg

SEQ ID NO: 41894 - DNA, 1291 bp, Bovine  19866880534467
  misc_feature (1)..(1): n is a, c, g, or t
ntaaatgtttgcttattcatatcagttattaagaaggaaatagaatttgtcattttatttgctagcattcaggcttctcaaggggtgcaaaataacccaaacttaaatgcagcagaggctcagaccataaagaaaagtagtgagaaacagtttttaaaactttaaaacataaaaatagcaaaaatttccaaattatggtttgatttgaatcaatagatttattggtagaaatgccatacactgagaatttatttttaggttttttgacagcttataagcaggctatgggtatgataatttttctatgtgaatttaatattatatacatttgtatgtagatgaataacctagactttttcctcccatgatattgctctgctgagtgcttaatatcctgttctgatcataaacctactcttaaaagatctattacagtaggttttgacattaccctttacaagaaaaagatatcttgtttaacttatttctgctgtctcttttgtgtttatgtgtttttacagagcaagatttgaacttctgtgttctccactttttaataaatgtatagaagcaatcagagaagtcttagaacaaagtggatttacagcagatgatatcaacaaggtaataacttttgtatttttcttatttatgttaggaatagttttcgactgggaatttaggatatggccccttggtaccgaaagagtatttttatacatgtaaatattttcttaccttacattaggaaataaggaaattttgattaatggctctaatgaactcacagttctgtgtgtttattagcaaaaaagattaaaattctttttcagtgtattttttgtatataagcaaaaactgacaaatattagagtgtttcttaggtgtcaggcactgtttctgagtgttttacatgaattaacttgctgtatcttaaccaggaactctatgaagtaggtgatattatttatctccattttataattggaggcacagaggtacagagatataagtagcttcatggttatcatgtggctagtggtagaaccaggatttaactcagtgtggttcccagttctgcttttaaccagtacaacggtctcctctctgcttgctgagaaatattgcatatttgcttgcataagaagatttagagactttgaagaatattctactggtttgtagtttttttcccaagattatttctactctttcacgatatatatacattttttcattgttgttgataaaggaattttcatataagaaaactcagaaaatagtccagtgt

SEQ ID NO: 41895 - DNA, 3006 bp, Bovine  19866880622931
  misc_feature (1)..(1): n is a, c, g, or t
naattttatggagtatagttgatttacagtattgtgttaatttctgctgtacagcaaagggcgtcagatatacataaatacacattctttttcatattttttctcattatagtttagcaccgtatattgaatgcagttccctgtgctatacactgggaccttgtggtttattcattctatatataatagtttgcatcactgattccaaactcccaatccatctctcccccaaccccctcccccttggcaaccataagtctgttctctatgtctgtgagagactcttgttacttttattaaattgatcaatttgtgctccagatgtcaataaactactaaggatacagagtaattgaggatggtgatagagaacatgggtttaactttggaaaacagcatgaagtttcctcaaaaagttaaaaatagcactactatatgatccagcaagcccactcctggtattcgtccaaaggaaatgaaatcaggagtctgaagagatatctgcacccccatttcactgcagcatttttcagaatagctaagatatgaaaacaacccaaatgtccatcaatggatgaacggataaagaagatgttatatagacagacagacagatattctgtagccatgagaaagaagtaagtgctgccatttgtgacaacatggatggaacttgagggcattgtgttaactgagacaagtcaggcgggaaaagacatactgtatatcacttacatgtgaaatctaaaaaacctgaattcatagaagcaggaaaaaaccctcaaaagctgaaactcatagaagcagagatcccctggagaaggaaatggcaacccactccagcattcttgcctggaaaatcccatggtcagaggagcctggcaggctacagtccacggggttgcagaagagttggacacgacttagcaattaaataacagcaataccatagaagcagaatggtggctaccatggggtagggatgcgggggaagaagagagatgttggtaaaccttaaaactggtagataaatcagtcctggagagctaatgcacagggtagagatgatagtcaacaatgctgtactataaacttccaaagttgttaagaaagcaaatcttaattgttcccaccacaaaaaagaaatgataattatgttacatgctagaggtattagctagaactaaggtggtaatcatattgcaatatacaaatgtatcaaatcaacacaccttaaactacattttttgcacctaaatgcacattattatatataattatatctcagttaaaaaataaagatgaacataggttttggagtcaggcagacctgaacttcaagttgctcatctataaaactggattaatgatatttccctcttagggtattatgaggactaacatgacaaatgccaaaccgttaataacctttaagaacgatttgttattatcttttacaagttgatggaaattcaggaatccttgaagacaatgcaagtttttggggtcaaggtggcagctagagcaagattatcatcaccttaattatatgtcccttttgtcactgcttatcttgaccatttgttttgaacttagcatttacactgctttttctgatttggtttatgtcgtctcctaatactaaaacttgtaaagtttggactgtatattgatgcacataattcattccttattagtattattcaattggtcttttgcgtttctgctgaccccagaatatctattttagatttgaaatttttactggacagaggtaagacatgcaagcttagtctgcgtattgtcatcccatcaccttttttggattttatttttcagtgtccctgagtcacaatttctttaaccagattctctgcagggggatagtgttgtaatttctaataaaagggaatctaaagaactatttattgaccattcattcatttaaaaagtagttattgaactcttattatgctacactgagaggaggaagacaagtaaggcaggttccttttcctcaagatgtttgctgtcaagtagagcaaaggaataaagggacaggcaaaagaagcttctcagttggatcaaagaaaaagtacaaggaaggaagtgaagtcgctcagtcgtgtccaactctttgagaccccatggactgtagcctaccaggctcctccgtccatgggattctccaggcaagagtactattagtttctgttctttcctaatgaaactgtagctttcaaaataccatttgacttaatgtaatttaattaaacaaatacatctcgatgacctactaagctgagtccttgtgaatgaataagacaacaccctgattctcaaggagtctggaggactggtgctatagatttagatttccttgtatacccacctgggcccctgcccctcgttaagtgacagacaaaattgaaggaatttatcatggcacacacaggatcattaagttctccagaaattccccttgtgctattctctataaaacagaacacttaaaagagttgcttcacttcacatgtcttgataaataattattgaggtaagatgtgtttctctaaaatggaaaacactgtaagtttcctgctggaattgactgagagtagtttcggcagctgctcaaattcttgccgatttctcctgaatggatccttttgttttgatggctttccttatgtaaaccacctttattttctttggagaagactcgacaaagcaaaatcacttgttaatattaggataattgctgattcccttcctttctggcactgaagatgtaagaaagatcttacatctttcttacatgtaagaacagagcctgccctggcactgtagagttcatctgtggaaaactacacaacacaaaatgtttctattgcctcaggggaattcagtgtgtcctttaaaacacattttttttttttttaattacagggaatttcctgttttttttcccctaaattaaagcacgggttttccttttaatcaaca

SEQ ID NO: 41896 - DNA, 2036 bp, Bovine  19866880636375
  misc_feature (1)..(1): n is a, c, g, or t
nagcctaattaaaaaatggttttagtcctgccctgtgatttttttttagtggggtggaatagaaatttacattgaagttttaaaaatctgatcgaatgacactgaagaatttccagactgaaataagaaaacagtaatcttaagagggaaacttttctcaagtcaatgtaataggcacttaaacctaacacaagcaaaacaaggctttaaaaaataatttacatgaaattatttgtacctatatattttaagatacttactgctatgttgccttctgggagttttgctggctgatctttataaggcatcttcttaacttcaaaggacaccagggatgcaagagaatagggatcatttttcctctgaaattaaaaatatttatttaaaatatattccatgtaaaactttaaagttatattggcagtcatccagttgttttcaatgttttccatttccaaagaaatattccctccttctttcttccttttctctcttttttactttttttttttgctatccatctatccattcatgatccattcgcttattcatccatccatccatctgttcatcatccattcatctttcatccatccatccagttatctatccattatccactatgtatccatcattcattcaaccatccataaatcatccatccatccatcatcatccatctatcatccatcatccattcatcaatcacccatccattatctgtctagacatccatccaaccatccatccgatcattcatcttcttacttctaaagataatctatcttattaccaaaagacttggcacaataagggtaaaataaaaacagaaaatcagacatccttaaaggagtaagcacaagtgctcttactgaagaacatagttggggatgacatcgtgagtacaaattcttgttgtctgatggaacgaaatattttaggagagagactgctgctaagttacaaagaaattagtcatatttccttttatagacaacaaaggtccatcaagtcaaagctatggttcttccagtagtcatgtatggatgagagagttggactataaagaaagctgagcgctgaagaactgatgcttgtgaactgtggtgctggagaagactcttaagagtcccttggactgcaaggagatccaaccagtccatcctaaaggaaatcagtcctgaatattcattggaaggactgatgctgaaattctaatactttgaccacctgatgtgaagaactgactcattggaaaagaccctgatgctgggaaagattgagggcaggaggagaagaggacacaagtttttggtggcttccattctcacattccaaactcatctggagcaggaaccagaactaagactcccatgaacacagtactgagtagtgcaggaagaaattctgccaccctgtggacattccccccaaagcgccatataatctattgctcatggtcagctcatattcacaagaactgctgggctcttgatgatgcctccacttgaaaaaaagtaaaggaaacaaatggaaaataataaaaaaggacaatctaggctttcttgatggctcagctggtaaagaaccctcctgcaacgcaggagacacaggtgacgcagatttgatccctgagtcaggaagatcccctggaagatgaaatggcaacgcactccagtattcctgcctgaaaaatcccttggacagaggagcctggcaggctacagttcacagggtcacaaagagcaggacaggactgagcaactaagcgtgcacgacactcaagaagaaaatatctgaagtacatcaactcacatcatttaaaaatattcatgaaaagctgttgaacgtcacgaattatgacagacatgcaaaccataactccagcgaggcatcactcagcgccactgggaaaggccatcgtgaaaaatccgcaaagaataagtagcacataaatggtaaagatcactacagagagaagcatggacctgcctccaagagataaaaatagacctgctataaaatcctgcagaaat

SEQ ID NO: 41897 - DNA, 1729 bp, Bovine  19866880667695
  misc_feature (1)..(1): n is a, c, g, or t
ntctgctggatgtgagatcttcctgaatagggctcaaacccctttcccctgcattggaagacagatttttacctactgtaccactagggaagtccaacaagtcattcttgattgttttcgtctgctatgtacactgcaataaacccaatacttagaataaagcatgatgtaaaacaggtgtacaagaaatatgaattgaacgacttgatggacggatccaatgaaatccaccagccaagtcaccacacttttcactgccacccacagtgggcagtaacgctgattgcagggcatgggatcttgatgtcctggcagatactaaaaggcattgaaagagttgaaaactaggctttgaggaagaagaaagttattttctaactggatgatttacccctgcccgatttacccttgaatactttatttacaggaaatacaattccaataacgtgcttatttgtgttgttttcctcaggttcatgtggataaactagacatgtttcgaaacatgcctgacattctccatcatctgacaacagaccgtgacactcagatccatgcgtgtcgacatccaaaggtacatggtgaactctttttcttactgtttgtatgattcacagaaaccaaaattttagattcagaaggaacctcagaaatcccattttgtaggctcttcaatttccaaatgtgaaaagtgaggctgagatcccggcattagatcagggtcatgcagcgttacatcactatatttccgttatcataaacctaactagtaaacagacacagatacttgtaatttctaatgaaatatatttatacaattgatatatgtttatttgtaatgaattatgtaacgaacaatttatttgtaaggaaagtagtaacattagagcttataattgaaaatttaacaaaaggtaatcaccatccattgtggtttacttttgaaactcatgacacatgcatatttataaactttattttttttctcattggaggtaaatatctaaatataactttgctttgatttttttaaaaattttttggccacaccacacggtattcaggatattagttccccaacctgggatcaaacccaaccccctggattgcaagtgtggtgtcttaatcactggagcatcagggaagtcccttaaatttggaagtagttacgtgtattggtgatccagtttcaaatgaatatttttagtgtctttgaaactcactggtaattgactttctgatgccatcatagaacttccttctcttattaactgccagggattcaattttgaatttggctttaacagttccattttaatttatatagtcattcagtgtaactcaactactaattagtgaccgtcaaatgcagagggtttgtgtgatcataatttttctctaaatttttaatcttggcattcaaatgctgagtaatttttattttagtaaatagcacatttatacatttggataatcactgtagtagtaatactatgtaactccatcagccaaaatcctaaagtttctttgtcctaaagtaaagcaaaatttaaaaaaaagattgttattcttaccatggagtattctatttcaaaccaccacaggagagatacaagctaagaaattcttttgatgattgttcagcttcacattataatttacgtcatgaatttacttcatcattttggttatgtatatatacacacaaacacagacacacaccatgcag

SEQ ID NO: 41898 - DNA, 2087 bp, Bovine  19866880728418
  misc_feature (1)..(1): n is a, c, g, or t
nagggttcagtaatgttagtgattattgttattccatactacattgatttgggttttttcttcaattcatgttctacccagaagcatgtaggtttttctccctggccacaccctgaagcatgcaggatcttaattcctcaaccagggatagaatccagaccctggcagtgaaagcactgagtcctaactactgttcagccagggaattcccaagaaacatgtaggctttgtgaatttttaggttggaagtcgaggtctacttaaaattaaacaagaattttaagtagcacaaattctgtcatcttgtgttcagctgcttcagtcttgtccgactctttgtgatcccatggactgtagctcgccaggctcctctctccatggaattttccaggcaagaatactggagtgggttgccaattcctactccaagggatctttcccacccagggattgaaccggcatctgttacatctcctgcattggcaggtggattctttaccattagtgccacctggaaagtgtcatcttattagttcccaaaatacagaggaaaaaaaaattttatcatgaggtacccattaacctaagcacacttgtgagtcttttttaatgttaatatccaatattttacatacatacactgtgtgcattgtagctttattagattcctaatgtgaagaggttcagatactttactaagaacttctaaagaatagaaaatatgtagttaactgttgtaggctaagcagttgttatatgggagactgcaggactcatggagttttgaaagacttttgctaacaatacttaaaggacaaactgtttcctttctctctgtttatgataattctgacacctagtaagtgggtgggggttctcaaaccaaccagttctcctcctctctggataccaaatggatgtcttacaattcacttccattctgacagttgttcagtcactcagttgtgtccaactctttgagaccccctagcacgccaggcttccctgtctttcaccatctcctggagcttgcttaaactcatgtccattgagtggtgatgccgtccaaccatctcgccctctgtcatacccttgtcctcttgccttcaatctttcccaacatcagggtctgacaatagctgtccaaaattagcccaaatgctaccgattaagggctcagtcccatgagactgtcctctaattcagacacaagccctaagtggtcatctgtacttctgaccaatcagctatatatcagaggttcccatgcatccctccctttctttcactataatgactcccagaactcagaaaaacaatgacttacatttgctggtttataacaagtatcataatggatgcagatgaacagccacatgaagaggtgcaacagggtgagatccagaagggtcctcgccatgggagcttctatccctgtggagctgaggtgcaccaccctcctagcacataaatgtactcaccagcttgaagttccccaaagcctgtacctttgggactctcatggcagcttcatcaattatggcaggtgtgatcaatcatgaactgagctttccaccccatctattctctctgaatgatgggaagtgagcctgaaagttccaagattcttatcatggtttgatctttttggtgaccagtccgcatacaggaggccaccctgagtctcctcatcagatcagaaagatactctggtgactcaggaatttgagccaggaaccagaggtagagaaaagatatatatttattattatgtcacattactaaaaaatcaatgttgttgattgatttgaacccagagaatccaaagaatgcagagtacttaaaaaattggcatgggcactttgatttagaaatcagaatttcctcatatccatctttgtttccgcagtattttcttcactaagcctgggcctgcttccagaacgatccgctaccctgatggtgtatgaagatgttgtccagatagtctcaggattccaaggtatgtctgatacttaaaaagaggagcgatggtaactttggggccaactgttaaaatatgaggaatgggtagtcaggtagtgatg

SEQ ID NO: 41899 - DNA, 1370 bp, Bovine  19866880748148
  misc_feature (1)..(1): n is a, c, g, or t
naggtacctctacgtttctctatgagtaaactttcgttatccagcagttaggaatggaagtaattgaattagcattaaaatgtatattgccctataaccaaggtgttatcactaagcatcggctgtcattcagggtaaagtgctggaaggctgcctggataacaggaagtacacactgactgaatcaggcaccctgtttggccctgcagatggagaatacacttgcattttaataataagtggtcagagctcccctatggaatgcatcttagatcaggtgtcacaaactttttctgtaacagtccagatagcaaatatttttcactttgtgggaacagctctgttggtgcaggaaaagctctcacagacctaacatgaacaaagatggcatggttgtgttctaatgtcttactccacttgggctgctgtaacaaaattaactggatggcttataaacaacagtaatgcacttcttcattctagaggaagccaagtccaagatcaaggtgctggctgattcagctctggtgagagctggtttcattggttcacagaggtgccttttcattgtgtcctcacatgccatgtcctcacatgtggaaaggccaagggagccctctggggcccctttcataaggtgactaatcccattcatgggggctgcgccctcatgacctccaaaggctaataccatcatcactttgggcattaggattctaacatatgaatttggggagaacacaaaccattcagtccatagcactcaatagaatttcattcagggatgcttagatttcatataattttcatgtgtcattagatgctcccttctgattctttcttcaaacatttaaaagtgtaaaaaccattctaagctttcaggccatagtttgttgacccttatttaaatgagaaattcttaatggattcacaagttactagttctggctgttaaacactttgaaattcaagtactttgatttacctgaaaagtatatcaattaaagtgttaaactggtttgaaatgctaattgcatttgaatcaatcataaatagtagataattagtaaatagtgctacatgcttaatacgtgttcctatttttttcccctgatcttataatattcttggaacttttcatttaactgcaataatttaatttctacttaaataatgacattatggattatatataatagtagaaacacccttatgaaatatgtaggcttctgttgagcttagtaagttaaagaacatatgatttctttgaaatgtccatccaaaactttaaagacaaagttttcagaaaacttgttctgattcatttgatcacttttgaatgactttccaaatgttgccttttcaaacaa

SEQ ID NO: 41900 - DNA, 1486 bp, Bovine  19866880781614
  misc_feature (1)..(1): n is a, c, g, or t
ntgacctgttagccttctcatactgctctaatactgcctgttcacctgcctgtttacccaactgtatctcctcccactagaatgtaagcagcttcacagactgtatcttaacctctcttggtttctaccactagggctgtcctggcacagagtaaaaacgcagtacttcttggcggaaaaagtcaacatcctactcttccattgactctacaatccaacccatttacaagacttttctacttcaagaccactacgaaagaaaaaaattataatcagaagatagcagcaattataaggcacattccaagtttgggattgttgtcaccatcctggatgagggaagagactaccacgaaaggttgaggactaactggtaccacttaataaatacagatgtgcacacatctatttacacaaacgaaaacctttcctttttaattagttcacttggcctccctatcttgagctgtcctgctcagaccagatgttgtttcaaatttaaatgactcaccctcctgtctaaaccccaggaaactaaagacaaataaagggactcatttctcagctatgattatgttctaaagctgagctctttttttttttttttttaaaagagtattatttgttgcctctaccaagacagcttaagtgatggggatcagtgcatccaaaaaggaaatatttttgcctccaggcaaggctgtaataaaagaagctcattcatcatctgctgaggagaaacatgtcacaacaaaattactaggtaatgaaaaatctgggcaatcctgtggcacttctaatcgtaagatctcaaagcaatcccacactgttgttcacaaagccttgtcatcagctggacgcaaagtaggaagcatctctttccatagtgttgtacactatgaaactaagagaaaacaatgttaagcaaattaataaaaataactattattatatacacagacacatttatatataattatgtacacatacatgcacacataaaattttaattaactgcaaatcaagtgagatcacataagaatacttacttgtaaatcctcaaacaccacacaaataataataataataagcagtggaagcatgttataattcagaggatagactttggaatcaaacagaactgggctttaatcctgggtcacttcctccctctgtgaactagggcaagcatcttaccctctctgagcatcaatgttctcctctgtaaaatgggaatcataagaataatcccctcattgtaaccaggtaacgatggaatattctgtgtaaagcacttagaagaatggctggcatgcagcaagtactctgtaaatgttagctccccaaatctaaaccaaagagaagccattccccatgcccatggaatccccttcttctcgtacatcctgacaactgaattttgcagtattccatttcatcactcccagtttgatcttgccttcctccctactcagtttggaactca

SEQ ID NO: 41901 - DNA, 1456 bp, Bovine  19866880810011
  misc_feature (1)..(1): n is a, c, g, or t
nctggagtaactctgtcgcctgcatcatttgcgaccacatcagcccggccatcctggaggtaaatacacaactgtattagttcttttgaaatgaaatatatagtctccttacatacattcagacatatgtggggccctgtgactgacatatatgtggaaacaaaaactgctttactgtatttctagatcttaataaccagaattctacaaccagctgcctcttttcaatctgttctgcataggtgataacagaagagacatgataataacctctctatataaaataacgtgttaatacattaacctttctatctcttttccttttccctgtaaacgctaatctttcttccctctttttacatatgatgaattagcaacaatccttcggcttttccctacaaatcatttgacatttaaccgtgagacgagtatcagggctgtcccttatggttccttccgcctccccacagacgagaagaagccctaaactcccagtcacacactcatttccagaaaggacaagtgactggagcacacaccatcaactggcttcctacgcttctcgggattaacaggtccagttccagatcgccgccaccttgctctttcttggcaaacgtccagaaacctccgggtaccagacgctcgggtccccctcccggcatcctgcgtccatgaggtccccaggtccgccttcctcctctaggcctccagcacccaggacgtggccgggtccgtccccaccctcaggggggacctccagctcccagcgtgtccctgggtccgccccccaaactcccggggcctccagcgcccagaacgttcccgggcccgcccccgcccctggggcctccggcgcccagaaagtccctgggtccgcccctgggctcggggccttcggaacacaggatgtccccgggtcctcctgcaccctggatgtgctgggtccgcagctgcctttcctgaggggccgcaggggaagaggccgagtccgcccagtccttagccccgagacttcctcgcagaatcgcctctccgtgcgacgtccctaggcccgcgacacgctgttcacaaccccgcagaccaaaggacttggcctcgtacccaaaggacgctgcacccgcaacccagctccccgagtccctcaccttatagacggccacacaagctgatgtgcagcccaggtgaaccccgatggccgccatgaggcggcagagacgccggcagcactaacgggtggtttcccaacagcaacagcgccgggccgcggcacagccccatcaagcaccgcggagacttcacgttccagtccacccactacgcctccgcccttgccgaggccgcccgcgtcgccgccaatcagcgtgaaggtcccgccttttctgtcgcgcagtcggcgattagctattgtgagtctcgccccgctggggcagcacagcttgagcaatattgcgca

SEQ ID NO: 41902 - DNA, 3120 bp, Bovine  19866880878835
  misc_feature (1)..(1): n is a, c, g, or t
ngagtttactcaaactcatgtccattgagctggtgatgccatccaaccatcccattctctgttgtccccttctcatccagttttcaatctttcccagcatcagggtcttttccaatgagctttgcatcaggtggccaaagtattggagtttcagttcagcatcagtccttctaatgaatattcaggactgatttcctttaggattgactggttggatctactttcagtcaagggactctcaagagtcttctccaataccacagctcaaaagcatcaattcttcagtgctcagctttctttacagtccaactctcacatctatacataactactggaaaaaccatagccttgactagacagacctttgctggcaaagtaatgcctctgctttttaataggctgtctaggttggtcacaacttttcttccaaggagtaagcatcttttaatttcatggctgcattttttctcaccaaaagcctagaactgagtaaagtctggcacaaagatgttcactatctatttgctgtaatgagtgaattgttcatttttttaaaaagagaagccaagaacagaattccccaggaaatctttcaatatttaaatgttggcagcaaattaaaacaaaacaaacaaataaatgcccccaaatcaactgtatgggccaaacaaaatatctgggaatggatagttgctctgcatccccagatccagtccattattctgttaagccacattaagtcttggcatagaaggaggaatgcaccaaaatctgatattctagaacaggaagaggatttaaagcctgaaggaaattgtgttttgaatctccccttctccattcctaggataacatacatgtgtaccaggtacttccccgtgctggatttcagcttctttctgattaagaaagaatgtagggttgctatgaaaacagtgatgaaaaatgttgatttatggtcctacctgttttactaatgaatgagctcagctgagaatgagtagacaatgaaagaaaaaccaaacaactttccccaaatggtcctatatttcttcccctccaatttaggtatatttcaaactgcttatatgaaatggcaagttgtaatgcagggatcgaacccatgtctcctgcactggcaggtggattcttaaccactggaccaccagggaagtcctgggtattcaatttaaagatactaaggcttcactgtacttgtacatcttgtctgtctcccttatatcatgctttacacaaaacacacaaactaaatatgggctgaattagaacaatgatgattataataattattagtacttacagaacactttacccagtactacgcaccactgtaagggttctccattctcaacaattttatgagatgggaaatgataactattattcccattttacagatgagaaaactgaggccctgagagattaatggacttgctcaagatccagaggagccagtgtttacatccaagctgtctcaattgctgggctacagcctgcctgtattcgatacactcttgccaaatgctgtacaaccagtgcaacatcctgacctatgaaaatgaattttacctcttaatttctcatttcagtggagaccactgaaaactgaaactatttttaaaaaaatacttggttttaaaataaatgatggcagctttgccttcctaattatttttcacccaggccaatctcagaacgagtatattaataatagatgcagtgcttcaaatccaggccaaaggacagcaaagcaagaaggttctgaggatctcaggtagtagggagaatacacacctgccatagataatccacaaagtaattattttataagtggtaattaagagttgactacaacttaagacattttctttcaggaggaacatactgatctatatacactctgaggccacaaagtgggcagccatcatttgtaaaacttgccaaaaattgtttccattcaacaccagcatgaaaagttctcctatataaatggaccctttaggaaaattaagtctctaaggataggattttgaaacaaagtggacctgagctatatatggctataatttagctaaagtgatggtattgttttctaaactgtctcattttcttgttgttgttgggggggctggctacaaacacaaaaggcttaacaatttttaggaatggactgatagtacaagagtgttttttgagttgctaggcaacatcaggaaacaaatgtccatgttctgagatcactcagcattcggtctccctgtgggcagtgcatgtgttccacggccagactccgttccactcgggcaacaggagtagaacaccccaactgtgatgctgatgatctgcagcagccaaaagacaccaatctgtgtctcaaaagcaggtcacattttgctggccacctggcagctgaggtctctggcccaagtttttgctggactggcataatttatccagattaagtcctacacttttaacggttcttttctgttatttcacttcaattagctttctctgcaggtaaattatctcccccccaccacactatatatctaagggaagcctgattcactggtatggacaattttttaaaaactgaagtacagtggatctacaatgttgtgccaatctctgctgcacagcaaagtaactcagttttacacatgtgcacattatatctgagaatacagagactcttttcctgagaattatttctttgtttctaagagatcaccttcattgtgagaagacccatttcaggtgatctttctcaaggatatactgacattgtacttcagcagggtaagtttgcttctttctttgtttaattcccttaactattgagtctggtcattttggaaaaaaaaattataaagatgatatgcatggttctaaagttagcatcacagatgtaaatacatacttaacttttagaaacatgaattcctttcttttgttctaacttttgcccacacaatgccctatggctcattcttgtcattcagtcactacaccctgtctggcaatttgtcacctgctatgtaagaggcatggctcacggtatatacagaaaaagacacaccagtaatattttcattt

SEQ ID NO: 41903 - DNA, 931 bp, Bovine  19866880893668
  misc_feature (1)..(1): n is a, c, g, or t
naaaaagacacaccagtaatattttcattttctttaagtgacaaatagaatatagtgttttaagaactcccatccttttctccccttgagaaacaatgaaatgtaacaaaatcctagatctgtactttaaatcaagctccattgtcagggataggctggccatgacttacctaaaagggctagttcgatgagcgacagcatcaacagtaaagctcaccatctatgcagagacgaacccactaccggccaattatgagcgagtatcgctgaatgcctgatacgtatgcgccatacatgataagaagctggttcagtaaccagcatttctatagcaacgcacaccgctctgcaggctgcgttctgggaaggcagttaaaactggattctgcaatgtagcttcacttggaatctgctttgatttttgtcacctcattagaatgaaagtattcaaaccaagtaacccaagttattatgaaacagcagcaacttatcatagagaggatcttaaatcatgatttctcggccacgcaaggtcagtcggtcactttcaattcaaaccactgacctggtttgcttattcataagtgaccgttccccagggcatcgaatcagattgcagtctgaccacctgggacatggggcagccatctgctgtcccagttacgagctaaagagaggaaatgctataaaaacaagccagcacaccatcttttactgtcccgaaagtcttggctaagatgcattcaccatgaccgacaaaactgcatttgtcctactgggggaagaaaagcagcttctttcaaaggtcaaactggcccctgcacattcctgatgaggtcactgtatcccatcccctcagacacacttgcatactcaggccccaggtcctggcactatactgcttgcaaaagagacagcatcatcagaagat

SEQ ID NO: 41904 - DNA, 2198 bp, Bovine  19866881007471
  misc_feature (1)..(1): n is a, c, g, or t
naacctgatacaagtgagttcagtcctccaaacagcaatatcattatagaaaccacagcagcaataccaggacctactttatctggattttgagaattaaaggagataataaagcaaagggactggaacagaatacagaagtaaatcataacaacggtggacagtaacagtgacagtagaaataataataggaatcctacacatgaaaagatgctcaagattgctaattattagaaaagtgcaaatcaaaactacaaatgaggtaccacctcacaccaatcagaaggccatcaccaaaaggtctaaaataataaatgctggagagggtgtggagaaaagggaaccctcctatactgttagtgggaatataattgatacagccactatggaaaactatggagcttctttacaaaactgaaaaatagagttaccatatgactctgcaatcccactcctggcatatatccagagaaactctgatttgaaaagatacctgaaccccaatgttcatagtggcactgtttacaatagccaagagatggaagcaacctggatgtccatcaaccaatgaatggataatgaagatatggtataaggcttctgtggtgatctggtggttgagaatctgcctgccaatgcaggggacatgggttctattcctgctctgggaaggtcaaacatgccatggagcaactaagcccctggaccataactaccgagcccatgtgccacagctactgaaacctgagcacctagaacccatgctctgcaactagagagtggcccccactctccacaactagagaaagcccacacatggcagcaaagacccagcacagccaaaaataaatacaattttaaaaaaggaagatgtgggacatatatactgtggaatactactcaaccattaaaaagaaggaaataatgtcatttgcagcaacacggatggacacagagattgtcatactgagtgaagcaagtcagagaaagacaaatatataatattacttatatgtggaatctaaaaaatgatacaaatgaacttatttataaaacagaaatagattcacagacataggaaaaatgtttatggttaccaaaggagaaacgattagggagggataaattaggagcttgggattaatagatacacacaactacatataaaatagataatcaacaaggacttactgtatagcaaggggtactatattcaatatcttataataaactaaaatgaaaaagaatctgaaaagaaaaaaatatatatatgtatctgaatcactttgctgtacatctgaaactaatgcagcattgtaaatcggctatacttcaacaaaaaataataagagtgctacaggtattctttcaaagtaacagcatgcggcggctgttcacagggttgttaactcatattgtgcagatgctgtttcctgagggcagccccctgggaggtctccctccctcgcctccatcccccatccctcgtctattgcacaggattgacactgccccagtagcagggagtccctggagctaaaggacccctcactaaagcagaagaagtggaatgcggagggcaggaggggaaagaggaaaggacagaagggtctgggtgggtaagaatagtctggaaatctaaggagaaagaggcttttcttctgacaggcagggattagccatgcactgccccctccccccaacacatagcatgcatgtttgcttgcatatatgtgcatgtccacacacacacacacacacacagtgaaaaagcatggggtggggaagcttgcgggagtggtagaaagatatttattctcagacttccccttgtggactacataataggataaatggctttaaattgggctaaaaagacaacttacagtgttttcctgtcccccgtgtgagtgtgacaatctgggctagagtcacgcctccctccctctcatcagcacccctggggtgttgagctcaggtatgttattattaccactgctgtaattatttcaacgtgaatccaagaatttcctccattgaagtccatgggagatctggatttccttgggtgatcaaagtgtagactcaaggtgtgaaaaatggaggtcaatttagggttaatcttccctggaaatgtgcttctatgtctgaaattaaccttatctaaataatgattagaaaggcaatcgttcttgggt

SEQ ID NO: 41905 - DNA, 2024 bp, Bovine  19866881073859
  misc_feature (1)..(1): n is a, c, g, or t
ntgatgatttacaactattcctcatttaaaaaaataagtaaaaatataaatacacgtataaatacaaaaacaagcagacagacaaattccgttagatgaatatgaactctttctccaaactcactactgcaaaatacgaaagccaagccctgaatccattgtttcattgtggccaccacatgcgagttcagacacttcctgtggagactcaacagaaaaggtgaaaatattctcacccagcagtgaattcccaatgaaaaacaaggcaaaaacagaaatgttatcaagtcacagaaagactgtatagaggctcctatgctcttcagtgaatcaggaaaggaggtccagatttttctcattaaagagagagaaaaaaaaaaggagctaagagctggaaagcagaggcatttccccaaagcagaaatttcatcaatttacactaccttaaagtgactgactccacacacaagacaacggctggtctgcacaccaaccgcacgacgagggccaagttttggtatttgcagtttactttaatatcacacggtgtggtttgtacataaataagtatctgagtcactcctcaaaataggggttggggatcctacttaagctactctggaagtccacactcaagaggcagcttccagattgctccagttaagcttcatctctggtcaatgcccaaggctgtgctaattagcacaatgaatatggagcctgttttcataggtaaagttagtgacctatcagtcagtatgtcagatggttgtgaaatcagcaggtacctcagccctggagactggctaaaacgctttagagatgctccagccttgcctggagcagttagccttgggaccctatggttagagggtgatgccaggcttaattcctaacagcttccagctgtgaaacattcgtattctagttgcctgacctggccctctagaaaagaaacctgcatcccacctctagacagaacatctataagggaggggagcttgcacttcgtcgagcttacagacaggacttttcagtgcctgcatgcttgcttatctgtgtgtaggagtatggcacaagacgcttctcctcggaagaaaagctatgacaaacctagacagcatgttaaaaagcagagacattactttgccgagaaaggtctgtccagtcaaagctatggtttttccagtagtcatgtatggatgtgagagttggactataaagaaagctgagcaccgaaaaatcgatgcttctgaactgtggtgctggagaagactcttgagagtcccttggactgcaaggagatccaatcagtccattctaaaggaaatcagtcctgaatattcattggaaggactgttgctgaagttgaagcaccaatactttggccacctgatgcttagaactgactcattggaaaagaccctgatgatgggaaagactgaaggcaagagaagaggacgacagcggatgagatggttggatggcatcaccgactcgatggacatgagtttgaacaagctccaggagttggtgatggacagggaagcttggcgtgctgcagtccatgggatcgcaaagagtcggtcacgactgagcgactaaactgaactgtatggcataatcccgagaatgtgggggaagaactaagtaatacccgtcaacctctgattactgggcactgggagagctttcaaaagaacagaacagttgtggcagatcaaagtggcgtgggtcagtggcaactggtagttgctgttctatcccgcagtatgagggatgagaagataaagcctcggatagactgaagagctcggctgggcaaggtccaagctagtttctcgcatagcctcccaaagcctgcacttcctcctgcaagaccctcgccttccttctctccagacatgggtgacctcttcgaggggcccgatcccgcgcagcccgggtccccgggaggaggcgacgcgctgcgctcactcacctttgtggcagtgggacaggaagtaggcacgggccctcaggtt

SEQ ID NO: 41906 - DNA, 1000 bp, Bovine  19866881144378
  misc_feature (1)..(1): n is a, c, g, or t
ntgggagtgaagctgccacacgccaagggaaggcagagccacctgaagctggacgaggcgggaagagtcctcccccgtgtgtgtggaaaggagcacgacctggccgtcacaacttgacttcagatttccagcctcctgaactgggagagaacaaatttatgttctcagccacccaatttggggtcatttcttatgacagcccttgaaaactaatacactagtcacataacaatcgaccttgttgtgtttactgtgtgaggcatattaaaatgctgatcatgtcaacaatgggatcctcggcaattactcccaaattatgcacaggacggggctaacttcatgggtatgtgacctgtgcagtcaggcagggccctacactcagacaagccctatcctttggatagcccagctgtcactgtcctgaaatccttaagaatttcaaacaaggggccaggcattttcacttcacactgggtcccacaaatgatggagttgatcctatacatggatcagaaaagaatctagcctccctttgcataagcaaacaagtgtggatctttaagggcactttaaaagatttcaaagatttaaatctttaaaatgatttaaaaaaaatgattctttgcacatatgcaaaataccctataaacattcttagtactcacatatccaaaattctgtgcgcctcttggaactccagcaaccaattctgtgatgaaaagtcatttagaaggtaaattacacagtctactttaaagctattcaacaaatcagctaaagatggtactttttgaataagtaactatcatggatcacgtagacagccggaagtttgaagttacagttttgcattggcttttgcctctgctacagaaaaagaaaacaggggactcaaaagttgtacttctagaatcacctgcctccaccagagcctccatgcgtttcagcttctagaacataagcctgccttctcagatgtgtgtgtgatttgtcagttaaa

SEQ ID NO: 41907 - DNA, 765 bp, Bovine  19866881194883
  misc_feature (1)..(1): n is a, c, g, or t
naatgattttgtagctcaatccaataagaagatttaacagttaaaattcagtaatgccagaaacaggaaagtagatacgtaaataactcaagaggctgccgtaaaaagcagcagcagcatttcgttttccccccaaataactcccttctctcgcctgtaagtctcagagaatgatcactgcctctcactagtaagagttcccctgatgttttactcactaataatgctaaacaggttcattttcatttgtttggccaccaaacatgaaattctctcccaacttcatttcttctacaatagcattgggaacactcaccactggcatttcaataattgatggtctgggaatagaaggctgaaaagtaactgctttacgaactgatcctacatccggagacccaggcagatcctcaggggtgtgagcagtctggacggcagagtggttgcttgaattccggtttgtgttgccatttgtctctgaatgggcacctgaatctcgccttttctctgaggtgccttcttcacctcgcgggtgacttgggtgtcggcctgctttggccttgggctgaacatggatggtggaacaggtatcagctgcgctggcctgatctaagggagcagtctccctggtgttcccaaaacaagcaagcagagctgagcatgggaatggatgcatccttgcagacggagacttcagtctttcagccagccttgccttccacgtggacatgatctgcagcagaacattgcagagttcacagcggg

SEQ ID NO: 41908 - DNA, 942 bp, Bovine  19866881218596
  misc_feature (1)..(1): n is a, c, g, or t
natagaattgattttacaaccaaagctaaaccatgatggcagaagtcagaagacaggttatctgtgagtgggaaagaccgagttggggagggacagagttctgtaccaggtgagtgctgttgtttctcaggctgggcagaagctgcacatgtgtatacttgtgaaagtccatcagactgtttccttatgatgtaagtactttcctacgtagaggttacagctcaattaaaagttttacttaaaaaagcccacacaaataaacagcaagaaaaaattacctgcattccaaccttcttttcaagctaggggctcttaatcctttcatatgatctgaaaacataaaagaatcagatatcataaatacattattttttcagaggattccttgacccagggaaactgagttgtctgttgtttatagatttccttttaagagaaaataaatgagagtttcacttttataggagcatagatttgtatgagctcttgcttctgcaagtgaagaatccaccgaaaacaggacaagaaccaccaaagttgaccatctctgagccaacagaagccatttaaaaggagaatgagcctctgtatcttagggcagagtctaaatcacttggagtagccacagaagaatgcatgaccagagtctcatttggaactgcttccatcattttcctctactctcttttatttcaatccaaccatcttcggaccatgctctctctaaccccttcaattccagtcactaagttagtccatctggaaattcaagtttgcttccatggaatccttgaggaaaccatacaggcttaggccagaataagaagagtttcattaacttctcagccaactgtgactgctgggttgaaaatcatttaagagacactggacttaaacaaacattagagtagataacttcacagatatatacagaacgttcca

SEQ ID NO: 41909 - DNA, 1853 bp, Bovine  19866881261061
  misc_feature (1)..(1): n is a, c, g, or t
ntttattcatcaaatgcatattgaggccatgccagactttgtgctggatgctgaggatacagtaatgagtaggaacttgccagaggttaccatcctggaactttttggccagcctaatacttgagaaactccaggcacgagactagcaaggaaaggtatgtcaagacagggctgtgagagcataggaggcttctctggggtggtcccatgcaggggtgtcttctaaatgctggctgacagatgaaatataacctgtgctctgcagtgaaagcaccaagtcctaaccactggacgaccagagaagtcccatgaatatgtttctgtcttttgtaactgaataggtgtaggtggatcccagtccctgagatggagaacactggaagacggaagacgatgggttgggagggagctggggaaggcagatgatgagtttgcttttggttatgttgaatatgaacatgtttgagatgtccaagacttttcatgtaagtatttagatgtgtgagcttaaactcagagaagatagctaggctaaaataagaactagcatgctggtgatagctgaagccaggaatgtgaatgggatgcctaaagagagattacagagaatacagacaatttggctgtcaagtttagaataaagatagagtagaatatgagagagatgaatagttgagtgaagtgttttgttgttttttaatggaagacacctgatagtgtttaaaaagccaatgtgaaagatacaggtgagatcaatttacggtaaaattttacatgaaattactgtactgtttagcttaattcgtaagtatacagacatgaacatcaaagaattaacctttgaagtctttaaacattattttgtaaactggaaagtaatatactttgtgcagtggttgaataaaatgtgtgtatttgaaaagattttgttcttaatcacttgattaatttcacataattctttctttacattgaaaaaaggatatgatcccaatgataggctgaaaatcagccataccaagggcacggggatttgtctgagacagatactttaaatttttactcagtcttaagattatagaagcaactaaaggaaataaacagtgtgttcatggaaagagggagagggtattcaacttttacccacagaaaattggcacattctacagacattgttcagaaacgcatgtgtaaatacaatcatcttaatataagagcagtcatttcagtcacggccacttggagatagtcatggcctggtttaacagttttattcttttggaacttcaaacagaaagactgtgggaatgggtgaattcccaaggaataatttggctttaaatttaatattcagtgttagtctcttgaaagcagtcctccagttttctcccaaagaacatgagatcacactttttccgtagatgtccataataaatatgggaatgcataaaagttttagtggaacattgctggccgtctttttgattcatgtctatctcaatacaatcgtgtttcgagacttcttatagtgaatttatttggggagattagccagtgttcttatcatatcagtgttggtggccatggattctctttttgctaaaactctgtatctcactgggcctccctgctttccattgtcttacttttatgttttgtgcttatattttagcataaagtgtgaatgacttagagattatggaatttcttcctttagcttaagctgatatgttttacaatctattaacttagtaagtgatttacagctaatacatctgtactctgagagaacacaaaaagtattactagaaggccaaaaaggaccttgtttgtaacgcagaatattccaacag

SEQ ID NO: 41910 - DNA, 1482 bp, Bovine  19866881315738
  misc_feature (1)..(1): n is a, c, g, or t
naatgggtgaacaaaaccggtttaagaatgaatttttttcttctcttgaattccttcctgtcacctcgggccctcaataaagtcttgttaaccaccagcctccctttgttgtgagccatttgggggaagggtcctgaggagggggagcacaggagggagggtcaccgggtcaccccgcctgagggcatggtagcaaacactgcagaagagacagaagatgcaggtcccgaggcggctcaggaatacctgatgggggagcctgctaaaagcctggacttcctgctcccatgaaaagggatttgtactgcttgtacttgggcattaaaaggtgaatgatctcttcagactgggaagtctgatatacctgggttagtacagagactgttccacagtaacctttaagtaaatggtagctttttagattttatttacaaaatttgaccaagactaaaattaaagtccacatttgatgttgcatgtactccccctcccaccatatctgacctctgtgttatgaatatggctgcctgcttgggacaatattcccaacgcatgctcagttgtgtccaactctattgcaacatcatggactgcagcccaccaggctcctctgtccatgggacttttccaggcaagaataatggaatgggttgctgtttcctcctcaaggggatcttcccaacccagggatcaaacccatgccttctgtgtctcctatattgacaggcggattctttaccactgggccacctgggaagcctgttatttcagtgagaggcttgtcaggtcccgtggggctcagagaccagatagaatagcaggggtcttgagctttcaactggcctttctcaacagcctaatctcctgttagaatcttgaatttcaatgaatcagtttctgtctccacaaaatgggaattcatgatataagatctaccacctgtttgagcttaaaagcacatcttgacattatattaaaagagagagcaaaataataaattagaattgccaatataccctgaaatcttgacctgaaagtcactattaatgggaaaaccattacagtattatatttctctaacattcttagcagatgcttggctaaggaaaaaaaaaaatctcaatttttttgagcattgtcttggaatgtggttataatttattattttttaccactcacatattaatgtgctgaaaaatagaagatctatgctcaaaagggcattattttccaaaattaagtaatatacatagtagatggacagaacacacattcacacattcataatatttgtcttaactgctcacactatcacaaacattattattattttttggtgttgttgaaaattaatcagggacttagcatggattgtaaaaaaagcaaattgtgtgtgtgtgtgtgcttattcacgtcatagtctttgtgaccccatgcactgtagcctgccaggctcctcggccatgggatttcccaggccag

SEQ ID NO: 41911 - DNA, 2401 bp, Bovine  19866881336383
  misc_feature (1)..(1): n is a, c, g, or t
ntttaggtgtgtagcaaagtggttcagttatacatgtgtgtattctttctcaaattcttttcccatttagattgttgcataatattgagcagagttccctgtgctacacaataagtcctcattggttatctgatttaaatatagcagggtgtataggtccatctcaaatatccaactattcctcccccacccttctcctctgatagccgttaagttcattctctaagtctgtgagtctgttttctgttttgtaaataagttcatttgtactgtgttgttgttttttttttaaggttctgtatttaagtgatagcataagattatttgtctttgtctgacttatgtcactcagtgagtgcttgttaagagccaggtgctgtgataactttgttgcgggggagggacggaatatagagttaaaagaaaatgaccttctcagtagttacccatctagttgggaaggcagacaaagcagaataagaaaggtgtagtgggtgctttgacagaaactctggggtccctaatcagaggaggtgacccacaaattagatctagaggaataagtgggaattgccaaggcaaaggtaggtgagggtgtttcaggaagaggaacttcactgcagctgtgggtggttgcaaggagggaccaggtgagggctgagggtggagtgacagagagaaatcacaaaagctttgtgattactgagcagtctggatcttatactgaagattatggagaatcacctggggattttaacgaaaatcattttagaaacacccactttatcctgaaaattgcagggaataagactaaagggaatgactttcactttaggaagttgcaagagtctagggaagaaagagtgacagagagagccaaaaaaaaaaatagtttaggagatctttggagataaaattgacaggacttggtaactgattaaatatggggtttataagaggaggagaagttacagatgacttttagttgatgggctgggcaatctggggatagtgatgtcatatatctgggggagagaggatgtgtttgattttggaaatgctgagtttgacagtgaagtagagggagctgggaggcagagggacaggcagatctgaacttcaggaaagtaggctaagctggagatggaggttggagactgtcatcattgtggtcattgttgctgatgtcatagtgatgctgtatcactcagcgagaatctagagcaagcagatgagggaaggaggtccatagataccaggtgggtggggattgtccgaatttcaagaagagagttgaaagagtctgtgaagccactgagaagggtgaaacaaacagaggcagcaagaaaacctgaagagtgtgaaagctgaaggaaggaagatttttaagaaggactaaattgtgcatgtggttttcgtgggaagactccattaatgacctttatgataacattttcaatacagtggtggtttttaagtattacagcgagtctagaagagaaggcaggtgagacccaggagtgcagagtattttccaggcagtttgcttatgaaagagaaggaattagatagggtaggagctaaggggtgatagagaatcattcagagaggaatggctaaaatctggccattactccctttccagaattttattaccagaccagatattgatctttgaatgcatgcaaccaactgtacctcttccctttcccttcagaattcacaaatatttggtgaacgtctctcataggccaggtactgctttcaattcactggccaaaaaaacagacagcgactgctgccgctcattaagcccaggcttcctcaagggagagtgtaatgaaataaattatacagtatgtaaatgatgaaatgctagcaaataagaaaaaagtgggcaaggtaaggggaacttcttgggtgacatgcaattgacacgttcagtatctggtcagaggaggggccactgctcttggtgcatggcttgtgccttactcccccgcctgactgtcttgataacctgctcagcacttcagctcccacctggctcctgctgtcccccatctcctggtctggagccctgtccctgagccgtcacccgccatcctgattttggctggtgtactgcctgccgctgctcggatccccaacgccacagcagctccaacctggcaccgccggcttgttgaaacccgtcttggatggctgctgggcctcggtctgtcatcatctctgcatgttgttacctgaccgctatgctggatttcctctccaaaccttcttttgattacaagtgacagaaaatgaacccaagcttgcttaagctaaaaggagaatgcattgacttgtagctgcatagtccacagactaggctaattttaggcatagcaatgacaaatga

SEQ ID NO: 41912 - DNA, 765 bp, Bovine  19866881353362
  misc_feature (1)..(1): n is a, c, g, or t
natgctactgaattgtgaacttagaacagttaagatggtaaattttatgttgcatgtattatagcacagttttttaaagcaaaaagttacagcagtttaaataaaacaagactaattatacaactatgatcttacatctataataagagatgagtcaagtaggataggaaatttccaagagcctcttttaacacactagtaaccactgtgcagtagtctcttcccccagtgaaatcttggatctgaggttctaaggataccatctggttccaatcccccaaactctgcgattaaaatagggaaaagaagacataatttttagaaatatagtgagtttctatgcattgttgttgttcagtcactcagttggtccgactcttcgagactccatggacagcagtatgccagacatactgttaaatcctactgtttctatgcataacaatagcgtttaagaacaccagggtcatctgcaaactctatcctgcttcacataattaatgatgacacacattcgtattatgtaatacctccatccactgctgaaaagtcacctgtgccaacttctttgcattctggggaacacatattccctatttatcattgctttccagtgttcaactggtttttgatactctcattttatttctccagaattatttgttttcttactcttttttgagaggttcttaggagacatttcttgagaattcagataaatatgtgtctgctgagtttcccttggtctttttttaattggagtat

SEQ ID NO: 41913 - DNA, 1143 bp, Bovine  19866881387677
  misc_feature (1)..(1): n is a, c, g, or t
nccatgagctggaaagaggaaggctcatacagatcagtcctgctgctggctcctctaatgtctccgagactctttgggcagccaagaatctccatggagataaattacgaaaaggtcacccaggaattctgctgcctcagcagtgactgaacccaacttctgtgcagggacaatgaagaacatgcagccggggcagctggctgctgtggcactgtgttatctaggagtggtgcaaaacccatgtcttttgcataaaacaactcaaagatctagtcagtctttactctttaaaaaaaattatggaaacgaaatcgggcactctacatctctgcctaacaacagtcaactattatttctttaaatgagccccaaacagctggcaataaatgacttattcaagatgccatttgcacaagcctaaaaaccgcacgaacataacatggattaaaaacttctaagcttcacggtttgtaagagtctcactccgctgaaaaagaaacagtataaaaaggcagttcagtatcaagtgcaaactggaaccagaccaaccaccaacttctgttcctccttgaaattgtttttgtcaggtgataaacacacacagtccggctggagatggtctaaagacagaataaagataatggaacttgaagtccacaatcagggtcaccaggggctatggagagttttttttattatgcacataacaagtacataataagcattttaactgtatggatgtataagggagtgactacttacacagaaaacgtagtgcagtcccttccaagacatctgtgtccatcccaacaaccgaacagatgacaccgactacctacattgaaactatgctttgaataaggtgagaataaattttctaggtagctttactttatcatcctttcattatcatcttttatcatcccttcaattgagatgttgaaaatctaaggaaaaagaagtagctcatatacctggtggcagacacagtggctgaagaacaggccatatgagagcagccagacccaatggactgcgtccggttctgcctctgtctgtctctaaacattaggatctgaagggcagggcagaattactatctcaagtggatccctggccagcagcacggtaaagccacagcat

SEQ ID NO: 41914 - DNA, 744 bp, Bovine  19866881409448
  misc_feature (1)..(1): n is a, c, g, or t
ntaggaaaagtaaatggtgtggcttggtgaatgctccacttaccgcgaaacacagagtgttgatgggagctatctgcctggttattcaatttattataaaaatgatctcataactgaggaatctcaaagtcataataattattaaatcttcatcccaaatgactggcatatttggtttttttttaactttttattttatattggagtatagtcaattaataatgttgtgatagtttcaggggacagcagagtgactcagtcactcgtatacatgtgtccattctcccccaaactcccctctcatccacgctgccacataacattgagcagacttccctgtacaatatgggtccttgttatccattttaaatttagcaggctttacacatccatcccaaactccataactatcctttctccccatccttcccccaccctggcaaccataagttcattctccaagtctgtgagtctcaagtgactgagaggagactgaaaaggcattcactgtcttgggaaattcaatcggagttaaaaattaagcccagaagaggctttcagcaacaaaggtaatgatgtctctaaattttatttagtattgagaatactactttgggttaaatgccagttaggctgctgtccaagtgatacatgaactattcaggtgatctagacatagctttggtttcttgtcaagtcatggaaaatctatgatgtagttcttcttcctttaataaaatgtga

SEQ ID NO: 41915 - DNA, 865 bp, Bovine  19866881593756
  misc_feature (1)..(1): n is a, c, g, or t
natggagacctgctccgtgcctctaggtcacatgctaactaacaccattcctgcaattagcaagtggacagttagtatttttcaaatgcagagtgagttttgaataaagacggagagcttaaggcctaaaataaggagccaatcaatttgactgcagaataattagaaacagaaattttctaaaatacagaagaggatcagcaggattccatgttctggttcccatgtcgcagcaaggcctcctgtaagactgtcagtcttttatgccaatgcttttttcccttggcagtggtgtttagggatcacctgcattggttactgcagaaaaactagtgagctaagttcagtttcaagaataaaaataacttactgttccgacaaggagagtactcagcatatgcactgaaattctgaatggctacatagcaagtgccaactgggtccttttctggtgctggtttaagagttctccagtgatataatggagcacaagcctgtgaaacatcaaagacaataaatatttttttaatgtagattccacatactatggacctaaatttgtaacaaacaatgctaaattattagatgacttaactggcctccagtatgctaatgagtaccttggtagtcagaattaattaaacttcctaagtcaatttctcaactaatactccatagaattggaacaaattaaacatatacaaaagaatgagatttttgtcccacaggattttaaatcaaataaaagtagcctgacaaaagtaaatatttatgaaaggtaaaggactcatatgttcttttttttaaaattggatctgcataaaagcaaatgaccatttaaacagtgaatgaattagtgcaatgt

SEQ ID NO: 41916 - DNA, 732 bp, Bovine  19866881615442
  misc_feature (1)..(1): n is a, c, g, or t
natgaatttaaatgcaaaagatgtgctgcaatgtggccaatctttcagggaaaattgagacatgactttttgaacacaaaatgtgttatttatggttttcctttgcagatggcatcttattttggatatacagttgcagtatcagatgttaacaatgatgggtaagtttataagaacttcctcactcactgaatattatagtcatccttaaagatgttatatttttttcttcatgaaatacatccttctatatttcctcaacaagatagaggctctcttgtttttttttttttacttcagcgcaagaggatataactactgaaaaactctctatcatcctttttaatgtctttaccacatctgcacttctaagaaaacactattatacttagttttatctttaatttcatgaattgaatagtacttggccatttgaaatccatagccattgaggaatttgctcatctctctttttagcacatgattcattcataaaatatttgcacataaatattgtttctcctgttattgcatactagaaacatccatgcagaagataaaataataatgctattttttcagattatggcagtaaattacagttgaacttggatcaaacagcatgataagttatggttgtgtttaagtcattacttcaaagaaacattattaagcatctctcaatccactaaaagcaccgacagattaaacaaagattaataagaaaaccaa

SEQ ID NO: 41917 - DNA, 1693 bp, Bovine  19866881626326
  misc_feature (1)..(1): n is a, c, g, or t
ntgtgtgcatctgtggcaggccagaacattgcaaacacaataggtgagcatattttcattttctattcctctaccatattaagaaaattcactagtaagtggacttcccccgatggctcagtgggtaaagaattcacctgcaatgcaggaggtacaggtttgattcctgggtcaggaagatcccctggaggaggaaattgcaacccactccagtattcttgcctggaaaatcccatggacaaaggagcctggcaggctacagtccatagggtcacaaagagttggatatgatgagcaattaaacacaagcacttcactgcatagaccacgtgaaactctcaaagagctctttattcacacaaaaatttctgttatatatatgggaacttctaacctaaatactccttgaataattggtattgtctataaaaacagatacaattatggggggaaatgactgtgtaaaaccatcataaaacaagtttttaagtttggggagtattttatcaaatctacacagctcatgtattgtttgtgatcccaactatggcaaaaatgtttcctaaataagcaaggtgaaacgggaattctctctgataaagcactgcattcactgaatacttttcctttctggattatatttgctttacgtctttctgtcctttaggcctgaccgctgaggtgcagttagacaccctgaaacaaaaaggagccattaaacgtacactcttccttgataaccatcagtcacatctcatcttccctctcgtgataaaagggcagaaatccctccagtgccaggattttatcgtttaccttcgagtaagtgtttcagaatcaaacctttttggcctctcacattcaaatcaaaactctaatcatttttgtccatttaaaccatcacagtggttctcacgggcttccctggtggctcaatggtaaagaatctgcctgcaatgcaggagacctgggttcagttcctgggtagagaagatcccctggaggagggcatggcaacccactctagtactcttgcctagagaatcccatggacagaggaaccgggcaggctgcagtccatagggtcacacggagttggacacagctgaaatgattaagcagcagcagcagtggttctcatagacccacacctattttcacttgattggaggaaacttgaggaccacacactcctatgttgagcctgacttcagtcaacctgataatatattgccgttacttcctaagttgcttctttttctttttccttttaattttttattgtagttgatttataatgttgcattaatttctgctaagctgcttcttgttttgaatatactcttagtcttaatactaactcaggtggttttcatttcttcctccccttccctaaaacacgaaagtcagacacaatttatttgaacttttatcctgcatgaggatgtttggccagattttatcaaggtgaatctctgagccaactcaggaaaagggtgaggcagtcacaggctttattgaatgtaagttataattatatttttaaagcaatgcattctttttaaaaaaactttttagtttatattggagtgtaacaatgttgtgatggtctcaggtgaacaccaaagggactcaggcatatctatacatgtagccattctcccccaaactctcctcccatccaggcttccac

SEQ ID NO: 41918 - DNA, 659 bp, Bovine  19866881666845
  misc_feature (1)..(1): n is a, c, g, or t
ntatgtgtgtatgtatgttctgtatgtgtatgtatatataagtgtacaagtagtaaaacactaactctggcaattattaattctcaaaggtgcagattatcactgagctttcaccttttttttccactttcaattgaattcaccagagtccagatttctgctgtctgagttctatcacatttctgttatttcctctgtcatttactggaggtagctgtgccctccatttgcctctgctttgatattgaacaaaaactgatttctttctgaggaagttagaaaagcaaggcttatgtgaccaatatgtttcccaaccctcacatgagaaaaaaagggcacacccaacactatcaaaatacaaccctgtacccatcacagcaccagatgctttaagctgcttcttattgtgtctccctcagcacaaaataaaacagactcctgcctgccccctccaacaaaggcttccggtctccaagctacaacacaattctgacaaaaatcttagcttcctagagctttgaaatatcctaacaaaattgtcttccattttaagctttaaatatatatatataagatgctaaattaaggtcaggcaaattctggtagtctttctcagatgactcccaaatctcaatggtacctcccacttcctcttgttt

SEQ ID NO: 41919 - DNA, 917 bp, Bovine  19866881950944
  misc_feature (1)..(1): n is a, c, g, or t
ntttttgtgggatttttttaaaagaaaataaaccctcagtaaattagaatgttgcaacctaataccacagtccagctcataaatgttttccttcagagttcatttggaagcatttcagacagattgttaggattattacttactgggataaaattatgctttttttttttttttcaaacatttcttcctctacttgtaagcctcctctcagtaatactttgcatgttgcaataaaaaagcaagaaaaaaaatctgtctatttttaaatgaacacatttgccaaactcaaggagacttatctaaatgcctgcttcccacagacatgggctgtttttccagtgccaaactcataagccaatttttaacccgcttaagagtcaacatggccatgtttccacccatcattttacacattatctttaatcccatcatttctcttaaaatcatcctggtatgaaagtgagcagatctcaggtgggtccaggtagacatctgtacttgacaaccctcattcatctttaaaatgctgcgggaaggggcttaacagagatggagccaaggtggtgatgaggagtgtctggaggagatgctgtgggctgtgagcatcggcaatgccaagacaggagccagaagtctatggatgaggagctcagggagctgagtcttagaggtgggccagtgagatgtccaagtctggttgaaccagggagaaacccaaaccctgttccataaaggaagcgagatgagacacaaaccatgcagaagcctagctgactcaagagacaaaagaacagtcctggattgtatatcagagccgagaaagtggtcatgtgacccccaacaaattgtactgagctcttggctgccttgtctggagaatcttgaagacttcgccagacttttagcaatcaagagca

SEQ ID NO: 41920 - DNA, 826 bp, Bovine  19866882165656
  misc_feature (1)..(1): n is a, c, g, or t
ntgggaagattcaaggcagaaggagaagaagccaatagaggatgagatggttggatggcatcaccaactcaatggacatgagtttgagtaaactccaggagttggtgatggacagggaagcctggagtgttgcagttaatggggtcaccaagagtcgaacaagactgagcgactgaactgaactgcctttgaatctggagctgcactgaagcatggtgcggcagaagtcttcctgctacatccgcttggacacggcctgatagacatctgcgttgtgattcatggtctgcaggcactgaatgtactctgccttgcctagtggggagagaagcctgcatatctcctgtctgtaccaccggaatcctgcacgtctattggaagttgccatggcagactgggaagaaaggctagctggaggaggctcccgggcaggagagtgctgacctgaaggtgtgaggaatttctgggtgctccagtctatctccaagagccagccgcttcttccctctctagagctaattgctgagaagccaggtctgaggactgcatttctggctggaaggccacagaggaatgcaagttacaggagcagtgtaaggataattgtggcattaagttaggcagagctacctgtaagtaggttgcaaagaggcaggatgccagggctgagagaagcccaactttgggaggtcacttaggatggggaccggaccaagggctacaaagggccttactggcttggtaacaaggggaccagcttcttcacaaaaagtaggatgcttccaaggctgagacctggaaccactgtgtgtcttctgccaaggat

SEQ ID NO: 41921 - DNA, 3608 bp, Bovine  19866880422344
  misc_feature (1)..(1): n is a, c, g, or t
nttgcctccctgcccccgctccaccgccccaggtcttggcttcccctcctcaccccagctgactcatccatctccttgtttggcatttccagttttcaaatagttgggaactgggatcatatctcttcttggatccctcgctgggctagatgctctgaaattctggccccataaatcacagccccagtggcctctgtcacttaacagctcttcttcccctgctgccgtttgccatgctgtgacccttcggccagaggaacagggactgatgatttcctgaggacagaccagtctctgtgccccgggacgtccagggtgccctccccagggacctcagtcacccaggtcatcagccagtgcaccttctaattaaagttgccaccctctcttagccaagcccgggctgtctccaacattatcttatataatccaatcctcacagcagtttttaatctttttctaaagtttatttggctgcgctgtgtctcagttgcagcgtgcaggctctagttccccagccagggatcaaaccccggccccctgcattgggagcgtggagtcttacccgctggactgccaggggtgtcccctcgaagcagtctttttggatgttaccattattatctccattttgcagaaggaaaagttgaggcaccaagagggggcatggctggcccaaatcattcattcagtacatggcccagctgggaacagagcccatgttgtgtgactccagacttgttaccccttccagagtgggtctggcctgttctggggagagagaggacgatctgggagggctggcatagtcacggcaggctgcctggaggaggtggaccagaccagccttggcagagggtacagcaagcagcgtatctaccatgtgggcttatccagctccttcccattctcagacttcagtgccttttgcccctgggcctccagctcagtttagtgacaacattccccaaggaggtgggtttgactttcctggggactaagaccctttggaacctggatccttctcgattgggtctcaagctccttttgaggtctgtaggtttccctgtgtttggagtgcagtggatttttgctgagtggggcctgctctgagccaaccctgtgcccacgtctctagggacgcagctgggagcagaatctatagacaagtcccaaactctgtcgtctgaccatctttgcacagcagagaaatcaagaattcatccatgcattcactgattcacccattcaagaccgaccgtgcgccagacattgtgctagtgtcctgtctgcattatcagctttcctgtgtagctgggattatgcctccatttcccagatgagaaaaagctcagaggagagcagtgacttgcccaagatcacacagccaggcgcagaggaaggtgggcattgaagccagctctgtcggtcctgctggaagagcttagcatcgtggtccctactctccagcagctccgggtcctgttggagaggtagggctcacgagtcataattacctagcacaactccagtctagacaatagcagattgtcagggaagaaatcaatttggcatgagttctctggaaagactttctggaggaagtggggctttaagagcaaggaggatttggccagtggaggaggaaagcattcggggcagggggccagaagttgtccccatcgtccctgggttcgcattgttgtccagcgtgtgagcaggaaggccccggcctgctgttggaatcattaacgctgggaaagaatgcgaggaagtcaccaacatagctgaggtgacatgccttccagtccattgcctgtgactggtcagatcaggacgcaagaggccaaggcctggtcttcagcttggttgccagccaactactgaccctcttccctggatctcactcttccgacctatgaaatgggctcctttcttgcttttgggccacttgccaactcagaggaaggggaagttgagttcttggagaaaacggttagcttgtcctcaagcctttgtggtaaagcctggcatcttaccaatctcgtgtctcccttcactgactccctgcccacacgtgctgggccctgggctaggagatggagaaggctccctgctcccctagactttcctgagcctctcctgtcctcccttgtggatctggggtccctcctgcagtgctcagcccacatcagttcagctgcggctgagctaaaatctagggaccctgtcaatgtctgtttaggggtcataggattcctatactcctggccctgttgctgtgatccagggtgagtcgtgtaacttctctgagcctgatttccccagatgcaagctgggacttttcattcattcattcattcagcaaacatttatggagtgccagctctattgccaacctcgtgttaggtatgaacagcaagcgtggttggaaggagcttctagtttgatcagggagattagtcaataaagggagagtcagccaataaagagggctgcttttcaaggcagagtcttctacgagctcaggagcagctgtttagggccacacgacctctaggagacgtcgggggtctttgtgactttgtctctgtccccatttgttattctagttattgtctgtttccctccaggtagcttgtgggaagaggggtcttggggagacagccccaccccccaccccccacctccggactagggcaggggagaagatgcagagaggagagcaggttgcttttgccctgagtctcagctgagctcatggatgtggggaacagccaggcttatttatactgagcctggttatattgtttcatttatttttgtctatttgtctggctctgccaggtcttggttgggacacgcaggatcttttagttgcagtgtgcgaactcttacttgcagcatgtgggatctagtttcctgaccagggatcgaacccaggccccctgcaccagcagcatggcatcttagccactggaccaccggggaagtgcctggttattttgcttccggagagatggaagctgccactggggttcagctttgcggtcctgccgggctgcgtgagaggagtagggctgaccctcctgtttccgctttccatcctcttttctccctccccaactcttctggggaacccgaaggaggcagagatcagctcaggcctggatttgatttgaagcagtgggaggaaaagggcttccctggtggctcaggtggtaaagaatccgcctgcaatgcaagaggcctgggttcgatccccaggtcgggaagatcccctggagaagggcatggcaacccactccagtattcttgcctggagaatcccatgcacagaggagcctggcgggctacacagtccatggggtcgcaagagtcggacacaactgagtgactaagtaccagcacacagtgggaggaaagggttaagttggcctggtttctcacctgggtgggaggaggtggagaggggacaaggactgggatggctggggcaggaatgtgtgataagatcaaagcttccagcctgccggggcctcaactaggggcctcacctgggtttcacctgagtagtcaaaggggattctctgagtgacctcctggag

SEQ ID NO: 41922 - DNA, 3147 bp, Bovine  19866880490199
  misc_feature (1)..(1): n is a, c, g, or t
ntctgctttattgacttgccaagcctttgtgtggatcacaataaactgtggaaaattctgaaagagatgggaataccagacccacctgacctgcctcttgagaaacctgtatgcaggtcaggaagcaacagtttcaactggaatgggacaacagactggttccaaataggaaaaggagttcgtcaaggctgtatatcgtcaccctgcttatttaacttatatgcagagtacatcatgagaaacgctgggctgaaagaagcacaagctggaatcaagattgccgggagaaatatcaatcacctccgatatgcagatgacaccacccttatggcagaaaataaagaactcaaaagcctcttgatgaatgtgaaagaggagagtgaaaaagttggcctaaagctcaacattcagaagactaagatcatggcatctggtcccatcacttcatggcaaatagatggggaaacagtggaaacagtggctgaatttatttttctgggctcaaagattgctccagatggtgattgcagccatgaaattaaaagacagttcctccttggaaagaacgttatgaccaatcgagatagcatattaaaaagcagagacattactttgtcaacaaatgtcggtctagtcaaggctatggtttttccagttgtcatgtatggatgagaaagttggactctaaagaaagctgagtgctgaggaattgatgcttttgaactgtggtgttggagaagactcttgagagtcccttcgactgcaaggagatccagccagttcatcttaaaggagatcagtcctgggtgttcattggagggacggatgttgaagatgaaactccaatcctttggccactcattgaaaaagatgctgatgctgggaaagattgagggcaggaggagatggggacgacagaggatgagatggttgtattgcatcaccaactcaatggacatgggtttgggtagactccgggagttggtgatggacggggaggcctggcgtgctgtggttcatgggatcgcaaagagttggacatgacctagtgactcaatggaatacagcaaaagatagaataaagaattatttccttttaatttataattttcatatgaaggtgtttgtgtcctagtagtttccaaattccttaattgtgattatttttgcttgcatttctctattaaaaaatgagtacctgcacaaattaatgttttttaaaaaatatgtttagtgaatatctgtgaagtacatttattattttgttgatgctcaagctatcctatctttggaacagaagaatccttcacactggttcctctgtgttcacaactttgtcaagtgaatggcaattattatcccgtcctgggaaggacttccattccaccagaagcagcagtcccagaagtcaaccccactctatgcttaagggtcaccactgaaaaccataactcacacacttttagtgaaacaatgctttactcacccagagaagaggcagagcaaggtgagtttcaagagtggacattggtttcccatggccagcaggtcacctcccacatctgacgcaaggtgatgatctgcagggaccgcgcctgtgtgctgggtgaaggaccctgttccttccccttcactccacaacgccagtgaaaggatgcagtaggtggttggcaagggaccacatgacgcacatgctcaaacaggatgaaggaacacgtattgagtctaaaacagagaaagatgttcccacacaggctgggagggctccttataacttggtagtaaggaggtgttccaggcccaaggtccatttttatgtggctgagtgaggagtcaaaaaactgcacacatttttgcctttcctagcaaactttattttctggcacaacaaaatagactgggtcatcttgatgcttcctgctccaggcttggaatcagatgttcttcaaaggtgtcctgtttttagttttattttttttttaagggaagttatttaggttgccttttcaataacataatttgaaggggaaagtaaactctttttaatatatccaactcaacagtccataacatcattttattttgtgcttttatctttttttttcttatgctgaatatcttggctcctaacagcattaacaaacttccttatattgtattacatttcattatagtcaaactattttcaaagttataaaatgttatagtgaaaagttagaacatttgatgaagtttaagatttctttgcaattctgttttcctttaaaatatgtttcctaaggctgtgttactgaagccacttagaaaatccttttgtactgtggtattatgtcatcaacttaatattcagttagattcccttgtttctgttgggtttcaatttttttttaagtgactttaaaaaaaagattttatgaccaaaaacatacactaagtttatccagaaagtctcacttttaccaccatcttcttcattcatttgttcctctcctccataggtattgatttttattagtcttcagtttatccttccaatgtttctttttataaatataataaatttatgcttatagtcatatggagtgataacatatgatatgacagataaaattctgcctcttgccactttcagttaacttcaatacatcttgaacatctctgcatactactgtatagtttctttatactttatttatgtctgcatagcattccattatctgtatggtttataatttaattgtttagagttgtgttgttagatatttgttttggttacaatcattgactataaatgccagtatcagtcttgctttcatagcttttcaacttacagacttagaaaaaatatatttacaaaacatcacatttccttttttataaaatctctttcatgcattttaaaatcaatattgtattggaatatttgtaacaaatatacatctgaagtgctacaatgagcagaacccgtggcatgcttataaatgtttaagggaaaaaataaatatgcttaatttgtgatatctgcagattcccatggtgtaaatattcccaccatggccaatttcaagccagcaatgtgaggtcactgaaagtgaagttgggaagagatgtacacaattcaagcccggccagaggcagttccagcac

SEQ ID NO: 41923 - DNA, 1179 bp, Bovine  19866880491264
  misc_feature (1)..(1): n is a, c, g, or t
ncagaaggctggaaatgcattataaatcaggatgtcattaagtgtgggacccttggactcaaaccccagctccacggcttgggggaccttgggccctcatgtcacttgctgcaccctggtttcatcgtctataaatgtggatggaccaagggggcctgcttcttaagatgaaatgaatccacataagcatcacgctcagagaccggcagacagtaaataatcatcattatcatcatgactgagtctttcgttccaggaaggcaagaggagcaaacttggggtcctctcccccaatatcaggtgtaaccctgagtgtgtacccagccttgacaatcaggagtggacagatcaccatccctgtctaggctgaggctctgtgaggtcaacccctaacctctcaggctggtatggtgcctggcgcatgctcaatactcgctgaatgaacggatgagggagcgggtacgatgggccacggcgggcagctgtttgagggcaccacgcagcaagggcgtcccggggcacttgaaagccttcctgctgtgggctgtgggctcagaggcaccgttctttaatcctcatggtagtcctgcagtgggctgcctcccacgttacagataagaaaacagagaggcagagacgcaaaggactctgtccacagtcacccgggtaatgcgtggcgaagccctcaggtcagcgggagaccccttctcctccccatccaaccccacctgcgtgcgcttctgggccccgagtcctgctctccccagagaaatgagcttatttcagtctcttcctcactgaccacaaagactcagtcctgtcctcagaaatatttggaaagttttatttaaatgttttgtgttcccttttaaccaacaccaaaaagagaaaattttttggctgtttcgaacaggagcgtcccttcagagaggctggcatgtatgtttagagccgggaagcgtccactttgccaggctcctcttcccagcctgggtcacccggggctggatggccagtcctcggaaccgacttcctgggagccccggggcgaccttggaatgagggagtgagcaaacctccctcccgaggaggacctggtctcccctgcagttatggacagacttggggaacgggccatgagcctggtgggttccagagggacggggaagggggtggggg

SEQ ID NO: 41924 - DNA, 1283 bp, Bovine  19866880506013
  misc_feature (1)..(1): n is a, c, g, or t
nctccaggagatcttcctaaccgtgggattgaacctgggtctcccgcattgtaggcagacgctttaccatctgagccaccagggaagtctgaataagggggtccgcatttcctcctcccagatcctgcctccccctcactttccctctccttccccagcctccctccctccctcaagaaccctctcccttctccacactcacctgccttttccaccccttgctggctcccggagccccagacccagggagagctgacccaggtctcaccctctgcccaatgagtctccatgtgctagaacactgcgttcctgccccttcctgttaccctggcttccagggcatgggggtgggcaggaggcaggcagctaggggatctggtggctctaggtgtgggaggacctcggtgggcagcagggctcagctatgaccgcaggaggcctctgtctcccttgtgtccaggccccatgctgtgagtggggttgggggcagcagggtggaccgaggccaggccatctcctgaccatccttttccacctgcagacgtacaacaccaacgcccaggtccctgatagcgcaggcaccgccaccgcctacttgtgtggggtgaaggccaatgagggcacggtgggggtgagcgcagcaacccagcgctcccagtgcaacaccactcagggcaacgaggtcacctccatcctgcgctgggccaaggacgcaggtgagtggggcgagccgtgcggaacggggcccggctctgtgacctgtctgggcctcagtcttcccaactgtacaatggggagagagcagaaaaagaggctcgccagggcccttccagctcccatgttctgggactccgcaaactcttccgggactctcttgcatgacagcaaagtctcgcggtttaggggattgctcagtgtgggtttgctcccaactcatttccctgagtctatttgtttgtgcttgaaaacgtagcccctcgtaggttcagcttgaggaaggtgagggatctagcccagctctggtctatgggagtccagtagctgtctttccccattcctttcctccttggaactgggaggcaccatgatgtccccctggcacctctggagtcacggtgtgagtctggctgatgtaggtgacagagccacactccatctgagagctcttcggaggggcccctgagttcttgcagggcagccgtggggcttcctgcaggggtgggattcggggggtcctcggtggagaaggagggctcccgcctaggtgctcacgcttcaagggc

SEQ ID NO: 41925 - DNA, 2152 bp, Bovine  19866880548904
  misc_feature (1)..(1): n is a, c, g, or t
ntctcagactctgggtctctttctggaagcttctttccggtctggcggcatctccctttccagatgtgaaatacagctgctaaaacctcttgatcttcagctttttgcaagtgaagtctctgctcttgctggcttgtcccttgctgcaggcccttatctgaccccaaagccttagactgtggggtaggggctgcaagcggggcaagctggcatgcgacaagcccattccccaggttccctggggtggagggggctccagtccatggcccgacatgctctggattctcccctctcactgcagatgtgtgttcccaacattttttccaagatgaatctcgtgttgctatttcctgtccagtcccaagccccagtggcctctccctccctgcaaaaaagccctggaccttgcttaccaccagagttttcttttccagacagtggcctggtatctatggggtgccaggaatctctgtgccatccatggccttgtttgcatgtgggagggggagggctggcagtgacacaaggagagtcctccccagctggggaggatcctacccgctagccttctctgcccagtcagtgcccctgccccagccctagcctcactctccccttagaccaatcagggcctgcgtaggacccacccaaggggtagggaacattgttctctacccctagccaggagagaagggagaacctctgatgttggactggtcttgtggttcttaaccagtgagtgtcagaatgcctgagcaggcatgacattaaccctcctacctggggtggggagatgactcagtgtctctgaggaagagcccaggaatctatttctcaccagctcctgaaggttctaaagcttagtcctggatgcagacctcatgggcacggcccagaagtccactggccacccagggcgggaatgggcatttgaccaaagggagagggaggggagagaaggaacaggaggaggaatttgcccatggattgtgagggaaaggggcttaagactatagcaggggatagacatgggcagtgcagaccttccacaaggcttggtagcactgccaaaacaaagatgacccaaggagggagatacatacagactgcccgtgctgagtggtgccttcagagcaaagtcatgctcaggaagcagctggaatgagtaggtgatgacactgttgtccattcgttcaagcccttattgaccatgcagtgctgagaaggcagagatgagctcatcacagtccctgctctcagggtgccgtcattccagtgtaggcacagccattccacggggagccccagacggtccagaacccagcctgggggcagaggagtcataactactcctcccagaagagggtttctttgagtcatctttattggggtataaagtacatgcaataaaacatacgcattttaagtgtacaggtcagtaatgggaatgagatgtattgattatatactcaggggactgttactccaaaaggtttcctgtgtcccttcccggccggccccaccccacccctggtcccaggcaaccccgatcttcctgtcatcataggttagacttatctcccctgagtttcgtggaagtggaatcatacaggatggcgttttctctgtctgccttctttcactcagcacaaagtgtttgagattcatccctcattccaggcctatcggaacgtgttctggtttgcgactgagtagttagaggaggtggtggtgttcagctgagtttcggaggatggatgggagttagccagataaaaggagaaagggcactccagcagagggaccagcgtgagaaaaggccagaggctccagggacgtggtcggtgtgaaggagagggactgactgtctggttttttccttctccttgggtgcctctccttgtctagccagtgagggctgggtttggtttttacaagggagcctatttccttctggccgggctgggctccccagatagggctgaggccaagacactcgtgccaggccatctagaactggacgtgtggacccgtgcactcttgtgcttggagacactgcggttcatgttttcctctctgttatcttgaaaactcctttggaaacgcctcagtctgttctaggggcttaccaggtggcgcagtggtaaagaat

SEQ ID NO: 41926 - DNA, 1218 bp, Bovine  19866880656980
  misc_feature (1)..(1): n is a, c, g, or t
ncagccaggggccccacggaaggacaggaggtgtggaaacaaactgagtgaggagccgcagctgtgatctggaccagcaaactccaagctctcaaagggcccgtggtcccatggtccatgagggattgaacagtacccgaccctggctgagtagctcctaaaacgaaggcacttttgtgccaggcctccctttcttctttataaccaaggagctcttcaattacagcactttcctctttacagaaaaacctcagtgcaagaggcctgtgatctctcctgtgtcctgggggccgtgtgcagagactgttgggggccctggggagcaggcagcaggcatgtgcggtagggggctgggcacggagcctgggtactgaagactggatgaaggccccagagctctgctttctctgccctatttcaatccaaaccactcaagactgaccactcacgcatggctgcctctgggcacaagccttctcttttccaaacacttaatacactgcgacccagccaccaagcctgccctccctcccaactgctgaaaaatgagagctggcttcaagaaaaaacaatctgatgtctaagaaggctggagagtgaaaatgtggggttggtacgacagtacacttggaataatgcacaagggagtcaaaaaagggaatggaaacaactctcctctctgccccccgcccctccctggccagaccagaaagaggaggacggggacagagggagaaaattcgagggttggctccctgaagtgtgctgtcccaagagcagcaagtcaggttgaggaggggctggtgaagaggatgggctgcaagggtggctggaacaaagtcctgctccagtgagagcaagaccggatgagggctgggagtcagctccagggcacgtcagtcaaggaatgttctgaggcctgtgtttcttgggggactgccctgctaatgccggacgcatggcagacaggacgccacccggggaggatccactcttggatgacaatcgtgatcacagttaggaagtcctcattgtgaggacgaaagagtcaagcctaaacgtggggacagcactggccacattcaagtaatggaaagcgccccaccagggaccctgctgcggctggacaagagcttccccggggggtccgttcttccttgctgggaacctatgtgccacgctgtagggtacaggatgaggaaaatgactggacccctg

SEQ ID NO: 41927 - DNA, 1682 bp, Bovine  19866880662729
  misc_feature (1)..(1): n is a, c, g, or t
ntcctggcaaccctagaacaaccctgatctgaagaagagtctggaaccgggagcgcaaacatctctggagagaccagaggagctggtgcacttgcctcctcttgctccctgcatcctgccaacccctccactgcagtcttcccaaagaccccaaactgcggattctgttggtctgccccactgctgggcacaggatggctgggatggaggtccgtcctccgcagctgccccagaggctgctcctgctgggggcagccacgctgactgcatcagctctgcacactggtgagtctgtgggggcttggctgggcaggcaggagactcaggcccaccacccttagagcctgtttccccagtcagcattcaccctgatgggctgggatcccttgggttgggggacactgggaaactctgagtctgctcttgcctggcacccccaaatccatcccagtccctctgggtggctggagctccaagtcacccagaagcaacggcctggaggcaggtggggcagccctcaggtctggcactgggaaacgctgtggactttggagtcagatgaccctgcattcacacactcactctacccttgacatcacttttttttttttttttttgtggcctcactgcagggcatgtgggatcttagttccccaaccagggatcaaacctgtggccccctgcactggaggcacagagtcttaaccactagatcaccaggggagtcctgacttcacagtttctaagtcttcatttcctcagcagtaaaatgggaagaacaatagagccttgctccttaagggactgttaatattatccatgtgagatcaaccatgcaggacacacagacagcaccctgcgcataggaggtgctcgtgcactcactctctgaaacaccccctgtcccatgtgcctccaggacaggttctgcctttagtagatctgcacagatatgagaagatgctcctacatcccgagccctaaaggagaatttctcccccaaagacccagatcctggcttgtcctcaagtactactagtgcccttaccatcaccagaaaagccacctcctgttctctctctctccttacaaaaatcagagatggcttgaatacttacacattatctcattaaccttcataacaattctgtaccaatgaggaagtttggggctggaacagataccaaactaaagggaacgtttaacataaggacatttattatttcacttaagaagagaggccttaggtgagaccagaatggttttcagcagctcaactgtgcgaagatcagatcagatcagatcagttgcttagtcatgtccgactctttgcaaccccatgaatcgcagcacgccaggcctccttatccatcaccaactcccggagttcactgagactcacgtccatcaagtcagtgatgccatccagccatctcatcctctgtcgtccccttctcctcctgcccccaatccctcccagcatctgtgccaaggctcctccataatgctcatgacctcatccttgcaagatggctgctgcagctccggacatcacatcctcagtcaatgactttcaaaagcaggaagaaaggggggctactcatcccacaggtttccttcctttttttttttttttttgttaaggaggaaaatctttctcaggaaccctcagcaagcctctc

SEQ ID NO: 41928 - DNA, 827 bp, Bovine  19866880665254
  misc_feature (1)..(1): n is a, c, g, or t
ncacccagaggagcagggccccagcctgccccgaggccggccttcaggacttaccgacgtagatgctgcccttggtgttgaccgccacgttcgggcctggggactggccgctcaccagctcctctccatccacctggatggagcctctctggccctctctgcatcggaacgggagtccggccctcacccgctattcctcgtcctccccagccccatgagggtcccctccctttatgacagagaggtccgcctcctgctccccaagctttttcctgttccccaacccccggctgggtgagagatctggcgccacacacacagcttccgagcaccccacccggatttcccccatcccctggggtgctcgtgtgcccatccccgcccgctgtcctggaagtctgtgctctgggtggtgatcgccccgctgaccccgccctcaaattctgtctccccagagctcaatgcctgccccctccatgtgatgggggaactctggcccctcaccccagtgcccgggcgggggggctcccttaccgcagcgccgtcacacgatgccactcgccatcgttaatggggtcttcggagaccaggcgggcctccccgctgcccagctggtagctgcaggcacacaggccccagagggcgtgagcagggcttgggactggagtgggggagttgggggtgtggctggggaggggaccggagggaaagccagtgaaggaaaggggggtgagggaagggagaggaggggccgggacccacctgaagacgaggtgcccgtcctgaagcccaagactgatgaagtccttgcctcggccggacttccc

SEQ ID NO: 41929 - DNA, 1541 bp, Bovine  19866880702365
  misc_feature (1)..(1): n is a, c, g, or t
ntgcctgcccttccccaggtcggagtcccgctgctgaacttgcacgcaaacagggaagttcaggcctgggaggcccttgagccccttcccatctgcaagggaagaacactggacttgaagctggacagccctgggttccaggccctgtggccatatctcaaatgaaggtccttgggcgggtccctttacctccctgaaccttcttttcctactttgtgaaatgaggaacagccctgcctaactccccgagctctcagaagtatggaaatgtttctttcatcgtgacatgtcacacagatgtgtacaaggcattgctttcaccctcgccctctccccaaatggcccgtcattcctggacccccagctgtcagcacaagtcctgcccagaatagtgttcaggcaaagtttgcgtgaactgaattgattcgttcttggttcgtttcagcaggtacctgccgactccagggccagcactctgggtgactggatgacaaagcccctcggtcctgggaggagtccaaacacacccgctaaagatgcaggagaacaggaggtcccaagtcatctcagatgctggagacttatctgtgcgtcacttattcactgattcatagcccctctccccctccaggctctgagctccatggacacgcagaccctctacatctctagcaccttgcatgtggtttatcttcactgcgaccaaatagagaggaccttatggatcccagatctgttcctcctggcagtcccttctcttgcgccccaggttcctcatctgtaagatgggagtttggggaaacaaactcaggaaacatagaccttagtctgcaaagttcctgcatatcacaagcctgcagtgggcacggctgttggcatcaccgctatgatttttaccaagggctttcctatggtagagatgagagcgatcgccccggggcttggagggcgggggggtgctccagccccgcccacggttggccctgagagaccagagggcagtctgctgctgcactcacaagtccatttccacctcccagaccgtggttcttctcatcttttcagtgagacgactgagggtcagctcagtgagagaattctcctaggtcacgtagtgcctaaagagatctggccctgggagagggcatttctgagggtctgcaggatcgccaccaggagcaacacttgcctttgccacattttctcaccccgtcttaacagggaggaaacacagaggcccacagccagtgagcagcgcctcccgccccggcggagggcctcagcctcagccctccacccgccccctagggcactcggatccgagccgggccctggccaccctctgctgctcccggaagtgccctgtgtctgcaccttgatctccgcacccacgatgccaggaaaccccagtggggcggccgagctgccgggtatttatagcggacatgcagcaaagctgccacccccatctgtttacccaacaacgctctgctagctggacactttcagccccgccggccacagacagaccctcaccgccg

SEQ ID NO: 41930 - DNA, 1374 bp, Bovine  19866880742916
  misc_feature (1)..(1): n is a, c, g, or t
nttgtgccctacctaccctgcttagcctgggtaccgggcctcttagggcgaatggaatctgttgtctaaacagggagactgagaagccgcctgcctcactagggttggggcagagccatagaccaggtccacgccacccctacccccaccgggctcttcactggtttaggagcaccaggtgtgctcccacatagatggtcacatttgggtgccgggagggcgcccttcaccccatggcgtgccctgggctcagcgcggaggaggggctcagtaaacatttggcgttgagagtgggcaggaggtggcagggatttgcggggcccagggagagtgcagatggaggctcacataccatatgtctaaatatttgcaagttataaatcaagctaacaaaatgtgaactaaaatatgttctattctcctaccttgacaagcacactttcatagcaacctggaaggccagctctgaatgcagactcctcggactcctcagagcccgcactggagcttggtggggcaggggcccctgtgtacacgtgtgtggacacctcagcccgcacacgccagctaggcgcacactgccctgctcccgagagagccgcccccggccacccctccgccgccgagctgggcatgtcagtggcgccatctgacctccaagcttggatctgcagaagagaccctcccaggtcctcctggtattgggcttggggccacctgggcatccagagtgatctagagggggcacagacttcaggtggcacatcaccttggccccagggtctcgtctccctgtggtgagagcttagctggaggactagagtttgaggtccccagggcagggctcacgttcacccaagggaggtactgaattactaaactgttctgagtcaacgtatatgattcttacagtctcagtgtggtaggctggaaaacaataatagtaataataataataatttaaacagctacaggcaattattttagagtgtccatataatgtttttccaaaccgagacatttttgagagtgaccagggtctccaactggaagatttgccaggagtcaggcataaagcaggactctgccaggcaaagtagcatctctccttttgctaaagtattgagcccgcacgtgctaggtgttgttctcaggattgtcacgcattcagtcctcacaagagacctgctgctgctgctgctaagtcgcttcagtcgtgtccgactctgtgcgaccccatggactgcagccttccaggctcctccatccatgggattttccaggcaagagtactggagtggggtgccattgccttctctgcacaagagacctgggaaggtcttttctctcctttgacagatgaggccatgaggg

SEQ ID NO: 41931 - DNA, 1710 bp, Bovine  19866880776716
  misc_feature (1)..(1): n is a, c, g, or t
nataaggagttagaggacgtgctctcccacctcgggtgaaactgagagtacttcctggagaacgcatcacctccccctatcgtcacatgacttctagaaggaagacgatctttgctggggaggaaaccaaggacacccagctaggtgagcagcccagctgaggtttgggataggaacccgacagtgattcagatctcaaaggcccttcccgttctgagatcctcgctgtgtaataaacaaagcacagactgctcccctgctgcgggaacccaccctgtgcgacgtcttacctgcagtgacgtcaccgtggacaggtccttaagcttcccctcctcgtctttcaggttataaccctcgggcctcttatcacgttcggtaatcttcccatagtttgatagttttatctttaaagccagaacaaagtgaaacaggacacatgatgagcaccggcatggaaaatgaaggacctgctgagcccactagataaggatgcatctacccacaagtggcttaaccttatcctgttcttggatgtaccgttgtttttgtttagtggctaagttcagtttgactctttggtgaccccatggattgcagctcaccaggcttctctgtccatgggactgtcctggctagaacactggaatgggttgtcattttcttctccaggggatcttcctgactcaggggtcaaacttgagtctcctgcattagcagatggattctttactgctgagccacctgggaagccctcttgtatgtgtaggttctttctaatttaattccttctctaaactgatgtgcccatctttgctaagggaacatctgtaaccatgctctgctgctgctgctgctaagtcacttcagtcgtgtccgactctgtgcgaccccagagacggcagcccatcaggctcgcctgtctctgggattctccaggcaagaacactggagtgggtagttcctcacaactgatcacaaaggtgatactgctgcgtcaaagggcatggccctttcaagggcagttatcagtctctcaactgatttccacaaagaccatcctaacgaagcttcctgctcttcacccttcatgggcagaccaaagagggtaagtgaagtgaagtgaagtcgctcagtcgtgtccgactctttgcgacccaatggtctgtagcctaccaggctcctcagtccatgggattttccaggcaaaaatactggagtgggctgccatttccttctccaggggatcttcctgacccagtgatcgaacccgggtctccctcattgcaggcagacgctttaccctctgagccaccagggaaaccaaccccccaaccagggatcaaatccacaccccctgcactggaaggccgaggtctagacaaccagggaagtccccacgcgtcatttttaaaggctgcatttcattattcaggcatttctatatttatccaatcaatcgcctactgttggaatttaggttatttttggttactgtaaatttttgactgttggaaaaatgcatgagcttagtttcttaaactggaaggaaaactggttgttttctccctccgccaagaccagttggcagtgacttttcctccatcccgtctcacagttcccatcagtgtccccagacaatgtctgccctttccatcagcagcaaaatcctgatggggtgtcacccagcccactcaatttttccgcctttat

SEQ ID NO: 41932 - DNA, 955 bp, Bovine  19866880783679
  misc_feature (1)..(1): n is a, c, g, or t
nctatggagcaggtgagctaggcagtgtgagcccatttgacagatgaggacactgagtcttagggaagtcaaaggactggccaggcaagatggcagagcaatatccgaactcaaagctcctcactccgcagtctcgagggtccttcaggccccctccccacttagctccctgcctcctacctggtgccgggcgggcaggctgcccccacgcttgtgccacgtgacctgggcgtggggctgcccagaaaccaggcagttcagatccagcgtctgtccttcagccacgtgtgaggaggatgactcgatccggaccgggggggtgacccccagcgctggggacagagggcagagagtgaatccccagctgggaggaggcggggaggggagggtgtgagtggaggtagggtctgctggtttctggggtcctgcctttgctggagtggggagcctccccccccgaacccccatcactcaccaggcacagagtctacaggctcaatgctgaccaggacagaggactccaggggcactgaaccgcccaccactcggcacacgtactcgcccgagtcggccggagacacctggtacagtctcagcagggagccgtgggtctggccagaatggaggtggggtcagagggggccctctcaggatcctcgcactgatcacctgccgccctgcctcactctgagcctgagaactgacttttaactccattctgctcagaggtggagaagtggctgtctcatcccaggaccaggggtggtcaggagaagccatggggaactgagcaaacactaacaccacactccatcaacttctggacacatttaaaataaaaaaaaaataggatggagctggtaacatgcatattacttttgctttattattatttttgggtgtcaccgtgggcctatggaatcccagctctccaaccagggactgaaaccaggcc

SEQ ID NO: 41933 - DNA, 825 bp, Bovine  19866880893732
  misc_feature (1)..(1): n is a, c, g, or t
ngtggggcgtggggaagcaagatctcataggagctgtggtgagacccccgggcgctgctggagctgcgcaggggcccgagggaaaccggtagaggcgtccggggcccaggcccacttcccactcagagaaggcggcggggattccaagtgcgggaagaaggactgatccctggggtctctcctgatggttgggcccacaggagcggacacgggccgcccttctggagacgctctatgaggagctgcacatccacagtcagtccatgatgggcctgggcggcgacgaggacaagatggaaaacggcggcgggggtggtggcttctttgagtccttcaaggtgaagggcgggggtccacctgcgcgcggagggacgcggcggggatggggcggggacgcggtggggatgaggtgcaggggtgcggggcaggaccaggtagggggtgtggctacaggcggactcgcccgggaggtggggttgcgtgggggcgtggctcggggtggagctaataggcgcgagctcgggccaggtgggcgcacacctggggtagagtccggaggacggtgagcctcagggtgacccaggttttagcgtgggcctaaagactcgtggccgtgcgcgcgcgctctgccggggcagagccacggttgggagctgtaaggtgcgctctggctggaggaggagctgatggttggaggcggggcttaagcttgggggcggagtctgcctggacggtagaaggaaggagcgctctggtgccaatggtggtggctgccaggtcagggcagagaagagaggacccccgtgtcctaccgagggaaagaaa

SEQ ID NO: 41934 - DNA, 1908 bp, Bovine  19866880894781
  misc_feature (1)..(1): n is a, c, g, or t
ncctcgtcccggcttccttcccgtgcggttgtgaattgtcttctttgttttctaggctgatgaaccaattgcagattatgctgcaatggacgatgtcatgcaaggtaaaagaccagtttgtttgggggattgttgaggaccttgttcaacgatggtggggttgtagttattgaatctttagtctacagtgtttctacttttaagcttgaataaagcttctacgtgctaaggtagaatcttaccgttattgctctttttaaagaatgatatctatgaaaattgagaaaatggaggaaagtgtagtatttagtttactgtaggaaactgaaacagatggaagcctgcggatagacgagcttagcaaaaagcagcgctaattcaggttgcagagcctccggcaggtatacaggaatcagatgccccaggtgcctctgaacataaggagtgaggttgcaacctaaaggcaggttggaaactgtgtaagaagcagttattcgactcaccaccggcacacgtcctcacagcccttccctttacatccattcagtgcctcttcttgacctgtagagtttcttcgaagaaattaaactagaaaggtgagagacgtgttacctaccaaatagggagaccagccctttgttcaaacaccgggcagcccatctcttacctcccacagtggagggaagagattctcttctagggaaagcagagaagttcaaggaaagagcctacagatatttttttaaaagtagttcatctcccagctacctttgggtgaagccaaaccagacagttttcaaccatctttttagtccctcacgcttcttagaggggagtggacgaccagagagctccggacagtgaggcagagggcagcatgggaccaaaagacatcagtcagcaggtggacaggaagttgatgatgcgggaagcacaagaaagctttaaaagtagctgaacaataccagagaaagagcaaatagtctgtatgtaagcagcgttcagagaacagaagacaattcatgaacataaaaatgggtgcgccaaggcccgggtacagttaagtgcaaatctagagattaagatcctaaacacacctagaggtctggaagggaaaaccagtcttattcctgagatgaagagtcaaggacaaaccaacgggctagtacccacaagagaatgaggaagtgtgagcttcaggctagagttcttgactagactattctgttacacgcgtttggtgactctgtgaatataaggcctcagaaaatttctttctcacctaccgtttactctgggagggtgtactctgttaaacaagagtaagaagaaagatgtcaacagtggaacctgaaaacagggatccaacgcaggagtagatgccctagaagacagttcgggggcagttccgagcttccagcacgaggcactgcagcaggtgttgagcacgcccgctccagattggagcacgctccctgggaagagtgcaagtgacagatgactgtcctgaggagcttacccttgaatcagagatggtacagagaaaatgaagcacagaaataatgcagttaccaaccccagagagacagagtcataccagacaagaacgatcaccagggtaccccagagggttcaaccgtggacactgttaaggagtaaaaagatagtgtaagcactggagattggcttaacgacaaaaaatatccgtgtgtcaggaggatggttaggggccatgtgttatgttagaggtgggttgtttctttgaggaaactattaggtattaccaaaaattgtgaattagcaacatctagaaatgcagaggttaaacaccagaagacgtggccgcaagggccaaaagctgttccctgtaaagtgtgggcacaggaaggcggggccccacggatttct

SEQ ID NO: 41935 - DNA, 1082 bp, Bovine  19866880896740
  misc_feature (1)..(1): n is a, c, g, or t
ncgggattcttttgtttagacaagtatcttccaaagagacataaagagctttgaaaattcttgggcatcctacaatacaggtttgagttaattaaaaaaaaaaaaaaatccataccttgcttttcaatttctgttacaaacagtagtaagtaaaataacccagaagctgtctgtacttagaacttaaaatttctgaaaaaggactacagcaatgttgaatccattttgtgcccacatacgaattttcagagatggaatcaaggaaaatgtgtaatatgctaagcagtaaataaacgctttaattcaaaacagaggaaatttatttttaaaaattccttcatttctttctataatgattaaaaggaatgctttttatattaaaagataaataattaaaagaaaggttcttacctgctgttgccctgtgtctaagcccaaggctttcacaaatcctgatggatcgatgtatcgcctattactgttttgtaacaaggcaaataagtactggagatgctcacaaatcgtttgaggctcataatctattaaagaaatgtttgtttttaaaaaactgctattttaaaaaaatatatacaccttgtcacatgaggacataattaaaaaaccttacgtccaaactaaattagttttattacatttttttttaaactttgaaagaaactagtaaccacatcttttggaagtaatgaggtaacctgggctgtccatatacattccctaaagccaagggcctacccacgtcacaatgacaataatgatcatgactacagtttctagagtatcaaatcccaccaaaacttccaatccaataaaagccatatactatatttactatgggcttccctggtggctcaaaggttaaagcgtctgcctgcaatgtgggagacctcggttagatccctgggtcgggaagataccctggagaaggaaatagcaacccactccagtactcttgcctggagaatcccatgggtggaggagcctggtgggctagagtccacggggtcgcaaagagtcagacacgactgagcgacttcacttcacctcttcacttcaccatattt

SEQ ID NO: 41936 - DNA, 1928 bp, Bovine  19866880921748
  misc_feature (1)..(1): n is a, c, g, or t
nctgccacctcctggacagacagtgtcaactaaccccctctgacttgtgttttccagacgtgtcttcccccgctggaagttttgtgtgagtgatacagagaacacctttgggcttcgccctgggccccatgttcgtcaaagcgaccttcgctgaggacagcaagaacatagtaagtgcccccccacacacggaggccgtgacatcacacccgcctcccccgtgagcctgccaggccgcgctctcatccactctggactggctctaccccgggccagggctccggccctaactccaaggttccattttctaaagccttgcgtaatctgagttacctacaacagagaatatgatcatagtggcaggcactttgtctgtaggatttcacgtagccctccccgcttcccagggaggttagtctggccgtctccacctccaagggtaggcagggcccagagaggtcatgttgacagaacagcttgacatgaagtggtggtggccacaggatgcctgtggctgagcgcctggagacagctgggccccagcctggatgccggctttgtctcttcctggtggggggtcttgggacaatactctgagcccaaggacatggaggtgggtgcgtccatccctcaggcggagactgaacggcattgtgcacacgacagcaaccggagcagaatgcgggctcagggaggggtagccgctgtggcattactgttggggttcagtcgctgactcgtgtccaactctttgagaccccacggactgcagcaccccaggcctccctgtccttcaccacctcccagagtttactcaaactcgtgtccatcacgtcagtgatgccatccagccatctcatcctctgtcacccccttctcctcctgccctcagtctttcccagcatcagggtcttttccaacgagttggctctttgcatgaggtggccaaagtattggagcctcagcttcagcatctgtccttccaataaatattcaggcttgatttcctttagtaccatttttattcctaactttaactgcacagattttttatttgcagtcagaggttagcaaactgactcaaacctcgtacgtgacctgcctgttagtggctgatgcagattctgagtcacgttctgtccgtcgtcagtctgtctgctcctcctgctgcccgactcccccttcccctgctccggagtctttttcagcctctggatctgcttttgacattcatctccagcctgaacagtctttctggaaccacccctcagaactcggcttctctagatgttaaagcccagtccatccagaaggaattccgtgagccactacctctgagaacagatacacgtcctaggatttctgaaaagaatcacagcgcacggcacaggcacccctaagtcccgccgtaagagtcttttccagtgttcccagagcttgccctgagtgtatttgaccagggagccctgtttatagaaatccgtctcttctcacaggatgctagcgtttagaggaaggaggttggggaaccatggctgtggacccccttcctcagcccagcacctcggagcacaaggcctggagccaggatctgagtttagtctctggccccacagcatccttctccatgggatgcccgctgcccatggacaagttcagtgcccacacgtgactgtctcctcaggccagcgagatcatcctggagatcaagaaggcgtttgaagagagcctgagcaccctgaagtggatggatgaagatactcggaaatcggccaaggaaaaggtgaggctggccaggagctgggaggggccctgcacagagggccgcgacctccgaggaggaggtgggcgaaggagggactggctctagccggtgagcccaacacgggatgctgtgggtagtccagcacgatggcgggagagccgtg

SEQ ID NO: 41937 - DNA, 1808 bp, Bovine  19866880963688
  misc_feature (1)..(1): n is a, c, g, or t
ncacatatacacatacacacacactacaatacaaagatggagacttgaaggaaatggtgagtggaacacaagatggtatggtacatccctgaggaccttcaacatttaaaagttaaataggaaaagccagtaaagacaacatgggggagagagagtgaggtacagaagaaactgagagtgtgtagtgttacaaaggctaagggaaagagtagctcaagaaggacagagtggccacctgtgtaaagcactccaagaagtcaaggggataatgaaaaaaattgtcagttgaattccacttcctgtctattagggcaggtgggaagggatgagacccagaggacatggaaaaggattagctttggtcaggagaaaagattcctcctcctttgcaacagaagaatgggtacagacataggtaggtttgtaaattcattgcaaatacattgtgaatttctcacatcagaggcaaaataatctgctaaaactgagaagagaagccaaggagtctagaagctttgaagtggtaaccatggagagcaggtggatcagtcaagggaaacttggcaggatgtatgagcagtgttgagctcccagttgaggctggcgatcatgaaactgtagtgataatcatcagcatgttatgtgatatttcccctgcacttctcagctgcctgatgcaatcacagaaaagacagatcgctagatgagccagcatgaggttttggtaggagcagaggttcttcatcagagtttgtgtcagaatcgcactgagattttttagaagcactcatatccatgcatagactgtatcccagggttctggcttggtaatcctgatggttggtctgtatatccctcagtttataggaagttcttccatggtgtgtggcctccagttagtaggcattcattcacttggtgcaactacagacagactggccagcgaattagcaagggagagcttaaaatgatggacagtaaagtctcaaccagattagagaaagaagtaaagacacagaatctcacacattgggttaatatggatctttctcaaactacaatgaggttatatcccaataagtccattttaagttgaaaaatcttaagtcgaaaatgcctttatattaatacatctaacctactgaatatcatagcacaaatttgcttaccttaaacatgctcagaacaattagcctatagttgagcaaaatcatctgacaaaaagcttattttagattaaagtgttgaatacctcatgcaatttattgaatactgtactgaaagtgaaatacagaatggttgtaggttatttaccctcaggttggcacagctttcctgggagctgccactgcccagcatcaggagacagaattgtactgaatatcactagcccgggaaaagatcaaaattgaaaattcgaagggcactttctcctgaatgcatattgcttttgcaccatcataaaattgaaagatcataagttgaaccatcataagttgagtactgtctatacagagatcaatatttaggaggtcccccaaaagtcaaataacatgtcctgtgtagaaagagtgctgatagcaggtttaaattaagcaaatttagagtatattttattctcatcataactttttatagagggcaaaaaataacctgtaatctcccagaaagctgcatttttttggtatgtgatggcccagaaatgctcatcatttctttgaagctaattaaacacttaagtttccaaacacatattatgtctcatgatgctgcctataggggtagagcatctccccccattcctcaga

SEQ ID NO: 41938 - DNA, 1104 bp, Bovine  19866880995852
  misc_feature (1)..(1): n is a, c, g, or t
nggccgcccgtttgttagcctcggggcggtggccctcatttctgtggagccgacattggcttccagcccggcaccttgccagccaccttggagcctcaccagatacccggagcggagggcatcaattggccttggccatcctcctctgggttgggaaggctctttagtgccaactgtggagcaaaaggcagctcacccctgggcaggcagcccccaatcccccccaccagcccacgtcccagccccgttccacccctatcagaccagctgggcccccggcccctggcagcctccccttcccaccaagccctcctggcctgcatcgccccctccccaccaaccccacacctagcccagggcccccttgccctcaaggggctgcaagggaaactccagcccactcgtaccaggagctgctacaggcagagccccacactgaaaggggcttcctgcccgcaccaggccacgtccccccccacggatctggaagtgaaggcccaggggacatggggggaagaggccttggtggtcagaaagagtaagtgccttgggtgcggggagctgggacacatgactgggaggggcagggaggggatgtgcctgtcctgccccgtctgtgggcgcccgagggcccgcctggaggcacgcgcccgccccgccagcagcccccagacgtggggccgggacgcctggcccctgtgtcctagaaggggccctcctgtggtctttgtcttgatctttcttaataaacggtgctatccccgccagggctgttgtctcctgtgtctttgattcaagcgggactcgtggtccctgagggtgggccggggtgggcccaagcaggatggaccagcgaggtccagggttgcagtgagacagcttcaggcgcacgaggcccctgctccctgcccctcgtggatccagcagagtgccagctgccaaaacaagctgcagggccaactgtccaagtggccttcagcatgaccctccgaggcagaaatcgtcccatcttccagaggggcagactgagtctcgagggctcagaggtagacagccctgttgggggtgggggcgggggcagaacccggggaccgtccgatccca

SEQ ID NO: 41939 - DNA, 1124 bp, Bovine  19866881001890
  misc_feature (1)..(1): n is a, c, g, or t
ncctctacagctctttgtgtggttaagcttcctgatggagggaccacttcgatttggcatcctaatgcctagcctcctgtaataagtgggaaatgaatgaatcaccaaacaaataagtgaatgaacaaatgacctctggagctgtgactttcatgtcttttttttttttttaatttataggattggaacgtcaattaacttctgaccactggcagcccacctttcccacgcacatccatcgcacctctgggctccagagagaaagcaggtcttggagggcgccatgatttcaccattcttactgctggctatcggtacctgtcttgccagctccttagtgccaggtaggattgggggcaagggtggagggagggggagagctggtacagctgggataggatgagggcagtgtccgtggtcggtcgtagagtcacccacagtatttaagagctggaaacaaatgttcagagcaggacatcccagctactacatgtgcttgtgctggaaaagccagtctttttccttctatattattctttaattgcagtttctagtctcgcttagctctaggaatctgaaatagaacttacccctataaactcttctataaacccctgatagaacatttctttatattttgtaattcttgctttaaaactcaccttcaaggagttgtatttatttttttgtttttgtagtttatgtttcctattggaaactcacatgaaagtgtttctatagtgtggtattctgtttgattcttcgatcaattctgtcagagtgtttatgttaatttctcagtttggggctcttgcactttaaattcaggctcagatatggagtgttttataatttgatttatttttgactgctgggtcttcgttgctttgcatgggaattctctagttatagagtgtgggctcggagtcgtgacacacgggcttagttgcctcacagcatgtggagtcttcctggaccagggatcgaacccgtgtcctctgcactggcagacggattcttatccactgtggcaccaggagagtccttcagatttggaattgagttcacatttcatcgcggctttctctctccaacccttccatatctcccaggcaaaacacgta

SEQ ID NO: 41940 - DNA, 1328 bp, Bovine  19866881022472
  misc_feature (1)..(1): n is a, c, g, or t
ncgagtggaggactctgcccccgccagcccctggagttggcctcctttccgcaaccagggcctggcacccactcactgctcagggtgtagttgcccaacagatgacacatttttccatggctccagccagttgctaggaatctcatattactttgtggtccgtacactgcttttcaccagcagccatctggcaggagcacttttcagtgactagatgaaactgtggaactggagtcaaaataatcacagagggcaagtcagacacgagacatgttagaaacgctcccctccagctccgctacactgtccctcctcttgccccatcattcgcagaagtcaaagcattcttggacgtccctgctggtctggcggttaagaatccgcctacctatgcagggaacgctggtttgatccctgatccaggaagattccaccttgccttggagcaactaagcccatgcgccgtaactactgagcctgtgcactgagggcctgtgctctgcaaagcgaagccacggcgaatgaaaagtcggcacctcaaacgaagagcaacccctgcttgctacaactagagcaaggccacaggcagcaacgaagacccagagcagccaacagataaacgttagaaatgaacagggttctttagaattggcatctagatcgactgcagaaatgacagtgactggcagtggtgagaactactctacggggtggagaaagcatgggaaccacctctggaggagtggcactagagacggggagtgactgtcttcccaaatctccacagggcccgtgaaatccttggtttattttttagtaaccaggcagcgtgacctcttggcaagggcatgggactagggccagacggaatggagatcaactcgagcttctcctcttactggatttgtttggggtaaggatttgcatctacaagttcacgtccgtgaaaaagtgttggtactaacaggttgctgggagatactgctgggcattttaccagtttcggtttgagttctggctaacttacctctgtaagcctcacttgtgctttggaggttcacctccgtatctaaaccccctaccttgcattttttattgaaagtgtaaggctaggtattagccatacagaatactatgcaactgctaaaaaaaatttttttaataaacctttttatgttgataccaaaagactgctaaggcttactgtgcaagaaaaatatattaaacattcataatgtattttgtgtaaataaaaaaggatttctctggcaattcggcagtccagtgtctaagattctgtacctccactgcaggagccagggttcaat

SEQ ID NO: 41941 - DNA, 1676 bp, Bovine  19866881031609
  misc_feature (1)..(1): n is a, c, g, or t
ntgaggaccccaacgcagagatggtgggccagccttttcagctaaagatttgatctcagtaaaggagcttgtgtttagcccacctttggctcgggaaaaggtgggacccctgccgtaattccaggaaaggaaaccagagtcctggcctgcaggggaggagatgctgacagccagaagcgaggaacactcccccagggacgacacacccttcaggtggtgtggactgggatacgccctcctcagccaggagtgtggcagtcaattattttgctattagagttgccaccacttttttttttctttttggttattctggaagcattcatttggatttttccctgctctggttttctttatgtttccataatctttcggctcctgggtggtctggtttccgacaggcagcagcgtcagctggttctcacagagtccatgtgctcatggaggaaatgtggcctgagccgatgtcaccacacccacagaaaggaagtgacagctgcacaaggtggagaaatgtatgtgctgtatccgtatgggtgactttggttaccaggaacagaaaactcaattcaaacagctataaataataaaggcaatttattggctcacattttttgaaaagtccttcaggaaaggcttgatccagcagcttaacagtgctaacaaggacccagttacttgcctttttcaagattagcttcccttacagtcccaagacacctcccagcagttcccaagaaaaagattgcctcatttcgtgatcaggagggtatcagagaagcatctttgttccagaattcccaggaaaagtcctaagattcactctgaagtgacaggtctagatcacatgcccaacactacacaagtcactgagccaggtgtttgaaattcacttactgacttagccctgctccagcctggcaccagaagtggaaccagtctgtgcaatcacacggctcccgaaaccaaaatcaaggccatctgagagggcagaggagctctgggaaagccatgcaagtgggcccactgcagtgagcagccacatgcatgaaagcgagtcgattaatcaccataattgcagctcctgtcgggaactgcattaagcacttcacacgcatgagttatgcgatgtaacagatcatcactgacccctgggaggtgaccttttcattctattttgcagagaaggaagcaggttaaatgaagtgacttgaagcatcatagctgttttgagtcagagacaagattgttgttgtcgttgttcttgctgttgtttagtcactgagtcccgtctgactttttgcgaccccatgaactgcagcacaccaggcttccttgtccttcactatctcccagagtttgctcaaattcatgtccactgagtcagcgatgccatcctaccatctcatcctccgtcatccccttctcctcctgtcctcaatctttctcagcatcagggttttttgtaatgagtcggttcttcccatcaaatagccaaagtattggaatttcagcttcagcatcagtctttccaatgaatactcagggttgattttctttagggttgactgatttgatctccttgcagtcccagggactctcaagagtcttctccagcaccacagttcaaaagcatcaattcttcggcgcttagccttctttaggtccaactcttc

SEQ ID NO: 41942 - DNA, 921 bp, Bovine  19866881069385
  misc_feature (1)..(1): n is a, c, g, or t
ncacgggcgttggaacacttgtgcatggtagatctttactttcattgctgaatgagaggcaccaccactaggccatatggtgcctttggtcatgctctcaaaaggtatcccctccgggcagatgtagcaccaggcctcccttggctgcacacacttgttcagtgaacaacccgccccaccgtccatggcacccctgaatgaataaagaaatacaggaggaatgagaagctctgaggcagagaaaagatttggagtgggagaggaagccaggggaagctgagttctattggttttgtagtggcagacggatgacccacgaagtctgtactcccccatcagactagagatcctagatcagactcctgtttttcagaagccaaattgtttggctgctctcgcctctccagattctggtagtctttccttatctaaggaactttctgtgagacttgacttgtttccgtcccagagagtgtggccagtgcccagagctatgagtacatacacggtgtgattatagatgcctccctggctcaactagcgtctgcaaggccttgcctttgttcttcttcaaagccatatgaggagatagccagactgtagacaaagcaacttgagaacatttactaaagataccaaggacagcaaaaataaaacagagccagccaaatcccttagtgggaaggagaggatgcagaataaatagggggatgaccaatcctccggtaggtggagttaccctggaactttctcgacaggccacgtttcctgccctctacgtcagcccccttcctgccagtctagtcagctttaccatctctttccccagcctcttttaggaagcaagacttatagctgagatttagtcttgactgcacatctaccaagagttacttgttctccttttcctttgcttatgag

SEQ ID NO: 41943 - DNA, 1001 bp, Bovine  19866881084011
  misc_feature (1)..(1): n is a, c, g, or t
nagcctggatgggtctcttgcacggctggcagcctttgaggacagtcttcccagccgtttccgggggttctaggggggcccctgctgcccccaggctgaggccccagctcccattggatgctgcctgacacctcgaggccccaagcagtggggcagggacggaccccgtgaggcaggcgggcaggccacagggacagccctggaggctgggcggcacggaaggcccggtgaccggtttggccgtggttcggggcctcgtggagggcaggggttgggactgaccttgcactggcactggccagcagggtcacactggttgctgacactgccctgggggtcacagccacaaccgatctgctccggcaactggccaccgctccctaaggtggagggaagccgctacagctggaaccccaaacccaccatgaagcatccccattcccaccaccctctggccatcacgctccacccgagggaacgagtgtttgcttctgaacacccgccacgtgcaggcattggccacattcacagacgccctccggggtgggtgggccttttacgacccccattttacaggcaaagaagccgaggttcggagaggcaaagtcacatttcctatgttgaaggagaacgaaggctctgtcctagctccatccccagggtggccagatccccaaagcctccccaagcctactcacttcgacagggctggccctggctggggttgccgtagtaacctggcgcacacctgcggtgagagaaggtgctgggtgaagggagggaagaatcactgggctgtgctgggggccctgtactggactccgtgacctgagtgctggacgaacacccattgcacagatggagaagtagaggggagaagaggggcagggacaggccacaggccatggaaccagtgagatcagcagggtcaggcctcgaacccaggactttcagcaagaatgaagggtttctgggaagactttggcctcactggggatggg

SEQ ID NO: 41944 - DNA, 1679 bp, Bovine  19866881164501
  misc_feature (1)..(1): n is a, c, g, or t
ntgatgctatagactgtagcctgccggctcctctgtccctgggattctccaggcaagaacactggagtgggttgccacgccctcctcaggggaccttcccaacccagagactgaacctgcatctctcattctcctgcatcggcaggcgggttcttcacctgggaagccggcaggtctcaatggaaggtcagccagagccaggtccagctccgagctcggtaactgtgtgacctgaaccgatccactgtgcctctgagcctcttgtttcctcttctggaaaaatcaggacagtcctgctgtcccagagttaattacgaaggggtaataacagctaacatttcactgagcacctactaggggccaagcgtggttctcagtgcttcacatgtacttctatcatcctcatttttatagatgagaaaacaggctcaggaaggttagacacctgcccaaggtcacgccacgaagcaacagaggagtcaagaagcgccctcagggcacgagaccccagagccggcgcaacattctgccactgcactcgtaactgatggcacctggagtgtggtcccggcgtgtgacctcctccccagctcccgctgcctcgtccagcagcttctgcccaggagctgggcgatgccagcacacgctgtatggggcaggggcctggatctggggcaggtggtggcgtaggggctgcccccgtccgggtcgccccatcgcccacctcaagctgcctgagcacacggcctgggtctgttttgttcgctgctgtatcactggcgcccagaaccggaccaggcacccagctggcgctcatcactcgctcaccctgattgagcacttgcctggcgccagaggcctttctatacgcctcacaaatagcatcgcgttgaaggcatgaggtgggaatcaccaccctctccgtttgtacaggtaaagaaaccaaggcacagagtgggaaagccacttgcccggggtcccacgcagtcagaggcagactctgctaaccactacgccatcatgccgccttggtgccatccgtgtttgctgattgaatgagcggatccacgacacatgctccctggactcccgggatggctggccagcccagcctccacccccagggctgcgcggtgaccccctccgcacccagcccggcactcccagcccagagggccaccccaccttgccgagaaagtgcttccggtagaggcgggcagtgtggttgcactccagcttcaccttggtcgtgggcgactgcagcagctctgtctctgggatgctggtgatttcgtgattggtgccttcaatccagtagcccccaaactggggcagcaggatcagggggaagggcccttctcggcccaggacctgaaggagcactcagctgagggtcactcaccctgcacctcggtgggggccttgggacaccccccccaacttggacccggagccacttctgtcatggctgaggggtaccagggcatagcctggagctccccaagggtcccctggctcacacccagggccccctcccaccttattttggttggccagaaagtttgttcgggtttttacagacgatgggatggaaaaaacccaaaggaacttttttgccaaaccaatactagctcgaacccttctcctccccctgcaggcccagacccagacacacacag

SEQ ID NO: 41945 - DNA, 1349 bp, Bovine  19866881184415
  misc_feature (1)..(1): n is a, c, g, or t
ngtattccaaggacacttggggacatatgggcccagactatgacaagcccattctgatatgtgttcctcctatggcatccaccctacacacacctctcagaatagtctccctagttcaaagttgtgtgtacatcattacctgcttataaacctcaaatagctcgaattcatttagggtaaagtccaaagccttgaaattcaaattccccatcacccaaactttctttccaacttgagtcactacctctgtgggcaccctagttgctcaaatcaaagtgaagtaacccatggttcctctgatttcttatttttatttccctacttatgctagttcctctgttcagaacacatacgaggattcaccgaagctctctctgttgcaggctccagctgcagcaattggaactctgaaccctggtttcctttgagcttgcttttgagtggttataataagaatccatcaaaacccatgtctggatctctctttggccaacacagccttatttcctgggactatgaactccagaaggagttttcctgccctctgtatagacaggcaacccactgcttgtttttgttctgatgtatgcctctggttttatactttgtgatatgccttaacatagaaaagaaaagtgaaaggcaaaggagaaaaggaaagatatccatctgaatgcagagttctagagaatatcaaggagggataagaaagccttcctaagtgagcaatgcaaagaaatagaggaaaacaatagaatgagaaagactagagatctcttcaagaaaattagagaaaccaagggaacatttcatgcaaagatgagcacaatgaaggacacaaattgtatagacctaacagaagcagaagatattaagatgaggtggcaagaatacacagaagagctatacaaaaaaagatcttcatgacccaggtaactttgatggtgtgaaaactcacctagagccagacatcctggaatgtgaaatcaagtgggccttaggaagcatcactacaaacaaagctagtggaggtgatggaattccagctgagctatttcaaatcctataagatgatgttgtgaaagtgctgcattcaatatgccagccaatttggaaaactcagcagtggccacaggactggaaaaggtgttttcattccaatcccaaagaaagacaatgccaaagaatgtgcgaactaccacacaattacactcatctcacattctagcaaagtaatgctcaaaattctacaagctaggcttcaacagtatatgaactgagaactttcagatgttcaagtggatttagaaaagggagaggaaccagagatcaaattgccaatatccatt

SEQ ID NO: 41946 - DNA, 906 bp, Bovine  19866881238517
  misc_feature (1)..(1): n is a, c, g, or t
natgacccttaaatacacagccccattataggcaatgatttccatgcaattatgacaggtctgacttgttattgttttttgtccagtataccaccatcgatataaaaggtgtttatcagggtaccacttaaaatcaccctctctgaccccagaggtgcaagttgcattcttttaaggaacctgtgtcatggttgcaagggctctaccagccccactagaccagatgcagaaagggacacacaggagtggctcgtgtaacatttcagagtgtggacagagtgctgggggctcaagccccacaagccagactcttgggtccgtgttctcgggcccctggggacaaaacccgttcgctctggctcccgaccttggtcccctcctcacctccctcctccagcctcccagccccactgcagggatcctcaccggggacgacaacactgccagagccggaagcttcaatggtgaccaggacggaggcctccaggggcccagagccgagggccacgcggcacacgtactcgcccgagtcggccggggacacccggtgcagccgcagccgtgagccgtgggtctgaggggcacggcgcgggagagaagcagaagtgaggcggcgtggaggatcagcccttggaggccggggcccggggctcagcctctgacccaggcaggccccgtgtcccacggggggctcccaggtctccctcccgggcagggcgtgagggacaggccccaagccggggcgcccacatccagcagccctcctactaggtcctgccccgcgctcacgcccccacctggtggtgagccgggaggctgcctccacgcctgtgccacgtgacctgtgcgtgggcctggccggggaccactcagttcagatccagggtctgcccttctgccacgtgg

SEQ ID NO: 41947 - DNA, 729 bp, Bovine  19866881247234
  misc_feature (1)..(1): n is a, c, g, or t
ntgagtgtccagggtcgccgcagacgggctgggaggggcccctccaccctcgctggcccccacaccctgacccccctctctccccgctcccagaccaaaacgtggtgtaccctgtccgcatcgagtcctcctctgactccctggccaacgggcgcaccctggaccttaactgcctggtggccagccaagccccccataccatcacctggtacaagcgtggaggcagcctccccagccggcaccaggtatggagccagcgagcagagagggtgcacgccagggggcgtggctggcccccatgggaaccgggaggagctcctcacagccctcctctgtgctcattcagtcattcaacacacaaagagcgttcttgccagaggggtcctggccagtgctggggacaccgagaggagtcccactggcccgcgtgggtccagcacagaacattctgtgattcgctcactcctggcccttccccgagaacctgctccaggccacgtcccactcccgccactgagaattctaaggggatgagaccaggcatgcccgcgggtagctcaaagactaatgggcaaggcaggtgtgccgtgtgacagccctgtagaaagagtccccacggagggcctcggcgggcttgctggaggggtgacagctgagaaagagtgcaaaggctggaggcaccctgcacccagcccagaagctcagaaaggccattgacggagttcagga

SEQ ID NO: 41948 - DNA, 1311 bp, Bovine  19866881262684
  misc_feature (1)..(1): n is a, c, g, or t
nctgctggcctcggagccgctcggggtccgagagcacttgaggttgcttgccccggtcatgctggggccgtggggccagcctggagtctgggccatgaaggacacattgcggttgccggtgctgggacggcccgcttggtgtccagacattgtcgagggcaggcggacgaagcttcgtggtacagaactgctgaaatctcacctagaggctggttccctgggcctgacggggagagagctgggtcagctctcctcggctcaggtgttcctctccccatcttcctcccaggcccagggatttttcaaacgagaaagcaggccccatgttcttcagaaagcacaaagggcaagagatggggaggaaggcaagacactgagaacaatggaaatcagaggaccccctagaaaaagtggggcagtctgctttttcctttctctgtagcccacattctgaaattcccattcaccttttaagcagggactccagaagaccacagagtcaaaggactaagtctctaatggtgaaattcgaggcaccaagacacacattctttggagtaacatcagttaatcacccactacaccgcacaccctgctactgaacaatatgtcttagaagcaatacggtatatgtgctttttctttgccagccctttgcttgttccttacttgtgagtcttaactacaaacccagaaggcagtcattattctattcctatctgacagatgggggaaactgaggctcagagggttgacgtggcttgcctcagatcacatagcttgtgagtggtgggggccaaggtactatcttgagtgtatctgatgacccctaaaagatgatgccgtgttgttgggggtgactttgtcctcaccagcagtctactgaggaagagttctcatctcacctgttggataggggcaccgatcgggaaaaccagatggggaggggtgcttgctaaccctgtaactaagttgatcttgacttcacgaaccccaaggggagaggcaaggagatgctgtaagtctacagtgggacttgtgagacagaagtttccagagtacagtgtttggtcttcatcttctctgatgaagggagatggtctcatccaccccacaaaagaagggttcttggggttcctcccggtctgaaagtggacacttcacagggactagggcctgaccaggctctggcccaggtcaccctgcttcctgtcctggggcctgcccaggtggcaggagccccagccccattccgtttgtcccccaggtccccagtaccgcccgtttccagaaggaaggctctgatttctg

SEQ ID NO: 41949 - DNA, 1561 bp, Bovine  19866881306763
  misc_feature (1)..(1): n is a, c, g, or t
nagtgggtcatctgaattcaagcccagcagatctcaccttggacacgtcacttcctcactctcagcctcagctgttccatctgtaaactgggctgattgtgcccatctctaccccagttgtcaggaatggggaacaagacgtcagcttgttctgtctggcacctagtaggtattcaggcatgttgggtcctttccctaactctctgagatcttcagggactctgagcagctaaggaaacagctcaggaagcagtgtcggatggtggatctgctttaagcctgactttgcagtgtccacacgtgggcctgtggtccagcgactcaccgtctgagctgctgggaaggttgaacagctgtattaaatgcccagcatggtgcctggcccaggggagctcccatcaaagaggttaacctggcggttaacccagggggatgggaatcggggataacacctccttccccgccccctgaccagaggcctttgccttggcatcccaagggggcaggattgaccacgggcaccacgagggcaaagccaagcaggcactgcacgaggcggtggagatggaccaggccatcgggcaggcaggtgctatgacctccgtagaagacacactgaccgttgtcaccgctgaccactcccacgtctttacctttggcgggtacaccccccgtggcaactcgatctttggtaggtaggcctccattggggtaggtactgggcattcccagggtctgccatccgggagtgggggtagaggaggagagctggcaagcccagggcctggcacatgtgggacatggaactggggagggaagagacgtcactggcaggtgggggaatagagggtggggggcatggagggaagtgatgcctgggtgcatgggtggccaccgggatgatggataggtagaagaatgagaggcaggatggattaatggacaggggagaggagaggatggagggatggatggacggatgaggggtggatggaccaacagatgggaggacatgggcacaataaaaactgagggatgtttggttggaaataaattgggcttggaaggtggcttccttgggaggggacccaggggtcctagccgggggttagggcctgtacccctggtgctccaacaggacccctggaccaatgccttcttgtgcaggtctggcccccatggtgagtgacacagacaagaagccgttcaccgccatcctgtacggcaacgggcctggctacaaggtggtgggtggtgagcgagagaatgtctccatggtggactacggtgagaaccaaggcccagggctgggaggggacagagaaccccctcagggatgagctcagaaacagtacagtcctctggttaaggctgggagcgaggtgtcccaggatagacaggagttgagtcattgagtcagaacaatgtcaacttgaatcccctccgaaaatccagcaactctgtgaccttgggcacttaacttcaccttcctcattttcagtttccctctgaagaatggtctgcctcccggggttgtctgaagggctagctggacctgatg

SEQ ID NO: 41950 - DNA, 1010 bp, Bovine  19866881375780
  misc_feature (1)..(1): n is a, c, g, or t
ntgcctgcctgctccaagcgagcaaggacacaggcagcgcatgttgtttcagagcctggctcgtggggccaccgagcagagtgtgtccgtggcggagcaagttacacaatctctctctctgcctcaatcttctctgcttggaaaatgggggctgtactagtggctccagcttaactcatccaacagatgtatttactgcgtatttacctccggccaggcgttaaggatacagcagcagtgaacaagagcacagaaggctctgctcctttgaagattaacccagggggagcggggaaggtaaacgggtaaacaaatacatatcggagagcgacaaggagaaacagagctgaggaagtgggcagggtagtcggggactggagagacgcgaggcacagggtcacacagatatccacaggacaagcattctaggcagaaggaacggcagatgcaaacgccctaaggtgggagtgtgtttggaacggtccagaaacagagactggtgcggttggagggagcgagcaagggcgaagcgggcagaaggagagagtcgagaggcagtggcgaggggtgcaggtgggggctagatctgaagggctgtgggggccagattaagtcaggggctgggttctgacgtgagcaatgtggggagtgtagggaggtcctgattgaggggacaacatgcgatgatctgttgaggaacttcatgcctggcggatgacagagggcatggacaaacgtgaacaatatctgcgtgatttcatctggcctggtaataacccccagaccaccctccccactgctgcaaaccctaaacccagttacctcctgccaccttctttccatccatctcccgggccggcctcaggcccgcagatcccaacttgcctgcgctcagcctgcgaacaggcccaggctgagccagctgggggccaggacgccccagacaccaggagctcggcctgggacgtgtgaggtgggggggggggggcatacatctctgccacaccagc

SEQ ID NO: 41951 - DNA, 635 bp, Bovine  19866881390619
  misc_feature (1)..(1): n is a, c, g, or t
nccatggcagctgtgtgaggttgggttatcatcagccttcttcagataagaaaactgaggctcggagaggttaagggacaagcccaaggtcattccaggcaaagggtggtgccaaggtttccctctagttcagggctctactaccacacccaccaccactgctctcaaggcaggctgaccccactgtcgcccagcccccagcggcctccccatagcagcccctggttctggccgccaccaagcatcttcccgaggtcccgctccagtcctgccctgtctggcctggacattcctggacacagtaataggcagcagccagaagggaggtgacttccccaaggtcacacagagagctggagccagcctggagtcccggccaggtacactccagggtcaccttcaggccctacaggtgtgtggcctgcagccagctggctgtggctcccctccccgctggagtgtccgtctccccctgcgaaagggtggggcaggctcccaggcgggatgggccaggccggaagcctgccgacagctcccgggtttcttggcaactgtcactgcaccgcctccccctcccttatcttcacgtcgaggtaacaataataattgctgtgtcgtgagtgcagctctctgta

SEQ ID NO: 41952 - DNA, 778 bp, Bovine  19866881725438
  misc_feature (1)..(1): n is a, c, g, or t
ncatgtttatatgctattctatgatgtggaccagggtttggcaaactgatctgcctgtttttgtatggtctgtgaactaaagttatgcatttttaaatggctgaaaaaatcaaatgtttttgacatttaataaattcaagtttacctaccaaaaaaaaaataataaataaaacatgaatttaaaagagaggttgaaagccattagaaggagatagggagagatctttttgggcttctggactgaattagtaagtgaagtggaatatataacttacccaagagtgttctagcagccaaagcaaaaggggaaatggcagtgtggttctggggtgacttggttccttgaaaaaccacacccttaccccctcaactgataagggctgtagataaaaaaaactaccggcagggaagacctttgaggaagtgggtttccaggctccgcatgcctgtccctcctggcagtctctgtgctcatcccagctaatgctcaggaatttcttctgcttcactgctccaacctggcctactttccccagctctgggctccgcaaaagtagtgggtctcccatctgagaaacgtcaaacttgggccaggtgaccactgtgggggaagcagcaaagacttaaaaactgaaacagggactagaatagatgaccgattcaggtccagccctcagagtctgtgagtttatgctgggtaaccgaggtgcagcccagattcccagccagctccggttcctgtatgctccttcagagaaaacaaattcacacatcacaa

SEQ ID NO: 41953 - DNA, 944 bp, Bovine  19866881808595
  misc_feature (1)..(1): n is a, c, g, or t
nacccagaagaatgtgtggaactcacttcgcggggagccgccagctttgctgcccagcctggtggcgtcaggtccatgtcaatagtggccttgagcagggagtggctcatggctgctaggggtggctgggccaggggcaccgtcatgaaagtcctgggaacaaggcagctctttgaggccaggccgtgtggggccttcaagtcgcagccgcccctaggacccaccctcccctcctttccctgatgcccacctgtgccagagctgcagggatccctagatcaccccgggttgggggacccgtgacatcatgagaggtcttgaggaccagctcctggccatctgctggagccctgtccctcagccacaggggagggcaccccgtttctctgttgcactggattttcgggggtatctggcacacagagtctggcagtctatgttgatgaatgaatggacactgatgtatgcaattcagtattctgtaacctgacatccctaagtgttagactcaaaattcatcgcacaaatacctattgagcatcttctaagtacctgaccagggtacctgctgaggttgcagcaaagaacaagagtccggttctctccccttgagtaacttgcattgtagcgaatgcagggagacagacaataactatatatggcaggtggagatgtgtttggaagagagaatacagtagggaagaggacagagagtgatctgcagatgaggctgtgattccgaagggatctagaggaaggtgggggagtggtggtcacagaggcccgggggtgtgctggatgtatctgcacaaaacgctgaggaacttcccaggtgacgcctgccagctcaggagatacaagaaacacaggttcgatccctgggtcaggaagagtccttggaggcaggcatggcaacccactccagtattcttgcctggagaatg

SEQ ID NO: 41954 - DNA, 1152 bp, Bovine  19866881827957
  misc_feature (1)..(1): n is a, c, g, or t
ntctcctgcctcccctctccccccccccccaaaccttgtgatcccttcagagtccccctccccaacatgggtatttttacttaggggaccacatgctgtgtgacatccgggcctggaaagcagctattattaactcaggacattgggacagggagaaggctcagtgctaccagctcagccccctgtcctgatgtcctgttgagttggcatgaggcaagtttgggacaggacagaggaagtccccttcccaccaccaggagctcagctgtgaacatcgttgcatggacaggacacaggcagcagctttggaagtgagctggggaggtggcgtaagagccactggtggcttcttggggaaagaagccaagatctccctgggtctggaggacagggtctggacgctcggtgcgggtgccacgcttggggccgcctgatctccccgtccccgcacctgtctgctccgcagagcaggaggcaggagccaccactgagtgaacgctaactctgaaccaggtcctgtggcaaacggcggttgcatgtcatcagagtcagtctaaagagatgagttctgagacctgccttgtggtccagcagtcaagattctgcacttccgctgcaggggacatgggttccatccctggttggggaactaaaatcccacatgttgcaccgccaccctccctccctgccataaaaaagagagagagaggtcctagggtgtccccatttaacagatgaggaaactgaggcttggtgaggcaaggtgactcggccaaagccacgcagcttagagccgtgactccagagccaggagtgtttgcaggctcctctggagcaccttaacttctgggctgggacggggtgggcttgtggctcagaaaagccatcaaatggtggagagagagccaaggagcatgagaggaagccggctctggaaccctgacccgggatctctggagggaagtgggtggtcccctcagggagggaccaggcagctggaagcaagtttcgagctggatgaggagctggcactgttctgtcctctgggcacttaacgcactttagttatacctgtggctcctctgccctggagtggaagccctggagggcagagaccctgcctctcagcgcacctgctcgggcagacgaaag

SEQ ID NO: 41955 - DNA, 1093 bp, Bovine  19866880051982
  misc_feature (1)..(1): n is a, c, g, or t
nctccaaaatcactacagatggtgactgcagccatgaaattaaaagacgcttattccttggacggaaagttatgaccaacctagatagcatattcaaaagcagagacattactttgccaacaaagtttcgtctagacaaggctatggtttttcctgtggtcatgtatggatgtgagagttgaactgtgaagaaggctgagtgccgaagaatcgatgcttttgaacgtggtgttggagaagactcttgagagtcccttggactgcaaggagatccaaccagtccattctgaaggagatcagccctgggatttctttggaaggaatgatgctaaagctgaaactccagtactttggccacctcattcgaagagttgactcattggaaaagactctgatgctgggagggattgagggcaggaggagaaggggacgacagaggatgagatggctggatggcatcactgactggatggatgtgagtctgagtgaactctgggagttggtgatggacagggaggcctggcatgctgcgattcatggggtcgcagagagttggacacgactgagcgactgatctgatctgatctgatcggaatggctattgcagtttatgatgatagtccacacatagaaaacacaagcaatgattgttggattgactgaaacagagttgaatcatataagttatcttttggtttactgtgaacttaaaagtctttacacaattcagcataatcgtacttcaaagtcattttttgaacatgagcatataaaatggacaattcttatgctaaataataattaaagaaaacaactacttttaagaatgagaaagtatttcattgttaaatagttcatgttttaatgtttagatctgcaaatagtaaagtgttacataaatgtttgattttatttaactcagatactaatttggcctttttgccaagcctgcttttaattgctttagaattaccaaatgcctgccatcaaagagaaaatgcaagtaatcagaccctctgtgagcacagcaggtgcaggagacagaaagcagaggatgaagcccgtccacaaattcctctcctagaaagaaatt

SEQ ID NO: 41956 - DNA, 1957 bp, Bovine  19866880275892
  misc_feature (1)..(1): n is a, c, g, or t
ncagtgttcttgcctggagaatcccagggatgggggagcctggtgggctgcccatctatggggttgcacagagtcggacacaactgaagcgacttagcagcagcagcagcagagttaacttcctgatttacaaatagtcaaggtaagaaagtcagtgaggtatcagtcacattaaaacattacatgagaaaatgtgtgattgcttcaaaagattcaatagaaaaatatgacaaaattctgtccccattcatggctaaagaataaaaatcatcttaaaaacaaagtttaacaatctggatgtagtatgaagaaaacctaaagcaaatatatttaaagatgcataattattcttttcaaggaaaagaaaagagtaaccattctcatcatttgttaaaaattcaaaatcttattgagaattctaataaatataatgaaacaagtaaacataaagggagtaagaatttcaaggggaagaaaaatatttcattcacagaagacaaaatgtagaaaagccaaagaatctattgataagccattgcaactaataaaggagttcactaaactgttgatacaaaaaagtcagtagtattcctgtaaagcaggaacaactaataagtgtaataaaataggctagagatttgtttattctcaccagaaggacatatacaagtgaatggtattggctatttgtcttagaaagttattaaaccttttggttttttatttacatatttctttcaatttgttataatgaccattgtattttaaaccaaaagaaattgttaaccagaaacaaatagactgtgggtttatttgggatcagtagagacttgcaaaacagagtctgcaaccctggggagccaagtgcaagttcccacatggggaggaggatgcttttaatggaagataaaggaaggtgggagggcttaataaacagaatccttggcttttcattggctgagtctttgccagaaaaaaggaggggtctttctgtgcttcaggctgtggtctctgggtgtgaaagctccccctgctggcctcccagctctatttatttggggtttctgtttattattattattattattttttacaaaaacaaagcctctaaaaataacgtcatgactaagttccttatacaagacagtagaagatagttaaattgccttaggagaaaatacaactctttgcttatccattcgtggacattcagtgataacatgaagacatggtcaatagaagccagagaaagggacctattagttatttcatattcattctgggtttaaccaaagtctgggattctgttcccacatttatccaatatagcatcaagtcatcagatttaatttagacagactattttagcccagtaactaaaggagaacgtttcaactggtaaaaatttttaattaaagtaaattagacaaatgtgtaggttgatggcattcattaatatttttacactgaaagtaatgtcttgccaatggctttatttccaaccatatttaaaatatatgcttaggcatgcactgaattcatacatttttttcttagagtcaggcaacattttttcagaattttgggtgccaaaaaataattttatctatatgtgtattctgaaaaagaaaacaaatcattgtttagttatagatatagctatctgtaggtcaactttctcaggttagaagttaacactacctttgttctgcctgtgaacaaaatttcaaaagacataagaatgggtgcacaattaattgctaaagaatgtagtcactagtgacttgaaactttagtctttgaagtctcagttacttggtttctatgacattaaaaattggctttatagatgaaaatatgtggaagctattgaagtgagtggagaaccttaaaaaaaatgacccagtcttttcgaatatattttaaacatattccatagagatgtgaggactttaag

SEQ ID NO: 41957 - DNA, 3059 bp, Bovine  19866880551104
  misc_feature (1)..(1): n is a, c, g, or t
naaaaggaaagataaagcatctgaatgcagagttccaaagaatggcaaggagagataagaaagccttcctcagtgatcaatacaaagaaatagaggaaaacaacagaatgggaaagactagagatctcttcaagaaaattagagataccaagggaagatttcatgcaaagatgggctcgataaaggacagaaatggtatggaccttaatgaagcagaagatattaagaagaggtggcaagaatacacacaagaactgtacaaaaagatcttcatgacccagataatcatgatggtgtgatcactgacctagagccagccatcctggaatgtgaagtcaagtgggccttagaaagcatcactacaaacaaagccagtagaggtgatggaattccagttgagctattccaaatcctgaaagatgatgctgtgaaaatgctgcactcaatacgccagcaaatttggaaaactcagcagtggccccaggactggaaaaggtcagttttcattccaatcccaaagaaaggcaatgccaaagaatgctcaaattcagttcagttcagtcgctcagtcgtgtccgactctttgtgaccccgtgaattgcagcacgccaggccgccctgtccatcaccaactcctggagttcactcagactcacgtccatcgagtcagtgatgccatccagccatctcgtcctctgtcgtccccttctcctcctgtccccaatccctcccagcatcatggtcttttccaatgagtcaactctttgcatgaggtggccaaagtactggagtttcagctttagcatcattccttccaaagaaatcccagggctgatctttagaatggactggttggatatccttgcagtccaagggactctcaagagtcttctccaacaccacagttcaaaagcatcaattcttcggcgctcagccttcttaacaatccaactctcacatccatacatgaccacacaattcagttggtttttttaaatacatttttcctgggttgctgcaagtctttgattaatttctagagttctaaaaatgttgattctaaaaatatgtgccacattgttatttttcatattacatttatgaagggggtgattttggggttccttactctgccattttcactgatactacaacttttattgcagcttttgttttaaagctatagtttttaaacctgagttataaaacagtcatatgtaactaccttccctttttattactttcttttgtaggatatgcttacatgcatccttaaaatgaattaatatttcagttaagaaaaacaattgagtctcagtatggcgggctaaattatgcttctctgtaaagtcatatgtttaagtcctaatcctcagtttcctagaaaatgaacttatttggagacaaaatttttatagaagtaatcaagttaaaatgaagtcatcagggtaagcccaaatcccactcaaatagtgtccttacaaaagggccagtaacttgtgctgaggagtgacactttaatactagaagcatttattaaaagtagaaaaaagaagaaacatttgaactgaggtaagtagaaaataagaggaaaaattaagaccagagaagaagtggaatgaaactaaaagctgccttgtatcatgaaagaataactcatgtataaaaatattatgaataaattaagatatggtgaaatttaaatatcatagcttaatatactgaataattttatataataatcttgtaatgaataactatcaaaatgtaagattctaaaacagacttgattaaagtatttagtaaactaataattaaattttcctgattggtaataaaaagtttgttttgctgtttccttccttgccaaaagtaagtaccagactatacagtttccagggacaaaaacactttacatattctttcagggaacattaataggaaaaatctgcctaattctttgtatgtgtctattataatcttagatggctaacttaataatgctaaataataacaataatgctaaatactaaatcacaaattttgtacaaattggaaaagacaaaggataatataagaaaattatgcacattacacttatgaatataggtgtaagtgtcccaggaaaacatagtacgaagaatagaggggaactttcttaaccttagcaagagtagctatctaaaagcggcattcaatacacacgatgctgtatggtaaaagtttagagagagtctctgtacaaagtcaaggagaattttaattctcataaacaatttttatcttactagatcacagaaatcttagtatatggttgatcagtgaagtattgctatgaaattactgaggagttgctagaagcttttctaaaatcttccttatgagtaaattcagaataactgagtcttcactgtgttccttttgtatctcctagacaatactatttttgcttgtttaatgaacagtattgtttaaattttaaagcaaattgagaaaatgcttggtaattaaaatcaaagcacatatttgtcaattttttaatcacattacaattctaaaattcagtatgttgtgttagatcactgtggataatgtatcattcctatgatctaaacaaatttatcatgtcagtttctttcaggtttggtatcttggcaaaataagttgtgatatagaattatcttaatactttgtaattaaaatagttttctgagagtgcaataagtatacatgaactctgaataaaaaggccaataatttatgctaagattaagaaatacccatacacacaaataaaataagtgtatatttttgaaagctagttactggaatgcagttaaatttaattcttaccaagtaatagcaataatccaaagaaaacttctgaacacaagttgcccagactacaaaaatgtaagccattatagaacatgaatgaacataagatattattgggacattttaatattgtattttcagtgaaagtatatgttatgctccatcaaaagagtccacatgtgttatgtgtaacccagcggctgcgggaattctgaactggt

SEQ ID NO: 41958 - DNA, 1302 bp, Bovine  19866880835329
  misc_feature (1)..(1): n is a, c, g, or t
naattcagttcacagctgtcaggattacccaaattgtaactgctcttaagtgaaggcatttgtctgagaaagatgagatgcaattttcagaaccagtggtttatgggtacctcccagggtaatgggctcttttatacctggagtttatcttcctgaaagacaaataagagctttgggttttgctgttagtgtaagagcagaatgtgtctgctgatcatcaaagaggatatttgacatctcatggacgtaccccattgaaggcctttgaggagaatattcattggcttgttctcttcgagatggagacagattgggtgagctgtccatggggctatttgtctaaaactgtcggccactgacagctcatttctaccagaacacatcccatggaagggttctgaaagcaattcaacttacctctgggaatggcactattgatcaagctgtggatggggtgaaggtacctgcccgccttggatgaatggctttattgtatcttgtgacaattgatttcccttttgctgaggacacaggctggagataatgtgagacaactgtattaatgaccaagtggcttttaacagatgaatgatggtgagggagtatgtatggataatcttacagagaacaaataatcttgcttgtgaaatacagctggaaacgtgacctcttttacagctgaggtcctcactcctggctgaggctggacaagctgccacagcatttgtggtacaaatttagggtttccttgaaaaaaaaaactggtgaaagaaaaacatgtggaatttttaggaagcacagcatttttttaaaagtatttttaaaactattttttaattggaatgtagttgatttacagtgttgtgttagtttcagggatagaagagcaaagtgatttagttctatgtacatatatacatttctagttttctcagattctttccccatataggttattacagagtattgagtagaattccctgtgttttacaggaggtccttgttgactatctatttgataagaagcactattttaaatggagcccctaggaagccaaggacgggagaaaacggccctgaggcttgactgggcagcaggcactttgcatttaatcctcatgacaagtctgggataagcatgatgacctagggataagcatccttcatcctaagtatgtgaagacaataagcaagtccaatcgggggacagggggttcatctggagactcgtgtccagctccaaagccaggggttttccatgatgcttctccagggtttagtctaagccgacagctgcacatg

SEQ ID NO: 41959 - DNA, 1534 bp, Bovine  19866880893099
  misc_feature (1)..(1): n is a, c, g, or t
ncctctccccacagactgcagacccacagcccagttgatatatccactaggatgcctaatgagcaactctgatattcagcatgtctaaaagtgacttctcttctttcactccaaaccttctctacctgccttcactgtgacaagcaatagcttcagtccatgcggctgcagaacctaaaaccttggaatcattctccatgcctccttctttcagactcatactctccagcctggaaattgtgttggctctgctttaaaaatgtatccagaggccaataactgttaaaacttcctactgaactcctcctacctgctattacctctgacctagatgacagtggcagccttctaactggtctgccagcttattctctcactcagtccactctgaatccaacagccaccatgactgttgatatacacacccgatctggccacttcactgccagtgccctactatttacagtttcttaatgtgcccgatgagatctgggttctggcccttcctgacttcttctactaccgcccccttactctgctgcagaccctggcctttgttcttccttgatagacacctcagtcacatgtctgacatggagctgttactctgtaatccctttgactggaaaacagtccctccagacatctgcacatcccctcatctcctccaagtttctgctcaaatctcactgtgcaaggaggcccacccagagctccaggcactcctgatcttaccatgttttacttttttttctcatttttgcattgacttattaccttctaagatatgatctgtctacctattaggcttgtggtttagcgtccatctccctttagagtgagtactcactggagaatctcagcctggggcgtagacatataacagatactttgattctctccttcaaacttctctgctctccttttctatgatgctgtacccttatctcatcctctctctctgaccatttcctttctgttctggttttatttttctattaaatgtaggtttttctccgttgaactgtttattttagcaatcaatttaagtaagtaaagaattgtgtctgaagttctttgaagtcctcgcaggaccctgaatattgtgcacaggaaggagatgtgttattaaagaaaaaataaatagaaatatatttttaaatcaaattctattggggaaaaaatgcttacttttgtgtagaggacttgtaaaatgagtcttttgcactatatttcttgtttgattgtaaaactggttctccattatcctagaaggggtgaataatgttaaaaagataagatataaatgagaattgctaacgttttctattcatcattctttcttttctcatctttctgcatttttcttctttcaaagcatctcttggatcaaccagatttaatgctttcctactgtcctctattatcttgaaaatttacattgtttacacacacacacacacacacactgctactgattacattaaaatttacaaatatatattattctactcatctttttaatctccctgat

SEQ ID NO: 41960 - DNA, 2029 bp, Bovine  19866880895318
  misc_feature (1)..(1): n is a, c, g, or t
nttttaatgttaatggtgccagtcagaatttgatatttctgatatgcaaaggaactactctgagagggaggttcatgggtcatgtttattttcttctttatgcttctctgcttttactaaattcacctatttagtattggcacaggctctgggatgaagaaaacactgtgcaatttaagtgtacatgaatattggccaacattccactattaaagaaacattattgtgaatgaaagttattgctttaaggaatgtggccatgagagctgcaatgatcagagcatggggaggtgggaaaataattgaaaggacctagcaaaccatggctgcataatacaagcaagtgccagtggtgggaaataagagctccaagccctgctcttgtcacctgaaaagccctgtgagctgcagccctggcctggcaggaagtagaaaactgacactaaggtggatgtcagggtaatagggaaagatggcctcatcagaggtcatgatgtttctatttcaaacacagcagaggtgctctctgtatagctggtacagaggataatggaaactagaaatacttaagagcattgccttgtcttgctttcctctcttttattgtgtgggccaggggcacttgctgctgctaagtcgcttcagtcatgtccgactctgcgcgaccccatagacggcagcccaccgggctcccccgtccctgggattctccaggcaagaacactagagtggggttgccatttccttctccaatgcatgaaagtgaaaatgaagtcgctcagtcgtgtctgactcttagcgaccccatggactgcagcccaccaggctcctccgtccatgggattttctaggcaagagtacttggggacatagaaatagaagtagacacagatatagatgcacaaggagatgctgatgtagacacagagctgggggcacaggtggggaaggagatgtagatgaagatgtgaaaacagacacagatgtggatgtacatgcaggtgcagatgtactgtaagtaggtacagagatggatgcctcaggacctgcttgtacgtgcctgtccagcctactctccctcctcattgtagatatctatatatatatatattttctgatttgtatatacatttatgctgcttcatgctcccttgccttttcttacactgtttccttcacctggaaagctcttctctccctctccaggcaacttcttcaagagatagcccagaaggacacttcagaaaacctttcatatactcttacagcagatgggttggcgttctgtaccatttcctgatccctgcattttgctttgtcttggtatttattacacagtggggattagtgcctttttgcttaggattagaattggtggcaggcgggtgagcataataaaacggttttcaaattgggtccagatttctccaggagattgctagctgacacctgatcaagccaggagcatttagtgcccacatatgggcttgtgctcataattgcattggtgccaaggaatgtttctttcactgtcaccggctaatgggaaagtactagggtgaattaacttataagagacgtgcttgcatctagagcaggctggatggcaccgcggcacactcactaatgaagtttcacagtcgttccaatacagggaagtgaggggagacgtgaatcattgcggacacagggccgtagacacagcgatgcaattcaagacgacattctctgccgcatccaagtacaattcaacttaaattatatcggttttgtgtttggtatgttatttgtaggtgttttccatgtcacatttgcatgagaactaaaggaatttatacttggccttaatatcttgtgagaaggctgtgtgagcccttcccctccccataaaagaagtttgagaaacacaacccaaatgcctccttttctaactgctgtacaggtgactttgagaaaatcccttaaacattttaaaccttagtgttcttcttggaaaacagggataatattggttcccactttatatagt

SEQ ID NO: 41961 - DNA, 1655 bp, Bovine  19866881079303
  misc_feature (1)..(1): n is a, c, g, or t
naaatgtatgaaatagcagcctggcagtgaagaatgcagttgatccgggacaggcagctggagagaggtaaagacagtggtttcccgacgctgctgcgcctgacaactcggggatttttcaaaggtaccaacgcctgattcccacccaccagacatgctaatttaattggtaagtgctgtgagctggaaattgttttttttttttttttttttaatctctccagataactctcatgggcagtcaagtttggaagtctctgtttcaggtttcaggtttgttggagggacctgggtgagtgaactaccgctgccaaattctaggcaggacccttcaggatttcttggaatcttctcctagaattgcagctgtatgtcagagtgggagcaaaaagtggggcaaagtcattcatatgttatatctctccctgaattcatcaaaggttccatgcatgttatgaaggaaacccccttcctctgcgtgagagtttttttccactgcctctaaaacacctgcagaatgaaaatgcctctaaggtcacagccttccatcagagcagtaagaagccgagatggaagctcggcaagggctggatctaaaacaccattcgactatcggtgctttacctgtggcgtacaggttactgatgttgaatagtattctacgtcatgttctaataatgagatttattacatcatgtctaaaaataacaaacatgaaccagaggactgaactaatgataagctgcttgggcttgagaaacgaatgcagttgcataataaactgccacctatttgaaaatgaaagtcctcacccacgctgcttctagaatctattccatttaaccctttttcagggacaacaaaggggaacttttttccatcttaagtgcaacaagactagaggagagcagattctgggggatgctctatagacccatggctgatgggtgataagctttttcagatgaaagacactgaaaagtacaggctctgagagaatttccaagtcagctgcatgatcagacccattccctcatttaaggaaagctaagggaagcaggaacccatttaaaaagaagtcgtcttcatgtctgtctttgctccatagttgctagtcttctgaacaccttctgtggcacccgattcccaaaataagcctagggttgtccactatgggtaactgaataaattactgcctaagtttataactaactggcttttctcaacaaagcataataaaatagaaattaaataacttgaaaaatataaggaagtttagtaaatcagttagagaaaaaggggctcagatggcatataattaaaagataaatagaaaaataaaggaaacatggagaaaaccatgttatatgtagattataagtcatgcatacgtggatgagaatgccaacaggaacaggctctctgtctgtaacacaggcccgaataatcctcaggagcccgtaccctttgtgacacttacgtgggctgctttatttaatctcccaacactccaggtccttggtcctgagaccatgccatggtagagatgtgggcactgaggcttgagcacaagtctaagccatgtgcccagagacaacaaggctggcgggtggggaacctaggggccccggaaggccctaaacccaggctcccag

SEQ ID NO: 41962 - DNA, 744 bp, Bovine  19866881157138
  misc_feature (1)..(1): n is a, c, g, or t
ncaccataattttgtagcctttttcctaattaaccctttcaaagctctgaagaaactgactaagcatttgggaggcagagtttatttttatgttttaatctacactggatgattcagctggaaatcaactaattcaatcactgtactttaaatgaatataggctctgatttctggatgatgttattataaataccaaccaaatacagagtgaatcataatatttccaaggtatttaagcaatcaagtcccagaggcaacaggaaggaaagctatgtgatataacacatccaggacacagttgttattagaaatgtgatttctgcttcagtggtgcattttgaggatgctaaaaaattacagtgaaagtttgagaaaataatcacatattcttaaggtcaacagtagatggaacagattttaaataaatgcaaggatgtaaattaatccccagcatagcataagtgtcatgtcagtatgttcgcactgaaagcgtgctgggtgcttgtgatgtgtctgcatctacatgttggctggtgtgaatgattggctgatagaaggccactcccaagttcaaagaagggctgaacaaacactaagttcctttcagatattcttacttccgactgaaactgccaaaaagcaatcctgctttaactgagtaactctaacaaggcagttaatatcatatttaacttaaaatcaggaaacataatatagaggcatgacgttcaaaatcacatatg

SEQ ID NO: 41963 - DNA, 1371 bp, Bovine  19866881222036
  misc_feature (1)..(1): n is a, c, g, or t
naattgagttttcattttttggtaaaaggaacaaagcccatggccttcaggtagatacacactataagcacctccttggcaagattcagcacatgtcattggaagatatttagagcaggaggtgggatgcggtgtttcaagtagtgaattactaagtcacttctgaattcaaagaaaacaaaatgggagttgaagaataaataggcttccaattggctgctaccactaaaaaataaacattttttaaaacaaaggaacaaaaatttcaatcaaataataaacaaaaaatacttgtcagatataaagacaatcatctccaagaatatgaagcaaatttgcttcaaagtgacggctctgaggtagatagaaagtacatgaggagtaagagataaactcttcctatttgggaatgctaaagtgatttctatgatataaagtgatagcatatgttaatttgttatatttaattatatttttataaaatttaagctatcagccttatgattatgtttctactttatttgtttagattacatcagtctttgaatccaaagccttgaaaccactttatagacttataaattgctaccttcatcaatttgacaccaaatatggttgggaaaaaatggaatatgaattagataatgctcaactcttcaaatagctctaaagaagaaaacctaggtcagttaagagaactttcttaactgtcctggaactaaatctggtagctacattctcaccagtaaaattcttataagcattcagctgatatattcatttcttctttcaattagagaagacaaaaatccttacagaaataaaacagaaaccaggtcatacgacttacccagaggaagggctgcaagtggaagtaaatgatttctctcttttgttatgaaattacagtcttgatattttaagcattacacggcatatgccactaccatgaggagcacatattatgaacttaccagaaaaagatatcctttgctttctttgaagtatctctggagaaataaatattttaccatggagacaaatagattctaattatcagctctcccaagaaacagagtctccattacttccagcaaattcctgttctcaaagctgctctgaccagtaaaccctgtttatcctcagacacacccattagtgcctggtcctagggtagtgtagtcaagagaaatccgaatacagtttgccctctatgttcatgcgtgcatgctcagtcatcttggttatgtctgagtctctgcaacccaatggactttaccccaagaagctcctctgtccatgggattctccaggtaagaatactagagtaagttgccatgctctcctccagaggatcttcacaacccaagg

SEQ ID NO: 41964 - DNA, 1051 bp, Bovine  19866880393709
  misc_feature (1)..(1): n is a, c, g, or t
ntctttcccattctgttgttttcctctatttcttggcattgatcgctaggggatcatttgaccccaattctcaaaataggaactgtctgtacttttccagaaaaaactttgctgactctgatttagtatgctgatttctctaattttctcagtagaacatatacatcaaaattaagaaaagcaaaatgcagacttgccatctgtcccttggacagtcctgtttcatggctgtggagcagtttcagcctgtgttgagtccatagctttggggtggggactccctgacccactgcacatgtccttctagtgaggcctatgtgggattatttccttgttcactgtctctcattcattctgtgcattgttgtaaataacatttcccaaaggcaggctctctcattagtaatgacagcacacatttttctcagggtttattttatttacatctttagagtatttttagttatgtgcccgtgttaatactgtaatttaaatagggtaataatttaaagaaacaaaatccataaagtgatactacaggtgtaactacttgccatgtagaacagattgtgtcaatattcataagcaaaactatcactagcttcccattaattttgatttgaagtgaagatggtgctcaatcatgaattatgcctggagaaaaaacaggactgggttcatgtcatgaataaaaaatggatatctgtatttcagtgcattacacagaagcagatattaatctttcactccttatcatgtctaggtagcaagttttggtctgaatcctttaaaacaaaattagtgatgtgctaggaacctgagaaatcctcacagactgggcttcttttcagtctctctttctgggtctgtttattaataatgtcactgtaacttatctagctcacaaagacagttattctttataaagtcattgttattttatcaagaggcttacttttaaagtaaaaatgttttcttagtgatgctgcatataagcaacagataaatgtgactccatagatttgtggacttttaaataaagggagagaaa

SEQ ID NO: 41965 - DNA, 5530 bp, Bovine  19866880499010
  misc_feature (1)..(1): n is a, c, g, or t
nccagtcaagtttctttcagtgaaaagaaacagaacctcgatgttcaaatgctaatgagaagacgagctttaaccggagggtcctcgggcgcccgaagtccctgaggaagggcggcaggagccgggagctccgtgctgccccgatgcccgcagggtctcccgttacccgctctgctcggccgcgtccccgtctgtctccctccgcagcggcagacagcgtttcccattaacgcggccagtcacagcgaggccccaccagccccagcagagccccacccggtcgtcactccccacgcaaggagcccggtgtccaaacacgcactgtaactgcgcttgtcccacagtgcttgaccttctctcacgctgaacttctgagttcagtcgaacaggtgctcatgccttttgtgaagctgccttgatttctgttggacagcttttctttcttagtgatacaaaggcatttaataacataccacgattgaaaccatgtaaacctactttggccacctgatacgaagagccgactcatttgaaaagaccctgatgctggggaagattgaaagcgggaggagaaggggacgacagaggatgagacggttggaaggcatcaccgactcgagggacaagattaagttcggcgagttggtgatggacaggggaggcctggcgtgctgcagtccatggggttgcagagagtcagacacgactgagagactgaactgaactgaaatagaaatatgtgcaagcaaacaagactagagggaagactctaaaattctaatttatatttaagagatggaatttttctaggctttctatagtgccttttcaagtgttttgtaatatgattattttaataatgaaaacattttatttgtatgttttaaaatgattttatatttttgtaaatgcctaaaatgtgtctaattctgaaatgtgactaatgtaatctacattttggtgattaaaaatagcaattttttaaacaaaatcttttctccctgaaagatatgaaatgtatcttgtcctatttataataaaatagaaaattactattaattgtgaatgtcttaggactttgaggatttaaggaaaatcaagttaatagtttcataatctaacttcagtgatcaaagggctataacctaataacgacaaaaaacaagacctgcgcatgtgaaatagtcagcataaacgcatatagcatttaactgtatgcttaaaaatggttaagatagggggaaaaaagtttcccttagcaaaactgttattgattaactctgagcaaggcaataaaaacttccaaagagattagacaatgaaatttacaatgttaagaatattaatgatcaccttggataaccatgtgagcaattttccagagacaactgttagcaattaggaaaactaaaatacacagataagcagttctttctctggcttgttccatcaaaaagcagcctttagagatggatctttattgaaacagacttggttacctcccattttgccagggccatcagctggaggttcatttcttaggctgagacacactctacaaagtacctgccatgagattaccacacaaaacgaagtctgagagtctcagtctttgaatattttcaacagattcaggttgtttgacgacatatgtatttggatggtcaagagtttgcaagtcctacagggcagtgggccccaacaccagggaccagcttcgtggaagacaaattttccatggactgggaaggaggggatggtttcggatgattcggacaatacgtttagtgtgcactttatttctgttgattattacgtcagctccactgcaaatcatcaggcattagatcccagaggttggggatccctgcttgagggaacagattggtggttgccaagaggtgggggaggggggatgaaagactgggagtctgggatgagcagaggcaaactgttacatacaggatggagagacgagaaggttctaaggttgttagcaggaaaccatgttcaatattctctgatagacggtagtggaaaagaacatgaaaaggagtgcatttagtgtatagctgaatcactgctgcacagccaaaattaacacattatagattatatacaaattaacatttttatacattaatattatgctgctgctgctgccggtgctaagtcgcttcagtcatgtccgactctgtgcgaccccacagacggcagcccaccaggctcccccatccctgggattctccaggcaagaacactggagtgggctgccatttccttctccaatgcttgaaagtgaaaagtgaaagtgaagttgctcagttgtgtccgactcttagcgaccccatggactgtagcccaccaggctcccccgtccctgggattttccaggcaagaatactggagtggggtgccgtttccttctccaatgcgtgcatgcatgctaagttgcttcagttgtgtctgactctgtgcgaccccatggacagcagcccaccaggctcgtctgtccatggaattctccaggccagaatactggcgatattaacattatagattacataaaaattaattatatagagattatataaaaatcaacactatacttcaattttttttttaaatttcttaaacacacacacacataaaactgtgagcaagtcctgggtacacaatctagattcagatacaggaaggtctttccagagaagacaagacctgggctggctctggaggaggggagactacaggctggcgggtgacagagaagggccacgtgccaccagttaaaaataaatgacagaggagcccacacaaaggccagggagggacgagtgtggagaacggcaaaccaaccagccaaattaaggtcaaggacacgcgtaaggcacgagaagtaagggccgaaaggcttgagtctgaaggcctgggtccaattctgaatttaataccagcagtgggcaggtacccagtcagttagtggggacagagcggtggctgcaaagatggtcaacgaaaagtaaaggaaggataaagagaaacctcaagttctttagaaatgagggtttcctattcctgaacgcaagttacttacggacgtgtgtcagtagcagcatggtgaacgctgtctataccaggtatgatgaattttcctgactctaaaactgctcccaaaggttttaatgggttcatatttgtgggacccatttctgaaccagagagggccactcgcacattaaaattcagcatgccataccactgccgttagccattcccaggaacaggtgacggctgatggacagaaatgcgcttatcgaccggaaattcccaggagcaagtaactaacccacgctgggggcaccatgggagaaagcatggcagcactgcattttagcccagcaggaaagtagtcagatcattctccctgattattaacaggtcaatgtttagtccaacagctccaatttgtagtggaatttttgacgttttctcctgaaaactgaatgtcatgttaaaggttttctgcatactattgtccacaaattctatgactattcatatttggtttagagaggtaagtgaagatttttcaaaatagggtagccagtttatagcttattatccttatcttttagctgaatagtatacatatgagaatacctgaacccaaaggaggcaatttacccaaaggaggtgtgactttctgtccaaatgctagatttagtaactactgtaataatagggccggagaattgatgcttttgaactgtggtgttgaagaagactcttgagagagtcccttggactgcaaggagatccaaccagtccatcctaaaggaaatctgtcctgactattcattggaaggactgatattgaagctgaagctccaatactttggctacctgagtgaagaactgactcattggaaaagaccctgatgctgggaaaggttgaaggcgggagaagaaggggatgacagaggatgagatggttggatggcatcaccgattcgacagacatgagtttgagcaagctccaggagttggtgatggcaggggaggcctggcgtgccgcagtccatggggtcacagagagtctgacagaactgagcgcctgaactgaactgaactgaactgtaatcgcagggcaagagagaagacgtttagatgaaaaatagtaggttaaaaaaagatattcacttggctttcaggttcttggtggaactaatagctttgacttaaaactaatactcacagagatagaagtaagataatctaagcactccagtagacatgataagaataaatgagccaagaaaagaagggaggagagaggaagggagagaagaggaagggaggggaagaataaagggatgacattagacccccttgaacaagtatcacaactcaattacctaatatctgtagacaactgaaaatcttgtttgggaccatgtactgtttatttatagtctgaaaagtctttgcattaattcttgacaaataaagacaagatgctcaagaaacagagggacacggaactgcacagtgagagagatctatctacacagaagccatatttacaagttaacagccctcaccaaagcttaaagtccccacattccctctgcttttgaacttgcagctgtaggttcaagcctggaagatactttactccccccacacggcatttcttctccccctgtgcatttgtgtacctagcggacagctgttccaaagcattcttacactcttaaaagtgtacccccaacacatacagaaggttttcagtctcaatccatggcaacccttgcacttattttccctaaagatgagtttcagagttatgtaataatgaacttcatccttttgtacaaattaaaccaggagtcataaagcagtaggtaaatgaaaaactgggttaaacaaaccaaaaaaaagaaaaccacacaactgaccaaatctatagcaggctcagctttttttgagagcgagagattaaggggcatgcagtcaactggtatgaaggtcaccaaacaaaatgttgcaatcttaaagtgccattgacatgcagactgtccagtagcagcttggaacaatcttcccctttgctaattactgtcttagcccaaatcattcatacatgacaagggtatgctacatttacagtaaaacatttaaaaaattaggaacattcttttccttactttgaaataaaaatcctgaatataactttttaaaattatattctcattcccagctttttgttaaagtgacccaaaggctcaaaacgtccaccattggtctctgcatggtagatatgggcttggacaaatctgtcttttcctcactcactgcctgcctgctgaccatgttgaaatcaccaaattgtctcagttggaaatcttctgattttcacaggaaaaagctgaaagccacaagccaccaacgaccacaggtacctcgcgctttctaagtccgtgtcagaaggaagcgtgcgacacaggggacctccgcgcgtctccca

SEQ ID NO: 41966 - DNA, 3571 bp, Bovine  19866880517654
  misc_feature (1)..(1): n is a, c, g, or t
ntggagcttacttttttgtaatcagaggaaacagaaggcaaataacccaatagttcaaattcaggttcgtatcctgttcatggattataaaattgacttaaccagtctcagacagctttcatgatcgtttctttgaggaacaagctagaataaaataaagaaagtgggcctcactctaccatacttcttaagtgtgttatttcatgagactgccatttctgttgtatgtgagggcgtaaatcaaagttaaacacttcttgttatgagtttcaaaagtttgaaaaatggtgaaaaatttaaaataaatgaataactgaaacgatttcaattgcaatacctgctgtaaaagagctaaagagtgaagatagaaaaatcacaaaaagatgccaagtgcagggaggcagaaccaacgttagctgtgtggccacacatggtctgtctgctgaagggccccaccacctgtccccagccaggacaggggctggcataaccgaggagacaagccttcccgacaaaggaaactgcaagggcaacgggctctgttgaggcgtcagtaccccgcggggtggcaacccacatggcgaagaaaaaggacagttcatctccttcctccataggaaggaaaattccagaactttaggttgatagagtcacaaagacaaaagggagacatgagcctattccataaacacaaagaggtctcacttcaaagacttggaagatcctcaatttaaggaactcgtagtaaagaaacatacattcagttaaaattcagcaaatatttattgaggttttactacgggcaaataatttacttcttggcaaataattactctaaaggtgaatttgaagataaacaggagtttcaagatataagtgtaagggtctaaacacacatacacacaaaagccaaagatcgtaatttacctgttaataaaacagctggccctttccttttcgagcatattgattccacatgcctggaaatttactttcctcaatttggctttataacaaagacttcatttactccagaagagtctctgcctaacagaatggtttctgcctaattagattatctggtctgctatttatttagaaagatagagatgttctgtatccaatggtgatttttctgtttcagggcctcaacaaagtattgtgacttagggcctctgttaacacctgaatcctgcaccccaaggctccctgcttctttctgagaaccccaagttcaaaagcagcccttcgaaaggcattaagcctgtgtttgtcacaaacttccggtggctgtggtccaggcgagcggcattatttcagtgtcccccgtctccctgccacctcactcagtccgactgcccaagctccgtgacagccccttggagcatcctttaccttaccttcctgcggagttccagtctgcaacttctttagcacccagtctcccactttctctgccaagtgggcaaagaaattcacagacgctgcagcagtgaccacaaaagctatttctgtagttgacaacatagacccgtagtcctaccttgacaacagcagactgtggagtcataggcctttggcgagtggtctggaaactccagagatgatatttatacgttagcttaaaacaactagaatccagtaaaaactttaggactggacagaacaaagtcacagggaaattcttgaaggattctttaagcacagagtttaagacacagttttgcagtcatatcaagaaagtacttcgtattctttgaagcggtaatttgagaagcttctagaacacttttgaaaatttttcgtaaagaaagaactcagaattcagaaatagatttcaggtcagaaatgttatttgtggcattacttgtgttcgaaagtcaaccaaatatccttcaataggagactgttaaatatttaatgctttatctatatggtgggtgtgtgtgtggggtgggggcgctgtgtgtgtgtgtgtgctcagtcgctcagctgtgcccgactctctgtgaccccatggaccacagtccattaggcttctctgtccatggaattttccaggcaagaatactggaacaagttgccatttcctactccagggaatcttcgaacctgggtctcctgcatttcctgcgttagcaggtggattcttcaccactgtaccgcctgggaagcccatgtctatataatggaggggtttcgccttcaaagtgctatttatgaagagagactcacataacaaaatggttaatgttagagggaaaacaatacaaatcagaatgtacgtacaacttcatctctattatatttgcatagaaaatgcataacagatgcatagaaagactagaaaagaaataagagttgagatatctagatatattataaatttttcttatacttgtctatattattagtatctttctacaatagcatgtattccttttaagttctaagtaaataacctttaactcaaacattatcatgttatttctccccagtaaatgtaaaaataattcatggtttcatgtagtattcagcatacgtatagtgctgggtaggctattaaaagttgcttgcctacatccatgagtatatacttgtttagtttcatcacaaatcattgccaagtaataaagcaacatgaatattttataatttattgttggttatatttataaagcaatcaagaagtctcatacaagattttcattttttattgcgaagaaaaagagaaggctctagtaatcgtggtttgctttaaggatgggacctttatttagaacaagatgttataggataataaaccagctcataataaataatatgcctcctgaattaattactaaattttgtgaattaactgtaggaaagtgcagagaactgtttgtatgcagatggattttagctttctgaaagtttcatcagccttccaagccctgccatggttacaaattacaaggtcatatatttgatctacaagagtaatgtgccaatttaaggacttttagcctggactggaaacagagggttgaagcctaacaaacacttttatttcactcaactgtcaaaccatttgctttgccttagggaaaaaaaatcaagaccagttcttctgatcaccttgaaaagttggtaatacatccacctccatccctagaggcccagttagtcagctaagagcaggcaaacactaagaaaacattcactcctctgttccagagaattttccctcgttcttgagccccatttataatttctgttctcagggagtatatatgacaacacaattatcttggcccgggtgctgtgcctcagagcgagggaccagatccctctggggaagactgttttgtcaaggacactgttgacagatccctgcatcctcccacgggtggtccagcccaggcctgtgatgtgccaggaaatgtagattcagggagcgcttatcatcacagcgatgagcctcctggaaaccagaattccaggtcactagtattcctcctgtgtgccaaagtaaacccaaactcctaatccccacatggcggggggttaatattaaaacgtagaatga

SEQ ID NO: 41967 - DNA, 1131 bp, Bovine  19866880529669
  misc_feature (1)..(1): n is a, c, g, or t
naggaggaggccagaggagggaccggcacgccatgcagacacgacaggcagacacgctaacaaaatcagccttcacgtgtcaactaaacccaggagatccagagatgggacggctccataaccatggagaacatcacaaatgagaacctaaacctttacatattttcccctccttacggcagtcactaagcctaaggaaaataaggttaccttccagatccacggactcaaaaacttcaagggaccaaaacaaacagacatttaacgttaggactggggtaactgagtcaactattttgaaaatgaaaaaagaagatctgaattacccagctgtagaaaacaccaagcactgtcaaaggacctgatggtgtaaacagagcctgggactgctgctctggatgaaagtctggctgagcataaacagcgtgctttcacgcagactgctggatttgatgagacacttaaatgacgttaacactgactcatcccacaggatgaagtctaagaaaattcttagaaaccagcggattatcttaaactattcccaagtcttcaaagcatgaaacatccatgctctatatccaaagacctttttatatcatgatggttgaagaagacactttccatcccaatcaaggaattactgactgtggcaagctaaaggatcagtcccttgaggaaatcccaacgctagtaaggccaaaactaacttgaatgcctacattttgaaagggttttctaagaattaaaggatcaattcttcaaacccatattttacataaaattctaattctgatcatagtatcaagcaaataacatgcgtgtgtacctagctctgtgtgcaatcaggtcattccacaaatgctgtttattcaaaatatttgatctaaaataccacgcaaaagggcttctaataaatctcctagccctcctgaccctcaccccctgcctctgaagttggaatggcctccaaataaaaagcaagccttcacagttttcctggacacaaagtgagcaaaaaacatgatttcactataccaggtgcatcctcgctccagtgttgcacaggaaaccgttcttgttctcgttctgagaaaagccatctatggaaactctatcgcacgctcgttg

SEQ ID NO: 41968 - DNA, 1536 bp, Bovine  19866880530815
  misc_feature (1)..(1): n is a, c, g, or t
ntgacaacaggaactaatgatctgaatgccggtcgggttgtagaattgccttatttaccatgagagtaaacaaaggcctagggaaagtcactggttcaatgaccgatttaggagaaaaccagcctcttatttcctaaacagcacattaccttcccctgacatcacgtccccgtaggatagacaaagcagtattcaagtactgtagccaggtgcccctcatccaggaaacactcgctgaacgacatggattcgtggctgtaaacacacccgttgctattacagacattcattaaacatttcgtaaaccatctccctgttttctcagacttttgcgacaagtatctggatgaaaaacatgtctctaaagagctatccaagatatttaatgaagtctttagtcattctgcaagaatttttctgtgatgagcacaaaaagcaaggatcatttaatttaaaaccataaattaaaccattccatccaacagttttgttggagaaagtgctgacttagatatttggagatcttgtcccaggaaggtctgctgacgtgtttgatgctttaactggctgagacctgaattccaggtgactctttcctccccacttccttcagcttgctccattctctaaaatttaactgtaaacacattatcctctcaaagacttggctttcttcacacattgcagttggcgatcattccaccaagttctaggttaccctgagcttcagcacagagcattttcaccagatcatgaggaccctggggtttgaattaaagagccatgatcccatgatgcctctgtgaaccccccagaacaatgataccaaccctatattgtagatgaggaacccaaggctcaaagaatggcatctgcatgcccggggtcatcaaagggtggaagactgatctcaacccacatcttctgtctccagactgctgccatttctcaagtgtctggagagaccttgggtgagatcagggcccaatcgtaacaggagacagaatatccccacacctcatgtgaggaagaactcacagtcaaaattacatttgatttgaaagaaatgaacgtttattgaatcttagcctgtaagctgatatttacttttagtataaacaaacaagtatttattatgtggaaatgtttatttattgtcactgaaaatgtctttatgtcaatgaaagttacaacatagtggatcaattggccagaccagagtctagaaatatttcttgactctttatttgtcctaattcatttaaacagttaattttaagacaatgcttcattgttggacttttttatatcgcaaaagtaatgtcctcatcagtataagtaaaacactgcaaagatacatgaacagaaaaatcaaatctcttgtcttttggttcagtatttcctcagtatccttatccttcaaaacatatttatgcctatagattggacctgccttcctttcttgaaaaaatattatactaaaaagtaaaaagccataatttgcttttttttcccttgtaaaacgtctcatcatat

SEQ ID NO: 41969 - DNA, 882 bp, Bovine  19866880558101
  misc_feature (1)..(1): n is a, c, g, or t
ntttcgttctttggagaaggggatgacagacatctttgagactctgattttttgaaaaaccacgtggacttacttcccagaaagtgtacttatataaatgcaagatcgaaccataatatctggggtttcatggagccttataaagcctgtgtgaagaactcccatttcaggcagtgggactgagtgaatggaaatttcaggatttggttggagagaaggaagaattctcaaagcgtttggcaagtcctcccatggagctgggttttttgtcatgggatttccttccccatcactgcgtgaatgggcatgtgagctttagatgctcagaggaggcgatctggatacagctgatgctgtttctagctgtgcatcctcagacaaattatttaccctcctaggtaccctctgctccactgagaagctgaggtcaaagctctcatggagtggctgggcttacttcatgacaaagggtgtataaaatgcctatcccagttctagagaacatgaagagcagaaatcaacttttctaagtaattctcgaagataatgagttgaaagagcaagaaaaagcccaattcctgcctgtgcataagttctttataattatgttcttttctgactcttaagaatatttgaggccacattcttgctttgcgtgggaagttacagtgaatgcctaactccaaatatgtaccagatttgtattaaaaaaaaaaaaaaaccttttgaaatgcattgaaaggtgataatatgctatcctaaggttttgtcttttttttttttaagcattctgaccaaagtgtgaatgaacactgtagaaaatgaaaggtttttgagatgattcaagtgttttcaagcagcagaaacttatcctaaatttct

SEQ ID NO: 41970 - DNA, 1452 bp, Bovine  19866880587911
  misc_feature (1)..(1): n is a, c, g, or t
ntaaaataatatccaagagaataccaacatttcaggttcgaaatctccaggcttccaggaatattcagaggtcatttcgctcaaattcctccactggggagagggaggatcagcaaggggaagcgactgtctcagtgttaacactgccagtgctgggagccacgtctcttttgttgtgagaatattaatagatatacaatctatgtggggctaaaataaataccatgggaagggaatccctagagctgcctccgtcggaagggcctggatcatcctcccagaagtgtttgtacacacacgcatagatatctgttcatcctttttttttcatagaagaaggaccatgataaaccctcgctggctcactttgtttggctcttggtttgaattctttcctattgatatattcaaatgtccttccttcttctaatcgggctacgtcgtattctctggactgcttctgtttatactttattaaagctctttgctaatgaggttctttccaatgtttgctgttctttcgcaccacaagccaagctgtgccgatcaaatatacttcaactgtatgcatcatttaatacacttctctctctcttgtttccgccacttttctggaaacttcctacactagcaactgctctccatcattcttatctgtcactttgctttagttgcctccacaggatttatcaccacctgaaacagaacgcatttgcttgttcactttttgtcgcttgtcgctgctattagagtagtaactccatgggattggaatcctttatacagtagtaactccataggatcagaaacttacctttattcgctgctgtgttcttaaaacagagaacagcgattggcttttggtaggcgctcaataaataaggaatcagtgaatgaatgctttacacatttttcctattggattactggtcttcgtcttactgattcataaaagctctttatacggcaattaaataagactttgccatttgtcttactcacatggtttccagtgtggtgtctatcacttcactttgttgagggaattctttctgccattgaagaatggtttaattattatatacttaagcataacatatttgtctcttataacttccatgttttgtgtcttggtttgaaaggctttatacactccagagttatttttaaaaacttgtctggtactttcgtggtttgttttctcgttggaatctttgattcatttggaatttattttggcaaaggtaggggctatgtaatcagctttgttattttttcccaaatagttagccagttgattcaacatgaattaaaaaacaattcatcctttcttcattgctccaaatgccatctttatcatatatcaaactcccataaatatttacatcatatctcgtctctagtctgctctgttaacttgcctgtcccttccttgggttgggactaatttat

SEQ ID NO: 41971 - DNA, 1649 bp, Bovine  19866880619669
  misc_feature (1)..(1): n is a, c, g, or t
ntccgtcccggctggacagcctctgacggtgggacgggccgggccgcccagggctatgagctgtgcccccgccgcctccccacctccggcttgagtcagcttggcaggcgcctcaatacccggatgccatttcctcccccgggctttggctgccctgtgactgctgcctgcgtcgcccagcgtagcgagtgttcgctctgagagaaggctcgctcgccctgcctttaacacacaatgttcccgttggggcacgcgctcagcagggatttcagtgcctgcctcaggcactttgctgtgatttggatgaacgtgagtggagagtcagctcccccgagtgcagacctcccctggtcggggcgccctgttgtgttttcaaggacatctcgcagatttcccagacagcaggtaagagctaaactgagacgcaggcacgcttgtcagaccgttatctgtaccccaggcattgatttcccgtctcccttccattcacaccccaggcatttcacaggttacagcattcctttttttttttaacaaaatgcacagaggcggcagtgaggtgctgccccgccttcttaccacgcaggtcacgtacagtcttccttctccgtttggtctaggagctcctaagtgtgacctctccctccgtccctcctccaggtggcgatcgttgttctagggaacaagatcgacctttcggaacagagacaggtggacgccgaggtggcacagcagtgggccaggagcgagaaggtgcgcctgtgggaggtgacggtcactgaccgcaagaccctcatcgagcccttcaccctgctggccagcaagctctcgcagccccagagcaaatccagcttccctctgcccggcaggaagaacaaagggaactcgagctcggagaactaggactcgaagcgcgcccggcgtccttcagtcaggactgcctctaggtacccgtgaccgtgttcaagccaggcccgtttgtctgccttggtccttaggaagcctctgatgcgctttcagttatcatcaagttacttgggctaagttgtattgcctgatttgaaatcatgtatttgcaccctcattgtttgaaacttgtccctgaatcgagcacctgtgccatttacatcacgttgtacttgaataaagcttggctgtacgcagaggacccgagtagctctgctcacctttaacttttctcagaagcggtcatcctgggtcactttatgcagacttctaatcgtctcatgtctagggttctaaaatgacacctcacatgtgtccagattggatcacaaacagtaaacaattggagtactgagttaagctaaacttcatctggtggagatcttgctgaacagaataaagagcatgatttaactttgttgaaatttagcatgaattgagtaggtggtgtaaatacgtttacattgcttcttccttctttaggaagctgctaaacactagtaaagcttctgccgtgaacaagtcagttaccatataactacctgaaaagtaagcagcaagccactcaagtcgtttcaaccatcaaagcagttaagtattggttttaaatgtgaggtacgtggtccaacaacaaactaagatttaaaaggtccagtaaacagcagttacctggggtactttta

SEQ ID NO: 41972 - DNA, 2244 bp, Bovine  19866880654101
  misc_feature (1)..(1): n is a, c, g, or t
natggttggaaagcatcacccactcaatggacatgagtttgagcaagccctgggagctggtgatggacagggaggcctggcgtgctggggtcataaagagttggacaggactgagcgactgaacaacatgtatctatggttatttcaagatctgagcagaggtctccaaagaaactgggcactgggagggccctagcatctgcctctcacagtgtgagaaacaaatagtaacattttatttgaaaatttagagagaaaaccttttattagattgaattgatatacatacagaatgaatgaatgaaatattgagatgggggaaattgtgctcaaaccttcccactagggcttactcctggaaactttataaacaagatcgccgaaggaccctgttctgccatcatctagttatttgaaacgcatcctcagaaatgtcgtcttgtgggcaaagtcttgcaaaatcagcctccttgttcagatagactgccttccatcgctgtgtggttttggccttcttttcctgagcacccgcctattaattttccctcttgttgagcccagcctctctgcccacgcgtgcaggtgaatttaggtctgctatctcagaagtttttctctcgtttctcccgcagcggttctcagtccataaagggagcgagatctggaaatggctaagagagaaacaaaccttttccttatctggctggtctcacttctccagttttcctacgtattccattaagaagtcactatctccatggaaaacaatcagcatagctgtggaaatcgcaataattattctgaaacagaattccaaagctcatctcctagtaagccattaacgttttttgcaagtgtgtgtttataacctttaaacgaaatgcacattcatgtcttttaaagtttagcctgaaacaaagttaaagaccaaacaacaaaataacgtgtgttcaaagagcctggtggaaactccgcttggagagtccctgcgtggaaacgaggcagtgagcaggaccacgagctacgtctaagaatgaccgactcggggacaagccgactgctagagcactgaccacaggccccaaaggctggaaaagggctttctagagaacacagcggaatcttcccctgggaagggtcactggctttccataattcatactggatttaatcagagaatcctcaggtcagatgactccaacattgaggtaattattttaaaggccacagagattccatttaggatattaaagaggctacagctgtggcagaaacattcccattaaagagccacaaatgcacagaaaagggaacagatgtttgttgtcagggttaagtttctcctgtgtgaaagttcagatcataacgtttattcttgttgccagtctgaacccacaattttgaaaaaaacatgaggtcatctgtaactctggcctcgttttttcgttcccaaacttgaaatacctctttcaaaaggagggactgcgtgtgcatcttttctaactttggaagctaggacgggggcatcatttgtgggtaaagaacaaattttgagatttaccacgtaaaaagacaaaacatgactcgggtaaaccgaacaactttatacatcacgcttaaaggagccattacatgcagcagaacacacacattctattaacgaattacactcagagatgaacagactggacaagaatataccttggtatggatgaaacacagtcatacaggctgacagaggtcccttctcagggttttcatagaatctcacaaccgttttccagatattgttttgtgcacataagtaaggaggatcaagatcagtgtggacagtcccttcattgacggaggagacgtttcagtctggagaagctgggttttcccttttttcaggaatagcgggctgggaggtcacccacatcttccttaccctcgattatgacggcaggcaagcttcctcagggacggggagaaggcgggtacttgggggtgtttctgggccctcaggacaccactaaccacatcaaaaacacattgccttgtgtggtctccaatgtttcctctggaaacctggtttagcatcagccgctcacagctctggtccaacagcagacaccgaggtagaatcgaattgttttcaacctgcatgtcttctgggtgttaatctggtttagcctgctctacagtgtttcaagagttcaggaaaatcaagaggcggtgtatttccactgtctttttcatacc

SEQ ID NO: 41973 - DNA, 2737 bp, Bovine  19866880705266
  misc_feature (1)..(1): n is a, c, g, or t
ntggctgaatgggacattgctggtgacccaacgccttctaagtgatgtgggaagtggatataaaataggcagcctcagaaaaagaccccacctctgtctcctctgaatcacggggactctgtgattgcccaccagggacaaaagagcaaagcagatggtgcaatttcatgcttttttctggagagttaaaaatatcatcaatcatgtacttagaaattggcagtcactgaagttctgagattccataagtcattaccagacagaaagttccttaagcaaaacaccacagaccaccaagcagacatcgttacgatttctgaatgtgtaggccatcgggggaacccagaacgttctttcttagcttccgtcatggctggtgtacgtgcttccgtgccaccagtcagaggcgttgaatatgagacctccacctgggagtgagggtctcgaggaggcaatgccatctcgctccgccgtggagacagcagcggcttccggctttggggtggccggaactgtgagcctgagtttccgtccatggggtagcactgaccggtggccctggaggggtccctgcgctcctcaccaggccagctctgctgcagccttttgggcgctgatcctggaagcttagctcggatgtgggtctccattcctgacaaggatgctgggagatccagtatgttttcatgaactccgttgctgttatataaaccagaggcagcctctgaggcttgcaaataagaatcccaagtaagaaaacacccatggcctttgtttatgtatatgggaagtggaaatattttggcttattctagctggtctatgtcatgaataaacttaatcggacagaagaggtctaagatgctaaaactgcctctgggggaggcaggccttgaactagagatctttcctgggacctcaaaaggaccctcagaagctgtcctatggagtgactgagggacctgcatccagagctctagaagcctttcactgagaataaataaataatcttgctacaaatatcttgtgttccccaaatctgaaaagtttatgggcccaggagatacttgctttggagatgccaatcctcttcccattgcctttctttaaaccatgcatacactacccagatttaggcattaattatttggggtgttgttttttcttccatattagattgaaaattctgactccatgtgtgaaggagaaggtggaagaaacagatgcctcccatctgatgagatgcttggagaaggttgtggtgggctgggtactttgatttttctcggtaaaaaaattgcaaaatgtaatacatatacaggaaagcacgtaaaatgtatttggccattaaagaattataaaaaagtgaacatgcatctcactattgctgaaaatgagcctgaagaatatgaccaatagtctacgagccccatgtctgtcttgcagtgctttcctcttattctcctttaagaagaactagcattctacttttaggaatagtccataatcattcttttgcttttctttatagtttatcatctatatatgtatatctaaaaatactatttcatttttcctatttttatactttatataataaacacatcatgttcttcctttgtgtatcttttgcataatgttatgtaaatccctggtagctcagtagtagtaagaatccacctgcgatgcaggagacatgggttcagttcctgggttgggaggatcctctggagaaggaaatggaaacgcactccagtgtccttgcctgggaaatcccatggacagaggagcctggagggctatacagtctatgaggtcacaagagtcagacatgacttagggactaaaatcaccaccttgtgaaatgtgtgcatgtggtcgtaattcatgtgtttttcactgcatggtagtcacacatgctattgtgtgactgtcttttctagtgttgatgaagctgggggttggtttctagtacttggcttattgcacataaggctgctgtggacatttggagtgcggctccgcgtggacacatgcacatgtgtttgtacagatgcctgatggtaggactgcaaggttcgagggatgctaaattgttttgtcaagtggttgtaccacttctcagtgataaaggtacagtgagggagagccctgccttctgacatacacttgctggtgtttacagtggtctctccaggtggtttttttggagaaggtcatggcagccccctccagtgttcttgcctggagaatcccagggacagaggagcctggggggctacagtctatggagtcacggagtcggacacaactgaagcaacttagtgcgccaggcggttttaggttctgtctccctgagaatactagtaaagcatagcatagcgtgttatttattgagttattggtaaccagctggcttttggtaatctgagttttttctaccatgaattgccctttcaagtccgatactcttttccctgctgccttttgttttaaattgtagttggtttacagtgttgcgttcgtttctggtgtgtagtgaagtgattcagagatatatatatgtatgtatcctgacccttcagctagaacggttccctgataccttgtaacctgcaaagagggagccctcggggaacagggcaggatttctcaacctcggcactgttgacattttttttttaattttattttatttttaaactttacaatattgtattagttttgccaaatatcg

SEQ ID NO: 41974 - DNA, 2189 bp, Bovine  19866880737708
  misc_feature (1)..(1): n is a, c, g, or t
ngagacactggtttgatccatgggtcaggaagatcccctagagtaggaaatagcaacccactccacttttcctgcctggataaatgccatggacagaggagcccttgcaagttacagtccatggggtcacgaagagtcagacacaactgagtgcacacacacagacacacacacagcaacagcaagctaagatcacaacccaatttgcaaaagaacccagtagctttctaatgtgctattaacatccaggaataaaaccctgaaagcacataaccaacaacatggaggaagccattatctgaggtttaagtaactgcatcgtgctattttaattatgcatcatgggcaaactgtgattgtgtccttgccagtatttattagcatgtcaattcaactgcattacatcccatgggaaagattagcaaggattttagcacggatgtgtgaaagtgttgctgtgctcaggccaactttttaaagttgtgtgctaattagagtgaaaatggaaagagaagtgtgagtgtctcaggtccaagaaatctatagccgctctttccaccattccaccgttccgtggtaattctcactgtgtttgcaaatggtacaaactgaacacaaagcctgccagacatcagcactgcactgtgagcattaggaggggataagagggatttcaggatgaggaaatgtatgttcagacatctactcctcagcttaaagtggagagggaattaaatattaagccatacacctggtggaaattcatttgaatcaattcttttaatctctctcaagagaaacttggaatctggggtcacctgtggtaacacccatattttactaaagaaacagaagcagagaaaacgggatcacctgacaagtgaatgagtggcagagaaaagggctcagatccccccagagtcactccaggacctttcttttctaccatcattacagtagtttctggacggggcaccaacactttacattttgtcttttttttttttttttttgaaacctgtaattaggggggaaatctgagtacataatacaggcagatgagtattttttcttggcctattttcaagtaaaaataggaccaagtaaaggaaatgggtaaaaataagggaggggtgtaatggtatactctttttttccccctccaccagaccaaacaatgcttataggttcagttcacttcagtccagtcgctcagtcgtgtctgactctttgcgaccccatgaatcgcagcaagccaggcctccctgtccatcaccaactcccggagttcactcaaaactcgaggttactcatcctcaaaaactggctgagccagtccctaggaaaaggctgtgagcctctctacctgccgccctccacctcctgcaggcttctctgtttttaatctttggtatcttctggagatgtccctggctgcccagatgaaaattataatcaattgagaaaaactctagtaaagaatcccgcctgcaatgcgggaaacccgggttcgatccctgggttgggaagatcccctggagaagggaaaggctacccactccagtcttctggcctggagaattgcatgatctgtatagtccatggggtcgggtcgcaaagagctggccacgactgagcgacttgcactttctgttactttcaaaataggatcccctcctttgtgatgactgggacataaatggccctttaatgatgccttcacaattaagtagacacaccagaaccggcgacctcggcggaccacccggcctctgcactctcccctcgtactgaccccgggagagagggaaatctggtcggtggagggggaggttggcccagcgaaagagaagcttccctgtagaaagaaactcggggtgtgccattgttcaggccgcgagctccagcaattccctccgtccgcccccagttccccgcccgcgcccccggaccgcggtccccagcctgaagcacaggtgagggcctctcgccccgcgccgggcccagcgaaggaccaggtaaagggcaggtgggcacagcggggtcgggccggctgcgcgcggacgaagtcaggccctcggagaggatcagggctccggagcccgcgcagacgccgctcgcccaccggcggccgcggctttgggaagcctgggggcattacagcccaactggcaacgcagggactctcc

SEQ ID NO: 41975 - DNA, 791 bp, Bovine  19866880769891
  misc_feature (1)..(1): n is a, c, g, or t
ngctgcactagcacacacttgcatacgtgtggttcctccaggttcaagttaattaaagacactgtctactgcacttgaatttcacacgtctcgtctttctcaatcatttagtttgccttctccagacaaacatttactcttcggtatgcatttactgccaccctgcaaagaagaggaaaggaagcaatgtatcagctgatgagaagcctcaaggtgagcacctcatctatcgaaatcacacttagattaacagaaagccaacaggctggagcgggcaagtcagctgactgctcttctgtgctccactttcaggggacatcctgaggcctgtctcacacacatacatgcacacacaagaagaactgataccagagatagaactgtaaaagaccagattccagacacactcgagtgctgcgtgtacagacacctccagttccccagctcacactgctcagcctccctttcatttcagacctctgtgggcttctccccacttcacacagagtgtctggcctcaagtaagctatggggctccagcatttcaaacaccagaggcttcatcaagcccccacatggggctcttatcaacccccaggcaagtgttaactaatggggggaactgatggatagactctctcccagtcactcctcaggcagatccttctgagaggcatttgaaacactacccagaacgtggggttcgatccctgggtcaaggaagatcccctggagaaggaaatggcaacccactccagtattctcacctggagaatcccgtgaacaacgag

SEQ ID NO: 41976 - DNA, 810 bp, Bovine  19866880834876
  misc_feature (1)..(1): n is a, c, g, or t
nctttagagcctgtgctctgcaacaagaagaagcctgtccatggagattctccaggcaagaacactggagtgggttgccgtgccctgctccaggggatcttcccaacccagggattgaacccaggtcccccgcattgcaggtggattctttaccatctgagccaccagggaagcccaacaagagaagccagcatactgcaactagagagtagcccctgctgtctgcaactagcgaaagtccacgcacagccacaaggacccagcacagccaaaaataaagtatttttttaaagagtagtccagggccactcagcggtgaagtttaaatccaggcaattggctccagaggcttgaccactgctacttatgtactcatttgtgaatcacttaacactgtctgccttactgagtggttgtgaggattaactgtctccatctacagagcaggaaagtaggggtcagggagcttaaagtcccagccagacagtggggtggttggtatcagagcgcagacatgtccagctcccagactccgggcggaagcagcgagcagccttcctggtacccagtgaagcccagggacaaggagatggcactgctactgcatctgtttcccttctcaggtaccagttcaacccagccttcttccagaccacggtcaccgcccagatcctgctgaaggccctcaccaacctgccccacaccgacttcacgctgtgcaagtgcatgatcgaccaggcccacgcatccttcccgcttcatgctgggactgggggacggggagcggggggacggagtcacaggggcgtg

SEQ ID NO: 41977 - DNA, 1307 bp, Bovine  19866880859148
  misc_feature (1)..(1): n is a, c, g, or t
nccggggatctccctagaaatgcagacccgtacgcccctccccagacccactgagtcagaacctgtgagaggaaggctgtgctttaagaagccctctggtgatgattccgatgccgctggagttcgaacccccctgcccattgccacaggccagaaggtcttcacaaggtgggcacgcctctgtgcccactctcagcagctcgtccagtggtcagcccagaacattcattgggcaccgaagcgagggtcgccctacttcctgctcatcggagagagtaacccttggtgtgttgcctctgagggtttgccaacgctgcgtctaaatcctctctcatttcttatgggctgtgtgttccatattcacaaatcagctccccttaaatcctctccagggtttttttttacactcctttcagctcaggaagtccagaacaagatgccgtgtttcaaccggggtctgtttcctgcagggggaggggcgtttctgcagggtgcttcagttcccctctgccagcctccagctcattttctgaacaatagaaggagattgctgattcatgtttggctcgcggctggctccaggcgtctctttttctcctgctgtacttgtgcggctgggacacgatgatgctctattcatccctctgagttagaaatgccagcagctcagagaggcagccgaagatcccctcccctttggcttatttaaaaccttcccacaaatgacacgttctgaaatactatacagcattcactctgagccagttggctttggccaagagagcttatctttttattagctgctgcttgcacaatgcctggcaccctggaaccagaattcttaaaaaatgcccgtagggtgaatcacacacccacctcctggggttcaaacctgatccttctatcctgccctgatatggcggaaagacagtgctcatgttcaggctcacgcttgcatcattaaagaatgggtgtgacctgcttgaggtctgacggtagggggggtctctgcccaccgctgaccccgtgtgcacactgtctgctcggccactcccggcccggccatagcagtgaggcttgggtcgcccctgagcacagcgttgccaacggcagccggggccagctgtgggtttttgtttcccaatggcaaaatcaaaccggtgggactgcttcacgctcctagaactcagtccccctcagcggcacgtccacatcccctgggtggctttgcagagtcccagtgcccaggctgcaccccatgccactgagtgttttgtgagtcaggcctcagttctgtcaagccgcag

SEQ ID NO: 41978 - DNA, 1181 bp, Bovine  19866880895357
  misc_feature (1)..(1): n is a, c, g, or t
nttcaggatccatattttaagaaccactgacttaaggattttggagtctattttttcatctttgtggaacttcaaaaggactgttttctttgacttgtatatcgtctaaattgacctatttcatctagttaaaaaactgctataactgagttggtggtatctttggcatgaatatgctgggcaaccattccatcttcatgaaataaaacttgcagccttcaaaccatagatctggaaagactggccaaataaggaggccaccaggaatgtcttaatgagagcctcctccttggaaatcctacagttcaagtattaggctgcttccatcagcttgggtcccgagtcccaggttcctaccacagtgttctcagcacagccatctcttttccattgcaccaggtcagaatccattctgtttgtgctaggaagccacattgccagtttttcaagcacatttttgtaaaaacaaattctgcttggtgatggattgtgccccaaagcccccgcttccctcaagtatccttcagtagagccatcagggctagaagtatcgaaaagtttttattaatcattaaaggagaaaaattagaaaggaattaagaatacaagaagttttaaagagaagaactttgagtttcttactcctcaaaatatcaaaacagactcaatcccagagccccaaggcttgtgtggcccctggggatctgcacttcctgggtccagcctgctctgtctggccaggagttttcttctttggtaaaaatgagagaaaaggacactcacctttggaagcttcccaggctcctcctctctgtctttggtctgtaatctgagaaaaaaaaatccattctttccagtgataaatcctgcaaacagtctcacctcttgcatatcttcaacagaacagacttctgtatatctcaacatatatttcacggaatacttggaaccaatgttacgagttatacgatgaggacttccctggcagtccagtggttgagaatctgccttccaatgcaaaagatgcaggtccaatccctggtcgcgggactatgatcccacatgcctgaggacaactaagcccacacctgaagagaattccacacgtctcaatgaaagatcctgtatactgcagctaagacctacctgatgcagccaaataaataaataaaaacaagatg

SEQ ID NO: 41979 - DNA, 1324 bp, Bovine  19866880895695
  misc_feature (1)..(1): n is a, c, g, or t
naaaatgaactgtttcatgcccagaaataaatgtcttccaaacataaatatgaatcagttataaaaaagaatcttttggaagtacaaaataaccacactgctaatatatttgtgtcccagttgaaagcgtgtcaagaacacacattctgggctaaagttgtcccaaggagtgattctcatttttgctttgaatcttgtataaacaaaccgggatgccttctttgagccatgagcaaatccacagctccctgttttctgaagagaagaagaattaaagatgggactgtttaagttggaaaggtctggggcttgaccttgctactttaaatttccttcatcactaggaaattgctttgaattcgtctgcttggagaactctaatttggtttgttcttggtttgaaccacaccatgaaagagatgctgtccatttgtattatagcaaaacttggaagccgcctcagtgacactgttctccagttttcctctctgctgttttcatctttaaacctgagcttgttctcagtaattcagaatgagacccctgacatcttactgcctgagtgagcgtcccagctagtctctgcttcacagtttgcctttggacaaaattttacacctttctctgcctctcttttcctcgtgtgaacaatggggttattaataatgcctacctcatacaagcattgtgattattaaattaaatgaaattctgagaaaattagcgaacccagcccacaaaacgtgcttaggaagtgttatgtattaaattgcttattgttgttattaattattgagaatgtttagcttgttttcactgacttggattcacaaatattctctaaaatccaaatcagatttataccctcaaaaaataaattgagattcaatattattttcatacaaaggcaaagtttgtttttaggtgttagtgttgaagatagtggttgtctatctactcacatttaaagccacaacagtgacagacacaaacttcttcctgccttgtcaactccttaatattgattgaaaaggggaagaagatttataataagcagatgaatttttagcaaacgttttgccttttaccacacctaatgttcactctgcatggagccagagtatagaacaaagagcagcatcttgagaagctgagtggagttgccgagaaaacttacacacgcacacctacatacgcacacacacacacataagtagcacacagtttaatgccatgacagcggctttgatggtgcttgggggaaaggcagtgagctaaaactgagctagagcgctctcaacatggtcagatcacacacataaca

SEQ ID NO: 41980 - DNA, 1136 bp, Bovine  19866880968058
  misc_feature (1)..(1): n is a, c, g, or t
nccatgtccagtcatgaatattaaatgagatgaacccatttcagacacttgttcccttggaaacagtcatctgagactcctgtaaaaattaacatgtattttttttccctgtaaagggcagaagcttcttttacttacatagttttgacctttagttttatatcttaggcttattataagacgttctttccagagccaggcaaacaaagcaccatataagcatcttttcattagttctgaggctcagcttacaatagtatggcctttgcagctgcacgttacggggcaagtataagcagggagtcgggtaaaacctgccactcactgataaaccatccgtccccagacagcattctagctcaggctgcgtgacttcacagcatggctaattgagttaaatagtcatgttggcaatatagctctatattttaagaggcggtgagtgtgaatgaagtcaagtctctcgtttaagccaaatcgacagatgtcatgaggacagccattcaccagaggcaacagttctgtctcagtcgatgccgtggagcagggctttggtccgtggaggatttctgataccctttccaaagcctggctggttctggatttctggtatctttgcagagagatagttcgggtcaaagaggctgaactggtccagaaccaaggctgatttctaaaggcgttactcacagacaggactaaccctcacagacagggctaaccactcacagacagggctaaccctcacagacaggactaaccctcacagacagggctaaccctcacagacagggctaaccactcacagacagggctaaccctcacagacaggactaaccctcacagacagggctaaccctcacagacaggactaaccactcacagacaggactaaccctcacagacaggactaaccctcacagacaggactaaccctcacagacaggactaaccctcacagacagggctaaccctcacagacagggctaaccactcacagacagggctaaccctcacagacagggctaaccctcacagacagggctaaccctcacagacagggctaaccctcacagacagggctaaccctcacagacaggactaaccctcacagacagggctaaccctcacagaca

SEQ ID NO: 41981 - DNA, 1925 bp, Bovine  19866881010741
  misc_feature (1)..(1): n is a, c, g, or t
ncgtgttcagaaaagatattcaaggaggtaaaattggcccccagggaaagttggtgtgagaacgtttttcatgatattatccagttgtttcccgttttctggagggcagaccttcacgccccttgaaactgagtagagaaaagagcgtcacacacagaaagcgttaactgcctgcttctcagcgcaagagagcggggcttttcttctgtcatcagagctcttaatttgccccaactaaagcacaatctgctgacctccttctcctctcacctcgcctgttccggaggacgtggaaaccactggcacagtttcccttggaagacccagccccttatgccagcctgtcggcagtggaaggtgccaaggagcccgagttgtcgctctcatgtagccacgtggcacgtccctctcagggaacagggtgcccctcaggtcagccggtgataacacccaagtcaaacaaggccgcatcctggacgttgtatgtcccgaggatctgaaaagtgtccacggccagccctgaccctcgagacctcacatggtcatctaagcagtatcataaattggtgcccacttgctccctagccattgccatcgggagcggggctggcgagagggcggcccttccgtggaggagcccacgtctttctaggcgctaaaaattgggggaaacgcgttgactcctccgcaggcagtccagcgccggggctccgtgccagaggccgctcagtgcgtcttatcgccgccgttgggtggaagggtccgggaacgctggcagcccccacgagccggggaagcgcttgccttccagacctcttcctctcggccccgtcttgacagtgccaacagccccatcatgtcgtgtttttcaaccctccagaaaatggccttccagcctgggacaagccgaagccttgtccagacggcgagccggagtggaagctcgtgggaatgtctgaagcctgcctgcatcggaagagccatccggagcggcgcgggcccctgaaacatgagcagtcgcccctcatccaggcctcctggacgagctccatattccatctggaccacgacgacgtgagcgatcagagcgcacccagcgcccagaccttccagacggaggagaagaaatgcaaaggtaacagctgttttgagacccgggtggccgcaaggaaaaggactctctgttgtgactgtgtgctgggtctcccctgagcccaggtgtgcggtccacgtggctccccggcagctctcttccaaagagcctgtgcccccagaccttctgtggagcagaaaagaagtgggtttctgaggagagcagctgatttcagcttcctgttggggccgcttgggggagaagacatttttctttctctaatgagcaggagggctgttagttttggcttcagttctgtttttgaagctgagtagaaacagacactgctagcattacataactacttgctttgaagtgtgtgtgcgtgtgtgtgtgtgtgcatgacttttcccagttgtgccagtagctaataggatctccaaatctacctttaacctaaatagacaattcatgttcaaaagagaggtttgaagttgttttctttgactcattaagtcctgtgtcatcaacctgaaaggcgagattatggtgttagggggttgtcacctcataaaaaatgttaaactggcctaagtttctgattgcattagatttaactggtctttacctcgggtcgcctccgccctgacagatgtctttgtgttgatcgctttatggtcttagggcttcccaaaatctttacttcttaaatcagttagtgtctttaaatgtccaagttcatgttgaccctccgccctttctcaatttagcatttttaaaaaataaagtccttttccattttctttgaggacttgattcagatcaagttttt

SEQ ID NO: 41982 - DNA, 1645 bp, Bovine  19866881135047
  misc_feature (1)..(1): n is a, c, g, or t
ntgtccgactctttccgactccatggaccatggccgaccaggctcctctgtccttggaatttttccaggcaagaaatacggagcaggttgccacttcccttctcaggggatcttcccgcccctggagtcaaaccagcatctcctgcatctcctaacactgcatgtggattctttacccactagcatcacctgggaaggtctgaactaaccacagaggtttaatcaacagccagattctgttacagcccaccaggggcatcttcccattctccaagaaggttaatgaagtcaaagcggagagaaaataatgatctgagtgtgatgaacgggtaagaaaaagacccagcctccatctgcatcgcacgcctttttccaggtaacacggacttcttcctgtgggcctaaataccaccctagcttctcttgaaactggattccctttttctaaagaaacgttactggatcccagagacacaggaacatttttcaggatatcagtgctgtccatttttgccaaatacacattaaacaagcagtgatgagcccattttttgagtgatttgagtgctattttgagaatggtaaataaaaattcccttttccagatatgcatttctccaaaaagctttagaggaaattattgaattatatcagtacatcgtattttctacacaatcttctagccagcctctccattagggaaatcaacttgaaagccaatgaaatatttcagtgagataggagagttttaatatcagctaatgaaatgaatttctcaactcatctatttattttctgagggcacctaacaaaacaggctttcaaaaaatttaatatgttgtctttgttttacttaaatcaactctgagatgttgcccaaaagcattctggaagagtaatgcagctctgccctctaaattctgccgtgtaacccaactgagtccgctgttcaagactcatcagaacgcagcggcctcattaagatgcgtgtgaaatcttaggggaaatggcatattgcatgcttttcactttagtactgattttgctgtcagttaagctttatgctcttggtttccctttttgaattgataagtgttcacatcttgtccgtgcgccactcttagcaaactggctactgccgtgtgtttttttaaatttcataaagaaaaagtctgggacttcctgctcactgccgcactctgtctccagtaacgttgttcttgactttttaaaatagaattgttgcatgtttgtgtgccatgaggttaagtcattcagtcgtgttcaactctctgtgaccccatggtctgtagcccaccacgttcctctgtccatgggattctccaggcaagagtactggagtggcttgccatgtctggccccaggggatcttcccaacccagggatcaaaccaggtctcttaatgtctcctacattggcaggcaggttctttaccactagcatcacctgggaagccctgttatatgtgtattgtttattttatatttttattgtcgtttagaaaacagcatgcaatacttacgaatgaaagttaagaacaggtaagctagttactgggagaaggcaatggcaccccactccagtactgttgcccggaaaatcccatggatggaggagcctggta

SEQ ID NO: 41983 - DNA, 1639 bp, Bovine  19866881160871
  misc_feature (1)..(1): n is a, c, g, or t
nccagcagaacagctgtacttttccgtgtcttacaaattgcctttcactggaagactgcattcaagtgttctttgtaaacaaaaaaatttttaagttggagaagtgcaggtctagccgattcttaccgatccctctccctggaacattctataaattacaaatcgtgtttctgatatgagagccgggactggccccctggagggaaggctgggagacagtggcagccagacgaggggcccccggggaggccagggccccgagctctgtaatattagcactggcgacaatcagatagcgccaccccaaccgaggcggctggacaataggccagaggcgctggcgatggcaggcacaaagacagcattcaggaggcccggctccaccgccagccggggctgcacagacgccacagaccccggcccagccggaatgtcacctcgccgccagaaagccatctttcctggttagcttttaaactgctaaaaataataaacacagagagggaagtgctgacacgatcttaactgcggagacaaactgaaaccgttgttataataacgtcaacaaaccgggttccaaatgccatccagcactccaaatatcaacagtgggggactggagggaggctgggagacttgtccgtgtagaaagcgggtcttcactgcacagttgctctcgtctacctgactcgctccaacccagggtagagatgtgatccttctgccttctttagcactcaaggaagggaggttggagggaactctggttctgcatccaccgttttcccacataacaaatgacaagcgggctcctttctctctgctcccagttattactttttttccccaagggaattcgaagcatccttttctccattatgtttatttttaactggctgaatgctttgtatttctcaatacctacagagttcaaaactatcttaaataacaacaccagcaatgcataagcgagaagatcattcccagaatgccgcaaagtgacaatcataaaatcacgaatctgcaaacaagcgcaacatctgacctgccgatccatgagaccccgtgtggaacttggcacccacgcaggacggccagtgggagggagactgcagatctggaaaaagagaaacataagataaacaaaagtgtttttttgttttaaagtccccaacatttgcttaatccgccactgatcttctatgtttgaatagggtctggtttcagagctgtctctgattttgaatacatgcaaatagacttagataaaaccccattccaaagaggagccggtttcagagaaagggactttaacacaaggattctaataacacattttgggatgggacagggtttctgagtcccaaggacctactttcctgtgcacaggattcccggccttggaagaggtctaaaaggcaaacgtgaacttaaacaatttagaacttctgtgctaaacactgtgcagctgggtgtcagaagacggtccccagggtgggtcctaacacgccccagctgcggctgtgcccctgtgagtcggcaggaggcggggccgagaggaccacggagatgctggatggtggcaagtgcggtgatgctggggacacttcccccgggtcttctaacagataaagagaaa

SEQ ID NO: 41984 - DNA, 866 bp, Bovine  19866881252949
  misc_feature (1)..(1): n is a, c, g, or t
nccccccccgcccatttcattcatcgaacacatgtttattaaaagctacactgtgaattctgggcactggtgcggaccagagataaccaaagacagccactggccatgctttcatggagtttctagttcagacaaactggactgtagacagtgatagccaggagtggtcaaggcggtgatgggggaagcacaggtagattggtgggggctgggatggggaaaacgaggcaggagagtatgggctggaccagagtggggtttgggtatgggaggaaggggtggatatcaaagatgtccaggaggccagatgtacaggccgcaagggctggttggctgagagattgaggaggcatttttcagaaaaaaacccagggctctaaacccagcccggggtttagagctggggcttaggtctgggatatggataagtttcatcagaggttatagagctgattcaatatttgaataaagcaagtggccagtgacagagggagggaggaaaggaagagaaggaggagcaggctacattccccccgctactcccaccccatggagtaactggcctcagctcttgtctctgctcactgatcttgtttctcctctaggtacaaccctgagaacctggccaccctggagcgctatgtggagacacaggccaaagaaaatgcctatgatctggaagccaacctggctgtcctgaaactgtgagtatctgcctccattcccacccggttcccattgtcagcagtctgccactcccagcactgggtggggtgggagtgagaggtaacctgcaagatgtgacttctctctcttttttaaaaattggagtatagttgacttacaatgttatattagttttatat

SEQ ID NO: 41985 - DNA, 1487 bp, Bovine  19866881298897
  misc_feature (1)..(1): n is a, c, g, or t
ncgcttttcttttcccattagtttccaaggcccgaggagcaaagttccttcccctccctccctctcctcttttcctcctctctcctttcttccttttttccttccatctttcatctagaacaagccctgtgatgccggactactaatcctttctctcatatcactcttagaatttggggggaaaagcgaaactgttttggatccttttagtgatttatgcatttttgactgcggggtcttcattgctgcgcgggctttcctctagttgccgcatgtgagaactactttttgtcgcagtgcgcaggtttctcatcgcaggggcttttcttgttgcggagcacaggctgtagggcacgtggccgtcagtagatgaagcacgtgggctcaatagctgtggttcccgggatctagggcacaggctcggtgattgggcatgcgggcttggttgctccagggcaagtgagatcttcctggacaaggaatcaaagccgcaactgctgcattggcaggattctttaccaccgatccaccagggaagccttggattctttaatggactattaataattcttttaataatgcactcccctttcattgcttaaaatggtaatgttattagtgctgaacacaggctgtcttttgtttggttggttgtttttggataaaagaacatgaagggggcagagtaaaaggctcttaaaggtccctttgctctggataccgctgacaaggcttccttgaggaccagacttccagattccaaatctacccaaaataaggacacaaagccagattcaatttctggagcagtggctgccgaggcagcccctcacgttctcctctggcaaacaatcaccagttcctctggtgtttcatgatacctggggctggaaagaacagaaaaggggtggggggtgctcacttccaataaaacagtgaggtgacttccacttggtgcttagagtttgaggcaagaaatgtctggggaagttgaaacaaaaagactgcactagagctgtttaggtgaaatggctacgtgggtaggggatggtctcccatctctgatacacagccctcaggactggaagtgctcagcgtcccagtggctctccttttgaacttgctcatccattactggggtaatgattttccgtctgggcaacagcaaagcccaaggcctattacacaggcaacataaagttaaaaagacattatgaataaaacgttggttctggcaggcttttgccaactcttctctggagaagattgcctgatgccgacacgtgtttattacacttaataatgtttacataatttcttccttgagctcattagagctgtcagatcccaagtaaatgtgctccctcctcggtttatctttaaagacttcgcagtcaataaagcaagatgaatggcatccagggcacagacgacgtactctccccggctttgcaaacactgacaagttagaccttccgtacgggtgg

SEQ ID NO: 41986 - DNA, 433 bp, Bovine  19866881329723
  misc_feature (1)..(1): n is a, c, g, or t
naaaagggttgcgctgctttaaaagctttgcaaatacccttcacagtatgatacaaccaaacacacaagggatctaaagccagagccccgtgccaatcccagtcggccctcatctggagggtgtggctgagacacagccctgaactgagccttgagaagaaaaggaaaactacatcaaggggctctgggcctttaagcactactgaacccacacaagtattttaaaagcaataaagtcatcaaatttccacagaaatagtggctgctcacttgcttacttgagtatcagttaacggctgccataaaaatctaaagctacattttggctttccaataatcaaagttaatcttttcactttaaaggtcaaaattacagtaaaatcccacataattcatgaaggcattatattgaaatcaaataaataaaagctac

SEQ ID NO: 41987 - DNA, 744 bp, Bovine  19866881423781
  misc_feature (1)..(1): n is a, c, g, or t
ntgtttgcaaatgcaaaatgtgtgcatttctagcgtgtttctacattcattaatgccgccttcaggagcaatatcgtgcaggtaaaatgctgtttgtggctttctgttgcacagttaaagctgacccaccttatgcacaagacaatcagatataaatctgtcctcctcaggatgcagacaggacgttccagagcacaacgcacgacagaagaagacccttaggagacaggcaacttgctgacacagacgctagcagggcatgaacgagcagacattatgccactcccctcttttggttcttcctatttggcatttttcatttgattttagagccaaattagttatgaaagctttctttggagaaaacacctttattcccccatgatgttttcatgccctgagaatcagaaaaggacaacagaacagggaaagatttacagtcatcggaagatttgtgttttgcaaatggtgttaagtgatattgctagattggtaatatttttttcagcctaaaattctattgaaatctgtgatcaaaatgttttaaactatccaaaaagaaaatttgtatatttgggaaaaatggatttttacatagcttttgtatgcagatattaaattgtaattatgactatagcaggcatagataaactgataagctacaattctaaaaaagaaacaaaaaagaaaagcttataacggatatacttttctgcctctttctttaaatattattattttcta

SEQ ID NO: 41988 - DNA, 1204 bp, Bovine  19866881793057
  misc_feature (1)..(1): n is a, c, g, or t
ntcaaattataggtgaaatctaatttgacaaaatcccctgtagtgttatttaggggaaaaaaaaaaacaaaacaagtggcttcagaacacacttgcacacctgcattcacacacacaggcacacatcgacatgtgaaacggtcttcttaaacattggttctccagaaagaatcaaaatgtttatcatcaagctgcagcatgtgtattaagtggcagcaatgaaatctttttagcacaaggtaagaatctgaatgaacttttaaatgaccagtacctgaaccaaaaattttactagagatgaactctaaaatacttattttttgaaaatctggactcaactgcctgttgcacttttacattaagtgttgcttaaataaacaaaaatagagcataaattcagcctctactctctaaacatttaaagcaatggttatgttatcaacaggtaaaatgcacctaatctgggtcttttgacacctcttgttttaagtttattgtatgataaagttcttcacagtttaaaatattgtgaagagatatatttatgtataactatattcacatggatattatgtacactgctatgtacttaatgtacccataatctttgaacatgtgtgtgccagaggataccccacacctacgcaggaaccctgaatagcagattggtgtggactgaaatgatttctcagaaaagagtagaagttaaaaaaaaaaaaaagataattattatgaataattataacaaaaattttaccgtatttacatagtgcctatctcccaagaggtaaagatgctttacagacggtggttaggccgtgtggggcgggcctggggaaggatcggctctcatttccacaagcagggagcctcccaggcccgcgcacgctcacgacggcggggcccccacaccgaggtctcctaactcgcggggcctcaaccggcagagccgagtcccgtggtgaagtcaagcttccgtctgacagaacttccaccgcagagggtaccttcaggccctcagatccttgtggttacgcattacgtttatgtcacagggagatcaaaatggtttttggttttggcagatgagcaagtctaacattcagtgtgagtgtaattcagtgtagcttctccagttaagtgctgcacagccggcgggtctcgggacggcgcgcggcctccagccagggctgaggaaacccgg

SEQ ID NO: 41989 - DNA, 1100 bp, Bovine  19866882077845
  misc_feature (1)..(1): n is a, c, g, or t
ncaggcaagagtaatggagtggattgccatttccttctccaggggatcttcccgacccagggatcaaacccgggtctcccgcactgcaggcagacgctttatcatctgagccaccagggaagccaggaggtaaagttcactgtaaaggtaaacagagcttaacccagggcattcagctgatgttttataaaagaggtagtgaaaaaataaataaataaaaataaaagaggtagtaagtcagagaaagactttaattttgttgttgaacgttttatttaccttattttaaatgaaatgatcacaaactttgcagcaaaaatcatattaaaattcataagtcagtcttcctcattcatcacctacctcaccacctctcctctccttcccttcctccaactacctccttttctcctaacctttgaccctagacccccaaattcaacgtgttagcttggttcatactgatgggtgtcatttccctcgtggaagattttccatgcaaactcccttctttctgtgcacaaaattaggaaacatgtagcctgctaaagtgttaagatgatatatccagtgaaaagaggtcatttttaaggtctcaaggcaagactcttttttgggaatgtgatataatattgctctcattcatccagacccctttgatctagaatttgtaaccttttaacaaagattgggctaaaggttgctattacatctatgaaaataatatcataaggagtttgatgacattatttacaaataagttgtggctgcttatgaattgggaaacttgcagactgtctcttgaaaggccaattttatgggctttgtttgaaactgctaaaaccatttctgtagatgctttccctcattccaaaagctcagcgattcaaatgggttttttttctaaattagccccagttaagaaggcttttacctacctgattatgcagtgttgagattctctcaaatcagtttttaatgacaaattttgaattctaggagcgactctaatgaaaattccatttaacattcagctcccaaagtgactctaaaaacccagtgtaccttgcagaggacttgatgctcactgctgctgtttg

SEQ ID NO: 41990 - DNA, 1719 bp, Bovine  19866882096672
  misc_feature (1)..(1): n is a, c, g, or t
nttggtactgttactggtgaaaagcaaggaatggcttggacttgtgcctccaatgaactagaaagggagccaggaaatgcactgggcaaaactgcaaaaactggatggtttgacacacagcttctaaccagaaaaggaggcagaaaaaaaaggaaaaaaaactgctttattgaaaggttaattttcagattagttttgggaaatttgagataaatacacgagatcagacaaagaaacataaggcctggatcctttttcctggggttttcagaaaatagtcattgcttccagtgaaatgttttgacattttcagtagggagaaaatgttaattgtaatgttgtgtgtatgtgttcttaaaaacacttgggaataaatcttttagttgtttgaagagtaatcagagagtgaaaacactgttaagatgttagctgcattccttattccttatggtaacgcctgtgctctctgctgctgcggctaagtcgcttcagtcgtgtccgactctgtgcgaccccatagacggcagcccaccaggctcccctgtccctgggactctccaggcaagaacgctggagtgggttgccatttccttctccaatgcacgaaagtgaaaagtgaaagtgaagtcactcagtcatgtctgactcttagcgaccccatggactgcagcctaccaggctcctccgtccatgggattttccaggcaagagtactgaagtggggtgccattgctttctccgatgaatcaagctaattcagggtaaatagagaaagcaagcactgtagagccaggtgggacttgaactctggttgcaaaagtgccataacgtttcctgtgctcatgggccttgttggtagccctcttcctctgctgggtggaggagctgactgtgcagattttggaaggctgggatggaggccacctgtggattggtagccaagcgcacccgattctggcattgagaacagagtccttaggtgctcctgggatcctgggtacttgaggacaatactagctacacccactgtgatacttcagagaacagaagacaaccaaccagctagcagtttacatgccagctcccttccttgtctctttgacctgatagccctggcatcctgggaccctctcttttctgggaaatttgcattgaccctaatataaggagacttagaactcaacagaaattcaaataatcatttaagggaccaagacgatcttccctgttggggctgagtccactctgagtgcagccatcacatcctcctccaacagccaccctacttctctctgccacagctaaactccttgaaggaattgtctccacatgctgtttctacttctttacctcccatccaatcttccagcgaaactgctagtgacctttttacctttttattgttggtgagcacatctcttgtcttcttgatctctttgcagcagggctaccctttcttgggaaactcacttcccttggtgtccataactccattgtctcttgacttttattctcaggttcttgccctgggccctgagtttttattgcccctcctcctgcatgcaaacctggcgccctgtgagctccgagggaagagaagatctgtttgctcaccattgtttctctcgctacagttgggctcaagtcccaagaggagagaggacagctggtagtgccagctcctctccacctctggggagagacttgcaaaatgctggg

SEQ ID NO: 41991 - DNA, 1441 bp, Bovine  19866880458199
  misc_feature (1)..(1): n is a, c, g, or t
naaaagtcacaaatttaaacctctgtgaaactccaggtacatagatgtaacttacttgataaccccacgcataggccttaaactcagaaatttcccctccaaacttaatccatgtctagcatcccctctattctgttttgcagcaaaaagttcaaacatttttctggagactcatttttctggagactctctccttgatccagctcttatgtaaatcacctctcaccagttttactactttcaaaatttacattcaggatagcttagaacattctgattgttactgttcacttaaatttttaaaaagaactacctagcaccttatattttcctctaacctcttctaacacagtgaaacaagaaaggcttataagtgggaaatggtgtaaatgtaaaatactgcacaggatcaaatattttttgaaaaaaaattacatggcaggaaatttttttttttttttaaagagaagcaacattaatagtgggcatcatgcttgtcaccttctcaaagtcagggtcactaagttacacagaaatgagagcacataaaggactatagttacaccaagaatttcagaaggtctaaatagattaacgtcttatcttagatacatacatttcttccatttggtggagttgtaaaatggagttttaaagttaattttctgatcataaaatcttaacaatgggcctccttatcctatcatatttctcaagagatctggaacatggcctgtaaaagagatgtctcaatatattttaaaatactatctttaattctaagcagaaagcactagaaagttagagtgaacatttactgtttttcttctggtcctgactgtttataccctagtaaagaatgatagattcttctgcaaagcctcctgagaatatggaactaaatgcatccaaatattgaattgtttggaaaaataatagttacatttctgcagataaaccctctacctctattgaaagctaagtattcataggaatattgataggagctttcacaaataatatgcctccctctgccaaaatacaaagcaacctccatcagttaataatgagcatgactaattattaacctgaataacacacgacatcagagaaaactggcataaattatctcaaaatgaactgtgagtgaatctgtccacttaatgaatctaatttacatgattcttctccctgctgttccctttgtaaataatctttcatttaaatcatttccagcccaaaagctgaaatcattattctgagagttatgtgggattgatgggtaagccattctttcagccataacttgcaagctgttcagatcattgatcactatacctggctcctggtttggatacagttttgctcgggtagtcagctcaggaccttgttcagagctcagatcataaagagaggctctttaaagagacctagaaccagg

SEQ ID NO: 41992 - DNA, 1312 bp, Bovine  19866880526288
  misc_feature (1)..(1): n is a, c, g, or t
ncatggattggagctgaccaggctcctctgtccacaggattctctaggcgagaatacggaagtgggttgccatttctttctccaggggatctttccaacccaggattcaaacctgtgtctcctgcacctcctgcattggcaagtggattctttatcactgagccgcctgggaagctggcctggtgcttagtaggcactaagtaaatatttgtagaatcaacaaggtgttatttgtttgtgcacttaaatcaacaggcacacatgtcgctctctcagtggtccattttctcttgccttgtgctcatagttcttaccaatggtgataggggccattcatctgtcttgcagtgaaataaagtaatttttttcatcagcagtaatgatccccttgaatctgtcagcagacacacgttcagaaataagtcttttaaggataattttagttgaaaaagctcagaaagggcccttgtgagtattctgagagtacagtggagagctggaaacatatttctccagaatttcaactagaactctcactcacggaggctccttcagacaggaaagaaagaggaaggaagtctaaagtctcccaaaattgcaaatgataaatccaagtgagagcgaaacttcctctcttaaaaaatcaccacctcccacaatgatagaaaaaaaaatctataaaagtagacgtgggggtgagggtagagtgggggtgaatgaacagtaaaggaacttgcctattaaatgtggggaataaagaagaaaaccaacttagacactggatcagacagttcaaaaagtccctgagtacaatgccatatggaacagctatgaattttaattcaagaggagacacagcttttgtctgtttaacttgttccagctcctcttattattactagtacattgattccatttcttgagccctgaggcttttcttgtttcctatcatttgaacttggaagtattttcctttgtcacccctctcccctgccttaagcattcttagttcttccacaaatatcctccatctacggtcacctactggagatagagaaatagcctctaatatttttctgttcaatgtacttgagggtaatactctgaatataactcaggattattaggacattctgacctcaaaattttggtgggctggcacactgttccagaatgtagtagtaactagattttccaagctatctaggggaaaaatcaagggcatgtagtaagttttatgaggagcaataccaattcttccaaattcattctaaactccttgaacactaactagtccaatccccaatgttca

SEQ ID NO: 41993 - DNA, 847 bp, Bovine  19866880559498
  misc_feature (1)..(1): n is a, c, g, or t
naaacttgtgttgtttgtcttgtctagacaaactctatctttctggcctcttggttaagtgttcttttcaccatatcatcttgtttcccccacattcctgttattttccttggattttcctacaaggtcatgcttatcatgtctaatttggctcccattgtcattttttctttttattggaaatttaaatttggatttgcattgctacttttccattcaattggtgattgaaatatcatctggagggagtggaaatgaaataagcatctggaaagaatgtgctgtgatgaagatgtcattgtttgtccataaaggctaggcaaacaatctggcttttcaaaaacaaatgaatgaaaatgtctatgtccatcccaatctatatttcagttaaaaaaaaaattaaaatccactgaaattggtagactttcaaagatgatagaattaaatataaatgattaattagctgaaaatataataaaatagctaaacattcattcattcacctatccatccactcaagggttactggataaatgatgctaagccccacaattgctactaaacctatctactaatcaaagaatatgtagtaagaggcaaaaataatttgaattacaaagtcacaaaatctaagtttgggcttccctggtggcccagtggttaagaattgcctgccaatgcaggggacacaggttcgatccctgatctgggaagatcccacatgctacagagcaaataagcccacgagccccaactactgaccctactacgcactctagagcccatactccacaacagaagccacctcaaggagaaaccagcgcccttcaatgaggagtagctccca

SEQ ID NO: 41994 - DNA, 1829 bp, Bovine  19866880564613
  misc_feature (1)..(1): n is a, c, g, or t
nttatttttatcacctaaagaagacagatactgcaactcagagcagatttatatgttgttggatttatttatctgcaggggtaccagaactcaatcagcctgtgactagtgaggagtgcagtggacagtaatcagcaaactgtagtcaggaggcctggggaaaagttaggagacagtcatgttattggtgtcctgagccctgtttgtactcagcaaatattaaaataccaattttcaaaaataattggtccttgagtatttctaagttatttctaaggtattcctaagagaatgagtaaataaatagaaaatagtcttggaaaacataatacaaattactgcccactgaagacaaaattgaccaaaatgaaaaggacattgggaaggagttggggagtaaaaagaaaatgtccttttcccaaggaagccaacaaaaggaaaagaaaattaaggccagaggactttggatcaggcagagagagagggaagcgtacattctgtgtgattctacagtttgtatgggacttcaggaagccagatctttggtacactggcttggccctggggtgtgccatcaattttattgatgactacaatggcaccccactccagtactcttgcctggaaaatcccatggacggaggagcctggtaggctgcagtccatggggtcgcgaagagtcagacatgcctgagcgacttcactttcacttttcactttcatgcattggagaaggaaatggctacccactccagtgttcttgcctggagaatcccagggatgggggagcctggtgggctgccgtctatggggtcatacagagtcgaacacgactgaagcgacttagcagcagcatgactcattttaacctgcagaaaactgatgaatttaggaggaaggagagtgttaccagatttacatctgacacaacttcactttatttcccaatcttaacccattaaattctttaaaacttaacacgatactgcctttcttcattcacttaaaaaaattgttttggtttacaaaaatctttgtaaaggttatgttttcagtaatacttttgttttagacactgactagtcagaatgctgagatgaaaagtaaatcttctgttgaaaaattgatatgtttttcctaggctcttcttcatatgtctttgtctgacttccatccaaccctcagtgttaaaggtcacctcagaaatggctccccactttctctccttgtatgggctgctactgtgtggggatttctctccctcctcccctgtcctctgtctccactactgctgagccttacaaccataaccaccagtgattcagtgcctcacttcttcccaaggctggtagtaaagtatagtaaagtaactataaagttactggggaaaagttaaggggatggggttagagcagagttacccacctcagagccactgttgcaaagcctctccccaggacctaggatggattactggggcagcgcttcccctctactctctttattaaccacctccttctccagagactcccttccttcacctttacaggcatcctcagattcagagagtggaaactcaccacttctaagtgtttctttataccattacattaaaaagatacatcagtggaagttgctagcatttctcctccctatatctgcccacacaaggaggttctgacttggtcctctcctgtagctccctcccaccagctctgagggagcatgtggtggtagcagatggaagatataagggagaatttttaacaggtattgctgggacttttgaaggtacaaaaattatacctgatgacctgactgtacttttt

SEQ ID NO: 41995 - DNA, 856 bp, Bovine  19866880629206
  misc_feature (1)..(1): n is a, c, g, or t
naagtaaggtttccttttaaggagctcaaaatctagtattgaacaattgcatggagagccagtcataaaaccagctgacagtcctgttcatcacagggtgaataaagcaggatgaaagtgttggggagagacaaatgattcctgacttgggacaaaaccaaaactggactcaatgaagagggacaggctggcattactactcagggaaaacaagaatcatctaggatttccctggtggtccagtggccagtgcagggggcatgaacttgatccctagtccaggagattccacatgctgagggggcaactaaggctctgagctgcaatcactgagcccaggccctttagtctgagctccgtaacaagagaaaccactgctttgaggagcctgtgcgccacaactaaagagaaacccccatgcaccacagctagagaggagcgcccgctcaccacaactagacaaagcctgtgcgcagcaatgaagacccagtgcggccaaaagtaaataaaataattatttaaaaaagactcatcttgattatggtgagaagcttagtgtggctcaagtaggggtgaaatgaaagtggaagtgtatggggtacaagtgaaaacaagtaatatgcttctgactaccagggaacacagtgtatagggaagagatggcagcacaataaaggccattttttccacatgagtactgatcaaattaataaatagctaacctgcaagggaataataaagctatttaaaaacagtgtacagcactcccactcagcggtaatactgctgagttcttgcacaactagaaagaaagaataatttaaaattagaaacgtgtcccattcttattaattat

SEQ ID NO: 41996 - DNA, 825 bp, Bovine  19866880631776
  misc_feature (1)..(1): n is a, c, g, or t
nccttgggaataaagatggattatataacttctctgtaatgaggctgagatggatgaggcaaactgaatcactcaaaagtcttctgaagtacctgattgaatggaacaagctggcatgcctttggagtgagtagaattatgcctcttgaacatgtcagaagtccttgaaataaagccatggataaaagggactagtggctttaatttatttagtctttccagaagtgtttgacaaagttcttcatgagaagggaatttagtaacaggggaggaaaactgcagaactgtgggagattagggctgattaagagccaggatgcctggagtcaggaacaaatgggcatttttcactgtagcaagctttagtggggacccacacaaggatctgatcaacaagctgacttttaagattatttcatttttattacccaattttaaagccttgagagacaaggcttctcacgtaaaggggtcagtgaccagctctctgccctcctccttgcccatgacagcttgtccaggacagggtggcaaggttgagtggctgttcatctgaatttgaccccagacagatcttgattcacactctgaaaatgtaagatcttctagagtgttgtaaagaaaatgagtcatgggtagttcagagactgtttggaaagactgatgggatgtggtaatccactcaatcaaaggcagacagggcaagacctgtaagcagaagagctgcttggaagtcatgagtctctcctcccatatctagggtctgctgtatcagccagagaccttgtgttgctcagttaacctaggctgccaatgtctcaagtc

SEQ ID NO: 41997 - DNA, 1982 bp, Bovine  19866880652245
  misc_feature (1)..(1): n is a, c, g, or t
ncccaaatctcaacaacttagtacactgaagtttatttattgcttgtgttcaagtccactgtggcctttgcagtcttttccagaggccagtaatcatttccagcttcctttaatctagtggctctgccactccctagtatttgggacctctgccagatgttctctgggaaccaacaatggcagaaagacagagaacataggagatctaggggattttatagaccagggttggaaaggtctctaaagacagagaacataggacatctaggggattttagagaccagggttacttatattactgttatccatattcaactggtcagacctttgtcatatgtcacacgtgatgacaagtaaatgtagtctaggtatcagtccagaacagaaaagaaaagaagtgtggtgagaacatagcaagttttattacacatgccagatggactgttttacaccttgctgttttagcttcacaacaaattttagaaagcagccatatcagttcctagacagtttcctcagcctttctaacagttgcatagtattcagttttacagattgtagttgactcttgaacaacacaggtttgaactgtgtgggtccacttatgtgcagatttttttcaatagcaaataccacagtcctacatgatccacagttggtggaatctgcagaggcagaatcatagataagtaggagttgcagaaagagaagaatctcgtatatagagggacaactgtgagttatacccagattttcaagcatggggagtcggcactcccctaccctgatcaaggctcagctgtatactgtgattttttaaccagtctgtggctcagccatcctcaatgttttctttttttcccattcatccatctgcaatgaatactcttgtccttatgtcattccacacatttgcaagcatatctgtgggataaattctcaaattaggtgttgctgaatcaaacagtatggatatttgacattttgatagctgtcgctaaattaccctactaaaaagttatacaaatttatactctcaatagccattttattgtttaatcttgctgggtaaaacatttctacttttctctgtgtttgaatgaatatttctgtgcctcgtgcttccaatcctcaatccattgtgtcaatagtttctttcatttcaattcaagaacagtgacaatttcttgagaaacaatcagtgttgggtaccacgtagacccctttacatctcttattacatctaatcataaaaagcaagtctaggaggtaggcaaattacaaatgaggaaactgaggctcagagagattaagtagacaaagctcatctaatttgtaggtggtatattttcattatatattctgaagttattcatcttttaccccctctggtacttctcacaccaaagcataacctagggcagaggaaaggaaacgctcattcttatgttgtctagagctgccttccctaagcaagccaagatttctttgaagtcttctatatatattaaaaatgcatgcaagttttgattttcacttttaagtatatctgcatgcttaaaatattcaaaatatttcaaactacttgctcttaagtataactgaaacttcaggaagccgccagtttcccctgtggcttggtgaaccctggcccagtgctcccagggcagacaagggagcatggttttgtatgttggtgccccatggagaggcttctattcatccttcaaaacccagctcatgtgctgcctcaagatcaaggctccctgcagggtcagcaagcccagagtgctatctgtcttctaaagaactctggattgcagcagagaaggggctcactagatttctaatgaacaaatcattgcagataagcaaacacattattgtattaactacttttatttttccaaaggagtcgggaattgccaaaataatgaagcctatttctgagtgccaacctctcttaaacactcctaaatct

SEQ ID NO: 41998 - DNA, 1578 bp, Bovine  19866880697207
  misc_feature (1)..(1): n is a, c, g, or t
naactgcaatccctgaaattcctctctcctgagaattctgctctggactctccagaacccagtgcattcagctgagtttttcttatttgatgctcttagaaagagtagtaagggcaacttttcttgtccttgggaactgggattcagatgagggaaggaaagaacctaaacctcaaatggtccacagtccatcttcctgctagaagaggcactaaaccagggaagacatgatatatgggaagcttgtctgaagagtcagtctacacaaaccttccttcactgagttccttctcatcctctcttaatagcttaactcactataaaatacaaaatgtgggtatagatgataagttgtaagaaaaacaagaccaaatgattttgttttggtatcttaattggtattcaggataattccacaagcctcattttaatgaaggatatctatactgtggcctggaacatcacctatagcatagtaagttttaaaaagcttaaaaaatagtacaaaagaaaagaatcttttgtgtaggggcacaccaccagtgcatgagcagacccagaccaaaagccaggtctcctatgtccagtgttagctatcccacctttcctgcttctcagatgccaagcttgtatggaaatcgacttggagacacacaggataattcagtactcatattgtctcatttctgggaggcactgtaccggtgctaataattcaaaaagtcacggctctaacgcagcacaagatgctttgaaaaggacaaacacaatgaaatctggaaaagtgcagtaagtgagtctagacaggtggaaatagtcagacacacgagcatatcacatgcaaaacagagcaaagctgacctttgttgctttactgatgcgtaaccatgaaaaaaacaacctgcatctttaagtatcatatattttgaatcatctggaggtagaggtattttaaaaatgtatctgagagagagagagagaaaaaaaggaattccaacagatcattgtagccaacatgcctctgtcaatgaaaggtctttgtagctaaagtgaaatggtatttcttttttaatgaggtgaacattggtgaagagatattatgcatatttttctaaaaataattgcatagatcttccccataatgcaataaatgtctgggtttagtccacctaacctactgtctaaaatataatgcaatttttaacataagcatctacgaataaatggaatcatatactgcaagttggaacaattcacaagctacagcaaaaaaagcttttcttattaaagatttcatatgataaaaactgagtgtaataattatcttaaccatatttctcttttaaaaaaagcagttctatttgtaggaagagagcccatattttatatcttgaaaattaaatcagttatcaaatgatactttgaaactcaagaccagctcataataattaaactataacaacgtttcaaggatcaggtaaatctgaatgccagtaatacagaaaaatgatttactggtgcttttaaacacttgaaaataaattctaaacttaaatgatgtgtagcttctatgcagca

SEQ ID NO: 41999 - DNA, 6785 bp, Bovine  19866880717430
  misc_feature (1)..(1): n is a, c, g, or t
naaaagaactggaaaatacagaaaaggaaaaaagaaaatagtcacatacaattccattttaataaccagtagtaacatcccagactatgtgcttcagatctttttctgtttatagatatgcctatgttcagtttttgtaaaattagaaattattatatatcaccactttataagtttacttttctttgcctaatatacactcttgtatgttgtattgagttgcatattagttcattatatgtgtgttctgtaatttattcattggacatttagattgctatgaatttttcactcatgaataccagcaatgtgaaataatctaattacctttggggttgtattcagattaatttcttggtaatttatagaaaatcatttaataagctatagatataaaacatttaatacttttaaataaatttgaaaattggctttcataaaaactttaattttattttcatcaatagtatataatgtttttagtttccatgtaaccttgccaagccagcataatatatatgcgtgcatatatcttatcttacccagtctaatgacttctattgagcaatatggggcaagttgttttaattctgagcctcagattcctaacctgtaaaattaactaacgagagtagaattcagaaatacagtcacaggttctaaagttgatattgattgcagagcctctccgtgctccatctgggaagtgtagctcaaatgagaaaagactgtagtggagtcgggttaacaccagatgaggctgaggggatgattgtcagcgagcatctccctggtgctgtcatgactgctcagaatgtctcagtgtttatcaatgttcatcagacatgcatattctaattcagagggtgatgtgcataacatatataattaaaatctattttattttattgccagctgctttgctttaaaatgcatgctccataaggacagagatctttgtcttatttattgatgtattttaaacacctaacacagagcctgacatgtagtaaagtttcagtaataaatatctattgaataagcaaataaactgaatgaagctaccctatagctttccagaggcttcaccctctggtaaccagcagaatgccctccccaggataacctgtagatgagctgccatgactgggacctctttccagaaaccactgctatgtcccatgacacagtctttctcagatgtgttaatacctgcagactggttaagatccagcctccccttctagaatccacatactttcacagaaatattgggtctttctacttgaactcatgttggttgtgttaatggtttgactcaagaggagtattatttccaagttcctagggaccctttcattgctgccccttagtactatgtagaactaccactttatggactagttgagagaatattatatgatataacatatagtaagaaagatagaaccgttcatctaagcaatatgctgtggtggttaaaaacccaggacccagagtcaaatttcctcagttcaaacctggattccaaaatttaacagttctgtcaacttcagcaagttacttgatcacacagtgttcagttttctcatctgtaaaatgcagctcgtacctacactatagaatcgatgtgtgggtgaaatgagttaaaacatatgaagaagtagaaatagtaagtgaatattattactatatctgtaataattgcattgaaaatttactatgtgtcaaaacccaaatttatattacttcagatagtctttaaaacaactctgtagactgaccattattgttattcataactcatgaatgaggatattgaggttcagaaggttttagtaatgctctaaaatcacatagctagtgaatggtggaaactgggtttaaatgcagatgtgtatgaaatattctctcatggagaaatttttcttagaattaaaatatctacattctcactgacattacgattactattatctgatttatagtatttttagtcatgcttacaaccctagaacatttttcaagaaactagctttacatgaatatgaatatctaagcaaccatctgtgggtctgagggtctattgtttctaaagactcttacagtcacttttagtgattcaactgtggtccagtttatgcgtgtctgtatttcctttcctaggacttagaaaaactcagtcaattaaatagtgaaatacaatttaaaaattataaggtgacaaaagatgaccaaaaacagataatttgcattccatggtgctggtttggtaaacattataatctcatcaaaagaacagctatccttgaagatcaaaatgcaatgatttcaggattcattcagcagtgtgttgaagttacaggcacgctaacccaacagtgattctgtgggtgtggaagtgccctgacaccagcagttgtagagactcatgcactctaaagtaactggttgaccaagggccctgtgagtggccaatatccttctcatcacagtaacagacttgaaatttgaacccttttcagatatcctagcagacaaaacaataaaactgaaaagtaatccatttaaaatgtctgtgcacctctgtatttgtgggcatgatttgctatgccatatttcacggataattttttatacccctgagatacgtgttttcattgaagcacactgtaaaacgttgtgctatcttttgccaggggaatgagttgtgatatttggtaggcagtgtcctgagaactagcattgctacaaattagcagaatagcggtaatttgtgcatcctgcttattcaggaaacccattagaatgttaactctgatggcatgggtttacacaggattcaacttgatgtttaaagatccttttttctcctcaacaggttaattatgtatggctttgtgaaggctatggtatatgctgaccagctgaaaaatggagactttcatttcactgactgtttgttttttggttcactgatgtctgctacagatccaggtaattgcccaaataatatgttttcttctttctgagagtcaaacatttaaattgaatttttctctaaagagcatcacccgagtcaacataataattccttattccttttcacctgcagttgacatatctgttagtgattttaaaaagcaggtgaatattctaacagctctcaaaaaatggttctcaaagcaacttaaagtaatggggaagactctttgaaattctccattgtccgcttccctagaacatgtagccatcttgacttatggctcttaattcttctctgtttaacttgtcttctttcaaaaatgctccatcgcagtggtccccaaccttttttggcagcagggaccagttctgaagaagacagtttatccatgtaccagcagattggggggtggggtgcggtgaatagtttggggttgattcaagcatctattaatgccaccactgatctgacaggaggtagagctcaggtcataattccagcaatggggagaggctgcaaatacagatgaagcttcgttcattcaaccactgctcacctccccctgtgcgggccagtgcctaacaagccatggacttggtactggcctatggcccaggggttcaggacccttgctctattgagttaaatggtaaaagataattttgaaaattgattgctatatgtttcaagcatattaagaatagggaaaatagtaaaaagagttgtcatataccttcatattatcaaattatgataataatcaaatctggccaaagtgttttatcaatatcctcctacattccttctcactatgactaaattatattaaaaacaagtctcagacatcatatcattttatttgcaaatgttttaaaaaatgacagttgtcattatgaaacctaaaaatattaacaatcttaatattatcaaagtgctatcctctgttcaaaaaggcagaattttcttattgtcattatcattattagttcatgtagtagtttgtacaaattagaacccaaataagggctatacattacaattgatggatatggcatctagtatttttttaatctatatgttacccttccatcttctatttttcttgtcacttatttattgcaaaaagaaagacaattgtctatggttgaattaaatatgattgcttaaaatgttcccctagcctcaggatttcttgtaaactgatggttaaatctagaaattgagtcagatcagggttcatttgtttggcaagattacttgcgtgctctgaatctctacagagtcacatcaggaagcacagtgtttggtgacccagccatcagtctgatccatcacactgctgaattgctgctccagcaaagaccaccagaacacacctgtagttgaataagacatgtttattacatgttataatgaagaaactgctcatcagaggaacactgggacctctcagagcgtgttagaaaggaattgttataggatgtgggctaatgcttggtgattttagggagggcttaaggaatcggggtttttctctggatgagatgctgtcagaaagcacgaatgattggacattttagtaaatcttctctagcaggaggaaagactgaatagagccgaagcctacaattggtaaaggaacagcatcactcataataaccaggatagagatgctgtggtttggacagtgttcattatttgggtttaaatgtgattacccagtagtcttgtttttgtcttgattctttatggtcacagagtgaacttgtctgatgttttatgtgaaattgtttacactcaacaagagaacaacaaggcccagctgatagtaacaggccagctcccacataccaggggctgctcctctctttcttagaatagcccagcagcattggcaccatgtggcaccttgttttaaatacagcaccagagctgctgaatcagcttctaaaatttaacaatatcctcaggtggtttattaatgcatgcatgcttgccggctcagtcacttcagttgtgtccaactctttgtgaccgtatggactgctgcccaccaggcttctctgtccatgggattctccaggcaagaatactggagtgggttgccatgcctcctccaggggattttcccagcccagggtttgaacctgcatctcttgcatcacctgcattgcaggtggattctttacccactgagccacctgggaagccccaagtggtttatatgcacactaaattttgaaatttagctagtcaaatcaaatcccagtcatggggaagttctgtaatcaaatgaccttcaaccagaccaatttacctggctcctgagaaatttgtatgctggtcaagaagcaacagttagaactgcacatggaacaatggactggttcaaaagcaggaaagaagcacatcaaggttgtatattgtcacctgacttatttaactcatatgcagagtacagcatgtgagaggctcaagctggaatcaaggttgccaggagaaatatcaataacctcagataggtagatgataccacccttatggcagaaagcaaagaggaactgaagaacatcttgatgaaagtgaaagaagagagttaaaaatttggcttaaaactcaacattcaaaaaactaagatcatggcatctggtcccatcatttcatggcaaatagatagggaaacaatggaaacagtgagagactttattatcttggtctccaaaatcactgcagatagtgactgcagccatgaaattaaaaaagacacttgctccttggaataaaagctatgacaaatctagacattatattaaaaatcagagacatcactttgccgacaaagatccgtattgtcaaagctatggtttttccagtagtcacatacagatgtgagagttggatcataaagaagactgagtgtccaggaattgatgcttttgaactgtgatgttggagaagactcttgagagtgccttagacagcaaagagatcaaaccagtcattcctaaaggaaatcaactctgaatattcattggaaggactgatgctgaacctgaagctccaatactttggccactaatgcaaacagttgactcattgaaaaagaccctgatgttgggaaagattgaaggcaggagaagaaggggatgacagaggatgagattgttggatggtatcacttactctatggacatgagtttgaataagttccaggagttggtgatggacagggaagcctggtgtgctgtagtccatggggttgaaaagagtcagacaccactgagtgagtgaacaacaacaaattttagctaatgacgttagtacccatcaatgattatgtttagtctagtatgtattaggggttataaactagtgctgtgttaattctatcctacctttttgcatgtattagctggtactctcccaaaagaagtagttttccagatcaacaatttgagtgcctgtgatattatttaaacaaaaaaaatcaggataaattattgatctttgtatttactaattttcaaaataatgaattatttctctagcatctcccacatatgatcaaggaagtaaatttttccttttcttactttttttttttgcttgtctttttaaaaaaatttatttatttattttaattggaggctaataactttacaatattgtagaggcttttgtcatacactgacatgaatcagccatgggtgcacatgtgtccctcattctgaagcccccctcctactgccctccccatcccatctctcagggtcgtcccagtgcactggccctgagttcc

SEQ ID NO: 42000 - DNA, 2584 bp, Bovine  19866880828968
  misc_feature (1)..(1): n is a, c, g, or t
ntgtgaatgagcgaaaataaaatacctttaaattactaaaagaaaaaatttaagctagcagataatcttaccaataattacatgtaactgtaaagtattaggcagttagaagaagatgaagaattttctttgatcaattttcttattatatcacttttttttttttttaaagaaaaagatataggagaagaacaaaacttagataaaagctttgcttgaaagtaggagaagggattagttgacctgcatgagattgtgaaaatcctaaccaggagcccttcctgctgactcattacagcccaccagtgtaaggagagggttttgatcacctttccaaggtcaatactctggccctaatcccagtgtgctgatacccctgctgggctcagtcctgcagttaggtgtctttcctgggcaacaaagtcagtgaaaacagcactagcctgaccttggaacacatgtggcaaaagaaattcaaagtgcatatgagccggatcattgccaacttaattttccagcccttattgtagagcataacatccttccttctttgtgtgaaccaggaaagctgcagcatcttgcctggcagcactaaccagctgtgtctcattgatgtgatggtaggaagaagccacgagataaaagagatggattctcttcaaattcagataggatcaggacacgattcattaagcagcatcacttatttatgatgctattctacctgggatttcatgtctgtctacctgcaatttcagcaaaaggtgcaacatggctacacagttgttaactttgggtaccaagtgaaaaacaactaaagcgaaattgccaatgatagattttactctgatgttagattcaagcccagagattggagactacacttctcttacttgaggtgacagcatgttgtcctgaacgattttcccttaggattttcaggctgtgcttttgcagatttttaacgtttctgtatttctgtatacctcaacctgataaatgagaagtcacgcaggagaagcaggcccatctgttttgtgccccacatgtgttgaacatgcatcaaatcaatttcactgaaatgaccacagcaagcaagttgctgggcagggatttgaactccaggctgcctgatgacaagagctgtgcttttgctcccacactgcagcttccaggcttcctgaggccacaaagaaggcacaagtgtctgctggtcctaagcactctagaggtgatacaaaggttatagacaccctgaattcccacgtgttttatagtcatctgatttgttttatctgagaaaatagcccccctttagaatggggcttcctggctatgaaacagaacagctcacgctgttgttctctatgcctccgcttttttgacttgcctggtgtgaggagggttcctccttctgatcttcatccaggtccacaccaaccctgttaaagagaagagagaactggtaagggtcttgtgcagatgagacgagacagtctcttaggtcagaccacctgaaccaaagacagtacgaatcagaggactggtttggcagaaaacccttgtacctctccctgagtccagggaacataaaatagatttatgggaacaggagagctcgcacagctgggcctctgtacagctggtgcaacggagcaccgacagctgttccccactgctgtctttcccagcaagagaatctgggagtgaagccctcagggaaagacctccagggcccccagacagggctcctggagggagggccacctgcttctctggcaggactcactgaccacactgctccggggatgtgggggcccgggctgcagcaggcttcccaggacagaaacaagcaaacaaacaaaaggtttttttagttgctttacaatattttatttagggaaaaatctgatctttcatccagatgctcatggagtctggcagtagggaggatccaggtttgtgggacttatacgatttagggggctctctttgagcaaattaatgcaaaaatacaaatacaaaatgaggtatgaaagtgactctttacaacaagaaaataaattgtaacacaattaataattttaaaatctgtgcaacagacatctcgaaatttataagacgtataatgttctaactaatttactgtctgatattcctctaaaataacttttcctcctgagttttgcctgcatactttcttactctgtttacatgatataatgactttgtataagagagaatgggaagataaggtagtctttcctctagtaagactgatggaaattattaataattgggagtcattatagcgtgcttccttacacagacatacttgctgtgtgcaaaaccgctaaagattaataccctgaaaagacaagatttctgataaatttccctacaagcgattctcgtcaacactactacccagtacatttatcagtgtaagtgctgcatcactgaatataagtattcttgaatttccattttgacggcgcattgatgagaacggaatcctccacttagaattttacacatctcacaactgggaagagttttccacagattagcttctggctcagga

SEQ ID NO: 42001 - DNA, 1649 bp, Bovine  19866880861972
  misc_feature (1)..(1): n is a, c, g, or t
nctgctgatgccatcagttctttctcatgtaacccagaacaactgcattaagtgactttcctaaaaccaaactcttactctcatttattagattttcctttcaggtactctggaattctatatcttttctccactgatgagattctttggatttttgagcaatgcctccagaagcaattcaatttctcttctgaaggaattgcacaaagtcttaacattttactaaatccattagcttcatctttcaagaccatcaagaaaatggcagccttaaatttggcagtattatttaacaaacacacactctggtgcatatattcagccttggtattttctgtgctgcatcaataaaatttaattaaagtgagtagaaaaattacagtaatttccatttatcatccccaaatgccattatgagaccaaagcccttcatacctacacctattaagcagggtgataaaactataatggactattcaagggggttatgccattgccattctttagaagttctgaggtaataatgagcaaccatctgtcttgaatgtcatcagaacggctagctgatctcttaaatcctattcagataaattttttccattaagcagtgaatcagacttatacatagaagggcatgaatcacatatatttttatgtgttgatactcaagcattaattttttttttgttttgttttctaaaggtgaaagaaatgagagaaaagagagaatgagacaaaaggcaaaagagagagtaaaagaaagggagaggaccatccctctctgagacgctaaagctctacatagtggtaaagaatatgaaaccattattcgaggggaaatgtagtaaaatttaatgcagcaaatgtagtaaaatttttagaaaatgataaatgaggtaaatacactttctttctgtcacctgatgcaaacagctgactcactggaaaagtccctgatcctgggaaagactgagggcagaaggagaagagagcatcagcggatgaagtgcctggatggcatcacagatgcaatggacatgaacttgggcaaactttgggagatggtgagggatagggaggcctagtgtgctgcagtccatggggactctgcaaagagtcacatacaactgggcaactgaacaacaacaaaactttcttagagttttggaagataagacaaaaatgcagagaagacttggaacagtgttggcaagaaatgtcatggtgaattaatatgaatccccaaaatgttgcctattggggtagagatagacagtcctggcaggtgactcaggtatagagctctttatgagcaagatgaagaactggaagaaaataacaacaatattcagttactcttagctacgtggaacactgatgaatcctgaagaaagaggaacccatcagtggtaaaatggaataaagcacatgtcagaagataaagaggtgattaggatagatatgatagcatcaatacttggtggggaaaaaatgtcattcttggttctacatattaaggccatcttgggtcagtgttaaggctgagaaaggaaatgaagagtaaagggaagagtgttggctggcagggacaaggtgacttgcgttcactgtcatctattaaaggggacagggaggaagaggagaagccc

SEQ ID NO: 42002 - DNA, 808 bp, Bovine  19866880896357
  misc_feature (1)..(1): n is a, c, g, or t
nctttcttagctgttttaatttagccaagaacaaactgtgtgtgtacaattttgtatcctgaactgtctacctgactgttataacctaagcatctcccattaattctaaatcttctttgttttgtcattactggtcaaataagtgtatctagatccatctattggattaaatagaaaaaaatagaatagaaaaatggaagaaaatattggattttcttctcctacaacctgtggatttttattatttcatgctttcttatttatgtatcaaattaaatcattgacaccatctaagtgaaaggtgtctttcaaagggataaagtgttcttcattataagccgagcaatatgctctaaggttgtactgacatttgaatgctaatttctaaaacaaaagaagaaatggttcccccaagacactcacagagcaataagaagattagagggagatttgaaggatgagactcagatgctacttcagcattccagaaaaagcatccatcacttagctgacagagtcagggtcctcacttgtcacttacctgctgtatgatcttaaatatgtcactgaacttccccacagaggctttatctgggaaatgggagaaataatacttgcttcatatacggactattttttttgttgtttcatcgctaagtcgtgtccgaccctttgtgaccccatggactgcagcatgccagacttccctatccttcattgtctcctggagtttgctcaggaggtttagcataatctagtatataatctcggagaaggtgatggcaccccactccagtactcttgcctg

SEQ ID NO: 42003 - DNA, 1482 bp, Bovine  19866880945682
  misc_feature (1)..(1): n is a, c, g, or t
ntaatctattatcatcttttacctgttagtatgcattttaaaccttaatgaaatggtttaagaaaaattactgcataaaatccgaagagttgcaatagaactcccattttgcatttaccctaaagatcaattgcagagcccaaatatgggattttaactggagtttttaaaaataagtgctgagttctatcacacagaatcacttcgaagaaattggttaagacagggaattgcccattagaggcaaaatgtgctttaatgcagagttcattgtactcagtacatggaatgtttggaagactattagcacttcttttcttttcttttttttaacgggaagcgtgttccccatgtcccagtgctagatttgcagtgcagagtataactgaccagtaatgaagcagtccccatgcttggagatgagggttgaaagaatgtaacaattgacttctctggggcattggctgcttatttcttattttctgcaggattcaatgtgaacatcaaaggtcaccacatgtctccttgagcttctttgtctctcattctccttgggcacagcacccacatatgagccccaccaagtaaacgatcatctttgtttggaaagttccagctaaaatgctgttcagttctggggccaccacaacctggatttcctcacctgctggccctcgcggggctgtgccaggagagtgcagctgcctgcctgcagcctttgtccatgtgggttgtgatttattctggtctagccagcaaaataatcccattcttttctttttattattttactgtcaccatggatctactcattattatacagcactcttatgtcaaagagatcctcaaagaaagggagaaaatataaatgtttgaaacagcaatcttaattctatttttcatgaaccattaccagacattttaagcaagtatttaatttttatgagtacaaacttaatacatgcttattatataaaaattttaaaaactaaaaaattatttaaaaaaataaaattcacctgaagtccttttatgccaagataattactaacaatagtacatttctctattaatctatagatgtatagatttatagatctataggttttttggtaatcaaattttttttacaaaactcagatctgttatttttttacttaaaaatatagcatgatagctttccaattttattagctatcctgtgaaattatgttttcaaggactgaataacaaaataatatgaatatgccaaaattatttattatttattagaacatatgaacctagaattattttaaacaattataaatgatgctgtgattatttcatacatacatacacacataaaacttcttagatctctgatttttttttggaataaaaatgaaattgaggagtcagtggtggaatattttatagaactcaaaatatattttgccaaattgctttctagtaaggtcaatggcaacccactccagtact

SEQ ID NO: 42004 - DNA, 815 bp, Bovine  19866880956307
  misc_feature (1)..(1): n is a, c, g, or t
ntctgtgggtttcttatatacccaaatttaaagaacgcttatgcagaccatctttttttaattcactgaaaacaatggacaaggcaatgaatttgaattgctctagtcattcagctagttaggtatctggactatgccaagtagatcccaggtctcctggcaccgattgtagtacattttctcttacataatttgcaacgacacaatgaaccttcatatcatgtaaacatatgtttgtacatacatgtgtgtgtgtgtgtgtatataacactaatgctccctgacagggtccaaaagagggaatcacagagaacagtgtaaatggtgttctgttaaccaaaaggaattaattgtcctctcaaaactgatctctctagaaagaacttacttgccagcagaatcatcattcttcccaaagaattagggacctcctcctgctgtttcctaaacttctttgcttgccagtaatttgaatttaactgtgtacctcttttgtggtttctcaaacagctcttttagttagtgtcataaagtattggttctagtccttgctcaaaattgcagaaatgagtccttgcagacagctcttcagggagcttgcccaccactgaaaactcactatgcaaactgaaaggcaattttgagcacacgcatgagtcagaaactcttatcattattttctctaagtcatttcttgatttctttcagagctccttatttattttagttctcagatacttttgagcatgctccactccccatggacctggatgtatgtacttagttctatttgtcattgccacgggatcccataa

SEQ ID NO: 42005 - DNA, 4505 bp, Bovine  19866880967896
  misc_feature (1)..(1): n is a, c, g, or t
nctgagtgactgaactgaactgaactgaattgacagcctatacaaaatcctcaggctgctgcaagtcatttttttttttaacgtaaaggtgattgattgccctcaatcattctgattttttttcctccagcaagtggctgctctgagtagaagcaaacaccagaaaatccatctcctggtttgggtgcagtcaggtgtatcattgtttttaaagtatttttcaaaaatatgtgtatgtatgttccaagttctgtacacacactgtgggctgggaatgagttaaatcagaaataaatgactaggcagagctgactggctgctgcttgctccctctccctccctctctatgggtttcacagaggtgtttgttaatataacactgccctgtctgcctggcaggagtctgagtctgacacagaaagccacaggtcaaattgggccaaaaatgtttacagtgcccttccttttgctacatttttggtgcaggctgaaatattacacaaaacaggattcagtcttatttacagtgaaacctcttaaaatggatttaggcacaactgagttgacaaccataatactttgacattgtagtcaaaaatgaaagctcttttcttccttaaaactttccaagaccactaagatgatatagccagtttgcagcctggcacaaaaaaaaaaaaaaatgcattccttaccttccccaaatacatgagtatatatttaataaaccctttatttaaagagatccattgttattgttgttactgttatccagtagctgagtcatttccaactctttgtgaccccattgactacagcatgccctgcttttctgtcctccactatctcccagaattcacccaaattcatgtctactgagttgatgatgccatctaaccatctcatcctctgctacccccttctccctttgccttcagtctttcccagcatcagggtctttcccaatgagtcagttcttcacatcaggcagccaaagtattggagtttcagcttcagcatccatccttccaatgaagttaacagctccatcacctcacatactaccatttttagaaaatgagaacgaagagatttactgttagtttactcaaagatttactcgttgtgactcaggcggcaaagagtcagatacgactgaacgactaacacacacacactcttacatctctccatttacccactcagcagcagttgttttattgtatgatctgactgtactgaaaccttaatgtagcacatgaataaatgcagttaactagtcttactggaaaatgctaggcaattgaagggtcaatctgaaacagacacaagatcgggaaaacacttatttttgacttagtagttgccagaattaatcaaatcataaatgtgcataatttgctatttttaaagtgcttattcttaggagttctttactattaatttcattccaagtgaatcattatgaaatccttatgaagaaaattatttttaagccatgtgtttattttaaaatataatttattatttttgcaggcaataaaaatgtgctatgttggttacaacacaccatgattggtgggaatgcatgctctaaataggaatgcattttttactgaactaaaaaaaaaacagactaaaactgcctttagatacatacatatatatgcatatgcattgacgatagtgtgtgttcgtcactcagtcatgtccagccctttgtgaccccacagactgtagcccaccaggatcctctgttcatggaattttcctgcaaagaatgctggagtgggttgcctttcccttctccagaggatcttcctgacccaggattgaacccaggtctcccaaattgcaggcaaattctttaccatttgagccacaaggaaaagcacacacacacacacacacacacatatatatatatatgtaaagtttttgttgttttctgggaatgctgtcagagattgcaaaatgatagttatttctccattctacatttataggcttttagtaagagtccttcctgtttcttgaggtggtttaggattccctcctctggcttttttgaatgaaacataatagtattttgagtttatcttgttttgacatttatgagactagaagagaagatgttgattaattaaaagaagatccccttcactaggctaagcttcacaagggcagagaatatgttttttttttctctttcttttatttttttcatcaaagtaacctcaaatcctatgtatagtctaacctcagctgagttcagctgctaggaagagagatcaaaaataaccgtaattgaaacaaaacagatttgtttttcttttttctaaaagaagttcagagctaggcaaaccagatgactctcatgattattggggacccagtgtcctgaatattcgttggaaggactgatgctgaagctgaagctccaatactttggtgacctgatgtgaagaactgcctcatttgaaaagactctgatgctaggaaagactgaaggaggcaggagaaggggacaacagaggatgagacggttggatggcatcaacaactcgatggatatgaacttgagtaaactccaggagttggtgatggacagggaggcctggtgtgctgcagtccttggggttgtgaagagttggacacggctgagcaactgaactgaactgaactgagggtccttttatttcctttgttctgccatcctattccaagaccactgtccttgaggtactttatggtctaagatgactggacctctagtagagggcaagagaaagggggaaagggctaaagctccttacctactgtctatctttcgagaagcctttctgaaagtcccatgcaacagcttccacttttctctcactggctacaactttgtaacatggccaccccctaatagcaagggagtctggaaaatgtggtcttttttattgggcacattgccatgctgaaagtgaaagtgatagtcactcagtcatgttggactctttgtgaccccagggactgtagcctgccaggttcctctgtccatgaaattctccaggaaagaatactggagtgggttgccatataagtattaataaaagcagtgttctcatactaataaggaaagaggaagtggtaaaatgagattaataaagacaatctaatcagtttttcattaagtgaaatttattcaatttataagattgttcttcgagactctttcccatcctttttttttttttttaagtcaaaaatgtttctaaaaaattgaaataatggtagattctaccttactccccaaagtttttatttgacctaataaaaagttaactcttttagtgctctaatattattgacattttactggcccacatctagggagctcctggactatagaggtgagctgtgagatttctcccaactccaggatagttcgatggttctgtgtcttcagtgcaccctatatgcttcatgccttctgcttgggaggtgctcatgaggtatccacggatttatcaagtagttttatccaaagtgctaatgcccagtgacacaaagaagagctgccacctccaggtccttgatcagggcttgctttgcagtaaggaagagaaattcatggaagtcagaataagtgaaggagtgattgttgcaaggatataggggaatctcatggacaactaaaacagaaaaataagcatgctcagtttgcaactgggattaaacatgggaagttggaaatggaaactaccctctgtctctcatggaataacacgatctttcaaacttctctgtttttttctgccaaccaactttgtttgctacttaaattttttcttccctcagtaactatggttggcatgaggtttggcttctgtgatgcaggggtggtacaatcaatctcagagctgcaattgcaaattccccagcaaaagtttaattggttcagcaaatatcagattactgtttctggttcaagtagttgtggcaaggagttgggcaattagtacaaatatgtctttctaaggttcattcttttcaacaggacctacggtatgagcatgttgagggaaggggcagtactatgcaacggttataatacatttctcttttcttgttaatttccacctctggcagccctctgtttcctgacctcaggtcctttccctcctatcagggtgacagatcaaagaccttcactattacttggaccatttcattaaaaaaattatttggctgtgtcagttctttgttgccacacacagatactgccatcacacagtatcttttattttggcacacaaactctctctagttgtggcgagtgggctccgaagttgtggctcacgaacttcagagcgctgtggtgcagcttcacagtgccctggcacacggcttagttgctcctcggggtgcaggatcttcattccctgaccagggatgggacccatgttctgtgcattgcaaggcagattcttaaccacggaccacaagggaagtcc

SEQ ID NO: 42006 - DNA, 1161 bp, Bovine  19866880979480
  misc_feature (1)..(1): n is a, c, g, or t
nctagaacctgataagaaaaataacccagtttgcaaaatcagcagtaggggttttctggagatcaaaagagttttcttactattttaataattccagtaaccctggtgatctagccactttccagaccctgctcagcaatgaagaactcagaaagtcactgattcccccattccaaatcagttatccaatcagatgagacctgttacttggtgtctctgtaacagaaggaagatgctcaatgtgatggaaatgtctgggatctcaagcccaacgggctggattccactgagcaattcttttattctctttgagcttactgtcttcatcaattcaacaactatttcttgaacatctaaaatatatcaaccactgtaccaggtgaaggggacagccctaccctcaaagtgaccaccacctagagacaagaatatatggcaaaaacactttgcaggctatacagtgacagtcgctcagtcgtgtctgactctttgcaaccccatggactgtagcccaccaggctcctctgtccatgggattctccaggcaagaatactggagtgggttgctattcccttctccaggggatcttcccaactcagggactgaacctgggtctcccacactgtaggcagattcttcagcatatgagccaccagactgtaactgttaattttcttatgtgggtaccccattagctttgcacataaaataaaaacatgtgagtctgtgaaggaacaaatgaatgatcaagcaagtgagatatgatggctgttttctagccactttatcttgtgccattaccacatggtcccattggtctaatatcttagtcccaagaagtccgttttgacttgaccttcctcagccttttatcctcaggaaatcctcatctgctggctgtcatctgcccccttcattcttcccttggcatagtcacccagaatctacctccatcactcaaagcacctttgaatattttcctagaccacaaattcaataaacatccattgagcacataacattatatatggcaagctctgggcaaactaagatgttggcaaacatagatcctgctccacgtggtgtctgtggatggcacttacacattccattcactgccacaggatgtatgtgttattcctttgacctgaagctactga

SEQ ID NO: 42007 - DNA, 755 bp, Bovine  19866881002023
  misc_feature (1)..(1): n is a, c, g, or t
nttccattttaacattttttattttactacttgtacttttatttactcttcaaagtctacatctgtttttataataccatcccattttgatttgaaattttcacatttaatcttctgtaacctctcgcaagtatatttaatgtggattcataaaaattcaattagcatattattattaaagaggaaagatgaggcaaaaaatcaaattttaatatgtcagttcagattacagactttgtaaaagtacattctcaggctagaagaattcttaaatgtgatttaattatttactcattttcaatgatccataagcttggttttccttgttgtctaacacatttgatttttccaaaaattatgtgtgcccagaaagactttttttggtaaatacagacaatatttttttaattgcatggtagagtatttaaaataattttgaaaatgaaaaataagaatcactctacctgatatcaagtcctaccatatacctacaataatcatgacagtataccatcagaataggaatagacacacagatcaatggaacaaaatagagaacctaggaatcaagccaacaaatccgcagaactgatttttgaaaagggtacaaaagcaattcaatagagcaattaaatatccatggacaagaaaagaaaagaaaaaaaagactctcaacctaaaactcaccacttacgccaaaattaacttaaaatgagcatagacttaaatgtaaatataaaggtatgtaactttag

SEQ ID NO: 42008 - DNA, 1475 bp, Bovine  19866881069783
  misc_feature (1)..(1): n is a, c, g, or t
nttggctttggctacccagcatccattctcactttcactggtagtaagcatcctgatgttactgagtgaactacctttctccatcagataccatcttgttaaccaaggtacccccatcctcacctgccaaagagaaagggggcatctgaagcaaggtcaaccagacactccttcctgggggtgtgaacctttaggaggaagttagaaggatgtgtaactgttggcacccggactttccaacagaaaaaccccctgttgggaatctctattcttgccatagatccctggagctgcctttatgcttctcccctccaataaattcccttctgatcacagttgccagaattagttttcactgcttgcaaacagagaaatctaaatagtacaagggaagaaataatccatgagggtatttcaacaaaataagctgtataacttggtgacacttcagaagggaaaagaggctcaaggacagcacagcctctaggcttagatgcttggactgtcttatgccaggtgcatggtgatacacaaacaaaaggaatcaagctcacaaagacagttttcacagtgttcattattctttttgaattcatctccttgtaagattcattatgaacacttcagtgtgtgtgtggggggctcgctcattaccacaattttctgctttcactttcagttgttactaatttgatgatgatcatttgatttattttgatcatcttttgcttcaagggctacatttgcagccgcctcgtctcagtctcttggaaattgcacctgcaaatgttcagtcgtcacatagaagaacttagttttatggaaacaagtggcttttagacatgcaaatgaaggttggcatttctattacccagaggtctgatactctgctattgtaaatatacaagcgcagtctgagaaaagttttatgtaggaagactgggcagaatgtcaaatgctagtgagaagtctttctggaagatgagggtgtgtagatagaaacggaatttaaggagtcttcacaagccacaagctgggacagcagagaaggaagagaacgtatgtacaagtgtctgccctgattacaaaatcagctactgaggggtctcagatttctaactcttctgctaatttgcggaaggattggaagaagtcaccctattaattggtatgtcagttttctttattgctgaggtaaaaggattttatcattttgtagtggaaggacattgcacacatacacacagaatgtggcttttgagtaaatacaggacccatgggaccctctctatgaggtacctggtacatatgcatacctaaattctgatcaagtagaatttttctcggccaagtttttaaaagtcatcaggttactgagtcattattctaaattgaatatgggaaataattcagcagtattatttatagcatatctctggtggaattgaatcctgtcacagaagccactttttcag

SEQ ID NO: 42009 - DNA, 1953 bp, Bovine  19866881082709
  misc_feature (1)..(1): n is a, c, g, or t
ntattcgggacaatatgtatcaaacatcatctcatgataatgaccatcacaatttgctgaatttccatcacaattttcctttaaagcaatattctttttaaaacttaaggaaaataactatcattacagtatttttttatcattacaattattttttttaatcagttacctctcaattaaaagaggaaagatactaagaataaatataataaaaaaaatcataactgcttgctcttggtcacctaagctcaggttccctcccagaatggtacacattctgggaaacactagcctagaaactaatgaaagctggatacaagtgtagccaagttctgatctgaattcctttatggtctgatgaaatacttcctgagtccgattaatacctctctctggcccatcctcaaacttttctataatctctgtcttatggtcaaaatttaagataaaaaaattttaatgggagttgtttgcttgaatcccctaaatgggtggagtcattgggaatcttcccaagctaaaaatttccttaatgagtgttctgcccatgggaagtatatctatttttttaactataagtaaggtatttttgtttggcttttcttaacgttggtctataacttcagagtttataaaaaaaaattaattgctgaatatactttctaaacataactaaaatgtatatttctaatccagccaaattatatatactactacaaaacaagtgatcttctgagtgttttttgtgaaaagactaatattttattaaaatgtttaaaaataaaccagatacccaaaacactacacatattttaaaatttcagactttttccgatactgaaggtaaaatggtggtaaattttaaaccaataatttctgaaacacctaagttacgtcttacagtcgtcttacatactcttagctctccaatgtggttcccagcccccatgtcccatttaaaacactagggcaaaattaaccaaacaataaacgtaccttaaagttttcagactgtaaatggccttgaattgtacgataggtagcattgaggtctgaaaatatctgacacaactttgtttcaaaactgaaattcaaataatacattactttaactattattctgaatttttcttctgcaaaagcccccaaagagtcttaagaacgagttcccttgattaacaaggaattttacatctcggttactttgggccatctagtccaacctctttgttccataaaatagggaacagaaaagttaagcaacttgttcaaggcagaaaaaggaatagcagagccaagattagggctgatatctccaaatttcccttcagagccagttcttcaaagcttccctgattcataaaataaacaccaaaaaggaaatgtcgggaactgagcaagagttttactatactcttttctgagcatcttacccttaaatattttattttaggcatatcaccttacatcactatacttacaattttctataataggaagcattggcaactttggctgaagagttgtataaaacatcagaaaccaaatataatctggcaatctagaataccaaaagatagcataaaatggattaaaactgaaaaccaacagcaaataatgtagctaacaaaaactccacattgaattttttgaatcaacagcataaggacaatgtttagctataacttaattataactaaatagaagaattttaagaaattctgtatcaccacaaccatgactttagcaggaataaaagttgtaattcatttacatttcaacctgttgataatttgtgtcaattaacctacatttcccaggcagaaggaaaacaaaactacatgggaaagatctcttcagttaagttcttgattcaaaaatgaaaccaatttcaatcaaagccagaagtcaggttattacctctttttcttaattaaatgttccataaagaaa

SEQ ID NO: 42010 - DNA, 1527 bp, Bovine  19866881110742
  misc_feature (1)..(1): n is a, c, g, or t
natggggaaacaatggaaacagtaacagactgtattcttgggctccaaaatcactgcagatagtgactgcaaccatgaaattaaaagatacatgctccttggaagaaaagctatgacaaatctagacagtgtattaaaaagcagagatgttactttgccaacaaaggtacttagagtcaaagctatggtttttcaagtagtcatgtatggatgtgagagttggatcattaagaaggctgagcgtcaaagtgagctagcgctgtagtccatgggatggtaaagagtcagacaagactgagcaactgaacaacaacgactattcctgcacaggtagcacagtgctgcccctgtgcaatgagagcattcacactagaaagaagagggtcttctgggcaacatgctgatggtctcactggccctctatgggctccctctctgagatctttttctcaccttcgctcataacacataagtgagttgtggctaagatgtcagcatttgatgctgaagattttattttcaccagtgtggagttcaaataagggccctttgaaacccaagagccttccaaatgctatcatgagtggcagaatgtagatattaatagctactgagtgtgcaacggcaggatggcaaaggcaggaccactgaccaaaacaggaagaagtgcatccagataggggcagacaggatggcatggaccttcagggctgaagataatgttttcaaatatcacccatgtcctttcttgtgtaattttttttttttttcctcttcaactcttcatcacaaagacaaagccagaaaagtaacaaactgcatgtaggaagacttatttgaactctttttctagtaagactttttttcatactaataacctgactttttaatgattttatcacatatcccacacctgggtatcactcatcaagttctaaagtttgaagatcagacaaggaagaaaaaggagaaagctcacaaaggaaaaagcttgtccagaagctagaaaaacagactggggagaaagtgagtctctgggaagttcttgggaaggcaggttctggaaaactgaagacagcaagacaaattccctacttttcctgagagaatcctgggaaaactgccagcctgtcattacagactccaacacaccggggcaaggcaaggtaatgcagcaatgcttggggaacaggtaaagacctgtacctaagtatgagcacaatctcatagcacccaacttctcctgtgaagaagcaatcgagggttcccggaactataaagaaagggtcccaaggagacccagggtcaaatgagaaggccacagtaagaggggacctgacaactgggggcaataacaaggtccatggatattctgtctttgacacgtgatagactatgggcaaagtacctaccctttctgagccaccgtttccttagccgtatctgtctcacagagctggctgctatgagaattgcacaagctagtgcccctcaagttgttagaacacagatctgcacgtacatgtg

SEQ ID NO: 42011 - DNA, 723 bp, Bovine  19866881118913
  misc_feature (1)..(1): n is a, c, g, or t
ntgcttgagggtctttctttacacgtacgctgtcctcactcagccccccagacacaggtattgcttccagaaatgggggaactcacccagcagggtcacacactagtacaagggagggccctgaccgcagttacagcccagatcagtctgactgcagagcgctttcccacccgcctgtgcggttggagctttcaggacccagagatgctgtgggaatggaggggatgacctagaccaggctcactggggccattattgcaatgaccccacgatgctcccactccttcaggaggtctcgttcaagtaaggctgctattactcccctggccccgtctctgccttttcccaggaaaggagaatcctttaatcctagtaaaggagagaggtggtgataacagcaaaggaagtgacttccaacctaaccagttacctccaccaccaagaacagaccgttctcacacaagtataatacaaagaaaaatggatacattgggatcaagtataaagggtcaattaaataacccggaagattagctaaccattttcttaggctgccaaactgaagactaacataagccaggttcaagaatcctttttaaaaaatattagtttcctcaggtgcatatgtatgataagtggagccatatgctgactacgaagcaaacataagcatcttttatgattacagctgtgtgaaacccatgccaggcactctggtctgga

SEQ ID NO: 42012 - DNA, 939 bp, Bovine  19866881121429
  misc_feature (1)..(1): n is a, c, g, or t
naaataattgaaaaatgcataattgcgtatacttattccttactcgctgaagaagtttatctctgtagtgttctacttgttcctgaaagctctggcctgcttttttaggtctttttccagattccaattcatcttgaaacttcataactttgagctgtgaaataagacatttttaaaataaatctttttaatcattatagcttctcaagcagtacattgctcctttaaaaaaatattttcttctttgaaacatgtataagaagggaaaacaaaaatagcaacataaaacataaaaacatacagtaacttattaggattcagtcaaaacataacatcagtgtatataactccctaatctgaaggccacttgtgagacaagcccaactgcagaattcaagtgatcaggcacaggcccatgtgctctctgcacagccacacaagatgacttgaaaaccaagacctgtgcctcatgcccttgagaaagtacctattctttgacataatgagaatgaatttggtatctggtaccccaacttactccaatactttggccacctcgtgcgaagagttgactcactggaaaagaccctgctgctgggagggactggggacaggaggagaaggggatgacagaggatgagatagctggatggcatcaccgactggatggacatgagtctgggtaaactccgggagttggtgatggacagggaggcctggcgtgctgcgattcatagtgtcacaaagagtcagacacgactgagcgactgaactgaactgaccccaaattagaaaggtaatattgttaaaggtaagcgtaacttccagcaaggtaagacagtcagcagaacacaggggataaacaactattaaaacaatcaaagagagcagcattctggttatagctcataaagctatagcttgaagtaaaatttcact

SEQ ID NO: 42013 - DNA, 1404 bp, Bovine  19866881136350
  misc_feature (1)..(1): n is a, c, g, or t
ncggttgctttttaatgatgttgtcttaattttctgctaaacctgtttcatctctagtcatccaacattaatatttattttgttcatttacttttaaaatattcttaaagctgttacaaatattctactgctgctgaagataattcagcataggcgctaccatgaaaatatcatagaaaccatgatcaatgtgttatagctgtaatctggcttaataaacacaacactataaacaattttagtaaattaagaaatatccattctagaatgtgttataaaatcaactgctgaatacatcctttttttaacctctgtgcttcatcccggaattaacagtgtagatagatttcacattgtaatgaaaattatacttaaaaatcatcttgggttaaagtatttcccatgtacatattcctttccattctattttccttaaaataaaaccctcagcatttaacctatacagattggcttgcacaaatctcacaataaattacagtaaaatagctatgatgaacttgaacttgtaccgtatttaatgtaatatataactacactctggttcctatttaggcttcataactttatatcataacacaacattctacagaatgccttcagtacaaatgggctcaggacggcagcaacaccattaccattacaggaaaactgcaatggtttttttcccctagaaaataccaaatcccaaaatccaacctactaactcataattcactttcatttcttcttccccataatttgctttcatatctaaaagaagctcttggttgaagccttataatgtcagaacatttagctacttcacaattttactttcaggaaacatgataaagaaaagcaatgtgccccacaggcatcctaagtaaactattattaattcacattctcttttcattaatttggctaggaagccgggaataggggggatagcctgtgggcgcccttacagttctcagatcaaaaacttcccttttcatatgcctccgtggactgtgtcagaggcagaaacactccaaactcagatacttgcgtcacttttctaaccaaggaacttgttgactaccattgccaacaaaacattcacactaatttttgaggtttgtgttcacaccatcagatggtttttgaactatatacttatcttctaagaaaaaattctaagaccaaaacatcggtctctggttcaaggtttctcagtgtaactccagggtaatcaaaaccaaatgccttcaaaccctcaaggggttacttcttcctttctgtgccccaagtggaaagtagtgccatgctttttcctccactgccctgcttgttttttgcctttagaatttgaagatgtgttcccattcctgggcactggacaggctacaatttacctgggag

SEQ ID NO: 42014 - DNA, 1060 bp, Bovine  19866881155566
  misc_feature (1)..(1): n is a, c, g, or t
ntttttgctgagatttttgggataagcaggcacttctcattaagaggagaagaaatatggatgggtatccatgttaccttccaggagaaaggagccaaaccacaggaagcagagctgaaagagagaaaccaggtactggtggagaaagagaaactaggtatttgtgacgtcattttagccccgattcaaaccgaacctgaaatcacctttcctgggctctgcaattacaggagccagttttatttcctttgcacttcaactgctttggatgggttttcttctttgtaatgcaaagaatccaaacgaatgctgaattttcccagagtgttgtaagcagtctctcctatgacacaagcgtctctaaggcagggccccctgtcttatctttgtgtttccagcagaaggcaccatgcctggcacctgagatgcctccaaaccatgcttatttaatggcaaatggaaatggggtcctcgggtccgcagcattagcctctccctatcctgccagattggaatctgcattttaacaggatcccaggtgattgatgttcacattcaagtttgaggcagacccacaggcaatttcattgcgccaacatttagcctggagtggttttgcacaagcagtaccccatcagttaagtgattttgggtgtatttcaggcttctttccacgggcatcttgctcacttctataaatgtatagataaaggtgctcagaaaaacaggagcagcatccacagctggtcaaggcccatggagtgagggatgtgaaagctccccctagttgccctatggatgcctggacccctccctggcaccacatcctggccacctgccaaaggaccaaacatttgtttgcttatgaatatgttaacagcccaccagattcttcttgatttggggagcttgaagaaagctaattgaagcctgaaatctgtcacagtcaagagaatactacatgtcaaaatgaactctgggcttccatcctgtagcatcctagccacatggctgggtccagagtctgatgttcagtctttgtgagtgcattttttttgga

SEQ ID NO: 42015 - DNA, 1083 bp, Bovine  19866881161175
  misc_feature (1)..(1): n is a, c, g, or t
ntccatattaccaatatttgagggtctcttactcatattattctgttaagatatgtttaaaatggattttcttttgatcgcacatagtactagggtgatgaatattaaaaaggagtagaaaataaaaaggcatgacgcaatgttgtttaaaaaaatatttatctcatttttaagggtagccacaataaacatttaaggtaaaaaggtatagaagcatcgttaaatttctctctcaattttaatttttttcttgtgatgtatactttttcaagtacaggtatttcagtatgattttgagaaaatgatctgttcactcttaactgaattcataaagctaagttctcaattttaagtatgctgttaccatctctaaaatctagatgaatcttggcaatcatggggaaaatagttaatctctctagatctttagcaatactttcgttattctgacaagctgtccagactgtcaaaaacatagctaggtgattcagtccctgaagaaaaatgtatttatgtcatacttttcggagaaggcaacggcaccccactccagtactcttgcctggaaagtcccatggacgggggagcctggtgggctgcagtccatggggtcgctaagttggacaagactgagcaacttcactttcactttcatacattggagaaggaaatggcaacccactccagtgttcttgcctggagaatcccagggacgggggagcctgatgggctaccgtctatggggtcgcacagagttggacacgactgaagcaacttagtagcagcagcagcagtcatacttttggatgaataaattccttaagaaaacattatagtattttgggtccctttagaaactcctagcaattctttccccttaagtgtttttactaattaggaagcatttacttactgtctttttggtgtgttatagagggataaagagtgattaaaaaaactatgaattcaagtcatttgtttttcatttacccttcttgcctggttttaataaaaattctgagttttggccattgctacaaagtaatgttcatatctgttttgtgtttccttttaaaatacttc

SEQ ID NO: 42016 - DNA, 1297 bp, Bovine  19866881199998
  misc_feature (1)..(1): n is a, c, g, or t
ntttatgaggcttgcattaacgcatatttcactataatgtaattttatattagatgttccacttatgcatggagccagaatagtttctgctctgtggcgatgctgatttaaatgagtaaaccacaaggaatcaagaaagcttaactctttgtgcatctcagcatggttgtgcttgcaaaagaattctctgtgggcagaatttcacctttagttaatggagagaggacagcatttatgtttcaggtggggggctttagaaaggacagatgcaatgatttcttctatactatgctgtgtgtgtgctcagttgttcagtcatgcctgactctctgtgactccatggactgtagcctgccaggctcctctgtccatgggatttcccaggcaagaatactggagtgggttgccatttcttgctctaaacacttcttctgcacaacattaactgattagggataatcctgagcaaaccctgagcactttccttttccctaccatagacatctgatcagtttgtctgcactgagcagtcagcaaggccgtgctgcacacaagacggggtgtgaggggctggtgggctgccttgaccacatggataagaagaacatgtgcaacaaaaatgcataaagaaaccctgagaactagatggatggcccccagcaggactgtcataaagcatcctgcacaatattactaatagacattttacagtttttgtagcttccaaagttatttttgagtcagtgctagcattcaattatttcctgttgaatagagaacaaaacaggcctaaagactaaaaggaaaagctgctgaggggagtgatcactccagatggaagttttctggcagattgtgatttgtgactcagaatgagcccagatcatggtgccatatggatggtagcagagcctttagacactggctcagttgctcagcagacttctgaattcctactacgtgtcagttattagctgggcattgggaacagatgagtaagcagtgatagtatctgccaccaaggagtctattcactcattcatcaacatttactgagcattaatgatatgcttcaaacactgggggatttgaatatgtaaacatagagtaaattaccatatggtattatgacaaagtcagttataaaaataggggaaaatgcttcacaaggatagaggtgagagagagagagagagactatatctggtgtagtcataggaattttccctgaacaggtgacattcagcctgaattttgaagctggattaggggattgagtagtggtgatgttgggtgg

SEQ ID NO: 42017 - DNA, 1561 bp, Bovine  19866881220411
  misc_feature (1)..(1): n is a, c, g, or t
ntccccactgcagtgatgtgtaacctttttgaggtcatggactaaatggagaagatgtatgaaagttaaggactgtcctttcagaaaagtgcgagcgtgcatttatgcggcttcacagccatccctggtctcctttgatcattaattctctggctgcgttgattgttgtttatatattcactgtggcttgctcacctgattctaacttgaaggattgcactgacctgtctccaccccaatcctcaactgagtcttccagcctacatttcccccagtttctgagcttttgtctacttgaagtgaaagtaagtgtatgttgctcagtcatgtctgactctttacgaccccatgggactgtagcccaccaggttcctctgtccatggaattctccagacaagaatattggggtgggttgccatttccttgtctagggaatcttcccaacccaacaatcaaacccaagtctcccacactgcaggcagattcttcactgtctgagccaccagggaagcctgttatcttctgacatgtgcaaaaaccatcttcttgaatcttcagactgtttcagggcccaaggtcctagccctaggagcttcacagctgatcaatgaccttggtaaatgaagtgttcatcctggtgcttggcatctgactccaagtcttagcaactacctttattacatgggtgggatagacctattaattacctgagttagaaatctctcaatttgtacaagttgtattggcttagagattcaaatatactataaagtctacatccttgtcccagacaaagctgtgtcctgaagatgcagtatcagagatgactctactgtggaacattgcattctgcaatatatactttacagcaactgctacacacataaaatgtaatttaaaggcattatgtgaaaggaaaaccctctttggtaagatttattggtccacagctcccatgcctcaaacacaaaatcaaaatctgtagaggagaggcaactgctttggtaaaatgcattagtttaagaagataactgtgtgctttgcccccaaagataaatttgtgctcaagtgaaattatctgcaactctaaaacgatggatgcagattctcaattaagttgcgatttgggatgcagatgctcacttaattgctaataaatagaagaacaggagaaggatctggggatatgagttgatcagtgcaaatattttctaggagttggcttgtcaccaggtgaaactccatcaggctgtctcagaaagctctttacaatctgagtgagtttgttatatacaggaatgaaaggtgcccagattaggaaagcttttcataggaccttatctatgaaaagtcctttgacccaaccagaggcagctagcatttcattcagcccctcatctctgtcctcagcacacatttttgaagcactgcaggctccaatgcaagaaagtgcctgtttttgaattcttttcatctctatgtggccttgcagtgagctgtggattgatgattgccatgaaagcaaatgccataggtttcatgacttttccttgattgttg

SEQ ID NO: 42018 - DNA, 1066 bp, Bovine  19866881229177
  misc_feature (1)..(1): n is a, c, g, or t
natgattctgatgtgcagccaggttgcaaaccactagatgaaagggactttggaagtggttagagatgtcatccagttgcagaaaatcatcaaaggggaagtggtggttgagatgggcagtaaaagctggcagtgtgggggagaccatctagggaaagggaggaacagggcaagatgtgacagcagggggcatggacccatccatggcgtcccacgtactggggtaacaaggaagcacacactggctgagaggcagttgagaggtggtggggtactgctctcattttgtgtctaattctgaacccgggctataactacgcgcatagccaagaccactgtccagttagaaaagcaccaactcacaaaacctgtgaatcatcaagttctaaatccctagcaggcaacacatttgggagccacagctgctgcctgaacaaaagaaagaaaaaataactgctcccttcaagcctccgtgaccgtgcaacgtcatccaccaaatcatttcaaattgtctccttttcataacactgggtccaaagatatgagctgcatccaagctggccttggtccccaagtgcatccttttgctggtaaaaccttgagccaaggtttttttttttttgcttggtaagaccaagagccaacctggccctcactgtcccccacaatctgtgccagctagaagtgaagagatgactctattcagtcagcacagcaaacgcttccttccctcctttctaggctctctggctggtctaataattaaagtgacataagacagatacacaggagaaaaacaaattttgtacagtgggagccttgtaaaaatatgagattcccagcagtcaggtaattgaggtttaaacaccttcctgagctaaggagaagggaggagggacctgggcttcaaagggggaagaagataattctcaggaagatgggaagaaccaaggcttgggaacaaatgttttgccacaccatacagatgagtcttttgaatataaaattcctctctgctaatagctctcttcctggtacgggcctctatctaaattcttttaagcag

SEQ ID NO: 42019 - DNA, 1337 bp, Bovine  19866881291530
  misc_feature (1)..(1): n is a, c, g, or t
nattcagtggcaacagatgaggaaaaggagaggagagaaggcagaaagctttccccttccttacagcccaatcccctggtatccatatattgttgccagtcagtaaacatttttatattggaagggtcgtaaagaatattgtttctgagcaaactaggcattaaaacatggtaggtatgtatggaatctgctgaggagatagataactgtgaattatttagtggccatatgtcttcgtgctgttatatattcacaaatgttcctgataaaaagtgcacttttatggcctgtgcacaaatgggcgatacaaatcacagcgtgcacaaaatattctgccgtgatcttgtcataaaccacaaagcattgctcctctccagtgtaacccttcagaaacagagcccagacgacattcagagcatcacaggattaacctctggggagagacaaaaaccctcattttcccaccgaaacaaatggcagcagctgcctgaggtcatcttttatgccccgattctgggggctgacaacagatttatatccacagagaaaaatcaatccaccaataggtggtttgttcactgaaatatttttgaagacgtcatatttgctatttttttcagccagggcctcaaaccctacagtgttgatgtaaaggacaaggtgtgacctattttaggaaacatgagctccatcttgtagcattaacatgacagatatgctagacccagtagtgttggggagactaataaagtcccttttcaggtttttttttttttttttaatacacgttctttaaaactaatcagacaaaatcaagagtttctcagcagcttctggaaggaacttagtagccctgtagagagcaaagaggataccagacacactgacttgagattagacaggtgtttacagagatgtaactgaatcttttatggcttggacaattaaagtatcttaactctctgacctgactttttgtgtctggagactgagagagttaagagagagcagggagagtggattccaattctcctccaggaaaatgtgtggcataaaaaaggtagctttaaatgtttctagtttttccctggatgtctttaaaccccaaagtaggccaaacacttctgctttgatcacgtaattggataaggaagataaatgcggatctcaaatggagccctgaaatgtatgcgagaaagggattgcctttgaagtgtttttctttttgtaaagtgttgtgctttgcaggaaaaaaggaaacgcaaacccacatttgggtcctttgtggctgacagtcctgggaaagactataaaacccagggccattctgaaattca

SEQ ID NO: 42020 - DNA, 1230 bp, Bovine  19866881344615
  misc_feature (1)..(1): n is a, c, g, or t
nccttcctcgctctggggggtgaagctggccgagggagatgggggcggggggggcttatactggacccggttcacggcaaagcagctccgcctctcttgctctcagtctctgcgccccgaatcttcccatctgtttagcggtggtagatggggcgcagcgcgaccctgcagccgcggcggcaggagccgcttcttccatcaccaggaggatgccctccgggagggcattgccggcagcccccgccgcttctcagcctccgaccggcccggaaaccccctatatacacacagctctaggcaaaggaactggggtctgcagcgctgtcttgcccgtcccgcccccggcaccaggctcttctgaccaacgaggaatccgggcagagaaaacccccgccgcagcagcagccgccgcgcgaaagcagcgcccaggaggatgcagctacgcgcctctccctacgccgagcggctgcaacgcgctcgggccagcctctgcgcggctcctgtcagcccgcgccgggttggtgcgcgccgccgtctgtcgctgcggctcctccccttcgccgtgccgcccgccccctcgcagcgcccagctccagtcgccgccttgggggttgaagatgcggggcccgatttacagcggcgtcgcttgggcctccatacgctcggctgaggccgtagccatcctagctccacgcaccagggtacggatgcggggttcggagcgctttgggcgcccggacctctgggaaacttggattcttgtgtgtgctgctgccgggctcagccgcacatttttgctctcggaaagagttggtgacaaagtttgggcagaaatcccccagtggcttcccactccgctctgccccgcccgggtcggcgccgccggctcccggtaggaacccaggacgcacccgcgcctcggagcgcaccgaggacgccgagcaccgctctcgggcttcccactcccggcgcgcccatttcatctggcctgaggcttctccctcaccaaggaagtaataaatctttctggccccggggtcaaagaagaagcttcagttttccagtggagtgtgccggcggggcgtcttctccgcgctttcctctaactatggagagggcctctctggttttattacgcccccagcagacgccctcggcatctccgctcgtaatgacgcgcccgctgtgattgatgtcctcgagaattggggtgatagggggtcgtggggt

SEQ ID NO: 42021 - DNA, 1198 bp, Bovine  19866881394862
  misc_feature (1)..(1): n is a, c, g, or t
naatgaaacaaaagtgagatagcatgcaaacagaagtcaaattatggattataacttaaaaaaagaaaccttttttgtgaagtataatatataagcacaaactacctaaaaatcataaatgcattgtttgatgaattatcacatagtgaacatacctgtttaatcacccaaatcatgctgtggaacattatacttttctagtggttttctgattgtgtcagaaaagaattttgacatattttaaaaccacatccatttacattataagatggataagcaaaatgaaaatattctattccatcttctaagaatttattgtaccatgtgcagagagagacccctgctggaacgatttttttttaaagacaatgtctgaaccaacccaaggaaattattttttggggaaaaaaaagctgccaccagttcttatagcacccttgtaaaaattagaaggtgcccattttttagtaccccttacttatctctgccaggagattgatttactatacttatgttaacaaattaacatttgttaagagcagcccagaatattgaacggtgagccacagttcagcaacagatccaagagaaactgaaataaagaagttattgttcacaaatcctggaggaaatgcccagtacatctcaacaggccacatacaagggtcaagtcagaaagagagaggcaagatcttggcacatacctcgattaagcactggtgaagtgctttgggatttccaaacaagggccagattgaccaattcaaaccaaaagagctgggttttggtaggtcccatgagggtcttacctaaggggcacataaggctaaccaggctctgggaggcaggggaaatctgatcacaagggctgttggagaagtcatgtgaggaactgttttttgcttctgattctattgtctgctgctgtctggggcaaatacttgtatggcagatctagtgtccatttaaagttacagtaggcttctttggtgaacaaaatggatgtggaagcaacaatactatagagtagcttagcaaaattctcaataccttagtttgttgaaacaaaacacatttcttctatctgccagaaaaaagtgttgcaataactctaagatgtctgcagtgggaatgatgcccctttatatgtggttcccctaaggattgcagacctgcataatggtatacagcgtttatg

SEQ ID NO: 42022 - DNA, 2432 bp, Bovine  19866881587065
  misc_feature (1)..(1): n is a, c, g, or t
naacttagaagctctgatggcagtacaaatatgtgtatgtatatacccatatatacatagaattttttattaccaaaaagtaaacttgtaaaaagcagagacattactttgccaacaaaggtctgtctagtcaaagttatggtttgtccagtagtcatgtacagatgtgagagctggactataaataaatctgagtgccaaagaactgatgcttttgaactgtggttgttggagaagacttttgaaagtctcttagactgcaaggagatcaaaccagttaatcctaaaggaaatgagttctaaatattcattggaaggactgatgctgaagctgaatctcaaatactttggccatctgatgggaagagttgactcattggaaaagaccctgatgctgggaaagattgaaggcaggaggagaaagggacaacagaagataagatggttcaatggaatcaccaactcaatggatctgagtttgagcaagctccaggggctggtgatggacagggaggcctggagtgctgcagtccatggggttgcaaagaatcagacacaactgagcagctgaactgaactgaaacttgtacaacatatctacagctatgaaattcatccagcctaaagcagcaagagagaagcctgctaccctgtacagctgggcccttgaccattactcttcatcattaaaaacacattcacaggactttcttggtggtccagtgactaagcctgcacaatcccaggacagggggcccaggtttgacccctgcttggggaactagatcccattcccatatgcagtaagacccagcacagctaaataaataaataaagctatcaaaaggaaaagcacatgcatagctgctgcctctcttgctcttgcccttcttgctctccctgggaggtgggtaaagtcaagctccatcatcttactttcacagagggagtaactgtcacaaggacctgagcaacctattcgccacttcacagtctttattctaccactttcttcaggtttgaaagagaaacactttggaacagttatttagatccagaaaaaaaaattcaattcagaatccctatttaaagatataaaccatggcccacctaggctaaggtcttggtcaaattcacactgaactcagttgatagaggagccagaactggacgcccagttttttcctaaagaaattttaccagaactcgcagtttgcatagatgctcagttgcttaggagagcatctctaatccctttcagcaaagggattagaatctgtgatctgaatataacttgcctaatctattattcctagaaaacttttcatcctttctcatattccctaaagcatatttatgttcttcagctgtaccatttggaaccctaaagccaactgctggtggcaacagaaagtaaataacaagaaaatgcaactctctggattttctccaatcagatcaattttctagcaagtagcaagttcataaataatgtagatttttaaaacatatttagctcagagtaagatgttacactatttactgtttgattgatggctttaaaatatattatcgttattggtaacaagatagaatgaataatttatcttgagagtgatgaaaatcaaacattcatttcttgccctgattcttctttttcaaccacttcaatatatttttaaaaactgtttgatctagaatggagaatttcagatagcccgttttgcttatgacgcatgtaatacaagcttttacttgaaatcccttcgtagttgtaatgtgtatttcttttgcaatatttcaaatcactttttggagcctagagacaggttgtcctcatgggcttttctactaataacagagtttaccaactaatcaaacatagaagaaatcaccaaaatgatttagaaaacatttagaaaataataaaatatttagatccataaggaaattatgtattcccttatcgatcctgagcttggatcactgctgctgctccccatcaccccagcaacacacacattttcaacacacacatcctgttattcccaagtttccctgctgtaatattaaatgaccagactccatggctagatctacacggggccagcctgaccaatctatgggaacatttctgacaattatccaccagtacacagcaccagataattgatataactcacttttttaaaaaacaatttttaaaaaatttaatattgctgacaaaggtccatatagtcaaagctacagtttcttcagtagtcatgtacagatgtgagagttggactatacagaaggctgagagctgaagaattgatgcttctgtggtactacagaagactctcgagagtcccttgggcaacaaggagatcaaaccagtcaatcctaaaggaaatcaaccctgaatattcattggaaggactgatgctgaa

SEQ ID NO: 42023 - DNA, 705 bp, Bovine  19866881702753
  misc_feature (1)..(1): n is a, c, g, or t
natcctttcttttctaatataattcagctttctaataacttagctaactgaatattccctagtaaatattataataaagattagttgatgtattacaattctcattttaacctatcaaaaaataatgctacttatatgaaattctttctaaaatatgtaattgtataaaacatctaatttttgtgtataatttacttactatttaaagatacttctggattgtttgaatattaaaatatatgaaaaaacaattttaagaaaaaaggtagttacagctgaaaattatcacttcttagtcatcagaaagtttttttagtcatactctaaaatggcctcatgcatcatccaatataattcgcacaattactcttgtgttcatcccagggaaatttaaaaagttgcaggggcaacgtttccttttatatatattttctgtagtaaaagattacaagtcatcaggttccagtgtagttgagaaggtcaaggtataactcctaaagaaagtaggaaaggaaatgaccaaaccactttgtttaaaaacagttaaacttgaggggaaaaaaagtacacttccatgtactagtgatgatctcatttatatctgcagccttgattgttcttctaagctccaaatacacatatatgccattattacctatccattgggatgaccctttaagtgccttaaacttaacctggtcctaa

SEQ ID NO: 42024 - DNA, 1706 bp, Bovine  19866881859779
  misc_feature (1)..(1): n is a, c, g, or t
nttaagatggggtgaatggtgcaggaaacaagaggaacacaggctgatgctgggggagagtgtgtttgactctggtttgccattttcctctgcaggcgagacccacctaaggattttataagctctgaaagcacagtgacttcataatgtttcctgtaggaaatccaaaggtcctttaaggcatcctaatgatttgtttaatcgccactatgctaatgtggtttgaattctgggagatggccctattgtttattgttggcagagcggtggcacaccccattgggtacatgcagttcttcatgaaataagccataggaagctagctggaggcgctcaccaagggcctcagcaagcctttgcttcccaaggcagggtctttactgaacattgagatgctttctctctttgatatggaatttcagaatgatttcagaggactttgtggtagaaaaccatttgaatagtacatcctccggaggcgctttgctggcaaaattgaaactgtttaaatacgttcatatagaagaggctttaaaataagcctggcataacttctgtgggttgttattttacagagctcagcccagaactataaagatgctgttcttgggaattctatttactgaattgagcaccctgaggggtttggccttgagggagtgagaaggggtgggagggtggaagggagccaggctgtagaggcagacactggcacgcacggcggatgctgccttttaagtaccatatgaaccaaaatggacatacaggatcatttacacaaacaagttaaacagcctacagagggggttctgaaaggactcagtgtgttggagaacagcatcttgacgcccctggatcaacataatggaggggatccactctcagcttccctgttcagaatgctcaccaagctctcactcactgaacaacctgtcacagagtgattagcttttgtaagcagcttgctacccaagcaaatcctaacttttaaaagccacatctttcaagtacactttgttaaaaggggaaagagaaacaggagtggtgaggccagttattaatcctaggctggattaggtgtgtgactggctgagagggcccacggggttgcataaggaaactgggtgggtttgtggggcctggtggggcaggagctggtgatgaaggacaaggtttttctcctacttcagttggtagaatgttctctgaggttatgatcctttgattgtttccagtacttaagcatcatcaactgccatttaagctgtgtaaagtatgactaaggactctggttacagcctctgggaaagaaaggggtttttgaattctctgtaactctttctggctgaacggacacgtgaagcccagtgtgcaacagacgacccacaggtgaacagagtagggcagaggtggggagggttggagaattacattttgaggtaaaacttggagtaattttatcatcatgtgcttcccatgtatgagttctcaaagccactgtagggctccagaactgcttgcctgggtgcctactatactgatgaggtgaatcctgctttcaggttttaagcataatagtgttttacgatgtaacctcttttgctgctctctcaattgctgctctgtaatgttctaccttttttaattactgttttagtatgctgcttgtagccccaggtgcttctgtgaaggatggcatcttaaga

SEQ ID NO: 42025 - DNA, 1180 bp, Bovine  19866881988480
  misc_feature (1)..(1): n is a, c, g, or t
ntcccttagagggacatagtagggacagaggtaggagcaggaggaatgctgtagaaaggcaagtcacagaccttgacaacagtccttcaagatgactgtgccagtttttatgtcactctaaactaatcaccccgtggatgcagcccatgttcctcctcagcctccctcaccctcaggccgggactttccctctttgcctctagtctctctccacccttctcttgctccaggttcctggcaatcagccctcacattgtctctccagatacaagggatgtgggggcttcccctggtatggggagaagtaggttcgagtcttcatgaggctcactctcggcatccatggagaaagccctgactggtgggcacagggtctggtctcggttggcaggttcagctcatgcccccatcccaggcatgccctgcccccaccccaactggctaacaagccagacttgggcctgtgaacattgattatgagggcacttagcattagcatgagaccctgttgcttgtcacgctcacaaaacattttgatggctctgggtggacagtgctataaatgcaagacagcttcagttatatcttgtttggtccatcagcaactgagaggtgagctactgtcctgttctgatgagccacttgtgatttggtcaaatgatttgtgaaaatcagagcagaagcgctgtcctctcccttcctttctttgttgggcagatggaagaggtgacagtgagaagtacagctgccctcatccttggtctaacacagtaaaataaaacatttcctctttatggatagcagcttgtgactaattaggtataagtgctttctggctgaccagctccagtccagaggtttgcaggtgcatttcctaatagagcaactggagagaagacagatgcttggcacaggaaaatgagcatcctcagccagggtgcttgacaagtctgtggtagcattgctcctttgtctgcatgggtctgcccgagtcatattcctcttggttaacacatcttttttttaagtctttattaaatctgctacaatattgcttctgtttcatgctttggttttttggccacaaggcctgtgggatcttaccttcctgaccagagatccaacctgcagcccctgcattggaaggcaaagttaaaacactggaccaccagggaagtcc

SEQ ID NO: 42026 - DNA, 2703 bp, Bovine  19866880399945
  misc_feature (1)..(1): n is a, c, g, or t
nggtggcatttcccagcaagtgaccactgagaccttggtgagaaggatttacaagcaggttttaatgcagcaatatagttcttgctcaataaatgtttgccaggtgaatctaaaagaattctaggtgttaaaactcaagagaaagaagtagtcatccccagacaagctttggcacaggactagtttaaagaaaacaacacacaacaacaaaattacctagcatccaaggagcaggtcaaatttttagtcacacattacacacctggtttttccaaaggggaggaggcaaggaagaaggaagtgagaggcatcgcagagaagggtggtgttctgaggtagttttgacaatgattgatggccccgtgctgtattctcactcatgcaggaaattagagagagattgctccagatcctggcccatctgagttccttctatgtccagcccctgcccccagtttctctcctgggagccctcccttcctgcctgagagcctcattattcaaaattcccagcagaaagaaagtaaaaccacttctttctttgctattctctctcttctatgaggaataaaatcatcattttgaggagctcttcacttagtgacttaaggggaaattcatttctcttggtgcttcaggttatttttccaaggggttcaaaagcgacagtgacaattgcttctgagggtgccttcatcaaatttgccatggcgccatctctgctaaattggcctgactgtctctccacccctctgctgggctcccccgcaccctcctacacatagcctgctttgtaccaggctggatttattctataactctgcttttccatttaattagtttgctaccattttaggcagatcttataaggtttcagtttctcagtttctctcctaaggggcggagcaaatgaacatctatatttttcacagggtctatactgggtccaaatctagcctccatccaaccaggggaggccatctaaaagctgatttcataagatgcctccagaaaaaagtacggtggagtgttgtagcatcatttagttttaaaaggatgtcactctatgaatgacattgagtacactctcatttatttttacaacctctgctaataatatcactttttacaaaaacccaaagtccactgcaagatttggcaagtatatatatttaaagttataattggctaccactctgcttcaacatggaagcctgaaatacctacccaacccaggtcagaaggggattatatttatcagaagttgctacaaaacattcatgccaaccaacagattgatgaaaactgtacatccaatcagccacacattaatctgatcttaggtaaccaaataatattttcaccctgttcaggagaagttttattttaaaggaaaatcatcatgaatcctatagtgaagcagataattgagataccaatcttctgacttcactgcctaagaacaaatatgtgtttgcagtacatcagggatttgaacccatgggagagaaaaggatgagagctacctctttgcccccatatcctctacagcatcgtgtcatatgaaagttagttgctcagtcacgtctgactctctgcaaccccttggactatagcccgccaggctcctctgtccatgaaactctccaggcaagaatattggagagggtagccattcccttctccaagggatcttcccaacccagggactgaacctatgtctcctgccttgcaggcagagtctttaccatctgagccatcagggaagcatcctatgacccaataccaaaaacacttcatctccattcctcgcaaattcaaatcagtaccaggaatgtggttccatccatctggggatgtgcagtgttggggtgccacacagttaaaactttatagattaaatccagcaacttcagttgcctgaggcagagtggcgaggcagcgatggggctaagaccaccctaaactggataggcagaaatgccattggaaataccaagtgtgtcttcagccaaccttctttttaacacaaagactgttttctgcagaagaacactggctgaaatgtgatctaaattcatatcaagaaggaaaatggatgcctggagttgaaatcaagagctttctctcccctttgaggcccatggccctcatggaagatgattccttcgagctttgttggagccagtcttggacagatcagcacgggggttggggtgacagagttactttctggctaactcttcttctgtcctttctcccagcccacgctctccctgctgttctcttcagtacctgctgcccagcatggctttgttctagcttccggcaaatgtagcaagcttcagtttctctcaccaaatgggcccttcttgttgagcccagagtcctttttaagtccatttcctctgctcccctttctgttctttaccttttttttttattttatttttaaaatattttattgatgtataattacctgcaaaagaatgcaagaccttaggtgttccactattgtatatgcatttaaacaacactaaaaacaaggtacggaatatttttacacctgaaaaagttcatttcactgatcacctatgtggtttttaccccaaagatgtggcagtagtgtcagagttagtctgtcaagctcttttttttttttttccctccaggataaccataaaggtcttttggttttaaggg

SEQ ID NO: 42027 - DNA, 2452 bp, Bovine  19866880424185
  misc_feature (1)..(1): n is a, c, g, or t
nagatttgacctagtcagggaagtcaggaaaggctctctcaggaagtagtaacacttgaactgaaatctgaagcatgaataggcagttgatgaagggagaaaaatccttccatgtagaggaaacgttgtgggcaaaagccgtgcagtggggaaggagagtgttagtatgaaggactgaaaggattcaaaggaggctgaagggatggcgtaggtagggaccaggctatgttgaggaattttggtatgttttgtgttagttttatagagtagtgggaagcaattgaaaagtagtatgcaggaaacttgtatttggaaaagattattctcactatagtaggaataatgatttacaggggactgtagtagatgtaggtagataaatgtaggataatccaggtgagaaatgatagtagttaattgagaggaaatggtgagaagtagattaaatatacttagggaacatcagcgaggttcatggatttaatattgaatggtaagagagggagatgactaagatttgggactgatacagtggagtggatgttatttttattagaattagcaacactggaatgagaacagattttaaaggaaagatcatgggctaggttttatacattttgaatttgagaggccacaaaacgtctaattgaatatatgaatatgttggtcaaaggagatcatgtctgaactggaggtataagttgctgtggtaactgtgaatgatgatatgcatggtgagaatatggcgatggggtgcctgggacccggtttgataaactcctaacatttagagactagatagagaagaatgaatctcacaggagacagagaaggtgtgacaagagatgtttagaggaaaatcagaagtttttattttttaaaagactttaatgatagaattagaagtcatctgtgttttggtttttatcttaaaacattttattaaaaataaattctgagagttgtctattaagaatcacctttatttagctcctctagacatagctttctcaagtgagaagctgtgtacgtgtcaggtgtgtctttgagttctctcacttagaaaggaggtagtttttgccacaggaagtgtttcatcgggaagcagatgtgctccagtgataggagatgggaaggggatgttttgttattaattacttagctttgaataaacaaagactttgtatttttgaaagatgtcttcttctggtttatagaaattaatcctatttttaaagcttttcattagttgatctaagaagtatgtactctgttgttccagtaacctaactcctgaactcttggttaattgtattatgtcatatcttctattacataagagcatgtgagatttataggatagaatttcggtagagaaaaggtgtgtcttaaaagataggaagtggtggcagactagtatttgtaatctgagaaagctcaggttttgccttttcatctctgcttgcttcccttcgttgaaagaaatcagaaaagccattttaatgagaaattgatatcctattttaatgtttaaaaaataaagaatttagcatttaaactagataacaataaaatatcttgactcaatgtcacaattatgccccgtaaacctaaatttatcaactgtattctgtgaaccatagttggaaaatgctaatttaaagaggttatatagaatcctgaattaggaattaggatacccatgtgttctttttgtttgtttgtttttgctgttgactaagtagtcatggacaagtttttttctctagcctcatttgattatatttaagtgttggttaagttaatctgggatgtcttgtttagttctctgttctctaattctgattctgtgtattgatattaaaagtttccatttttgctctgggtagatttttaaaatatgcttatttaaactttgtgcattcaaaaggaataaaaatatacagtcattataaaatttcatatattatagaaattaataatataaaaacataaatctattagcagcaataataacacattttattatttttaaaaaagaaaatatttaaaagaaataggaacagaatttctctctacgcaaatttcatcatatgtatactgacatattaatgataatcttcagtaaaagtgggatcatgatctactttttatagtatatattgcttttataccttatcccttagacttcttaccacctaaatttccgttttttttcttcttactgtgactatagtatatactcatagttaaaaaatagaaccataaagatctaaggtgatacctcagttgtactccctacaggcaatcactctttaaaaatgtgtgtgtttctagcacagttaaataatatgtgggttgtttttgcatggtatgtactgtgatttatttgggcatcctcctatagatggtcatttgcatctccctcccttgcttccttccattaaaa

SEQ ID NO: 42028 - DNA, 2030 bp, Bovine  19866880505015
  misc_feature (1)..(1): n is a, c, g, or t
naaagctgagagctgaagaattgatgcttttgaactgtggtgttggagaagactctcgagagtcccgactgcaaggagatccaaccagtccattctaaaggagatcagccctgggatttctttggaaggactgatgctaaagctgaaactccaatactttggccacctcatgcaaagagttgactcattggaaaagactctgatgctgggagggattgggggcaggaggaaaaggggacaacagaggataagatatttggatggcatcaccgactcgatagatgtgagttgagtgaactccgggaggtggtgatggacagggaggcctggcgtgctgcaattcatggggtcccaaaaaggcggacacaactgagcgactgaactgaactgaacaggacaagtgatccaacatccccctggattagtgattatggcatccttggcagaagatgccttcaccttctgtttgaacaccatcagtgacaggaagcaccacgccttacaaggcagcctgctctgttggtaggctgacctgagggtcacctatttccttcttgcactaaacttaaccatgtctccatgtgagttccatcccattgtcctacttctgccttctggaatccatctgcatcctcttccacatgacagttccacaaaaatataaaaaatgccatttctttctgctgctgctgccaccgctgctgctaaatcacttcagtcatgtccgactctgtgtgaccccatagacggcagcccatcaggctccaccatccctgggactctccaggcaagaacactggagtgggtttccatttccttctccaatgcatgaaagtgaaaagtgaaagtgaagtcgctcagttgtgtccaactctttgcgaccccatggactgcagcctaccagactcctccatccatggactttccaggcaagagtactggagtggggtgccattgccttctccaattcaactctaaacataaccctaaacttccttgaagaaccttccacataacttctaactgtaaaaaggacagttttagtagggatgctaagggaggggtgtcaacacagttcaaagtctgggcactgtttgaaaagagaatgattgaagaacattattgaagaaattaaggcattcatatctattcatacaagagagaaatcatcaaaatgagtgcttccccaaattggtcatgcagcagaatagtctaggaccttttagcctcagattcatgtccctacttcagaattactgagtcagaatttctgggagatgggacctggcaatctagatgtttatcatgggtcattgagcagggcccaggtgattctgatgcagcctattgttgtgagatactggatgaaatgaccctaagacctctcatagtgagttgggaatctcacagaatcttagactttggttaatattttcaaaaatatttttgtcaaagaggaatgagttggttcaagtaatatcctgacatcttactgaaggataaaggtcttaattatctaattcattaaaatgcaccccaaacctaataaaaaaaaaacccagccatccaaatctaagcagatcatgaatagaactgaactcttatactagcagagtcgggggagaagctggttgctttttgagggtagggacatagatgatgaatttatttcacgtggtagagcagttgtcatcaacctggctgaatattagaaccaatctccagagcaattaggtcagaagcactggagatggagcttgagtgttggtatttttaaaagagcacccccaggtgattctaatatgtaactatgctgagaaccactgcattaaagaaagagatgtgctctcaggggaaaggatagaaaggcaggttgttagtgcaacacaagtgaatcttccctggctaagaatagcagctcctttctcttttaaacaatcaagatgggtgggcttattctctggaaactgaggagagaaggcaggtactgagaggaaaaaggagtgaaacagaacctgatttgcacttta

SEQ ID NO: 42029 - DNA, 1558 bp, Bovine  19866880542019
  misc_feature (1)..(1): n is a, c, g, or t
ntgaaaaaaatgggaatgtataagaagcaagtatatagatggctgagtcccttggctgctcccctgaaactaccacaatattgttaactggctatgccccaatacaacataaaaagtttaaaaaaaaaaaaagtaagttaggacccagaaggagagaaggaaaagtctgtaaggtgaattgcttcaatcagattggcagagaaagattgacgtttgtgtgatatgcagactgacttttttttgtttgtttatttttaaattggcataaaagtgaaaatttatttagaatgagaaaataaataacaatgaattacttattttttaaagatgacatatctgacacattttttgagtctttcccatatttttatttgtatctcaataaatgtatacattaatctaaatggaattgactgctttacaaatttaagctttttatcccaagataagtatgtgatttatttaagtcatcttttacggacatagagataaagatataacattttcttcaagaaggttctgctcatttctagttatatttattccaaggtattttaaaaaatctttctgttgctactgttaacctatctatatctgtacatatactttttgatacctatctctatggcatatctgccagagttttaagactgatttctacattgttttaatctgtatacacattgaccatctctttaaatgacaacagctcatattttctaaagagggaatagaaaagtaattcagtctttcttctaacacagttggcagattttttgtttttattaaaacagattctaaaagtttctttcacaacatcacctaatatggaattgagaaaattggggggatttttttttaatttgacaaggcttctcattaagtttcttttatttatgcctggtctctggttctctgcatttcaaaccctgtttctctccgctgcctatgcactttcagccccaagaacaaatgcacattgcaaatgctcctggtcttgcaccttccaatccagctgccactgtaagcagcagttctactcagggacagtagcttcggttgtgaaaccacatgttaaatgtagaacatacatcagcagctatttcccttttataacatttctctgtcaccaagctgcaagataaagaagcatttagagtatcaagcaaatccataccagcttttaattgtatgttaaatggcataaatcacgtgaatttgctgataatttcctcctcaccagagcagttgcttctagcgatttggctttcttccaggccctttcagatagcagtgctgaccaaattatcctgttattcagaaagctcaatgaaacattagatcatatttattttcaataattaaattcataccagctgccgaacaagaaaagtgttccttctaacgcaaaccaaaatcagttttaaaaagacgttgctcacaaagagtgcatgcaacgaaccagaatattctacatttaaagccacacatagcaccatgggcaactgtagacacattaatttgcagggagcaggggatgtcttcctgttcacggtat

SEQ ID NO: 42030 - DNA, 1774 bp, Bovine  19866880543836
  misc_feature (1)..(1): n is a, c, g, or t
ntttgggaaatcttccctacagggccaaatatctaagggcaggagggaatgtgtagcactgaagaagaaaagcaggagacaatattaaaaaaaaaaaaaaaagtagatatagaagtccaagaatagtagagttatggaatagtaaaaatataaggatgaatcaaagattcatcagatctttcaagacaagaggcctctctcctagatctagcccatctcccataagatggctagttgctcattagcagggcccaagcctctgaagttctaaatacaaatcaccaaggagctgaaatccactcctaagcctctgattttagcggcttatgcctttccagaagaattaacttgcctactgaaatggctcctgcccagggctagaaaagtttgaataaaatgcatttagctactatctaaagatcttaagtcattgagctaaatgcaagagccttttgttaaaaatcacactcaactagatattgaggtttattacacactttctccacttttccttctccttttatgtaatctcagctgggctgatttgccggcattctttccagtggaatcttcttattactcccaagacacaacagagaatctccaaccctgtacagaggggcacatagctgcatctggattataaaaaagggggctatttatactcaaatcaataggcagattttagcataacattgcaggctttctgcaagagaatgaaagaaaagaaaatgcagttccttttccattcttctttactgtattatttgccccaaagtatgcttgtcacatggcccagagcagtgtgatctaataatgataggcctgcttggcacaagggaggggaaaatccagctgcactgggggtttcaggggatgactcagacagctggcccagccctcaccccatgtgtgtttcagggaaaacacccagtatgttgctcatctcacttgcatgtaattcttcccaatgttgaacctgactctggatgagagctgtgcagagcctcttgtctctcaaacaaccagagggccaggaaaccttggaaaataccaaagtaaacaaacctgaggccacagaagtctttgattccattccagttgggagtctgtccaagtttgtactcaaactggccagcctgtggcctcccaacccagctgtgaggaagagccaaatagcctgcctctttctgcagcttttattaacccccgggcttagtgaagccagtgggaaatgcttcaagataagagattcctaagtcaaagtgttgagatttttaaatgaagggatgggtagcccctccataaacctgaaggaggcaagagagagcatagagtccctctgcagccatcctaggggacattcgtcatgtaggctgctccaaggacatccatcaagacaagctgacaagacacagcacaaccactatgctcctaagtctgtttgtgccaaggactggcagtcccctctgccattctcaggacaaagtccccactttcatctatttgcacctgtgaagtcttagtgccaggagcagtaacccatgcctaccaagtcacttcataaatgcatataagaaaatccttggctgctgtcactcaacccattctgtgctttgtcttccaggacactgagtctgatatgagcagtgactgcaggaagtctggaacacgagacagagtctaatggccctcccacctccaacaactattgagtttctagctcctcttccttcctacatgcacgatttgtaagcctgggatctgaccagct

SEQ ID NO: 42031 - DNA, 863 bp, Bovine  19866880566468
  misc_feature (1)..(1): n is a, c, g, or t
natcttttcttgaatcaagaaacattttcaatattttttttcctaaattaatctggttcccatagtttgggttccctattcagaagcactttgagttatctggtaaagctgttgccttctttcctctacattcatagtcatatttctcatcttccccctatttcctctgcatacctgaagagcttctcacattgctcttgtgaattgtgattcacattttttcccctgcagaatcaattctattcctcggtgcttctgatgcagactcaaatccatctacaggagattctgatttatagttaagagacttgtacttcctcattcccacagttgctatgattattcttagcatgatcacagtaatgatctaaactaatattaaagtttagttaatgactgtgaatgacaccatcactaatgctattgccacgccaactcaattatcacactcagttagctagtgaggtatatcctgcaaacatgcttgagctgtgagaatctagttgacttaagctctacagtgagactcttattgagctaaaagagcaaagaacgagcagatgagagggagaaaatggacatctcctttgagagaaccaattagaggaatgtgctgcctctgagaagaccttgccctgaagatgaacagaagataccttggactgacataaaatcatgttaaagagcacagcttggggaatgaagcaaggattggataccagcttctacttgctcccttgtccagggacataatgtgcaaatgcacacaacagctctgtttccagtgtatcctaaggccagagctaccagcttatgatttggttgttgcagatcaatctattgtttgtttgcttaaaagaatt

SEQ ID NO: 42032 - DNA, 820 bp, Bovine  19866880594649
  misc_feature (1)..(1): n is a, c, g, or t
naggggcgaacagtctgaagttctgatgggagtcctcccgggctgccacagaagagcagtttgttacggtaacgtggcctgggggcctccgtgttcctttctcgtgcgatgcagatgggaccaccaaggcccggctgtgctgggagctattttctaaatgtcacaattctctgagacgagtgagtcccatatttcttacggtttcttaaagcctgtattacagagctgtcatttgtttgggcttcctaccagcttccttccctcccccttctcccctgtctttaccctccttatgaggaggtggagggaaaagcccctatttctttctgctcatcaaactgagccctgcctgctttcccaaggcttagtccttcctctgatccctgtgcctggctgccctctccactggaagggacaagccctcttaccaccagggatttttcagagggggcccttgaacctgctcttggctctttaacttctaattgccttttaatgcctcaccttcttctatctgccttttgaatcccatcactcgtttccagccttgtagaagaggctgtctcacaaaattaattgcaaagcaatggaaaatgtaaatgtagtagaaaacatggtgaatccctcttctgagactaaagtatggttaaaaatggttgattcatttttagcttagtcctctctctgatgaacagctgagctggtacagctttttgggcttcttgggtcatatgaacactcttaccattgttcacatctgaggttttactgtaaagcaatgagtgtaattttttttttttacataaatataccacaattt

SEQ ID NO: 42033 - DNA, 2209 bp, Bovine  19866880648518
  misc_feature (1)..(1): n is a, c, g, or t
ncaggagtagaaactggcaagtggagccatggaacacagactctcttcacccacgttgctaaagggacacagactacaagttaatgttttcctctatgttccacctgctacaattctgtgtgatcatctgctagactctgactgatgagagcagtggaaaccctgcagggtggaaggggcaagagtctggcaagagtattcagagggagaagacagccttgttctgctatacttggagccacttagagttatcacttgttcgggttccttgacaagcatttagaggacaggggtgtggggctagggggatttagttagcaagcaagagcccgggaatgctctcctgtgtgtttttctgcacatacagagtaagaggagggtccccaaggcagctctcctggcaaggagaggaagtaatacagctagcttcaacaagggtggcactgggcacatgaaaacatagtttttacatctttgccaaaacgtaagaatctcagtgggtacctggaaaggagagaagtttagagatagtaatctctatcaggcttcactgacattgaacagaagattcaaaagagagggaaaaagagaaatctgaaagtttcagatggtagtccaagtaatgtgattttagttcaagtttaccctagagagtacagatgtctaaaaacagttccaaaatctcccccatgatcttgtcctttaacatcaaactatgagagctgtggtattttgtttgttttagaaattacaacatgtgctgttttattcctagtttactctctgggtttccattatacctctttgatctaagacatatataatttggtgctggaaagaatttgcaagattatccagtatagccatctcattttgcagatatgaaaaatgagatggtaagttagttgcttgagggctcactgtgttacagcaagagaggcagtaccgtactcaaatccagctccttagattcccatgtgcttcatctttcatcacaaaatctgcttctagtggcacaaagaagtagttctaaaaaagtacaattgaccatcaggattaatgttcaaaatcaatgtggatgatctaaaatatttttagatcattataattaccatagtttcacatatacaacttcacttgattgcaaccctgataggcaagcatccttattaagcccattttccaaatatggtgactgagttcctgagattatatggcttgtttaaaatcaggcacaaactgtcagttctgactcttggtttaactttatttccatatcatctatcacaagtctttgtattttccacaaattttaacatcataattgactacttcacacctgaacttgatgttttattcatctccacatggataagcttcagatcaaccatgtgtttattttctaatgtgtctgctaggattttattatgagaatatggtgtattgaaattaacagccagaagccatactgactcaaagaagttcaatattcattttgtactacttttcattttcttagcttgggctggactcctttggggaaagttttcagcagactcagagatactttaggaagagcagggtcaatgaccctcaggggactacttccagcccttctcctcctccttcacctgtctcccactcattgcccccaacaaacatccacaaagccaccctccattggccctgtgagcagtcaaatgggttagctgcgccagacaggtcttgacacatggctcacccagcctctggtacctctggcttcttatcttcaatacacaccacttggccaaattaatttctgtcacaggggggagattggtcagtgaaatctaaatgggcttttcctatttattgatacaatttcgtggcaagagcaattttcagagcttattttccactccattgaatcccatgttactgcaaatgaatatattcctcggtcagtgcaatggcaaaacacagttgtaagtgctttatgcttcatttggataaagtgttcaggatattaccaaatataaaaggaagttaagggctatatttcattagaagctgtctcccctgttaataaaacctgatgctggtggtagatgtgtaaagaatcagagcagagacttgcggctctgcctggtattcaataaggcagtacagcggttgcaaacgccacctgaggagaacaccacatctccagtcaaactaatatcaacac

SEQ ID NO: 42034 - DNA, 1157 bp, Bovine  19866880754937
  misc_feature (1)..(1): n is a, c, g, or t
ntttttgccatgaaagatcaataggagagatgtaaagcttctagtccttctagtcctggtcctaaaaaagcatcatgccagcaacttccaccccttgcttctctttccagtgaaactatgagtttcagttggcataactacatgatggatgaatcccagatctctgagtcacttcctgaagaagagtcacctaatccatatgagaaagtgacatgggcaataaataagcctttctcatgctaagccacagataattcagagtttatctgttactttaacatagtatagcctacactgatgaatacatactgtggaaaagacagaaaattaaagtcagattattgcttccattaataacaactgctattaacaatgtttttctatgctgggcactgtgcttaaagagctagtaagtgtgtgtctgtaaataaacaattacccattttacaaatgagataattgagactcagagaggtttacaaaaagctgctccaaggtcaaacagttagtgataaagattttctgatgcctgagtttaggctacttcaatgattttatgtctctctcttagtaaagattccctctttccatttttgcaagagattacctcaattgtgttcactttcctttactgaaatcttattattatttctaccaaactcagaattttctccatactgcctcattacttgccctacagagtctgagcacaacagtttccagcacattctgtattgtcaatcattatggaagccagtgggaattggccatcactctgagtccttatcctgaaaatgagaacctgtcaactagtttagctatgatccaatcagaagtaaggtgttataggaaaaataacctagggtttcggtctatgccactgcagtcattaaaatattaattacacccaaaccaatctagataaaataaatctaatctacaaatatttattgagtctcctgtgtgtacaggacatcatagaggcaaaatggtttttgtggtttatattctgagttctgggtcctaatgagcctcaagagacagccttaggcagcaagtgtgatttccaaatcatatatatttttacattaaagaaaaaaattcaccttcatttctgctaataagataaaataaattaagatcccgttttggtagta

SEQ ID NO: 42035 - DNA, 959 bp, Bovine  19866880778238
  misc_feature (1)..(1): n is a, c, g, or t
ntctgtgcacagcaatcctctgatgcttctaatttacttgaaagcatcttgtctctccttagaaatgtcacctagcccttttccaagtgcatttccaggcaatcaggatcaatatatcacttaggttaaccatataagatagcaattgacagcgcaaatgagcttacactttgaccctcagcatcagttctgatattaggagctgctaaaacccattcatatctatgagcagagatcaatgacctagaaagacaatgtcttgagaacaggtatagcctagagtagagtttatcacagctggcctctaggttcaagctagtcagaggcctcagaattcaaagtcaattccaattaaatagttacttgctgggtcctgttttgttccagacattgtgttgccatgagatataaggaagatcaagcttgtgccttcccataatgagcttacagtatagtagggggttaacacgcacgcacaatgtgctcgtgtctgttggactagggctgtaacagcagcagaaaaaataaaaacttccaagatccgacaaaggagagataatatcctatctatttggccttcatttttctttatttgaacagtgggacaagcctgagtaaaaatagacttagcttgagaaattgcaaagttaacccttccaccagcttagtccagaaacaacacttatcaagcacttctttcccataatatattaatcacggcactgggtcctgcttaaattaaagaatattcactctcttatgaatagaaagatccctggttttctaaggttgtgcacaagaatttgactgaactataaaagggcacaagggaacttttttgggtgatgggaatgttctaaaactagattgtagagctggttgcctaagtctttaattttaataaaatcatgggaatgtacaattaaaaaaagaatattcactctccgacttcaagaaga

SEQ ID NO: 42036 - DNA, 1025 bp, Bovine  19866880821273
  misc_feature (1)..(1): n is a, c, g, or t
ngtttaaatagaatcttgattagggaagtgcttttgtattctcctctgttacagcattgtacacagtggacattctgcagcccttagataaagcacagaaaagaaaaaaccaacaactgaatagtagttggaggttagagagctgggagagttttggtcagctggtgatagaagcagaccttgcttttcatacctttgctaacttttgaatatttgcagactccccagccatgctgggtccaaatgacataatacagcagcattggatggaggtatgtgctctcagcttctgctagaacattacagcattagaattcttgatacaatttattccaagcctcaaatctgtgtattacttatctgctgaattgaacaaattgaaagtgatcacatttaggaactattagtgggaggttggttcttcctcctctttaataacatcttgagagctaacgggcttcagtgctattcctcacatccaccctgcctccctccacacaaatgagctcagttggaggtagggtttattgacatttaaatgagcatatttggctcactgtagcatggatctaaatgaacactgctttggtgcattgaaacttaatgatttcctctgcatccaggtgagacgggaatgttgcggcattcaggtggggatgaagacatatggaacacaaatcttccagtcaagaattaatatcttgattatatcataggttattttaatattggggatgtgggaactttaagaatgttcttctgagcctggaaaagtaaaacaatagctacagaggggttggaaatcatgaggaatgcccaggtgagattattgataagactagttttttcttatggcttcatggtctctttggggactaaagacacaactaaagactaaagttgagctatttcaaatcctgaaagatgatgctggtgaaagtgctgcactcagtatgccagcaaatttggaaaactcagcagtggccacaggactggaaaaggtcagttttcattccaatcccaaa

SEQ ID NO: 42037 - DNA, 2637 bp, Bovine  19866880897642
  misc_feature (1)..(1): n is a, c, g, or t
nacatctctctcttcctgcagttttccccatttttccgctgctaaaaccaaaaacctatgagtcaacttttacttctgtatttcactcacgtcccacagccaatcccccagaaaattctaacagctcgaccttgagaatatatccagaatttcagcacttcccaccacctgatccaaccaccatgacctattgcctagattattccaagagcctcctgtctctcccagaagccagagtgatccctgaaaaatgtaaagatcatgtcagtcactgctctgctcaaaacccaaccacagtctccctctcacttaaagaccaaagtccttaccttgaccctacatcctatgagatctgcctctctgcttcagggagctcttctccttccactccctccccttccatcacctacagcatgctggcctcatggctgttattacacatcaagcatgctgtacctcgagaccttgacactcgctgttcccttggcctggatctcgagacggagagattatcctggattatccaagcaggtccagtgtaatcaaaaggcccatcataagagggaggaagagggagattaccgctagagaagaggagaaggccatgtgatgatggaagtggacattgttgtgatgtggccacaagtcaagaaatgtgggcagccaccagagctgagagaggcaaggaagagtctcccccggatcctccagaaggaaccagccctgctaacgccttaagtttagtccctaagactcttttcagacttgcaagctccagaactgcaagataataaattcatgttggtttaagccattaagtgtgtggcaacttgttacaacagcggttggagacatagcactggggattcaccagtgcaagtggaaagggcactggacaaggatattggatctccaagaatcctttctctcttgaaattctagaattaaaaaataactggaggggctttaaaaactcattgcaacctctcctgcttctgggtctttccatagcaagatgtttaagactgagtccagctctgtctactcagttgggcctctcttgtagcaagggttttaggaaacactatttccagacctgacaaatcgtcttgtattttaagagcattagctttccaagttttttctttctttctttttcccttgatgggaggaggagaaagagaagtcttcatgccctgaagtagaaataattatcttgaggacttcaagaccgcatacgcactgtttacaccattctgatcaaagtcaatcatgacttaagaacaaactgtagccttctattcagtatttctttaaataatctttctgcttctctttgaggaaagaaaaaacttacaacctggagactagtattaaccataatgataatgttccacgtttacatgctcagagagctttagcatcattagacagttaatgcatatgacacttcattgcatgaggtaggtcagtactgttcttccctcttagcgacagggatccaggtgctgcgagtttcagttctcactggtacacttgtcatccatcagtcatagggtcagggctgggaaccaggtcgacagaatctctgatctctccaacgtatgtagaactgtgagcagccaacacttcccaaaaaaagactgttgacaaaaaaaaagtttatcaatgaataacaggattcaaatagagtgtttccattctttaggagagataagattgtgaataattaacagcacagaagacaatgtaaaaacgaagggctgttgtgctgtgtggcatagacagtatgagctccagggattcagataaaggagacataattgagcagatgtgtctgtgcagagtcttttttttttttcataccaaccagaattcttgtagctcagaatttacatgtatttacatgattgaaacacatatatgttccacctaaggacagagcaactacgtctggagcagaaggaaatgtattagaaatcagtgtgttggcttctgtgctcctgttacagggactgacctggatgtaaaaagcctcctatcgcctagtgatggtatccctgcatgactcatgtggcccagcctggacccctgctctgaagagtcaagacagagaggagcctgtggggctacaggcagcttatgatttgctgaaatgagctaattcttttaagcaggccagtgtctcacttaaaacaaatagggtggtttcactaccatatgacccagcaatcccactcctagatatataccctgaggaaaccaaaattgaaaatgacacatgtatcccagtgtttattgtagcactatttacaatagctagaacatggaagcagcctcagatcagatcagtcgctcagtcatgtccaactctttgcgaccccatgaatcgcaggcatgccaggcctccctgtccatcaccaactcccagagttcactgagactcacgtccatcaagtcagtgatgccatccagccatctcatcctctgtcgtccccttctcctcctgcccccaatccctcccagcatcagagtcttttccaatgagtcagctcttcgcatgaggtggccaaaggactggagtttcagcttcagcatcattccttccaaagaaatctgagggctgatctccttcag

SEQ ID NO: 42038 - DNA, 1598 bp, Bovine  19866880926338
  misc_feature (1)..(1): n is a, c, g, or t
nctttttctcttttttttaaaatttagagaacatgttattactttctgtaatcaaacccacatagataagaccttacatatttaatacagtgcattacccctgtacaaacagaaaaaattggtttaacgtttctagaccaatatgctgttaatttctgtacaatgccaacccaacatggtataactgggattgtttgtcattgttcagttgctaaatcaagtttgactctgcgaccccatggactgtagcatgccaggcttccctgttcttcactatctcctggagtttgctcaaagtcatgtccactgagttggtgatactgtctaaccctctcattgtctgctgcccccttctccttttgccttcaatctttcccagcatcagggtcttttccaatgagttggttctttgcatcaggtggccaaagtagtattttttccaaagttgagagcacaactaaagtttccaaaaattcaaattatatatatatatatatatatatatttatattaaaggaccaatagcagtacgttatgcatcaatagcagcgacagcttttccaggttcaacagtcatctgagcagacttatagagacacccagcgcatgccatttaagaaagaaaaggaaaaaggaaaacctcggaatatagcaaagttccattcctgttgtgctacctggcaccattttttaaaaattggcttctcaatcgtcatctagaaagaaaacattctagaattaggtcattaaaaacagacctgataaagcactgtcactactatgtatcatgaagcaggtacgaggcattctgtgttcacagaggtatgatacaattttgttaagagtcattaggcttcctgatgctttagcagagatgcctgcctcaccccatggagggagtggaaacagacagcacgccgagacccctgcctctgctgtcctgcggaggtgggtgtccaggccccagctttggtgccgacctctcaggctgacccactccaaccacagctccagggagggggaagggaaggaaatgagttaagtctgtcttcagacgcgttggtattgattctgtcagtttcttgctgcttgctgacagaagatagatggctcataacgcagctgggcacagcacattagatctccgtctcggggctcctaaatcatttcgaaattttaaattccctaatcaatattttatggcaagcacgagacagggattgggcccgcttctcttcagggtgtgtgctcgcacacggggtcctggtggaagtgagtaggctagaggggtccctccctgcctggggagaacttgagggcagtcatttcctaccggccagaaccaaggggccctcacaagttacatgatcccagtgatcacctttaaaggggaagaagtctgaggacaagagatgatgaggttggtccttagtcgcctgacttgtaacaaaactgagaccagaattcaggtcttctgacttccagcccaaagctctttctgtgaaagcatgcctagcagagtgcatggtacatagtagatactcaacatgtgtttgttcagcattaagcaaatgttaaaactcataaacagccaaagt

SEQ ID NO: 42039 - DNA, 1000 bp, Bovine  19866880958920
  misc_feature (1)..(1): n is a, c, g, or t
ncagagactgctttgtggtggtcacagtcacagccatgtcctcctggacacatcacatttcctcccttgcagttaggtgtgatgtttggactgagttctaaccaaaggaatgtgggtgaaagtgaggtgtatctgtcacacttatgtctgctctgttaacattttccatattcagtcagtcctcctcactcttctttcccacccatcagctaaaggtagagaactctacatacctaggaacagaaccacaagatgaagagtcaggtcctcaaataactggacagaagctccctcaactcactgggaacctctgagtttgactctatacgaaaaaggaataaactttaattttgtttagccactgagattgttgcacattcattatagtagcgaacattattgtataacccatgtgccatctgctttcttatctacatgagtttatttgcatggttacctttgcttggaatgagtttcctcttcgtattttaaacttttatgctttgtctgatacctggaccattcctgccacctccatggggctttctacaatttcaccaatccagagtgacttcctcctcctcctttcttaaaagtcacacaaactgctttaccacccactcaacaaatactatgatactgcacatatttttatttagttttaatgtgtatatcctatcttctctgataatttttaagatctttcaatggtagtacctttgccctgtgcttcacagtattgggggatgttataggagcccaggaaataattgtaaaatgaatgaattttgttacatctcatcctttcttattgatacatcttacactgtaatagtttgctccttccacaagggattttgatggcatttcttgtttctctgcctgactctcagaaatgctgtcaaaagaaaatcacaccttcccagtattccttctctttcacacagttcactttagtgccacttacttgtttgtgtttaatacatgctagttttgcatt

SEQ ID NO: 42040 - DNA, 2191 bp, Bovine  19866880968801
  misc_feature (1)..(1): n is a, c, g, or t
nctcattagatctgtagaatgtggcacaataaaatatttcatggtcaatttagattgagaaatgatgcatacagtacacctctcttggaaatgtgtaatgagctttttaaaagacactgaaggaaagttatttacatttgtttatgtaaatatatgcacacttatttatttaatatcacagtgtccattagcctcccatagaattactagttttcagcattttgctttaggtattgttactatcaatgcccacaggctgaaaattcaatatagactactagacatgaaagttacgaagacatggccatggatcatcaaaccctttgaaaaggcttacttttgaaggcaaaggataagcactggctaatcatgtaaatagaagccaaaggaatcaaatgttcagtaaagcatagactaactagaataaactgggttggctactgtccatgtgcagaggtgctgaagcagggatatgctgtgaaaaatggatccctgaaggagcccttaaaaaagaactgttgagagagtgaggttttggggctacatcgaacacctagatacaaaacgtgtagtaaaactgcacagagacagcatgggagaaaagagtcttatactgggtaggaaattaacggccatggtatttgatctcattgttccaactaattggatgtgtgagcctgggcaaaccatccaatctcccatgccttatttttcaaagaagatgattggacaggatgtaagttcattcccagttctaaaagttataatatataatgattcttcaagttggtctttatgtgagcatgggagaaatcaaactgatgggtacttgtcccaggtctctgggcttctctagggagaggatgtgcttctgaaccatatgtgttgcactcattggtaagaacattcagtcttgagtcagtaacaaatcacaatttgggaaaggagagagtgcctgaaacaaatgttacaagtttcagttaccattattgagaagaaaatttctcttcctcctgacttctaaaaggagacagcttttaataatgtgtttagcaaatgtttaattatgaaataactattcattaccagactctgttccagatgcttgggttactttgtgtgtgtgtgtgaaagtgtaggggagacaaaatagacaaaatttcctaccttcaaggagtttatattttagtatagggagacaggtaataaacagtgcacccaataaataacatagatagcaaaagtcaattatatagaatgttaaaagatggtaaattttatggacaaggtaaggggcatgaagggttgtaattataaatagagttgtttgggtgagcctttttgagaaagccttccttggtggctcagatggtgaagaatctgcctgcaattcaggagacctgggttggaatccctgggttgggaagatccccctggtgtaggaaatggcaacccactccagaattcctacctggagaattccatggacataggagcctggtgggctacagtgcatggggttacaaagggtcagacatgactgagagactaacacataaattgagtcaagacctgaaggaggtaatggtgtgaaactcgtgtctttctggaagaaggatgcagacagaggaaacagggcagaggcaagagtgtgtctggcaggttgcaggaatagcaaagcagcctgtgaagctggagtagagtgagtaggcagctgtgctgtaaagatggagtctgggctgctttgtctggcgggaagaaagacattgaacctgcgagagcaatttgcacacccaacagcagcatagcctgacctcaaacttcttttctttgtaggaagccctgtagcagtcccggagtgatgggactccctgcctggcctgagatacccagttagcacctgcgaatcagaatttcctcttcgcagcaataaagcatccagcctttgcatctgtgacagcctcccctgtaatttatgcattctatggtgagtttaaacgctgactctatcattatctgagtttattaccatggccatttgcatatgtttgatggggacggggtgggcaggaatacctctggatagattccaagttgaaagtctgcatgtctctcctcacccttacttcctccccagtcctatgcctagagcagagcctggaccaaggccaagtgtgcacagtgctaagga

SEQ ID NO: 42041 - DNA, 1265 bp, Bovine  19866881005640
  misc_feature (1)..(1): n is a, c, g, or t
naacaatttctgtgttgtaaatcacctcctgttataggacttctggtttcaatttactttgtaagagaaaaagctagacattggatttcatttatccaggtcacatgctgtggcttgagtcccagaacccaagcccttagtttccttggcctctgttttccctcaaagccccagtgcccatgagtcttaaattttatccaacgtggcttccaggtttcttacaaaagtctccgggcaaggtaaataagttgctttgacattcaaggtacactttaaacaccattagatactgtactcattcctagaagcaattattcctaattataaccaatttttatgtgtgatatcagaaaaaaacaccaaactgcagtttaaaattggaaatctgtatggggaagaacagtgatacagagctattcgtgtcaactcagagaatttctcctttgaaggtagcatttttaagaactaaaagaatttccacattttgattctttgaagtaccaaagtgacaccacaggaagagatgacacaagaaaagtggcaatttagatatttacccagaaatgcagaattaggtgttattaatgagtggctagatcacacctgacgttttacaaagtgatatgcaatcgcatctgtgtgagcggttgcatacacacacacacacgcacacgcacacacgtgaatacatactccatgtggaatagaatgaaagaagaggacaattaggtctcatccttagaggcagaatctactgtaaatggtgcctgtcttagtaagatggaataaaaaattataagcaggagatagagagggaaggagttaaatccatgaatgatgaacactagctggatgaggattatgatgtatccacataagtcagaccactctattcacacatgcacatgcacttatggtttgttataactcctcagaggcttccctgatagctcagttggtaaagaatccacctgcaatgcaagagactctggttcaatcccggggttgggaagatctgctggagaagggataaagctacccactccagtattctggcctggagaagtccatggcttccctggtggctcagatggtaaagtatctacctgcaatgcggaagacccaggttcaacccctggattgggaagatcccctggaaaaggaaatggcaacccactccagtactcttgctggaaaattccatggacagaggagcctggtaggctacagtccatggggtcacaaagagtcggataggactgagt

SEQ ID NO: 42042 - DNA, 1362 bp, Bovine  19866881017468
  misc_feature (1)..(1): n is a, c, g, or t
ntgcaatcactgatcagatcagaatagcacagagtgctgtgggtatagggtgcaggacacctccatggaagggctttgatggaaaggagagaatggcccccccaggggaagtcagacacctatgagcagagtccttcctaaggcagagcaattatggcaaccaccacaggcctaacttccaagagttgctgtcctgctgtggacacctaagggtacagaactgaacaagcagaagaggaagaagcagcagaaatggtggtcctgccagctagtcctcatgatgaccctaaactaatgatagaagatagagcactcaggttactcactcccccgacagacatttcctgtctacctaccacttgcttgccccatgctagctgctgctgagtatgcaaagataaatcagagacagttcctgctcttaaagttatatgttccatcatgcctagcatgtcacaggggcccaataagttttcattgagtattaccttagccttcagctctgtgtggcctctattctctgccttcccaggtactttcgtatattgttctgttgttgtttactcattaactctgactcttttgtgacccagtagactgtagcaggcttctctgtccatgggatttcccaggcaagaatattggaatgggtggccatttctttctccaggggaccttcctgacctagggaccaaacccatgtctcctgaattggcaggtggattctttaccactgagccaccaggaagcccacctattatattgctctgaattttagttaatgttgcataatttattcccccagtgacacaataggattgctgaatacaggatccatatattcttgtcattgcatcttctcaataaatagtgattgaatgaatggctgtgtaatcctaactggtgtgtcaccaccacccactgccatcagcagaaaagggtggaaggtctagggcttgtaactgcaggagaaagcatgctgggttaggagtcaggagacctgccttctagcagaagctgctgtcaccagcttgctgagagactgcgaacagctgcctgagagcctcggctcagctggaagaaatggtagttgatggtggtggataatctctaaggtaccttccagccttaagagtcatcaccttaatcatagatcacagatgacattccctgagcacatggcatgttctagcactgtgtaagaactttgcctgcattatgtcatgtagtcctcaggataaacttttggggtgctatgattatccctattcagataaagaaaggaagcctggggaggctaaggaaggactgggggactggaacccaaatctgaccaacttgcaaacccacttacaaccatta

SEQ ID NO: 42043 - DNA, 1260 bp, Bovine  19866881053673
  misc_feature (1)..(1): n is a, c, g, or t
nctaggtcatggggggaccatgcaagtttgaaatagaatcctcagcttttcccatcaggagtatttacactattctgcttctcaagaaccataaatgtactggaaaaaacaagttagcaaacaggtccctctcttcaattttgggagacagccatgctatatgagcttaacaaatatattttaaactctgctgggtttctgattacaaaagtcacgcttgttcattgtagaaaatacaaaaaagcatctagaagaacataaatatcaactcaaattccccttctgagagatggccactgtgaacagtctgttggtggactgtgcagtccacacacacttttctaacaaacaggatgatcgtacccatcattttgtaacttgctttttcacttagcaatagagtctgaatatttatatatgtctttatatatctagatttcccaggtggctcagtggtaaagaatccacctgccaatgaaggggactcaggtgccatccctggactgggaagattcccccggaggaggaaatggtggcccactccagtattcttgcctggagaattccatggacagagcagcctggtgcgccaaaacccccggggtctcagagagtcaaagactgagcaactgagcgcacgtgcatgccttatgtacttgcactcaatgtggtttttaatgtagggcactgactctcagctggatcttcgtagttactgatgtgactgagagatcagggcaaatatggattcactacatttgctctggtccacgtggaagttacctctggtctctgcctcactctgctttgctctgtctcagaaattaaagggacacgactgagcctgagcatgatgatgaccttcttgtgaaggtgaagagtgcttcaacccttctcttgatcacattcctttcaaaaaacttgcttgttagccccctacaccccattgtttttcatattttttgtgaccatggttatatctctagctcagacccttaattcttcccacttagtaagccatcataagagagttcttatttgtcttctcagatggctcagtggtaaagaacccaactgtcaatgtaggagatggaggtttgatccctgggttagggagatcccctgaagaaggaaatggcaacacactccagtattcttgcctgggaaatcccatggacaaaggagcctggcgggctgcagtccatggagtcacaaagagtcagacacgatgtagtgactgagcatgcatatatttatctt

SEQ ID NO: 42044 - DNA, 1383 bp, Bovine  19866881072475
  misc_feature (1)..(1): n is a, c, g, or t
naaaaagagaagtaaaggaagaaagggaaaggcaaaggtaacttagcagcatggcaatctggagaattagaggtgctttttgaggtctggagtgtggagaaaaggatagtccaataccaccagataagaaattaatttgccactcatcatagaaacacgggagttaccacttagaggtacatttataacctcttaatttcagagatatgcagcaggagacaacagatccactgtgtcaaagagagggaagatggaaggatttgttttttttattctagggcagctgaagtaacagaaaaaaaagaaaagagacccgaggagacttaagagacagcaatgatgaaaaaatgtactgaccttcatggaagaagatgtgagatcctctagacaaccaaggttagggcttcatgcaaaaagaactagggcaaactggtagataattgggcagaagataaatccctttgcctcaactggttgtgcaaattagttattcaaataatttccacagttcctcacttactgacagttacaagatatgactaatctcgcacatttttagaacttttagaatttcacagaagcgtctgacagaaaggaaatgcaatacttttcaaaggaaaagttagaatttgtcagcaaagggcattatttagcaaatggcccattctaggatgcaagagggtatttcaaatatcttcaaaagagacaatgcaactcgaagagaaaaaaaaaaacaatactttactttcagatggaagactgttttatttttttcttttacttctagtcttatggagatataattgacatataacacagtatgtgtgtttaaggggtataatgtgtgacttgtttatatatatatatatatatatatatatatatatatatattctatatattgcaaaaggattaacacagtcatgttggttaacacttccaccacctcacatatttaccttggtgtatgtgtatgtgtgtatgtgtggtgagaacactttcgatctattctcttagcaactttcaagtatgtaattctgtattgttaactatcatcatcatgctatacattagatcctcaaaacatactcatcttgtaactgaaagtttgttatacttttggccaaaatttccctgttttctcccaagccctggcagccatcattctactctgcttctatgagtttgactgtttcagatgggaggttgttttttgttgagtttaattccattttgattcatgtatttctaacatggtatgagaaaatattttttaatgtttaaaactgtgtctaaatgcaacaagtttagaatcaagaacaaaccaagagccctatgtatgatatgtagacaatgattcttatatatttcaatttattaaag

SEQ ID NO: 42045 - DNA, 2512 bp, Bovine  19866881174582
  misc_feature (1)..(1): n is a, c, g, or t
ntggggacaggagatcttttggcatctcaaacagttagtcccaagttgagaatattttaccaatacagatgtctcaaaagttttgtgtctcctatgtctgattttagtcaattccatgttcagttcagttcagttgctcagttgtgtccgactctttgtgaccccatgaattgcagcacaccaggcctccctgtccatcaccaattcccggagttcactcaaactcatgtccatcgagttggtgatgccatccagccatctcctcctctgtcgtccccttctcctactgcccccaatccctcccatgttagttacacctataacattaataaattctgagaggtgcctccctcttgagactaattttaggtatcttgggtttattaagtgtccatgggattatgctttctgtctttctaggagcactttcggagaaggcaatggcaacccactccagtactcttgcctggaacatcccatggacggaggagcctggaatgctgcagtccatggggtcacgaagagtcagacacgacttcactttcacgcattgaagaaggaaatggcaacccgctccagtgttcttgcctggagaatcccagggacagaggagtctggtgggctgccgtctatggggtcacacagagtcggacatgactgaagtgacctagcagcaggagcactttgttcagctgaaaggaactgataatcaccaatgcagtcctttcaaaagttgtgacaaaggatgtgagaactgcacccttgatatagtctttgtcctgaggctgataagatggtaaagtgaaaaacagttttaaacccctggaaattctgggcattctatattctttctcagttttgttggccagctgctcagtttctttttaaactcaagtttgtcttgcaaaaccttatccagctggtaacaaccaaattatactatcaacgttctgccctgacactttcttactcaatgcttcaaattcattaagcacattttctatcttccaagttatcccagatgagttttgccaagggcttcatcactatataacatgggatggcatgtttctagctctccataacggtttcctcatcatctgctgcctaatcaccaaactacggtcacgtattttagacgttcatgatggcaggactgcacttctgctcaatatttgtgttgcctaactattgtgacaataatactgcattgtaaactacccccaaatgcattacttacagtaataagcacttatgctcacagccacatgtgtcctgggtgattgttattcgactgatctcagctgacttaaactaatgaacctgtcttaggctgtgtattgactgatgttggatccaggctaggttttgggctcagatgtttcttactatttcggcctagactgtaaagggcagcagcagcttggggataagctctttttatagtgttatcactgagtgctagcccagttgaactacacatggaaagcttcttcttgcaccatacccaccaacattccactggacaaagcaaatgacatgatcaaacctaacatcagtggaacagggaagtatactctgtctacagtgggaaggggaaggaatgactttttagatgatttcattcaagtgatcaccctaggatttactttcaagatattggtgtcaaaaagagaaaagaaatggatatttatccaatgtcttactcaagatatctggcttttcaatttattcctcaccatagctctatgaccaagttctgacaaatgggatgcaaatgatgtgtgaacttttggattgtgtccttgaaagaaacgggtatgctctcctgttgctcctttctaactcctgatgtctgggactttaagagcatcttaggtcccaaatgaaagccatgcatttttgatggcaggctgctttcccagttctggactattatgtgaatgagaatctttgctcttgtttaagtcacattaaaaaagaaatctttgttacagtagcttcactgctgttgttcagttactaagatgtgtatgactctttgcaaccccatgaatggcagcacgtcaggcttctatccttcactatctcccagagtttgctcaaactcatgtccattcaattggtggtgccatctaaccatctcatcctctgtcacccccttctcatgtcctcaatctttcccagcatcagggtcttttccattgagtcatttctttgaatcaggtggccaaagtattggagcttcagcagcagcatcagtgcttccaattaacattcagggttgatttcctttaggactgcctggtttgatctccttgctgtccaaggcattctcaagtcttctccagcaccatgattcataagcatcaattcttcagtgttcagccttctttgtagttcaactctcatatccatacatgactactggagaaaaacatagcttttactacatggacctttgttggcaaagtgatgtctttgctttttaatactcgtcaaggtaggtcat

SEQ ID NO: 42046 - DNA, 1230 bp, Bovine  19866881182113
  misc_feature (1)..(1): n is a, c, g, or t
nttttagaagttactgtctttcctcttccccttgtttttctgcttctatctcctgtgaacttcgcacaccagtacctgctgcacaggtagcttctccattccacaccaagtctctcctaccttcaactctttcatttcaagcatttaaagttttgtttatacttcaaattttcctaaaattatcacaaaaagctttaaaggaattaattcagtaattcttggcagataaaagattcttgcccaaacttaaaagccatgtcaaagctgattttcttcacacgatttggataaacaaatgggttacatttttaccacaatgcagacctatttttagagtcaaataccaagatcacttaaacagagagggatgcacctacgttatgtagaaatgtggtggttttgtggcctagacaagttttcactcaaatgactaaccttcttatgtaagttggccatggatgacctaaactgccccctgcaatttaatctgaatcttatgatccacactgagcaagaaaatgttgataggctctgtccgtaaaaactagaatatggaaaacttttatagcaggaaacccagggttcctgacaaaatatcaatctgccaccagcactgaatttaagaaaacctgaattatcttgcctgtgtcaacccgagtaatcatcttacagtcccccttaaagtcctccccttctccaatgtgagctttgctcctagttccttcacgctattgtgaaacaagacaatgtctcatgaagcatgctggggaccctgaactactcctctccagtgttaaaggtagaatgaaatagaaagcagtacttccacattttagtttttctgtctgtctaaattatgaggttgattagccatgtcataaattttgtagtttcacattttttcctactatctatggtccacattttgatcactttataagactgcattaaaaggaagaaaacaagaagtcagagtaagtgggattgtttgttctttttggcatttctgggttaaggtttaaagggcattttaagtaacaatctaaataagatatttctgaaaacctatgaatttaatttattcattctactgtgtcctcatttccatagctaaatgaaggtttaatagtacacttgtaaggcctgtttactgaggctgtattaaactcaggacaaactcacattgttgcctaatttcactttaccaagtctctcaatccctcccgccca

SEQ ID NO: 42047 - DNA, 784 bp, Bovine  19866881201370
  misc_feature (1)..(1): n is a, c, g, or t
nggccccttaatcctttctgagatgcagccttgcctctcaggacagctaacattctgtggcttcccacatgagatcaatgtattctaggtcctccattctttgtgtctaactcagcaaaaagcaccggagtctttgcacctgcgttggtcacagtgggggaaacacttttccttcttcttgataatccatgtggagtgatggacaaggtgtctacccagcaccaaccttgatccactgtgagcaaagctgatccctgcattggtcagatcaggaggatgtagccaaacatggcatcattaaactggtcaaccagctgcaagacattaccagctgccgtgttaatcattaatgaggcagacagtgcctgttgcctgtgtagtgaaccaaacgttatgacttgggttttcatttcatttaaaattaactcactgaatgaagaatcggcccccagcttgtgagagacagagctgctggcacaaagaggggactggcaggccagaagtacaaaaggaacagaaagtccctcatcgatatgatccaaccgtatgtaggccatgtcttttaattcaatttcgatctcagctcctcaaagctgccactcaaaatatttctgtgttcccaagcagcctccatgtgtcacagttccttcctgccatggcatgtgctgatgcctctccaaattacttttactatgtctttaaatctaggcaaagtgagagtaaagtcctactcttcatttttggattgtaattttcctcttcaggaaaagcaaatgtaactttt

SEQ ID NO: 42048 - DNA, 1635 bp, Bovine  19866881364214
  misc_feature (1)..(1): n is a, c, g, or t
ntatgtaacaattcaagtggggtttttgatgtctcccttgtgtcagccactctaaacacaagcctgaaaataacttacataggccctatataattggctcaggtaaattagcctaatccgactctacactatgcaagacaacacccagtagttatgtgcacaggacacaaagccattcagtactgttttcaaccaaaactgacttccctagtgcctcaacaggaccatctaacactctttacaaatttaaagccaagcagtaaaaccagaaacaacacatcaatcgacatgcctaggatttttctacaaccacgctagtgctcagataaattttatctctgtaaaacaactttgctatcgcttggttataaagaataaaactttctaatgacctctgactgtattttaaagtacttacttaatactaaatccaagatgttttcttttattgtaacactctcaataacaagtccataaattaccggataaaaattagtaatttctttccttttgcatagtagcttacccagtttagtggcgccctctggtgggtattcaggaaactgaccctcggaaggaacactgacagttctccgcaggcatcgccctttggtggaatctgcctgctgttcttgtcctccgtccacaggtatctagtaaacaaaaaagagatgaagcttaattgtgccatgagtaccttctgagcgaatgacatttttaggtgatgatggtaggagtgtgcaatcatcagagcaaaacagaagaaatggagaaataaagtctacacaatggttaaagtattactaacccctttcaggaagcttttctttaaaaaagaaaactgaaagatcaggaaaggtgagtatgtaaatgagcttttgcgaagtatgtacaaatcacattcaggtgtgtatctgcttgaggagcttggaacacaaaaacaagacacccacacaagttaagattctttcacatcagaaacctgtgcacgagttccaattctgcccaccgttcagtaaggaaatggaaatacaacaaatacaaccaaccagaaagattttgctccaaaattctcgtaaaagaaggttttgttaaacaaaagtagtaaaatcaccccaattttctccaattttagaagcacttagagatagttaataaaatactagcatatattcttccacaagtgagactagtttttgaaattctaaaaaatatttttttctagcgtaatttttctttctgattgtacacgtggaatgagaactacaaatggtataaacgatgtttgatgccattaactattttataatttacagaccggtaatcattgtgaagtaatgagatggctcgaagttcctttttcttcccccagtaagaccaagtcatcttactttgggagaagggcaaaaacttttcacaatgagattttattagtaacctctatcggaattaagaatagtgttcataacatcttaaatagtttggcaaactatgtcaagaattatggtaccgaggcctcagaatcatgcccccgcccctcactcaaatggacactaaccgcccttatctgagtttcaggctcaatcacaaacagaagaagttacagagagaaaaaaaagaacggctagggccaag

SEQ ID NO: 42049 - DNA, 957 bp, Bovine  19866881365203
  misc_feature (1)..(1): n is a, c, g, or t
ngcgctgtgggatctgttagtgcctagaatggtgctgagcagactgagagtgccctggatacactaactggaagccagactgggcaccagatggcagctctttgatttggctcctctagggtgtatttatcaaactcgagtctgagcaagctccgggcattggtgtaggacagggaagcccagcgtgctgcagtccatggggtcgcagagtcagacatgactgagcaactgaactgatactgggtgtttttaaccacaattcaaatccactgggatttatataccattttataacccacagtcttctgatcttggtatgaagaatgtgctggaacagcccttgactacaattcacattaatattaaaagcttctaacagtggacagaggcagaactgaaccaaggttttctatcccaggcattgggacaattcaagtgtgttagtcagttttccctctcgcctgtgacagtaatgtctaatggtcccctactactgtcattctttttatttctctttctctctggaatgttatttttttaatgtaaatacctatctagggctatttgcatttaaagaatataacattccagaaaggaaggtagataggtaacatagtatgtagttattagcccctaggtgtaagtaagcttaagaaccaaattaaattggggtctttaagatggaaacttaggaagggattaaatgtttgtttacatatctatgactatctgagatggcagaggagggaaatgaactttcagtgaggaaggtccttagggagtaatgtggtcccagctttcactaaatggttgtcaatatgtgaggtggggtgtgggggccatgaaggttgatagacttcaactttaaaagcaggggaaatcaagtataattttcaggtaccatcttaaggggagccataacattagcctggagagcaatgctgtagaaactttgaa

SEQ ID NO: 42050 - DNA, 1902 bp, Bovine  19866881462126
  misc_feature (1)..(1): n is a, c, g, or t
naatgagtgaattagccacatattaaagttggtaagctctgctgcaagctacctccaacacatctcctaccttctgaccttgtgtcaggggtccacgctgcccctgattctttgcctcctgtcccctcctatagtcctgttctgggaagatgtgctgtgtggtttgcttggtggccctactctgctcgtgataattagagtttggcgctacacttcggtttctcaaagggatggtttcttatgggagtgttggcatgaaggagagtcagcttttccatggtgacggtctgtccccggaggtctggcactgggcctcgaatgtactgctccccaactgtgctcatcagatcactgtgatcctgttattctctctgagcacacatggaaccactgaaggttgaaactctccccacctggctctccagtctgcccatccctccccttgggtggatgttccctgtagtctacttacaggagaggaagaaactcaatagcatttggctgctgtgcgcagttgctgattgacatgaagtgttagtgttagtagctcagtcgtgtctgacgctttgtaaccccatggactgtagtgtaccaggctcctgtgtctgtggggttctccaggcaagaatactggagtgggtaaccatgccctcttataggggatcttcccaacccaggagggatggaacctgggtctcctgcattgcaggcagattctttaccatctgagccacaaaggaaaccatgaagcatcatgaaaattattactttctgtttagcacattcatatgccaggcattgtgctgggttttatgatttccattgtacagatgttgaaaagaattcttagaaatgtgaagtgatgtactgaaagtcacatggctagtaagtggtggagatgggatacagtcccacaattacttgactctgaagttcatgcttgtttcacattacctctagaaaggcttatggttcctaatttctattaatcaaagtgacagattattgtaactttgaatctttgcagacttctagtgcagtggcttttaaatgttagtgcacatcagaatcagcagatgggctggttaaaactctggtttagtagttacgatgtgaggctagagcatttgcacttctcacgagtttccaggtgatgctgctgctgctgctgctccaggccatgctttgagaaccactgcccctctggactcgaaggggtagagacgagcagaaaacaaagcactcgttgttcccatcccctcagcctgctgggcagtgctgctgagatgcctgtgccttgctttttgcttcctggacattatttcacaggagagcagaggtctggctacttgcatctgtttcagttcagtatctcctcttgtctgggtagtatgtaggctggtccactgccctgaactcaggagggtcaccttctaacaagctgaggatttaaaaagcatacaataacacaaacaaaggcctagaaactgaaagcatgttgatttacgggcactgctcaggaactagtaatccagttcagagaatgaaaaaaccttggctcatccacccaactagagggcttctctgaaattcatgagatttgtaaaaaatgggattcatcatttgcctttccctagagttcttgccttgttgtatatacccaagcttccaaacagagttgactttgaatttccatgatggactatctaagcatgtttgggagaatgctgggggtctatctacatgctaaccctataggcactctggcagtgagaggcacggtgtacagagcatcggggctaagagcaagaggctatggagtgagatagagctggttgcgaaagctggctctgctatttaacagctgagtgtccatgagaatattacttaacctgtctggat

SEQ ID NO: 42051 - DNA, 1573 bp, Bovine  19866881694364
  misc_feature (1)..(1): n is a, c, g, or t
naaaaaacccgtcgccgtttctgaagagccagagcgaaatcagggtactgtgcatgtctccttgtactcaaaccacctaagccagcccttgggcccaacgcctggacccaccccctgtgctcaccccatatagggaaccagctcacccctcaccacccctggggagtgagccagggaacctgttacttgttcttctgcctcctgcagccgcaggagcctccataaagccttgcctgaatttcttgtctggcctcttatcaatttctattgattggggaaaaccaagaaccccagtgggtatcagttctactgtggtgggactgaacagtgacccagtaatagtggttcctcccatcctagtgtgccattatttcttgcatgcccagcttcctcgggaatttcctgggtaaagagggattgtcaggttggaatttaagccattgtgtgtcatgccctggggatcacaggtggtgaagacaagggatccaaccctccaggaggtccccgtgcagcggtggagagggccaaatgcacgggaaaggacagcatggtagggtgactgctattctaggcgtgtgtgcccgggtgctgctggagcacatggagggcatctcatcccgcctgaccaggggaggctgcctggacaaaggatgtctaagctaagaagctgagagctctggcagaggcaggggagcaagcagctgtgctgatttgtggagtaatcagatgaggacgctgaatctaggcaagctgaatagaatagacaatgggattccaagcagagacggaggaaaagtaggactgaggatcaggaaggggaatcaagaatacgaagcacctgatgagaagatccgactcattggaacaggccctgatgctgggaaagactgaaggcaaaaagagaaggggcagcagagaataagatggttagataatgtcaccaactcaacagacatgaacttgagcaaatgttgggagatagtggaagccagacgagcctggcatgctgcagtccatggggttgcaaggagtcagacatgacttagtgactgagcaacaacctctctcctcgagggtgagaactggagctggaatgggggtgaggccagagttggggaggagagagaagcacagagaatcaaaggctaagcctgggaatgcccaggtttcagggctgaaaaggcagaggggctagagaataatttagagagccagctgggaaatcctagcaacctgatcaaagcaccaccaaaccctaggtcctctcacagtccagcttaagagtgtgcagccctcacccctttgtgtttctggccttacaggtgatgttcaccacagctaccatctctcaagggagtaccaagcagcaggcactatgctagactaatatatatattatcatctgaagttcttagaattcagcgcagtaaacatcaactttcccattttacagatgaggaaacaggttcagagaggttaagtgactttctcagggcccctgtgccacacaagctggatcagaactgggatccaaacttctaaactccatgataaacacgggttgttgttcagt

SEQ ID NO: 42052 - DNA, 779 bp, Bovine  19866881737836
  misc_feature (1)..(1): n is a, c, g, or t
natccctaatgtaaagacttaagggttactttgtgtcagtgatagcaagtgacataaacatctaagattttcctggaatcctagtgtaagacatggtatagtgtagtgggtgagagtgagggctctggaactgtgtgattgtggacaagttaatcttccagggcctcaatttcctcatccataagatgggagtaatgatatttctcacctcatgattttttttttttttttgcattggttaaacaagttaatacttagagctgggtgcatagtgaatgttgggtatgttttagctattttatgtgtcagttaattataaaatgtcagagttgtatgttagaggatatgtctaggtctgtgttttaagaaggtttaaaatttctgaggaagatttagatttttatcacactgtcagtctacccgaatagtcagtttatatcctggaagcaaaaatgactcttcttgtctagagggaccatcttatgggagctggttatgggactgttatttaggcagctgctttttggcatgatcccaagtgaaatgtttgagctggctcttccctcaggctcagaagtcacctggctaatgtgaacttcaatggtcctgggatgctcagctggaatctctggcttgtgttaccccaagcaggtgttctgagaccaaagggacagtaattggcaacaatggttgttggaaggttaccaaagactggctgggaatagtctcatcagcgtgcgcgcgcgcgtgtgtgaatattctcatcagtgtgtgtgtat

SEQ ID NO: 42053 - DNA, 697 bp, Bovine  19866881785679
  misc_feature (1)..(1): n is a, c, g, or t
naatgaatcctaagatctgggcctggaaatatgcgtccaacatttccaaaaatcccagtagaacaaaagagatgccagctatttagctttgatattcaggagaccatttgtagacatttttcataacagtttctttaggaggatgagaataacagggataaggagatgctagagagaggggagggaagggtggtaaatatcaaccatgagtaagagatcactgtttttctatgcaatcccaacctcaaccacaactcttgatgagagaagaggaatatttctccctactttctataggatataaatttcaacagataaatattctgagtcttcagccaatataaatcagtcttggtcctacttcaactccaactatacttataaagtacttactgagaaatatgctaaagaaattcttagtcacaaattatctttcagaacatagggattaagggaaaagaaaatgtggtggtaaagcagtagatgctttagatctaattgacaaatttagaaacaaataaattaccaggagtagatggcaccaacccaagggtctgaaggaactcaaggatgaaattgtgaggctgctggccaagttgcaaccttgcagttacaaatggccacatgccatcagagtggcagactgccagagtgacttctctctatgacatgggctgcagaggagacctgagagcca

SEQ ID NO: 42054 - DNA, 893 bp, Bovine  19866881933621
  misc_feature (1)..(1): n is a, c, g, or t
naagaaatcaataatccaagttttgtatgctaatgtaatttggtgaaaaatgtactacattgagctcagttagaacattctctagattgctagagtttcttacaggccgcatctccagaaagacctacaaaaatgagatttagcaaaaccgtcgtccacgtggatctgagcgatgtagagacgtgtgagccccagttccattgtgctgaagccttgattagcatttctgttcctggcagaaaagactgacagtcagtcaatcagtcccaaataacaataatatagctctgcaaaaaagcaacttccactcttaggggagttattgttattcagggtaaaaaatatcccctgggcagattcactccactgcagaagttggttactttgcaaaacctggggggagaaaaaaaagaaaaccaaaaaaagttgtacatgcaatatttcacattgtgagtagatttgctttggggacaataggcaggatgcttggagagacccctcctagcaaatgacaaaatagagggatttctatctttaactgcaaaaatagtaagaggagagacttgaagactgaacacagtgaggctgccccattgttgcggctccccgtggaggtgggggtcacacacacgggagacgaagccacggtcccaggctttcttccaccagccccagcttctggctccctctgcagtaatgttaattatagggtaagaaaaactaatcttttctttttctaaagacattaatcaaacctatcaaagaggtaccaaaaaaaagaaaaaagacaaactttcaactagggattgcaaagaaagatttaagagaaaaaataggatttgcttattattagccatgggaaggttaaaaagaaacatgataattgagtaaaa

SEQ ID NO: 42055 - DNA, 813 bp, Bovine  19866882141936
  misc_feature (1)..(1): n is a, c, g, or t
nttggcaagtaaggaagaaaggctctgaaagaatcttttcctctctaaaatttatgagtgataactcccagtgctaaatttaggaaatccactccaaaaatgatgatggatgagcatgaatcaagatggctgccaaatctgttttcaagaacagaaggtagagggctggctctggagtacacaccttagtcacttcatcttagtttgtctttaggacctgtacctggaatgttggccataaatttaacaatgtactatatattccctttctataaaatcacaataatcactcagactataattgcacttcctcaaaatcaactgatttttgtggatcaaagcatgaatagtgagagaatcctagagaaggtgagaaagagagtcatcaacataacattacaaataatgacagcaaaggagttgaaagaaggcaactctgagctagtccagttcacacaaaacttatatgtgaaatacaaacaggctataaaatggtcacacccagacaggtttgcaacataacttaagcccacacctaaactggtttcaacacattttaaagaagtataatggaaacaggatcagaggaaaatctgattcttccaagtatgaccccttgaagaaagtgtttgctaaccctgactaatgtctagaaaagcaacaaatgtcacaggataaaaagggaactaaaggattcaaattctggacaaagttccatttagaaaatgaaaagatatgaagaaaaaggcaaaaacaaacaaacaaatcttgattttaaaaactacagcaaaatcacagaattatccatactaa

SEQ ID NO: 42056 - DNA, 1894 bp, Bovine  19866880558760
  misc_feature (1)..(1): n is a, c, g, or t
nagttctttattgctgtttggcacgaacaccagaatctgtgtcaagccatgcatcgtgctctgatttttttttttttttttttcctgcttttgaggcaaaacgggaacaactcgcattgtaacactttctgaactggttcggctttcttcacattaaagccaaccaatcccagtatgcaatgcaaacaatgagttaacagtcgcctagaaaccacatatcccagaatgccatggtctcaagcaatctcggaagtgggtagaggagacgccactgcattctgggagttgtagtctcacaggactggcccgcccctcgtgcaacttcggcggcctacgtttggaggaaacgctgctcgagtggcttagcgcggtgcgggccatagagagcggttccgcccaacaaaaccttcgcctccggcctggtggccagctccgcctcttctcgtatctttcccacagcccaaaatggcggcggaggtggattttggcgacttagagctgttcgaggcgtttgaccacccagaggagtcgactccgaagcccgttcatacccgcttcaaggacgacgacggcgacgaggaggacgagaatgggattggcgacgtggagctgcgggaacggcttcggcagtgcgaggaaaccatcgagcagctccgcgccgagaatatccttcccgctctctgggccctgtcatcagggagtgtggtggggcccgtgcccggagggcgcgggcggaaattccacaagggccagaattcagcctgagaatctagggttcgggttgcgtaagctgtcctcgaggcctcggcgcagacctctccccttgtgggattcgtctcctggacctcattcgtttctcccgtccgcgagtctggggcgggattttagcgttattccggactctttcaactgttcagttgcagactgtttaccacgtctgttcccgtcttttgagtcattatccggtctccttttttggaaccaatgtaaagttgatgcagtcacgctatgtggtgtgttaggagataccggctacattgacctgggcgcctgtgtctttaaggcgcggccaaagttagtggccccattctgtggagttggggttcctaaggagtcgaggcatgcacagagaaatggttcattgctgatgaccattggggattcatttgaaagttcttccactttgaaacagcttccgtgtggaatgtgcatttaagtttccgtttgactttagttacatgtccacagcctttctagcaaaatgtgttaatatgttaatacattcttagaaggtgtttgcgggtggggtttaacttattttaaaattttttgtttatttttacttagcttacaattttggttcaggaacttttttctagtgtaaggttttcgaagccattttttttcataatgcctttttcctggacattttattgtggaaaatttctgaagacagtaaagttgaaaggatttggcagtgaacattcgtagattccatcctagatttttcagttcttaacagtttgttatgctgcatttaccttgttgagttatcatgatgcttttgacctggaacgtcttcttaagtggctgtttaacttctgacggtgcaccgttgaccgaatagcatttttggtttcagtctgttagtctattttgaattacatgacccccgtcttagaaataccatgttggaagggtatgtattttagttttttagatccagatactagtcctgcaacagaaaaggtcaataagtgtgtcatcctcaaaacatttgtcttttaacttttgtaacatacgtttataacattgacatcaaaagtgaggttagtagttgtattttatgatcttatttctgtttaatgagggctaagtccttaacaagtaataa

SEQ ID NO: 42057 - DNA, 994 bp, Bovine  19866880560214
  misc_feature (1)..(1): n is a, c, g, or t
nccctgggctcgacaaataacttctccaagtttagtcccatctactgtcaggtggtacactgacggcgtctgatgttccgatgataaaattcctgtttgccaaggagagaccaaccccgtatcagcacttgcagggaacagggcatgccagcaattctgcttctaattgcacacgaaacgcctctgtcgtctataatttagtgacattattaacccagcatctccaaaaatacgccaccaaaacccaacagcctccatttgcaagtgaaaaagcccacatttctacatgtaaattgagtcattaagtatgcagatggacagtcagttgtacaattagctaatctgcacatgcaaatattcatttgtgtatgcaaatatggtgctgggtgcacacatacagatgtgcctgcaaatacggcaagggtaattaagcaggctcacagataattctgtcttgaaatgttatggctattcactatcaaatccctttaaccatagagctaggacaaactcagctcagagaaaggagaccaacctacaatgaaggactccagaggtcactgagatcagagccatttccagcttcctatcactaaacattcttaataggagaatgatgtttcacttagaaaaaaaagattaaacagtgatcgtaatcagccaaggagatccatctctgacccagggaaaggcctaactagaaaggccaggttcctatttcacatcccaggaacaggaagaatataccacggcacacaaactaaaagacacagctttctgactgtttcaatgatgaggttcatgaacgacttcaactgagcgctgaagaaatgatgctttcgagctgtgtgctgggagaagactcttgagagtcccaaggagatcaaaccagtcaatcctaaaggaaacaactctgaatattcattggaaaaactgatactgaagctgaagctccaatgctttggccaccctgatgtgaagagccgactcactg

SEQ ID NO: 42058 - DNA, 693 bp, Bovine  19866880630507
  misc_feature (1)..(1): n is a, c, g, or t
ngataattctccttggatggaaagatacaaaaagagttttgccctcaccaggataatctttcccacatgaattctgaattctttggtttatgctgggatgttcgtacagactgacaatgagatggactggttttccgatcactcttaaatactcagcagtgttcagcttgtgggctatgagcacagcttccgtgcctgatcgccggtactgaacatgaagcttcttcagcagagcttcagctttttcacgtgtctcatccttttaaaaaattccaagcaaacagaaacttgttttctaaatcttcagtgagactaagaatctatctttatcaatcaaggtcccttcctgccttagttacaaccttagtaatctacaccaagcctcattttctttctccagtttaggtccccaacccttgaaaatatctatcaccagggtgggctgaaaagggatgctagagagcacaacttaaattaaaaagaaagtggactctgacaacccagagaggtgagatgagggcaggggagggaggttcaagaaggaggggatatatgtatgcttatggctgattctcactgtggtacagcaggaaccaacaccgtgttgtaaagcaagtatcgtccaattaaaaataagttttaaaaaagaaatagaaatggaaccttaaaaaaaaaaaaagcagagcctgcacc

SEQ ID NO: 42059 - DNA, 1773 bp, Bovine  19866880680778
  misc_feature (1)..(1): n is a, c, g, or t
ncttcttagccccacctcccaatctctccatctaccttctcctcactcctagccctaggcaatcactgatttctgtctctatagagttgctttcagagaaggcaatggcatcccactccagtactcttgcctggaaaatcccatggacggaggagcctggtaggctgcagtccatggggtcgctaagagttggacacgactgagcaacttcactttcacttttcacctccatgcattggagaaggaaatggcaacccactccagtgttcttgcctggagaatcccagggatgggggagcctggtgggctgccgtctatggggtcgcacagagtcggacacgactgaagcgatttagcagcagcagcagagttactttcttctaaatatgtatataaatagaatcatataatatgtaatcttttgtgactgacttctttcactcaacataaagttttcaaggttcatccatgaaacctgtgtcagtactgtgttcctttttataaaactgaataatattccattggatgaagagaccacattttgcttatccattcatccactgatagatatttgtttctactttttggctcttaggaataatgttgctatgatcctttgggtatgagtttttgtgtggacaagttttaattctcttgggtagatacccaggagtcaaattgctgggtcatatggtaactcgactattaactcttgaaagaactctcaagactgttttccacagcagctgtaccattttacattcccagcagccacataggagagttctagtttccattgcagaatggaaacaggggaatgagatgatgtgatttctaaaagatctctgtctgtgtggaagatggattgtaaggagacaaaagcagaagcactggagagctgtgtgggtggtacttgggtggtacttgtgtggtccacaccagccttaggtggctgatacaggggctgaagtggggaggtgctaagaggacaattgggggatctgtttggaagtgtctggaactgctgcagaaaatggtcttgtcttggctttgggggtgcagaaacccccatggcctttctaagaatcccaccatttcaggctaggggggcgggccagcctgccccttacctagtcccctgcctcctacctaggagctgaagatcctggtagactacgacgagaaaggctacctcctgcagattttcaccaaacccatgcaggaccggcccacgctcttcctggaagtcattcagcgccacaatcaccaggtatcactaaggaccgcctgtcctcggcgggtggctttctgggcctcgcagctcatctcctttctcccgctccagggttttggagccggcaacttcaactcactgttcaaggccttcgaggaggagcaggacctgcgaggcaacctcaccgacatggagcccaatggggttgtgtccggcatgtaggcgccgcaggtccagcaagagccaccgaggccccgcccaccttcgggagcggggcgcacggtggatcacgctccctcgccctgtgacccgcccactccactggagctgaagggagccctccttgccccgcccaccatccgactccgggacccctcccacacacactaaaggctccgcccactacttaccatgcccctctttggggcctctactctcctgcccttgggtataaagcaaagcagggtccaaggcagtgtccacgcgtttgtgtcgggctggatcagcgacgttcttcggccgccagggggagctcaagg

SEQ ID NO: 42060 - DNA, 1088 bp, Bovine  19866880681021
  misc_feature (1)..(1): n is a, c, g, or t
ntagtgagcatataagtcagtcatataacttttcccttctttgaagttctctttggacactctgtatgtgtctacagccaaacacgtttttgaaaaaaagctgaagcccaagctcctgcagttaacacagggtaaatcctcaacactgattaacaaggagatagccaagatcacgcaaaccatcgaatcctacctgttgtccatagttaacccagagtgggccgtagccatcgccatcagtcttgcccaggatgtcccagaaggtatggattcttcctttaattgagcttcaaatggttggctgtgttgttttcgtaacttgttaaaaaaaaaaaatgatgctcctttcatttccttctgtttcttttaaggagaagaagtatgatagcttagaaatgtatgggactccactggcagtccaatggttaagattccatgcttccagtgcagtgggaggagttcggtccctggtcagggagttaagatcccacatacatgttgcgtggcatggctaaaaaacttttttttataaaagtagagaaatatatttgcccccctgtcctcacttgtagcactgtcatatgttaaagaggcaccagtgaggggacttccctggtggtccagtggctaggactgtgctcccagtggcagggggtctgggttcaatccctggtcaaggaactaagagcccacatgctgcaactaagagttcaaacgccacaactaaagattctgcctgccacaagtaagacttggagcagctaaataaatacattaaaaaagaagaggcaccagtgaactaagcaagatgcaatgttgcttgcttggcgctcagtgccagaggcactgcctaacttgagtataaattcatactctctcatgtctaatcatacgtactttctgtaacgaaaccttagacactgtctcatggtcaaacaggtatacaaacacttaaataacttatataacacttatataaacttgccgtgttttcagttgtaacaaaagtgaaaataagtaatttttctaaatgctcatttgtcaaaaacggttaaaaaaaataaagggtattcatagagtactgtgta

SEQ ID NO: 42061 - DNA, 1749 bp, Bovine  19866880692941
  misc_feature (1)..(1): n is a, c, g, or t
ntctgtgtatccgtcttaacttcctttcttttgtccccttacttcctttattctatccattctttttttaaaaatatatttaaaattttatttatttatttgactgcgccaggccttagttgcagcacatgagatcttcagtcttcattgtggcacatgggatctagtcccacagccagagatgaaagccgggccccctgcattaggacttcagagccttagccagaggaccaccagtgaagtctgtccattcttccatccacccatcatctatccatccttccttccatccatcccggtctgtccaccaaaacctacctatgggtgaaattcagcaggctgcgaatgtatgacttcaagagctgagatctagctatgaattggttcgtactcacagaaagttcccaagataatgctaagtgaagcaggacaacaaagttgtaagagttcaggtcctggagttagttggacctagatttgaattctcactctaccgctccttggctgtgtgaccttgggaaaaccacagaatctctctgaacatctgttttctcatctgcaaaatgggcatagcaggactgcactgctggggagctgtattaaatggcatcagcttgctcataacggatactccatattggtagtttgttaggtgtagaagttcaggcaattctcctcttaaaaggcctgatactgtctccaccgacaaaaggattgttgactgacttcattcacctcagtcctcatgtgtgttcatctgggcttccctgtagattgagtataacctactcaagagctacaaagaccacctggcagtcctggacattcaccgaaccgaccagggcagctatcccacctgtatggtctggtacccgccactcaccaaggagctcttcctgctcatttgcaacagtggctacaaagtgaagctttttaattctaccacaaaaatgtgcaggtaagccagggagcttcccgcaaatggtgcataaatcaatttctcagtccccaggttatttcaagtcccaccttaaggacctgcaaacagcttgcctaccattacaacccttcttactttgcaaagtaggaaactgaggcacagataaggttagttgtccttgctcaagtttacatggttagaaagtgccagaggcagggacttcactggcagtccagtggttaagaatccgccttccaatgcagggggtgcgggttcaatccctgttcgggggactaagatcctacatctgtgggacaactaagcctgtgcactgcaacgactgagcccaacgctctagagcctgtgtgctgcggctagagaagcccacataccacggccagcagtccctgtgcagcaatgaagagccagtgcagccaaaaataattttaataagtaaataataaactgcattggtaacatctaaaaacattttaaaaaggaagtgccagaggcaggattcaaacccagaaacgttgtttctgagcccagcacttcacagggataaggtactcaggcctcggagatggagattcagcaaaggcatcagaccccacagccccagaaaagctgctcatgtgcaatggaatctcctgttcttctctcctggaaaaaagcggattcacctgaatactaccagctgtttgatttttcttattcttggttcttagagaagttataagttcaacttgatagcattctttcttctctcaagcccactataggactatagcccaccctatgaactgtag

SEQ ID NO: 42062 - DNA, 1784 bp, Bovine  19866880837400
  misc_feature (1)..(1): n is a, c, g, or t
nactgtctgccatatctactttatacaaaaatgctgatgatggtggttttttggaatattttgtaaagaaaaacaacgaaagaatgacaaaccgctaaatttaaattcagagatcacttctcaaggagaaccatctgtgactacaaaagccgtattgtacccattcagttaacaaagaacaatatcagtagggtaccacgcatcatgatgtaaactgtatttagggccttctaaatagactactgctttgagagcatgtactttcatgatgagggggttgaaaagatgacttataaagttcctatcacaaacattttaaaaattctgtgacttctatccagtgaagcaaaacatttgtgaaatcagtggttgatgcagcagttttaatctaatgcaacaaatatttgttgagtacatgaaaagttgattctgtctgcagccaaaaaaaaaaaaatcaagtagactcagacaaatacatgtacacataggttcacagaaacactattaacaatagccaataggtggaagcaagtcaaatgtccatcagtagatgaaaggataaacaaattgtgatacatatgtacaatgcagtattactcagtcaaaaaaaaaaatgaagtactgatgcatgctacatgaaagatggaaggcaaaaggagaccagggcagctgaggatgagatggttggacagcgtcaccaactcaatggacatgatcttggacaaactctgggagatagtgagagatagggaagccaggtgtgtacaaagagtcggacatggcttagcaactgaacaacatgctacaagctgggtgaacatcgaaaacattatgctgggagaaagaagccagacacaagacgtcacatattgtctgactccatttatatgatatatgcagaaaggatatttatatgagatagccagaaatatctaaggccatagagacagaaaatagattagtggggattagtgggggagaggcaagttggaatcaactgtttaatgggtttatgtctccttttggggtgaaaaaaaatgtctggagctagatagaagcagttgtggcatactaaatgctactgaattttatactttaaaatgattaatttgggggactttcctggtggtccaggggctgagactctgagctcctaatgcagggggtctgggttcaatccctagtcagggaactagatctcacatgctgaaactaagacccagtgcagccaaatacgtaaatatttttaatgattaattttatcttatgtgaatagtatctcaataaaaatacacatataaataaatgaaagtaataaagattttaaaaaaagacaaatggagaatatatgaaaaccaggtaggtgagagattttagaaaagagattttttaattggaaggattaaagtccttccccggagaaggcaatggcaccccactccagtactcttgcctgaaaaattccatggacggaggagcctggaaggctgcagtccatggggttgctgagggtcggacacaactgagcgacttcactttcacttttcactttcatgcattggagaaggaaatggcaacccactccattactcttgcctggagaatcccagggatgagggagcctggtgagctgccatctatggggtcgcacagagtcagacatgactgaagtgacttagcagcagcagcagccagggcttgtattccaataaaatgactaaatctcatttagataccttgtagaaggaaagactcaaaccaaacagccagatttgggcttccct

SEQ ID NO: 42063 - DNA, 1227 bp, Bovine  19866880846321
  misc_feature (1)..(1): n is a, c, g, or t
nctgcatttcggactcttttgttgactatgatgccatcatagtcaacactgtctatagcacttgccaatttctgtagtgtaaacgtgatctcaaactattgacatgaggtcactgaacacagagttgggatgtgtaggcctgtcagcactcactgaccccaccctgggtacaataagcaaatcagtctcatcacttaggcaacctgtattggtatcacctgcaggtccagggacccaccagccctgaacttggatgtcaaatatttatttggccgcacgaggtcttagttgagacacatgcaatcttcaatctttgttgcagcatgggggatcttttttgttagttgcggcatgctaactcttacttgcggcatgtgggatctagttcctttggagtccttagccactgggccaccagggaagccccctgaacttggacgttggtcattgtgcactagcactgccctcaggagcctggcagaagcaaatgtaaagtatctggagatgaaggtagcttcattctaggcctccaattatccctataaataaatttggaaatacagtgtccagcaaggttaaagaaaatcaggcagatcacaaggaaataggacaccatgagtaagaactagcagaaacagactctcagaaacttcaaatatcaatggtcagacacagactattaaacacctgtgctttgttgaaaggaagaagtgtaaaaatatctgcaggagacagtaaactataaaaagtgccacactagatttataaagaacatttgtagagagctttgtagtttaatcggagatgaaaaacatacatgccttcaggggccatgcggtaacacaaatgagtacagtgactaggtgacacattggtgacctggggagctgtatccaaagggtacagggctcctcagctccagctgattgttgccatgtggcacacagtgcccagtttgcagatttgacatgtctatagaagctggatgtttggatttctttttattgtggtcaaatacacataacataaaatggaccactgtgggacctccttggcagtccagtggttacggctcagcgctttcactgccaagggcctaggtttgatccttggttggggaattaagatcctgcaagctgagtggcacagttaaaaaaaaaaaaaaaaaaaaaccaactcaccaaacactgtaacaatttaaaggtatacaattcagggcataaagca

SEQ ID NO: 42064 - DNA, 1262 bp, Bovine  19866880848593
  misc_feature (1)..(1): n is a, c, g, or t
ntaagagtttctttgtttgttttcgaagtataactgacctatgacactgtattatttcttgttacacaacatagtgcttctgtgcatttattcctatttctatatatttcaagatgatcacaacaatatgttgtcatacaaggatattacatagttattgactgtattctctgcattgtacgtttcataactgggactcatttattttgtaactggaagtttgaaccactttatttccctctcctatttctttcctcccccacaaccctcctcccatctggcaaccacctgtttgttctctgtatctataactctgttcctattttgttatatttgttcacttgttttttttagcttccatatataactcaaatcatacagtatttacctttctctgtctgacttatttcactaagcgtaatacccttcaggtccacccatgttatcacaaatgacaagatttatattccatcggatatatgcactacatcctctttatccattcatctattgatggacatgtaggtttcttcctcatcttagctattgtaaataatgctgcagtgaatataggggtgtgtatatcttttcgaattaatgttttcatttagagctatgaaatcaggcatttctgccattgaagagcaattggaaattagtataaagcatctttcttaaaaaatagtttattaaggcaaaattcacatgatgtaaaaccaaccattgtaaagtgaacaattcagtggtattcagtcctttcaccacctacctccatctagttttaaaacattctcatcattccaaagtaaaacccctggcataaagcatcttttaagctgtaggaataataaagccctgtaaccacaacttaattgggaaggaattgccttttgatgataaatccaaaagaattttaaaatgcatttaaaaatatttgaaagaacacgaagaggcagttcagagaaaaaggccaataaacctatgagcagatgcttaccagtacatcaaagatgcaaatgaaaagaagacatcatttttcacaaatcagattagcaaagataaaaatgatcgatagcgtcaagtgttggcaaagtcgtcagatgctgtaatgggctgctagcggccgggctggggggggtgtagtgtaaagggggacaaccttttgggagagcaatttgttaccctctattaaattacagcctgtcttctgacttctagggaatgtagcccgcagaaatactcgcacaggatgccaaggcata

SEQ ID NO: 42065 - DNA, 1571 bp, Bovine  19866880870064
  misc_feature (1)..(1): n is a, c, g, or t
nactgcctataaaagatgttactgcctgggacttccctggtggtccagttaaggaccacttccctggtggtcctggtgtgagctaagactccacgctcacaatgcagggggtctgggttcgatccctggtcagggaactagatcccacaagctacaactaagagtccacatgtcgcaattaagacccagcacagccaaattaataaattaaaaaaaaatttttttttaaagatgttattgccattggtaaactactaccttccccttagaaggttaaataattgattcaaggatacactgagacaataaaggatgagagacaggcaacttttaaaacataactatcctgaagagtttggctctcctcccatctagaccttccttgagagcctaacctaaagcaggcgctcttattaatactcatacatacctttctttcagacgtagttcgtcattcatttttgtcagctgagaagaattgtctccagacattttcattattgctgcaatgtcattttccagtttttcttttgcctttatcagctgctcttccctttcatctctctctctaaattttgcctccatatctgaatatatatatatatagaaaaaaaaatagagctgttgtattataatcaacaacatattaactacattctgtatgccaaaacttgctctgggaatatctgtacatagcaatccctgctctcatgaaaattatattctagcagagaagagagacaatgaacaagaaagagaacaaatcatatattagagagtggtaagtgctaagagggggaaaagaatacaagcagagacaggagccaggaaggaagctggggagtgtgaaatcttagaaagagcctctctgagatagtgacatttaagtaaaaccctaggggaaatgagggaagagaaatgcagacagaagaaaagcaggtgcaaaggccctgacgcaggaacatgcttcacaatcgagtatcaccaaggaggcagatacggctgcagtggaaggaacctggggaaaaacagcacaggaggaaatcagaaaggcaacaggacctgacgggagctgaggaccacagcctttactctgagcgagatgggtgccactgggccaccttgagcagagatgtgacatgagctgacttaaagttgaaagcatctctttggctgctatgctaagagaagactgaagggggcaagagcagaagtgggcagcccaggtggccagctgttactacagctcagattaaagatgctggctagctgggatgaagggcagcactgggagtggtgaggtgttgggtgggattctgacttgtttgaaagcaaggcagagaggatttgctgcggtttacagacctccaacaagatttcatcacaagagaacacaatgagcaaagactttatgcttgaacagtagatacattgtaaccacacactaaaacaatctcaaatcctaggaagcctactatatttaacgtttataataaccagagacgtgttcttacctgttaaattttctctcaacttctccagttcggaagacagtgcgttaaactgttcct

SEQ ID NO: 42066 - DNA, 1744 bp, Bovine  19866880898430
  misc_feature (1)..(1): n is a, c, g, or t
ncctcccccagctggtttggtgtgtatttttgttttgtgtccctttttctatgccaaagaagcataattttgcctgctttacaaaatttaccctgtatacttcataaggcaaaatatattttctgaaaatgggatcactctaaagatgttcagctgcccctttttcatttctcaagatgttacggccttcagtcggcgtcagtgtgtgtgaaaatctgtgtcatgtttgtaaagactgccgtgtaccccgttgtgaggtcacctgggattctggggctcagggaatacgtgcactcgtgggcatcgccacgtggcctcccgcagtgccctcctagcctctgcactcgccactgtgagtgagggagcctggttcccttctcagtctttcttggtggtagtggtctagtcaagaagtcatgtccaactctttgttaccccttggactgtagcccgccaggctcctcatccatgggattctccaggcaagaacactggagtgggttgccatttcctcctccaggggatcttcccgatcctgcttgccaggcagattctttaccactgagccatatggaaagcccgtaaaatcttttctaatcagtagcttattcaagagctggtaaactaggaggagtgccttccagaaggctctgccctgggagaattgcttcctagctgtcccctgatggcacagctcttgggctcctggcctgggctgccaaacagcagcttcgtaaactggaccccagtttgcagcttcctggcaaagtggggaagtggaacccatcttacccagtggctgccaagtcccaccaccagacggaggcaggcaccacaaggcacccaggtgaccgtgactgtaactagcccttcctctccacaggagtgctatctggaaagtgaccagaccagcctgtaccatgcagccaaggggctgatgaccctgcaagctctgtacgggactatcccccagatctttgggaaaggagagtgcgcccgggtgagaaacgggagatgcttctggtggtggagcaagggccccctggtgcctgggatggggaggagtgggaatctgttttgatttgaaaattcgcatacttgctaaaatttctttatagctcccaaattggcacagtgctctgcagatacgctcagggaagcagtaatttgtatcatccagtaattgaagttgcgcatgttctcagctgagatcacagcaagcaacgctctgccttcaactcataccatgaacaagtgtgatttttgccactatactgccgtgcagtactcattgccacttttgtgtgtgtgtgtgcatttttgtgcctttttttttttttttcagttggtgatttcactgttaaaatggcccccagcggtggtgcggaagtgctatccagttttcagaatgtaggaaggctatgatggtcctttagggagaaaactcatattagatgagcttcatttagtgtaaatgatagtgttggagaatcaacagcatatatttaatgtctttaaatagaacacacataaaacaagattatatattgatcagatgatgaaagtgttgtaatcagagactcaagaagccctcaccctaatggccctgcagagcggtggttcagtattcactgattcagcattcatggtgactttatagaatagaacttccgtgaataatagaaatagactttgattttatgcctcgttgagaaatagctggtaaagtgtaagcactggaatg

SEQ ID NO: 42067 - DNA, 1597 bp, Bovine  19866880979097
  misc_feature (1)..(1): n is a, c, g, or t
ncttgaagtcacaggggagaattaaggggaaaggcctgggctggcggtggcttgccggagggaattttccctgaggggggaggagttccggaagtgttcggcttccaagcaggcctggttcccctcgcagcgcctgcgggctccacgtcgtgtcgcaaggaccatcagaccctttgcagcctaggccggaggaccagcgctaaatcctgcctgcagaagcgtttttatttgggccttagtttttaaaaagctttgagaccactatttacacgtctacacctggtacctctcaaactccaccaccatccgccctcattcccgcgcggggggagccaagtagcgattgcctgtttgtgcgagtccaggcctctctagtccgccccgctgctcactgagtcccgtcctgtgaaaaggcaccctacgtcgtcatttgggttccagcctggccccactttgagtctccaccccctccacgtaaattgaagaggttcttccagatgggtggttgtgccttattaaacttattaaactctgtttctaggtacagacagtgtgttccagtcgtggctaactttaagaagcgctgtttctcggaattgataagaccatggcacaaaacggtggctgtgggatttggggtcactctgtgtgcagttcctattgcccaggtgaagtaccatcttgtcactcagtgtttttggtctttgtgtactgtgtcctctgaagtctcaaataggcgatgaagcatctgacaagctctaatggttttcacccagtgctctccccagccccaggtgatggtatgctgtatcagcattgtttcatagctgagcagatatattaatatcctcattttggtcatttggtagaaactggtatgtcagtttggtcaaattgtataaaaagggaagaaagaaaataatgtattacagaacaataatcttttcattgaacaaaactttatggggcaacttttatgtgtcatacacaagagactaagtaaatcaagatttctgcttttgtaaatctcacattctggagaggaggaggaagaaaaagtggaatgagagaaaaaagatgagctcacagatagcggaaggtcaaaatgtacttagatgtttgtactttgtgggccgttgtaagcattggaatttattatgataaagaagccactggggattttaacaagattattatggtctgacataaatttttttttaatttatgtttaattgtaggatagttgctttaaactgttgtgttggtttctcctatacaacagtgtgaatcagctaccagttcagttcagttcagtcgctcagtcatgtccgactctttgcagccccatgaatcacagcacgccaggcctccctgtccatcaccaactcccggagttcactcagactcatgtccatcgagtcagtgatgccatccagccatctcatcctctgtcgtccccttctcctcctgcccccaatccctcccagcatcagagtcttttccaatgagtcaactcttcgcatgaggtggccaaagtactggagtttcagctttagcatcattccttccaaagaaatcccagggcgatttccttcag

SEQ ID NO: 42068 - DNA, 757 bp, Bovine  19866881010861
  misc_feature (1)..(1): n is a, c, g, or t
ntgggtgcagcatcgagattataataaaacgtccccacagcagtttgggggcttccccctccctttacctgtttcatgattttataatcacacctaaaagtatcatcaagcctgaaataaaggcactactgacattgggtagtgcaaagaactcagctatttctttgactaaaaataaacgagtagatgaaaatgcaaagtggcatacttttttttcaactcattccagtgtcaaagcttaacccaaacatctaaatatacaaatgcagcctggaaatattttagtgcaaatatgaagaggaacggcataatttaaagttaacttaaataaggtactgaaaggctaggagttgttctgtgaggtctccctcatagggacgattcgtgtaatggcatctggtgcaatggaatactttttaaaaatcaagaagacaaaaatcagaggtgaaaacccccccttatttattattctaacttataaacttatacggggagactaaaagggcgattttgtggaagatcaaaatattttcttagatctgttgatgggggtcaaaaataacgtgagttctcctgaagtctgcacgcataatgctggtggtcagttgcctacacgctagtgcatctgagagagcccagttctgggtggaaggcttcatcagaaggtctcgtcgtcattgcagttggtagcccagtgcccaaacatctcacagatgtcacagtaggggcgttcctcgctccgactgccgtggtgtgt

SEQ ID NO: 42069 - DNA, 1740 bp, Bovine  19866881041323
  misc_feature (1)..(1): n is a, c, g, or t
naattttagtaatggtatttttttttccatttcttttgaaaatattttggcagccagccgttgctcatttaactttcttggttgcaaaatgcacgcttagtttggtttgaggcttaccttgttctttgagacatccagccctgctagttgtctgtccggctttgctgtcattccccatgcagagtctcctgccactgcgggtcccccattgggcatccgcctagtaatttctcatgaagatgctcatcgtgtccctctctgcgtgaggctaatctgggtggccccagaatttagttggcagcgtggaacgtgggtacagattgacaggaggaggactcaaacccagttatctgggctgcagcctctggcccagaaagcagcataagaacaaatgtttctgacctcagctatcctgcgaagactgctcactggctttcagagaaggagggttgcgatatggggggcagaggggaaagaaaacaaccccagaggtggcctcactcccctttcagggccatgttgagccttcacccctgttttccaggttttctccctctcctggccgctgggcctcctcctcttctgtctgtttctggcctgggctctttctgacttcagcttcctgtcggtcccccggcctcttcgttctagccgcctaactctccctggtacactctgtgctttttttttttttgggtttggtttcctgttaactgctgcctcccagctgtttccagatgaggttcagcagctctttggggggaggaactaagggcaggggaagttgtggtggttttttccccagtcgtgtgaagtggactagggactctgatgtgatctgtccctgaacttgcaaagtcatgaactgctaaagggtctttggcaagactgactttggggaaaatgtggggtgccccatggtccacctggacaggtaacagtgtggacggattccagcttcctgtagctggccgtaaaatccacatccttcccacaccatgatgctaagaaaagccccctgtagtgaaacatcttgatttggtcctgcagtgtgaggtcaattgttggaatgtttggaagaggaagaagttgcctctccccaaggcagagcttagaaattcatggcctgccttctctaaagcttcctatccgccactggggacgtggggagagtacggtgtccctgcaggatggaagggaggataagtataacttataattatacttataacttataaatataacttataactaagataatgtctataaatgggtctgcctgccttctcagtcatgtccgattctttgcggccccatggactgtagcctgccagggtcctctgtctatgggattttccaggcaagaatactggagtgggttgccatttcctcctccatgggatcttcctggcccagggactgaagccacgtctcctgtgtctcctgcattgcaggcggatttttaccgctgagccatcagggaaaccccacgaatgggtctgctgctgctgctgctgctgctgctgctaagtcgcttctgtcgtgtccgactctgtgcgaccccatagatggcagcccaccaggctcccccgtccctgggattagaatgggtctagtgcctggcaaataagaagcaacaggaggtttaatgggctgaatcccttctgcatcatcattcagctgacattttttaggagcccaagttactcatccataaactaagggaagtaacatatctga

SEQ ID NO: 42070 - DNA, 2408 bp, Bovine  19866881120291
  misc_feature (1)..(1): n is a, c, g, or t
ncccgagagcgcagtcgggattggacagacgaatgaaaggggcggggctgaaggtaacggcagaaaccgcgtggccagacacctaaccgccagagcttccgcgtggggcgcggcggggcggagccgaccctggggtagagggagccgagcgaagtcggccgtcgccaagggtgtttggacagggtctcgggtcctcgcccctggagagttctctggttggctggccggccgtgcgggtccgtcaggacagaggtcggaggcggagcagaggtcggaggcggagcagcgccctggagggcaggtggttggggccgggtgcggggcgggaggtgggaggggcagggagccgggcaggcggcgctgtcacttcagcaccaggaagtaggtggtccaaccggccagcagcagcgccccgatgagcaccgtgtagctgaggagcacgaaggccagcagctctcgcagaagctgcagcacgtggatggtggacgaggtcggcatcgccctacgcgggaggcccgagaacctgcagggtgggggcacccaggagaccttgagcacgccaagaggacggttctttcgctagaccaacctccgctgaacactaagcgagcgcaaccgagtcccgcaccgttagaggcagtgtggacacggggctagactaggacctctaaaaagtataaacacacccttcctaaggctgctgctgctaagtcacgtcaagtcgtgtccgactctgtgcgaccccatagacggcagcccaccaggctcccattcctgggattctccaggcaagaatatggagtgggttgccatttccttctctagtgcatgaaagtgaaaagtgaagttgctcagtcgtgtccgactcttcgcgaccccatggactgcagcctaccaggctcctccgtccatgggatttcccaggcaagagtactggagtaggttgccattgccctctccgaggctaaggaagcccaaagggctgattttctccctaacaacccacgtggacactgtctacatttatatcatatagttcttttaaactgaacgttctcattctttggctcctgatctggatctgagctcggagcagggaagcctggagaggagagttcccagctcccgctgctgcactggtcttcatctccagccctctcctcccatccacctcctgcatttttaatgttgtgagtgttgttaatgggctaatggagtaaagcttgctttttgccatcattcaagccgcagccccagctgtcagcgctgcttaggagaggaaaagagatcgttttgagtagggggaaagcagcgggccctcactgcagcccttctgcaatttttctggccccaaggcttatctatttacaagagtccgaggaccgctgctttatggccagccaggatcgcaggagtgccaagaggtgggtatcagtttgactctgggcttatctctttgcccattgtgctcttggcatccgctccagccctctatcttccaccatccacctcggatggaatcagatggtaacaattacaaaccaattctttacctccactgctgccctgcccagcaacacccctcagtgccagccaccaacttccctgtctccccatttcactcactcaacaaagtttccacgaatcctccactgtggcagctctgcggtccctctccggtctgctgtccgaaggtaggcttgtgtgcgctccagtgatgtcggcaaagctgagggactttcaggcagcagctgcactcaccaactaggtgtggtctagagaccaatcacaatctccacgtggtccctgagctctcacggagctgcgcacaggcaagtccagaccaggcagggcgctggcaggcttgcccaccctctgcctgtgtcaccatcacagcccacacggctctaaggttgcctgcaaaagctcctgtcttagaggcgctgagcaagtggtacacaggggggatttcatggcccttctgcctggcttttctaaacactgtggatgggatacagtccagattcttttctaacaaacttccacaaacagcagtcccatccttgagtctcagacaagaagaaccactgtacatacaacattcacttatgactgtccaactaaagcaaaaactttagcttttttgtcttaaaacatgcaattacaagcatttgtgtgagaactagctcagaaaaccaagagctctcaagtgctagattctaattcagaggttgcagtttagagacttattatatagacaccttcgcaatgtacctacttccaatttcaactcctccaaatgttaagggtaaaagaaccagtcaggattccagccaataaagaacagaccctttcccagatgtaacaatgaagggaaaagaaagcacaaactttatgctgctccccat

SEQ ID NO: 42071 - DNA, 1339 bp, Bovine  19866881177536
  misc_feature (1)..(1): n is a, c, g, or t
ncttctttatctacgggacttctttttgtaggactgctgggtgttgcagaaccatctatccaactagacaaaaaggtccagacatgatgtaaacaatccaccctttccaagaataaatgtaccattcacgtacccgttttctcagtaagggcacacttctttgggacaaagactgcttccaagtattaagtgaacttacacaaaggcgtataatatataattatcccccactttctatttgcatacaaatggagcaattgaggttttgaagtcttatgctgaatgcatttttaggagctgacctaactatgctcagagcaagagaatggagagtcatgagtgaatgcagacacatgagacacaactgagcatctgttcacaggacaaaacccccagccaagggcacttgcctggactggaattgaatcccaggagccaaaaacactgatggacaaggtgcattttattctctacagcagctaagactgagagccactggggctggaaggtataaactaatctccctgggctaacaaggagttgagaaaggattcctaaaacagggattgctttctttaagacctttccaaatactgaatgttaaagccaagttaaattcacaagaagcttatcttttaaatattccctcttctacccctcatttttacattaaagagatttttttaaaatgcaggatttctccttcactcataacatggcatgtgctaacagaatttcactagagacaaaaacatgtacaggtactaattaacaacagaaatgacacctcaggggacttccctggtgatccgctggctaagactctgtgctctcaatgcagagggccctgggtttgatcccttgtcagggaactagatcccacatgctgcagcaaagaagatcccaagtgctgcaactgagacccagtggagccaaataaataatttaaaaaaaaaaagaaaagaaatgacacctggggagggacactgactttggaccccagcaaagaagggggaggggtcaactaattttgctggagacttgggcaagggctataaaaccattaatttagtccccttcttggccttaactctttcggatgctgggacagtgcaggagggagatttccaacttctctgccagcaccttccctcttcccttctacagcctagcagtctcccccaggaaaggtagcagctggatgcctggatcaccaacaagctgcaccagaggggggatgacatcaccaaaccagggagcctggggtgtttcctagcataacaaacaccggaggctgtgtaaggagtggctgcagactgctggggcagcaggtgtggca

SEQ ID NO: 42072 - DNA, 969 bp, Bovine  19866881191421
  misc_feature (1)..(1): n is a, c, g, or t
ngaggagtatagcctagatcttattctttttgatggggatctcctatccatggaatcggagggtgcgttcaaagtaagtttggcattttctgttttaatgtcaggctgtgatttttgcccaatttatgagcttgatggtcatattcatctcagatgtacagcagaatgcttcagtattttttcagattatattctattatgggttattatattaggtatagtttcacgtgctgtacgtatatccttgtagcttttttttttgtactagttggtatccgttagtcccatacccctaatttgtccctcccctcttccgtgccccactggtttcttgtcttgtcttttttttggatggggggctgtgaagtaaaaaagaatagctttattgctttgccaggcaaagggggccacagtgggctaatgccctcaaaactgtgtgtcccctcctggagggagtagtgaggagttttatagcaatggtccaaagagggcgtgagcagcttgtggacacgcttctgattggtcattggtgagatgcatggaggtcagcatcatcaaccttctgattccaatgggtctggagtctgcatgcttaatgagcagcatacagttaacttctgccacctggtggggggtgtcagtagctggtgtctgggcttactaaggctcaggttctttgtgtctcagcgcagaagggattcagtgagaggcaaagggttaggcaagaagcagagttattaacatgggacacttgtaagaggtgcaggccggcaggtgggggctctgccaccgctagttggttttctgtgtctgtaagtctgtttctgttctgtgtatacattcatggtattatctttgcagatttcacatatgagtggtatcacgtagtgtttgtctttttctgtcttatttcgctaagcataatattctctaggtccatccatgttgctacaaaggcactatttcatt

SEQ ID NO: 42073 - DNA, 1279 bp, Bovine  19866881223347
  misc_feature (1)..(1): n is a, c, g, or t
ncccccactcccatccgtccctctggagcctcccccccatgaggagcagcccccacgtactccgagcctctgtggcagcctgggcaagtcccagagcgccgaggcggtgccggccacgccgagtggggagcccttgccgacggcgggcagtggcggcctggccctgagctccccgcagctgcccggtagccccttctcctacccatccccatcccccagcttgagcagcgggggcctcccaaggacacctggccgggacttcagcttcacacccaccttccccgagcctgggggccccctacttctgcctgtctgccccctcccagctggccggcgtgacgatcggtctggccccctggcctccccggtgctcctggagacaggcttgccgcttcctttgcccttgcccttgcccctgcccctggcgttgcccgtacctgtcctgcgggcccagtcgcgggcccccacccagctgccccctctgctgcctgctccactggccccttgcccaccccccatcaagaggaagccgggccggccccggcgatccccgccagctgtgctcaccttggatgggcctttggtccgaccgccaggaggggccgccctgggcagggacctcctgcttctgccaggccagccacagacccctgtcttccccagcacccatgatccccggaccgtgaccctggacttccggaacgcgggattcccagcccctccaccacccttgcccccccagccccctccacccccacctccaccacctgttgagcccaccaagctgccctttaaggagctagagaaccagtggccttctgaggccatacctccgggtccccgtgggcgtgacgagatctccgacgagttcatggccaaggtgcgggggtcctggcgccggccaccgaagaagcgccatgaggacctggtggtctcagcctcgcccgagctctcgccaccgcagcctctcttccggccccgctcagagtttgaggagatgaccatcctctatgacatctggaatggtggcattgacgaggaggacatccgcttcctgtgtgttacctacgagcggctgctgcagcaggacaacggcatggactggctcaacgacacgctctgggtctaccatccctatatcctgccaggtggggcgggggccacacctccctctctgggtggcatctcctacgagggcgcatgtcaccaccacttgtggatggtgtctgtgtgttggtgccacaccaggctctgtatggagtcatctctgccttgtgcg

SEQ ID NO: 42074 - DNA, 920 bp, Bovine  19866881244527
  misc_feature (1)..(1): n is a, c, g, or t
ngggctcctctagttggggcagggggagggcggcgggcaaaggagggccactgcacaggactccagaagacacacagaaacattttcttttttaaatgcaaaaaaattatcttccttcagatacaatagagaaactccaagcaaaaaaggaaatgagaagcgtgtgttggagtaagtcctgttgtgagcaccaggtaaacactccatattcagtcccttaagaacaatggatttttggctcctttgcctgagatatccttacagggcactggggccaggtcacagaaggcattagaaacactcaacacaaagaaatctcataaacaggacagtctccccttctcccctaaactcatgcccctatggagggagcaaatactgaatcacattagaaaatgtaaataagatgggaaaactgaggttaaacagctactgaacttgtggacatgacagagaaggccccctctctctggccaggttggtgaaatgctctgggtgagaggtaaaaagatccatgggtgggcgagagggcaaccctgctgagtggggtgcagtgcccacaggctaagagccaggtccagtacaggcctgagacggtggggacgggggtcaggcactcacagctcccaacgacctctggtctgacgggcccgggcaggccctgccactgcctctctgtgcggaggaagctgtgctaagccggggccgggtggcgcctgccctgccttctgcaggctgagcggcagcagtgtcaatcctcacgcaggtaggcctcctgctcctccggctcggccctctcgctcccgtcctcctgggtttttctgtccggagttcctctgtctgtgcttctgccaacttggtttccgccttctgggaaagctggcgtacctcctgcacctgcgatttcaccagctggatgt

SEQ ID NO: 42075 - DNA, 980 bp, Bovine  19866881418933
  misc_feature (1)..(1): n is a, c, g, or t
nagtttcaatatgtgttagggtttcagcataactttgattaattacatgtttaccggacatactagcctatctagtgctgacgtcaatattttaactcgctcctcctcaaaacattgtaggctgtatttgacatgaattagatgatgatatgaaacttctaatgaggttttggggtgtttttaaatggatgagaacaacacagaagtcaactaaaggagtgtgactctatatgaaatgagtgaggaagatagctgtcaaaattactcataatccattacattctgggccttataacagcagacctcagaaaatgtttcccttactctttgttgattgtaaagatacatttacttcaaaagaaatcagccttcttatttggaagggctttgaaattcaagcatggggtgggcattcagtagactctaaaatcgcaatggtagcaaaaatatgtattctgagaactgcacagacaagaaacttctattaagatattacagattaaagtaccaaaaatctgctaaatttgaaaatttttaaatttgcatttgtcatacatctagcagtggtttgaaagcatcaaagccatttaattctggggtcttattaaaaaattcatatgaatcactgtcgtcgtttagtcactaagtcatgtctgactcttcgagaccccatggactgcagcccaccaggcccctctgtccacgggatttcccaggcaaggacactggagtgggttcccatgtccttctccaggggatcttcccaactcagggatcgaacccgggtctcctgcactgcaggtgtgttccttactactgggcctcctgggaagtcctgaataactgttaagagatgagaaaagttgatgctaaaggaaaatctctgaatttaaagtatgccatgaaataaaaattgctttttcttttctggtaattactaatactttaaaaaatcagttaccataacatatattattttc

SEQ ID NO: 42076 - DNA, 1338 bp, Bovine  19866881459322
  misc_feature (1)..(1): n is a, c, g, or t
ngcgatggtggtaaggaccttcctacggaagcaaagaagcttcagctgaattctgcagaggagctgtacgctgagatcagagataaaaacttcaaatgctgtgggctccgtgcttagcaagaaagcaaaggtgatctctgcagcattcgaggtgagatggtttggttgttacccagcttctgtaggtcacaggctagactgcccacccctcctagcgagcaaggactgccaaagtgcagccactgagcagggctgcagttctgagcaactgtgggctcagccactggagaactcaaggttttctttcttttttttttaaatatatgcaccttcattcattcattctgcacttcgtagcatgcaggatcttagttccccaatcagggctggaacccctgcccctgcattggaagcaaggagttctaacctctggaccaccagggaaatccccgccaaggttttctttttaaacttctccccagacctatgagaaaaggtgtttttctctttcagggagagaaaggggtagtattttgagtttacaagcgttcaccataaatatttgttttaccttctttgtaattatttcccatctctctcaagaggaagccagctgtactctaaatttaagatcctctataatagaacttgcaatttgggccaatagctcccagtttagccaacatgccaatggcaagggaactctgcagatgcaggaggtgataataagagcgaaatcccaggagcccagagcttttaaatggacggcttcattatcaccttcctgcctcctcttgcccagccactggtttattcttggttaagctcatttttgaaatgggaattcagtaagatgctgaactctgcgtgtttagtctttggaaacatgtattaggagaactttgaagactgatttttttcactgagtgtgtatttccaggtttcatctttattttttttagtgttttttttttttttaacgtggaccatttaaaaaatctttattgaacttattaccgtttttgcttctgttgtttatgttctggtcttttggccatgaggcatgtgtgattcgaccagggatcaaacccacaccccctgcatgggaaggtgaagtcttaaaacactggacatacctgggaggtccctaggttcatctttgttaggattcgttaattgattttcttcaattttctgagttacttgctttacaattactaaactttgcaaaaaaaaagaaaaatttctcaccacgaagtaaggttgtttttatccgtggataatattcaagattgaggttcagcagtaagaaggattttttttctgttacagaggaaa

SEQ ID NO: 42077 - DNA, 838 bp, Bovine  19866881542976
  misc_feature (1)..(1): n is a, c, g, or t
ncgagcgacaacactgagattcatagcaaatggaccatgacaacgcagcggaggggggcggggggcaccggtggaagaagcagcaatgggaaaaaaaggatggggatagtgacctcggtggagacaaggcaaaaggtttgggggtgattcggaagggatgcaaagtacaacaacagagaaaggccaagaagcagctgaagaggctggaaaaacctacgaagagggggtgaagaagaggtgggtcgccggaggcgcccagagtgccgggtgtgggggcggctggatgccaagaaagggacgctttagagtcgggagaggggatggaagtgagagagggcggggagaccagagtctgaggagatagaatacgggcgaaaggaccagaaaggagcagaatgtaagcggactaaggcgacaagagcagtcaggtgtgagggcgcgacctgaagcgaagggggcaaccccggggacaccagagcggcccatgtgggcgggggtgtggagacgcccggcccggcccccttccgccggacagcacctcagcttccccacgctctctacaagcttctccgatgcgggagaggcacgaggggttattacccaggcggtcgcacagcctccgccgcctccgctcccgccactaccgccagctgaagcgacacatgcgattcctcttccccagccagagccgcccgagagcgcgtctaccagcggcggtcccgcgagacaataagcctttatcgcgagattcagtggccgccgggcggctgtcgcgagaagcctgaaggctggggcggggaggaattggagagcatgcgcatttcgctcagggcttcca

SEQ ID NO: 42078 - DNA, 1207 bp, Bovine  19866880617750
  misc_feature (1)..(1): n is a, c, g, or t
nattctttcttgaaataataaaaatatacacagggttattgttaccatctttctaaattccatatatagctgtatctactggttcaaagtgaattttaaatatgtaaaatacctaataattttttcaaacaaattaatgttttacattatatttataatgaggtgttcataaatgtcatgaatgtatctatacatttacatctatttcttcgaatataaatgtatttggtgtgtgtgtgctaagttgcttcagtcatggccgactctgtgtaagcctatggactgtagtcctccccagttcctctgtccatggggattctccaggcaagaatactggagtgggttgccacgctctcctccaggggatcttccctactgagggactgaactcccacctcttaagtctcctgcattggcagggaagttctttagcactacctgccatctgggatgcccaaatgtataatatcacttcataattgagtccttagctagttgtccctcgatacttaggcaacctaggaacattgtttaatattttcaggtatgttccttacctgagaagtggatgcattaagttaaatgcttctaaggccctttaggagtcaaatactagttcaaaagaaccttcaacttagttgtaagctaattaaaagcaggcttacttagataaactatccacatggtttcatatgatctaatttgctcaatcctttacatttcaaataaatatgaggcactattacaaatgcacattaccaatgtttgtcttccactgactacttcagtattgtatagacctattttcagactttccagttgttttcttattcttttctcacctcaggtagagggcaaaattgaaataaagaaaagtgtaaaagccattttacactggggagttccttacaattatgaccataattaatcacattcatccattgggagaaaaaagaacactgtccaacaaaaggaacaaacctccacaatgacttagattttcttgccagagtgttaagagacttcagtattggtagtagaaaaaaaatgaaaaggtcttttcatagatcatcattgaattaaaaaaaaaaagtgattgctataatcaaaagtaatataagcttgtgtagcagtagaatgacattttataacctaaaatatgtcaaccttatatttgagtctaattaaaaattttcctctactaaca

SEQ ID NO: 42079 - DNA, 805 bp, Bovine  19866880898902
  misc_feature (1)..(1): n is a, c, g, or t
natctagtatggaagatctgcttagatgtgataattaacaatattataatgaataatatctaaggtaggctatatggaatcagaaaaaacaacaacaacaactttctacaggtatggaactaaggtacaccaaagcccaccccactaataataataaaatgagatggaaaaaaattttctaatatagcaatatgctgaaaactaataaagagggtatatattataggaattgttaataatggcaagatttaagtcttcagtggaatccttgaagagttgatttttctagaagtttgtaaagtcgagtcttcacaacagacacatatcaaagacttgagctcagactatcaaccttacacattcactaagcaaggttctgcttcctgagatgagactctatggactcacacaagtacaaggatggctcacttctcaaggttaaaggcattctagcctcaagctcagcagctgacaactgcattgaacgtgaatcatattttattttgtctttttagaggaattctgccaagatgaactataaaaataaacacaaataggatttatgagagtttgtaggatatgccttaggccaactttcaggatcaatgaatttgtttctgactttaatgtttagaatgactcatttatatgtcttggagtaaatagtttgtctaatgttatccttttagaacatataataaggtggaattttcttcatcaagtcaaagtgtttattattagaatcaagttagagttattgactcttctcaccaaagttgttataaatcctaagacagtactgaat

SEQ ID NO: 42080 - DNA, 1685 bp, Bovine  19866880999561
  misc_feature (1)..(1): n is a, c, g, or t
ntggttttatataaaagatgtaatcaataactgatagaaaaaacttgatttttcttctttagtaaaaaaggatttgtgaccaaacttgcttcctccaatatagaaataattgtaatgtgtcctttatattatatggactattttgaaggttaaaagcaattgaaaatattgatacaatctaatgcatagtgaaaacacctgtaagcttatattaacataaagaattgggtagtttattattatgaatgattatttcataagcttattaataagcatatttcatttgttaattgcctttcagttaagaaactgtacttaatgtctaaccaaatattgatgattccgtatttattttctcttgttccttcttctataaaaagtaatgaaaacatgccagtaaaattatcattattctttaaatatttgtagacgctcagaaagtttctcctgttttataatctcaaagcttactagctgtgaatctctttagttttttacatttgatatagttttcttcctgaaacaatccctttcatattttatgcatcacttattttcacttaaaaatgagaaactgtgctcatattcacaatgtggggagctgttgccatctttttgtgccatcttcttgagtaacaaggcgctgttcttttctagacgagcaataacttcattcagattttaaacaaatgtgattttggccttctcactgacaagtttagattaagtcaaatcttccctcatgttttgctttctgcagcttcagaacccacctgcccatacaggagatgtaagagacacaggtttgatccctgggtcgggaacatctccaagacaagtgcatggcagctcactccagtattcatgcctggagaatctcatggacagaggagcctggtggggtacagtccacagggttgcaaagagttgaacataactgaaatgactcacattaattaatgaattactacttaattaatcaataacacattaatttaaaagtaacttcactcaatgttttcttattatatctcatatatgcatatttaaatgctaaaattatacttatttttattgtatactgcaagtaaaacaatacgacagcatatattgtttcctctaaatccagtcttactgccagacctacctaatttcaagggccaatagagtatccatcttcaattctccccacattcctacatatagaaatgtacaaagtcagggttatttttagaaaattgaaaactgatgctaagcatattttacattttaattttcaacacatgctcctcttaaaaaatcattgaaatgtagataattcatttaatatttgtataaacattcatggtatggatatattaatatttactcaaaattttcccttattaatgagaatttactctttttgtttttttcattttttgtataaaaatgtggtttaaataataacccttaaattcatcttaaagcactgctacattagtatctaaagtgtacattctctaaatgagatcgttgtgtcaaaaattatgtgtatcttaaagtttctcatagttttacccagtgtgtacgtgctcagtcacttcagttgtgtctgactctttgtgactgcctggactgtagcccacaaggctcttctgtccacgggaatatccagcaaaaatactggagtgggttggtatttc

SEQ ID NO: 42081 - DNA, 952 bp, Bovine  19866881842086
  misc_feature (1)..(1): n is a, c, g, or t
naaaaaatatttttttggttgtgctgggtcttattgctacatccagcttttttctagttgcagcgagcaggggctcctctttattgctgtgctctggcttctcactgcagcgatgtcccttgttgaggagcacaggctcttaggcatgggggcttcagtagttgtggtacgtgggcttagttgccctgcagcttgtgggatcttcccagaccagggatcgaactggtgtcccctgcattgcaagcagattcttaaccactggactaccagggaagtcccaatttttacatttttaaatggttccccccaaatcaaagaataatattgcgtgacatacgaaaactacattaaatctcagtttcaacatccttaaataaagttgcactgaaacatagccatgctccatttgtgtgctgtgtacatgctacaatggcggtgctgaatgcttgcaacagagactgtatgcgctgctgctgctgctgctgctaagtcgcttcagtcgtgtccgactctgtgcgaccccagagacggcagcccaccaggctccgccatccctgggattctccaggcaagaacactggagtgggttgccatctccttttccaatgcatgaaagtgaaaagtgaaagtgaagtcgctcagtcgtgtctgactcttagtgaccccatggactgcagcctaccaggctcctccgtccatgggattttccaggcaagagtactggagtggggtgccattgccttctctggtatgtgctgcaaagccccaaatatttactttctgctcctttccagaaaatgtttgccaatctgtgctctccacctaacttccacttacaagtgataccggatttagaggaagaggataaacaacacttagagggaaccttcacactcagctataatgtggaatattctggaagaccactgacctggtcattttaaaaacttgt

SEQ ID NO: 42082 - DNA, 1022 bp, Bovine  19866881845340
  misc_feature (1)..(1): n is a, c, g, or t
nttaacaccaataggtaaagctacttagattactgtacctcattcttctgcaaggctatttgtcaaaacgcttgattttctgatccttttcccaataaaatagagtgcagtcagtggaaaagcattgtgatgttaaaaaaaaaaaaaaaaagtagaatacatcttttaagcctttcgatgcttataagaaactacacaaattcattttatagacatgcttttatctgtttgtaattgaattgaaaattgcagtgagctacttaaaaggaactctattgaatggattgttttatataatagagcaacttcaagtgcgtcactgtttactagggctcctataagcctttagcattgcagataatatacatggaatcagaggtcaatatatgctaaaaacgtttaagaatatagttactgaacagcaattacagacagtgtgcttcttagtaagactgaaaagaagggatataataagcactgtccctggtcccaaagcatttaaaatcgaattactttgctggcagtacaatatatcatcatagttgccttatttaggaggttctgagaaaactgaaaaagaaaggataatgagtcatattttaaaaggttctacattttccctggtagctcagatggtaaagaatatgcctgcaatgtgggaaaccggatttaatatctgggttgggaagatcccctggagaaggggatagcaacccactccagtattctttcctggagaattctgtgtacagaggagcctgggattcaaggggttgcaaagagttggatacaactgagtaactaacactttcagtttctacggcatgctttgatgaccaagcacacttatattcataagagagagaacgagacacaaggagacagagagagagtcagggagggagagagagagagataaggcattcattcaaggaattggctcatatggtattttgtggtactggcaagtgcaaaagttgtagagcaggccagcatgcggaagcttagagaggagcttcagc

SEQ ID NO: 42083 - DNA, 1603 bp, Bovine  19866880347357
  misc_feature (1)..(1): n is a, c, g, or t
naaatccttaagtttacttgtgagaagatgaactttttttttttaatgtgtaggttctaaaatttaaaacaaggaattgaaaaaaactgttcaggtctgcaggatggtacatccgtaaaagttttaaaatataaccaatttgtgtcctgttagaaatgataggtacagaggtttacatctaaggaagggatagtcagggagattaggatggacatgtacacactgctgtatttcaaatcgataaccaacaaagacctactgtgcagcacagggaactgtgctcagtgttatgtggcagcgtgggtgggaggggagttcgggggacacctggatacatacgtacatatggctgagtcccttcgctgttcacctgagactttcacagcattgttcattggttataccctaagacaaagtgaaaagcttttaaaaagtaattaaaagcaggtttagctggaggggtagaagcactgctgccccctttttcaactgtggagccagtgagatgagtggtttaggtgggaggtgacatcaggattccagggttctcagaagctttcagtcctctgtcccagtcttccagtgtgcatagaggtgcatgagggggaaggtgccaaaggctaattatcttgggcttgaatctcacttctctttggcaggctgtttggccatagactattacattcattttgtatttcttgacatctgggccagtataatatttactagatatgagtggtttataaaaaagcaggctcagagatttttattatatttagtgatctcactgatttatactgctaggtagtcgctaactagaacttctaaataataacctgtaaagattaggaaatgaaccctaaattcatttccaattcagaaatgatcctgaattgtgcttggaaccaaaccttgttcacactggaaagtcaggcgttggttttgggttggtgcacaattccatcttggtgggcatagaggaccttatttttccgtgaaattttcttaaatttcatatttccatgaaatttaagaatttgaagtgtcagctattctgtgaagtcctgtttttaaaatcaatatgaaaattaattccttacctttttgttttcctttagaagtacattttggttatccatgccttggttaaaaacaactatactgtgtagtagtgggcttacgtgatgtccttcatttattttttgatatttgggtgtgctgggacctagttctggcactggggatcctcagtgtaccttgcagcatttaaggtctttagttggggcatgtgggatctatttttcaaacctggggcccctgcattgagagcttgaagtcttagccactggactaccagggaaggtcctgcatgtggtcatttaatggcttaataagaccatagtcctaggacaggatctcttgtccccttctcaggaacccaaagcagtgagtcttgtacctctagatgccattgtttgtgggggtttttttaccctttgcttgcagaaaataattgccgctcttttatgccaagaagttgctatttttaagctgaagttagatagctaattgggtagtttagaacagtggcttccaaactttt

SEQ ID NO: 42084 - DNA, 2106 bp, Bovine  19866880479784
  misc_feature (1)..(1): n is a, c, g, or t
ntgtacatggtgatactgacttcccatctcagcctgtgcctggccccctccctgcaacttctcaagggcatcacacacatatcttggcacacacatgtatgcaaataaatgcacatgctctcaaggtcactgacacgtgtacacactcacacacacactcgtgggtctctagcctttttgtccctgcttttcacttctgccatattgaccattactgggcatggttaacacctgtctatcttccagctgttgtgtgtgcgtcacctcctcaggcaagtcgtcaaatccccaagcccccagcctggcccaaagatgctctcagagaatcataactctttcccagggccctggtctcagcatgtggcatgctcacccatgtagctgctgaatgcctctctccagatggtacttgggaaggataaagtttatgtctagatttgccatccttcctgccctgcattgaagacagtgctgacacttagtaggagctcagtcaactgctgactgtggaatgaatgtgtggatgggccaccagcctggcttaacccaggaaaggaaggacaaggcacagagcagaatccaagatgctccaaacagtttaagttgtcccctgacctctttctgactatagctaacatcttggcagaaataaccacagtttggagtcagacagtagagtctgtgctggatctctaacttgctaagtgatctaggatgataataataatagctcacatttgttgggtgctcactttaatggagctggccttcgttatacattatccccatttcacagatgaggacactgaggtttagagaggttaagtagctttcttaaggtcacagttagttagtgtaaaacagatccagtatcagctgacagcgcaggaagacacacagttcaccagaatgagggggaaggaatgtctgtttgtccaggccattcagggaagggacatcattccttccatcagagaggcccaggaagaatccagacaataacacacagcttcttcattattacccagaagccccagagattatttacatgatgtctggcatgcatcaggggctaggacctgtctgatatggtctacctaccctgccatgacaatgaagaaatccagtcggttccatgtgtccccaaggtagcacttcttgccaaaaatgcccagggccaccatcttgagcaccatctccatggcaaagaagacaaagatgaagtcatcgaagacctgcaggggcaggaggaagacaagaagcaagggacagcgtgaggtcccagatcaggacgcagcgttggagccacggtgtgaggtgggaacatggggatggacacccgggcccagggagagacctggaaacatcttctcctggttcgggagagaacctcagagatcctagtccaaggcattcatttcacagaggaggagactgcccagggttttccagccccctctatttgttccctaaaagcaagcataatgacaagggacccagatgggagtgggcaaaggggggtctccctaataattgccatgccctgggctagacctttgccctgcattctctcttcagttctctgagtgactccttgaatgctgccattttacagatgaggaaccgggatctcagactgcttcagaaactcgccacagttcccacagcagtgaagggaagaaatgacactcaggtctccctgactcctaaacacacacggaaggagctttctcaaaataggcctgacacctgcagtgggcacaggtccctgtgatgtcttcctctgctcggaaaggaaggccccaaatatggccacaatcacgggctctgtgagcgtctatttgctgaggatgggacctgggtggaatccctctttccagaatcaatgaaggttgaagacaattcaattcagcaaatggacactgagcaccttctctgggtagctcataggctgagtgttgggggcccagagatgaatgctcgctaaattcaccacctagtagggaagccagtctagtactcactgaggttaataatgggttctaactccacccaggaccctggggccggcccaggagcttgttacccacttggaccccagaccca

SEQ ID NO: 42085 - DNA, 380 bp, Bovine  19866880509867
  misc_feature (1)..(1): n is a, c, g, or t
nccttctctggttcaccatcagtgacctctcactgcagagattcccattcttcagcttcctgatttggtaggatgtattttactatgtaaacatagccccctaggattatggaacccaaaagcagcatgtatctctccatccacatggagaaagataaaatagtccagaaacctctcctcaggttgcttctctttgtctggttttagttactcgaaacagggagggggtggggtgggcacggagtaagttgtaagcaaatgatgggagacttaggagtgggcacagttgagctgtttcttttttttttcctcccagaaaggttttttttttttttttttaaacctgttaaaaatgttcctgcacctaaagtcatactaag

SEQ ID NO: 42086 - DNA, 1590 bp, Bovine  19866880513831
  misc_feature (1)..(1): n is a, c, g, or t
nttgttcaaaatatggtcaagtaattttttgatacaagaaatcagtctatgaaaagtctaaattctgaaggtattttagctcagattttcatcataaaaaaaaaagtcagcctgaacacatgctttgccagcagctctcctgtgctgtcaccacatgttcacccacttcctctctgtgcctgtgaacttgatgccagagacagtggcagaccctgctcctgcccttctggctcccaggccaacgcaggcccgaaggcagggaggcaggactgagtagtgtggtgctcaggacaactggggggacatcaaggtgaaaactgggagaacatctgagctggagaggagatacttctgctttatctcactgggaaattggctcagatgcacaaaagaagacacagatgatcactgctcctggaaggaccagggaaaaccgacaggaatcgtttggcttatcatcagaaggcctagaatatatgtgttcacaatttctttatatcatatttaaagctttatatgatattttatatatcatatatacctttatatcatatttaaatcatatgacagaattaataaacttttatgttccaaatcatgaggaggaagaatggtgtatatatatgaatggtatatatatatactacatacatatatacaatggtagtatatatggataatatgcattaatagagactatatgtattcgtagcacaaatatactatatagaaaaaggtttaggacacagactaaaactcatttttatttttgctttagtaaaaattttagacttttctacaatgaaaacagattacatgtatcagaatataagaggaaaaacagcaaatactctcactgctctactagtctactacacatccctagaacctggcaataaatacttggtgaatgaaaaacaaatcaattcactggacatttcagaagaagccaggttacaaggcatcctttgcacagatgaatgccaagtcctggctccaaagtcaccttctttcatcctcagactgtactccgctaacttctttgacccatctgtgcccatgctgtatttaccactcagtaacttgttttgcaggtgatcagcatccaccttgtcttcctgactgaaccctacagagcgaagaccacctcccacaaccgcatgaaaatctgctatttttccaaagaaaagcagaaaaaattaactagatgaaaaaaaccaaagtgggtggcaaaaggcaatctgttcagaacctgaaattaacgattacaaaacaaaatgataccccagaaacaaaaccaccatcttctggacggtaatacctggaggccaactggcattgctagatttacttccgattttatttgttggtggagatttggcaggtaaccagctatcaccagcaggacccgtatggccacccagtgtgtcacctgggatgatgtcaaactggttgtatggtgaccctcctcgggtcttaccaggggccacaatagcgcctgagaaaaaagagaggtgatgagctcacagcagaaaggactcctatgaacagaacttgctgagctttcattcagaggaactcagtctccag

SEQ ID NO: 42087 - DNA, 1288 bp, Bovine  19866880528705
  misc_feature (1)..(1): n is a, c, g, or t
ntggtctcttttacttcatccctgctcaccttggtatttgacatttgctccccaacccacatgtcttcccatgtgatgggagaaaggaattccagagccttgaaatttgggggagatggcacagagtaaaatgcccttgtgttttttatgtgatgacgatgccctggtgccgagtttcctagttcttcttttgacctagatttcctgctcccctacccccgccaccctcctcggcacacacatacccgcacgtccttagcaataccaacagtcacatttgatgttagaaactataaagtttccttttctcagcaattctagaactcaaatatgggacacacttttatttcttcagaacaaatgatcacattcaaaacatacacatagaacactttaaagaacttatcaaccctccgtgtccttcagacctggagttctccttcataagaatatcacgttggacagaattatatttaaaaacacagcctgtactctctggaggacgtccaagtatgagggagcatttgatccttgcatcagctccgtgaaggggctgccagttattattgcccccattttgcagatgataattgactcgcctgaggtcagacatctagggaaccaaggacccaaggaccaagggcttctccttccaaactcaggagtggtattagaactaggtcatcactgcttctcaattccattgctctcttcaattctcttcctgtctctggaaggcagaaaccagaggcttcaagtccacccactttttttgatgactctgaaatccagctccagccctcacctcactgctgaacccagacacacatctccagtgctccctgagctttccttctctgagggtcccaggggcaacttgattcacccgcaggcgatctgaggtccatgagctttccctcagacctgttcctcctcctgtcttttctattttggtaaaagcatcaccacccactcagtctcccaagccagaaatccagagccatcccagaatccccttctccctcagctcctcgaacagtcacgaaatcctgcctgtttgtgcttcctgattcttctgaaatctgtcctcagttccacctagcccagatctccttcgtctatgcctggatggctacgctcctcttcctacactctctcccctgacttcacccccacagtccatcctcaagttgtgataccccacgcttttcttaacactgattctcactgtgctgtttccctgatgaaaatcctttgatggctccccgtacatttcaagatagaaatc

SEQ ID NO: 42088 - DNA, 1068 bp, Bovine  19866880538953
  misc_feature (1)..(1): n is a, c, g, or t
ncctccttgcctccccacccccgcaccccagagaacatgctaacatccaaccccaccacctcctaaggtgcacgtcctctccaccttggcctggctcagcttcctgaacccagggtgcctgttctgcaccacacctccttctgctgctgcaacagcagtgcagacaatgacagtgacagccgctgggtcctccaggcgggaaggacagtggcgcacagccaggcgataaactatacgcacagcgcacggcagggctaattagctgctaagggggcttcgtcagtgtttactcggaacgtgtcatggcaccccaaggagcagtccccactggccctgtgtggaggaagttgggatgtctctctgctgtcagccctggctgcctttggagggggggatgtggctgggcaacacacagtgtcaacggtgctgtctgtgtaggactttaaccgagactgaaggaagggggacagattgggaggaaacgtggcagggctgagtagagtaagacagatgtggcacatacacacacctgttctggggagtccaaggcggggacaagcttagttaggtaactagaatgaagatggaagatgctattgtgtcagtcacagaaagcaaaatctttggcaagtcaaccagtctctctgggccaaagtgtcctgtcaaacaaaaggaatggttttgcaggaggtatgcccaggaaagcagcccagggaggagcacgtggccttttcaactgagctcaaagagctctttttcaactggaacgattttaacccccagggacacttggcaacttcgggagctatcttttggtggtctcacctgaagggtgctgtggcttccctggtgactcagacagtagagtctgcctgcaatgcgggacacctgggttcgatccctgggttgggaagatcccctggaggaggtcatggcaacccactccagtattcttgcctagagaatgccatggacagaggagcccggcgggctacagtccacggggtcgcaaagagctggacatgacagagtgactaacacttccgttgtgaaggtgctactggcggt

SEQ ID NO: 42089 - DNA, 1598 bp, Bovine  19866880543152
  misc_feature (1)..(1): n is a, c, g, or t
ncacaaaaacaatactgacttggcataggcaggcccgaaaggtgtttctgacatctagttcacctctcctcccctcacatttccaggtgttcacatattttatggtaagaattgagtgctaaatgacctaaccctctgtacagcagacttgcttaagactgaccaccttttcagaattccaggtgtctggaaacaaggcattttggcatggtaattttggaatccaaccttggttccttagtatggtgactgagacaggtttcgattaaatgattaagtcacatggtgtcctcagggcagtgcccagctaataggaagcaattagtctgtgctacctagtttgacctgattgaattctgctgagttgctgtttcctcatgaaacaggctttgctatagtactatccgtttcactcagcattctgagaagtcaatcagacacactacctgggaatgagacagtgtattcatctccttccattcttcccctctgctattctagcggtgttgcgtgatcacaggtctaacaagtctccagcagtgaacaataagtaagagactgttcagatgggaacaagctggcctttagcgtaaggctctcccgtcctcagtggtgagcacagcaagcagggcgcaggcgcaggcaaggtggcttcctgttcagaggtggcacgcggctgccctcccaggcggtggcagagccccaagcacgccttgtctttccttcagctcccttcaagtgtcttccctcccaaaggcacatggggcgaaaacaaggcgacaaaaaggcagcaggagaactcgagctgctctcagactgtctaaacccagcagcgcagcaggtggcaaggagcctgagcccaccaccgactgtcaacccgagaaccccagcaacacaagccacaacaaggtgagatcgatcaagtggaggtcctgttcagatgctgaatgtcagtcagcttttgtgtgtggactagagtgacggagaagagtggaaaaaaaatataaatattcaacaaatgagcaaactaaatgggcacaagaaaacaggaaaccacaataaatgcttagcagccaaacacatttattagtcttttttctttttttttttttccaggaacccaaaaatattttgtagttataatgtaagcaactgagttgcacataatacaatcatatctttccaaaataaaataaaataaaaaactaaacaaaaacaaaaataagctgtttaaaagcccaaaaaaaaaaacccttcagaaaactcttatatatgcattacatcatctctcagttttaatgaaatgacgacgacttaattccttattactcaacctgtcacaatccaataaaagaccaccctttagttttttttgtttttgactttttttttttttgaaatccagcatgagaaatacagtacctgctatggcaaaaaatacacataaaatgcaacttttcagcttatttgtacattagtagagtttaacattttattgtttgttttttaagtgaaccagtgattttaagtaccactatactaaaaaagtaaaataaaatatagaaaaggggggcccagcctgccatgcaagtgcacct

SEQ ID NO: 42090 - DNA, 1731 bp, Bovine  19866880611538
  misc_feature (1)..(1): n is a, c, g, or t
nactgtactgaggtgcctcagccttactggcttctaagaggccctggcctaaatgccacaatgccaggccaggaagaccagctgaaaatcgcacactaccccctcttcatatgtgtgactgagcagatctgcagagagaactggggagtggacagcagagaaactgccggaccacaggggctgagctggccccgcctcgggccaggttgctggggggcctggagagcccagggctacggcaactgcgaaagcaccacgctcagcctctcccagcctcctacttctgagccaaactctggtcctcgcctctttccttctgcaaaacgctgggcaccggcagcaccttggggagggtccagatgctccggtggcgcggacaccggcacttggtggcagtgggagcaggggagccccgagcatcctctgagaggagcctggcctcccaggtgggcgggaggaggggcaggggaaggaagggaggacctggttcccgaggcgggtagggggccaagggacctgatccccccactccctgagcttgtgtgagattaaacacttcctgggaactgtttccttatgcaccaaggcctggcgacatggccctgcttgttctagaggggaaaagagcggggaggtggcaaacaaggtggggggagggggctacacctcagctcaaggtgtctgtgtggagagagcgcccttggtgggcaggttggacacctctggcggccagaggaagggaccggctcctaagtgattgtgccaagggctgtctgtgcctcccctacaagaaaaagtgaaagtgaaagtcactcagtcgtgtcccactctttgtgaccccatgggctatccagtccatggaattcttcaggccagaatactggagtgggtagccttttcctcctccaggggatcttcccaacccagggattgaacccagggctctctcattgcaggtggattctttactagctgagctaagcaagcccaccaaatctttttcctgtctccaacccaaagcaggcccagttccctcccctcccctgacatgcaggaggctccagactggaagtcccaagtctctgtagccttgagccaggccgtccatcctgccccggcttctcgctgagccagcccagggtgattctcactctcttcagagaagccaagcggggtgggagaccacgtgttgaggaggacgcagcacagtgtcccgggaagaacgctggcctgtgacgggacacctctccctgtccttacagaggttcgggtgagctggcctcatggctgaggaccctggagtcgtaaaagcagcttgtctgcctgagctccagcccctccgttctgcctctcagcttctcggttccagcacttgtgcacacttggtgaaatatcccttctgtcatcaaatctcaaagggacatctggccttcccagttggacggcaagttcaaggatggatcatgcccttggtccctccgcagcagcttccagaaggctggtgacgtcagaagggctccaggaggaacggggaagaaacagtgctctgggtgcagggcctggcttcgtggcccccacctcaccccggtcgccaagctgcccactgtcagagtgcagccctctgtagaccgagtgccaccaaccggcacagccccctgagaggccagcctcggggggagcagaggccctttgaggtctgaggcctcgccccattggagcgagaaggcggga

SEQ ID NO: 42091 - DNA, 3962 bp, Bovine  19866880612505
  misc_feature (1)..(1): n is a, c, g, or t
nctttcttcctctgtcactgcctccattatatgagaatccctcccctcctccacccacaccccctccatctctacccaagccctggagctgaaccctgcagagcgtccatccagcatggctaagactggccagacaccctgtacttctctcctctcctgtggctgggttacagctcattgccagactccagcaggtctgtgcctgggctccccctgacccctgcacaagtcagggtggggctcagcctcctcaggcctgtccaggcagaaaggctcctgcagccagcagcctgggccaggcctcaaagggcacatgcttagacgcgggtgagtgggctttccaggccaggctgctctcctctctaacaccttgctccttcctggctggttcctgctcaatcgtagaacacagcccactgatgttcagccccatccctccctcccaaacctagaatccccaagcccccaagggaatcaggggagccagaacccagaagggcccgagggcctgggtcattcatgggttaacttgctgacaggctcattgtctttatccaaggctagaacctacattccaaggggacaggggggtggcattcatgccccaacagtgccaagcatctaggaggagcaaaataaatgtctgtctgattgagtaaacctctctaggtgctgcccactctgacacccaaagattcttgagtgtccccacatgaaagctctggcccctcaatttcaaagccctttctctgagctcagatgcagcaatgccagtcagactctcagccagaccccacccagcagtggggtgaggatctcttgcttaatggaagattgacctggtttccttggcaaccgcttccctcccatccccggtccttgctcaccttgggatactgccttccctcccgcctccctgtcagaccctccttgccccaactctgctccttcctgccccctcaaacctctgccactctcccgccacagcctgtaattaacttcagtcgttgccagggcccccttctagcctgagcatcgctccagcagcagcttcatcattaattaacttttttgaagttcaaacgttctaattaccagcaaacgtcccccatcctctttgccttttcccctggcctgtcgtgctctctctccttccagccacctcttctgctccctttgcccttcctgccagcttcaagttcaaagtgcacttggcaggtgtcttccaggaacctggcactcccacttcttcctcaccaaggccctgagcagtgggggtcagcagacccattttacggattaggaaaactgaggttcagagaaatgaggggcctctcccagctcacacagtggggaagtgctggagctgagattcaccccagacctgctctcctctgtgatgcagggcttgtctctgcccgtgtctttccttgccagcctctgaggcctcagctcatcttcagcacctctcacctgagccctgcccagcctccctgctggcctccagctctggtctctgccgctccaatctgccctgcatacaatccccaggtgtttgttgtgtggccaatactatccaagctctttgcaagcattatcgcatttaatcctccagccctattacaagccccattacaagtgaggaaacagagtcacaaaggggaacacaattttgcccaaggaccctagctggaaaaaggcagagctgagctacaaaaacagagcctgctgttcttgccccatttcgtcatcgccaaattaatctggctgaagtccaattctgattagacctctcccctattcaaaagccttccagcctccctagcctgacacccacagcctcctacactctgacctcaatgaactcttctggcctctcccgccagccttggcatgcactgaacttcttgctgtccccaattataccctttgaatgagatatgcatgcatacctttctaccaacatgcatatctttctaccaactttaccaggcaaactcctactcatccttcacagcccaggtcatctgtcacctcttctggaagctttcctgaagcacctttccccactcacctagtggtggctcagcctccttcccaaagtgctccccacccacctggtctagctcatattgcgttaatgaacttggcagtagtcatgactactgcctgccaggcccctagggacatggccctaactcttctcatagcccacagggagcagatggagaaatggcctggagagctggaatgacctggccaaggtcacagtcaatgagatgcccgaacggtgtgacttagtggtgccggagccgctgccacagggccacctctggtgcacgtccctcgaaaggggcagatggagcggctttcacctctagatggctcagcttcagggatggacagtctcagccctgccccaaggcactcagggaaatcccagatggcagggctgggccctttccaggagcctgcgaggctcagaagtcaggccagagcgggcatcgctgtctgcagatcctgacacactccccactggctcggggatcaaaggcataagccctccttgaagttaaaccagaccacgtggcgcggggaaggagagtggtggaaggcgtgaagggcctggcccagcgcccagagctgccatcgttagtcacaagcaccgggcaattctgaaagccgtcaagcagagctccgggactctgggacagcacaagagaggacagaggcccagagagggtggtacaggattgctgggtaacagggcaggctggggcctgggtgccagctccaggtgggaagctggtgtgaagctcagggccccaccggcacccaaggctctgtggttagggccctgccactctgcccccttggccgcccagaccctcacgcctctccaggtgacctttgccacagaacaaccccatcccggccctcagagagcccctgatcccatccccactgcacagaggggacacagaggggcagagagcatcccagggacacgatgaccctggagcggaagtgaccctcaggaaagagactccccagccacagggtccctgagcttttcacttttctaatgaaatagcaaatattaataatatgtcatttaaaccttacagtaagcacatgaggaagggaccccagaggccccagaacacagaacccatgtgatcgtggacaagaaccagggcttgtcatgtatgtgcaacagggaagcccctatctttgtccacctcttctataacagggtccagggtttctcattctttgactttgggcgaaaaaaaaagccacctcaccagcaaaggactgagaatctcagactggtgttatctgctgattacttaacatgaccttgagtaaggacaagagatgcgatcacaaaccctttagaccatggctgcctcccaaggactgaaccttcactcacaggctttaaatacaatcaatcaacaacttggagagtcgtccttcaccttcagccgagtcccctcaactggcaggtgctactgttaccccattttacagatgaggaaactgaggcaccagcattggctccagggctccagccacagccacctagggtcataccatggctggtatgtggcaaagtcaggatttgaacatgcttctcctgactccaaaccccatgttctcagccacatgctgtggcctcagggaacagggcctggactggcacatgctcagtggaatatttgcttttcccttccgactgggagacttccctggtggcttagacggtaaagcatctgcctacaatgcgggagacctgggttcaatccctgtgtcgggaagatctcctggagaaggaaatggcaatccactccagtgttcttgcttggaaaaccccatggacagaggagcctggtaggctacagtccatggggtcgcaaagagtcagacacgactgagcgacttcactcactcactca

SEQ ID NO: 42092 - DNA, 612 bp, Bovine  19866880623922
  misc_feature (1)..(1): n is a, c, g, or t
ntactagagcgtttgtttggtctcaaaagtgcctggcccctcttggagtctctcctcaacccttctccctgtgggtcatctctccctgacttccttccctccctattcccaaaccccatcagtctggcatctcaccaagatcctctgtttttatctcacctgataggtggtttcacgaaggcctctcacgacaccaggcagagagcttgctgatgggcaaggagcttggttgcttcatcatccgggccagccagagctcccccggggacttctccatatccgtcaggtactggccaatcctgactccgccctgacctactaaagcactaaaacgacaaggtgacctcttaaacatgacctatccctcaggagcatggtggcaaggggcccgggcacaacgtatcaatacattcacctgcctccccttccagccccggtgcttctggaaagacaggatttttatcaacctcacctctgtgtgtttcacagcaccatgtaaacccaacaggtgctgggtgagtgtctgcggaaggggaatgggaagggagaaggaacaagaatttccagaggtccacatccatctttggagttgcaatcttttttttttttttt

SEQ ID NO: 42093 - DNA, 1161 bp, Bovine  19866880670738
  misc_feature (1)..(1): n is a, c, g, or t
ncttggagaaggaaatggcaacccactcctgttcttgcctggagaatcccagggacgggggagcctgatgggctgccatctatggggttgcacggagtcggacacgactgaatcgacttagcagcagcagcagcagcagccaggaacacccgaacatctcagtttcccagaatacaccagcagacatgcctcagcatctgtcagcctctctccctgggacgcccttcccagctttcagatcccaccccagggcatctctggctcgagggggtgctgttgtgtccttgttcctcaggtcatggctcagagccctagttaggtccctagcccctcatccagcacctggcttggaggcagctccccctgccagcttgtcaaacaaataacttgagggacaagatcagaaaaaaagaaaaaaactaggagctgacaagaagcaacataaaatgactgagacttaacatctttccaggaaatacccctcccaggagatgatttctgagtgttactgataaaaatagggtgtttcctcagtctttacaagggactcacaggggctttcttaaaatgtaatgtaagatgtagctaatggaaaggaagctgagatgctggaaatggcaactcatctgtcaggaggcagctctatgatgactcaggcttgtgtcgggtggtaactagaccaccagcttatgctactgtctcagcacccagcacatagtaggtgttcagtggagggagggcaggcgggagagaggaaatcatggaaagagaaaattaggggctgataatgttaacccttgactctggccagtgttttatgattggtgggtcgttattgcccagataccatcacacaattcttatgagaccagaataaagtttctttcttttttggggggaggggattgcactgggtcttcattgctacatgtaggctttctctagctgcgagcagggctactcttcattggggtacgcgggcttctcactgtggtggcttctctcgttgcagagcaagggctctagagtgcaggctcagaagttgtgatgcataggcttagttgctccacggcatatggaatctttccagaccagggatcgaacccatgacccctgcacggctggggatttgtatccactgagccatcagggaagtccaag

SEQ ID NO: 42094 - DNA, 2269 bp, Bovine  19866880687124
  misc_feature (1)..(1): n is a, c, g, or t
nttttcttgatccagaatagtagacagcaacattcaaatggattttaaaattacaatcaacaaatattcactaagcgcttagtttactttaaggccctaaatcagtgctatgggtaatataaacagttattctcaagaacttcaagttcagatgggaagatggaacagatgaacacagagttgtaaccccagggaacatatctgctcaatacgtggaggagaaaaacaatgctgggctctcagcaaagactgtgccaagataagtcttgaaggattgatataaatggatgggctcagcaaaacaggaaaatacaaaccaaggttcaacttgaactctctctggaccaaatacatttccctgcaattgtggccgaacaattcccggggcagagaggtacaggaggccatacaggacaaccgggggctgacccaagttttagataccatctgttttgcagcagatttagtaggtagtattcaaacgagggtcagaacctgggtgacagcacaaagaatggaagagcagaaatggatgtgagagagaagaaagcacttgggaggcgttatcagtgcctgaatcctgcgagcaggggagatgggaaagagtaaggaggaggctaaagggaagagatgctgcaactaagggatgcacgacagcaccactaagcagttagagtttagttatgaaagaaagacaatttgggggtggggaggaggtatatgttcagttttaaacaagtccaggtgatgcgtggggttacctctcaggggatcatctgcttgtaaaaaaggggtatgggcagttacaggaataagaggtgaaaacgaatttttacatgtaaaggcagaagtcctaggccttcagtcctccattggtacctcttaaaaatcggacacagggggcttccctggcagtccagtggttaagacactgagctttcacttgagggaactaagatccctcaagccacatggtacagtcaaaaagaaaaatgcaaaaacaaaactatgaactctgggtgaatgaggtgtcactgtaggttcatcaactgtgacaaatgtaccactctggtcgaagtcctatgaaagaatgatggagggtggtgtgcagaaacatggaacatggagctggctcctttacacactcactcagacctgcaacaaactctatcagctctttgagtctcagtttcttcatctacaaaatgggataatagcaggaacttccccacagattttggtgaaggtaagataagaatttatgctcaaggcttagcatgctgcatggtctgcaggagcattcgataaatgaggctactgtactgtcggcacgacgcagaagtggaaacaaaaagaaggtgatctgtaaggtcattaacctgcagtgtcttggtaggtagctaagaatttgttttacttgcatttacttggacaaagagcagaagccttaatgacttcaatggcttaaggtccaacttttgcaagaccaacgcgccaattactaatgactggtttacgaacctgtaaggtgttgtgctaagtaagtgacttcaaaggcttttttatatccattaagttttccattcccaactgtctttaaaaacaaaacaaaacacacacacaaacacacacacaaggaactcagcaaatgttgtagaattaaccaaggtcctcttttttcccccttggccatctgcccttagcctttgtctgtaagtggaagaatttttagagaaaagcaagctctaattggctgccttagaaataacaagctaaacttaactggttcttcccatggcccctgattttcttggcagaccggttaaaagaaaagcacttgtgtcatcaggatataacctctgtcctcacaacacccacagctccttgcaatgatgtcaccatctgcctcggtcctaaatggtatttgtctcatcctgcctctgtgagcctgcaagttccccagggacgcggcctatatgagaggtgtctctccatccatgctgacctgtgttgttcagctgctataatttattccttaagaaataaatgccaatttcctttgtacaatgcaacctgatagggaaagtgctagccagaggggaagaaatgggtcacacacctaccctgaagtgctatgaacgttggtaaagggagttgtcagaggcactgtagggccaggcaccaggtgaaggcagcgaggtgttgagggaagaattagaccctttggatgacaaatgaagaacgagatgaaaaaactgcaggtaagtat

SEQ ID NO: 42095 - DNA, 851 bp, Bovine  19866880730938
  misc_feature (1)..(1): n is a, c, g, or t
ntctgaggaaaggccctaactctgatgcttacagctcagtaaaagctgagttatcactgtgctttatacagctttctgtcttgccatcaagcagcacttatccttcagctcatctcttccttcaaacaacaaaatcatctaaataaaaaatacccaagctatccacccgaattaaaacatgaggaaaacatccaggaataggaaaaaaggagtagaagcagcggtgtgtgtataacaccttctctaaagtatcttttttcccttgctaattcaccacaaagaagtgaggcacagctgtttcagctcaggatcctaaagccagggtatcagatttctagcaatgcattcaattttacatttcattataactaaataattcagaagcatctttaaattccttctgatggaaatttacccttatgaaactataacttgccttcattttctctgactcaaatgttagagtcattttcgatttctgtctttcttctccaatatatcatctatgtatccattccctctctatattctgtctttaaacattaccttttcctcatttcaataacctttgagcgggtcctagattcaaacaactgtcttctagaaagcttccctccaatttgtagctccttcatttctacacaaagcaataagaattatcttccaccaacagctgttttcagtaataagaaagctaagttctgtgactaagctgaacatcccttctgttctccaaggcctactatggatccttcttgctagttgtatcaaacaaatttccaaatactgctaataaactgtatttataaacggggcagagtactctcaactatctgcccgcatttttctat

SEQ ID NO: 42096 - DNA, 963 bp, Bovine  19866880784457
  misc_feature (1)..(1): n is a, c, g, or t
ntgtctcataaatatactaggttttgttactttgtttgctttgatgtgtttttcctttgcaacccatctatcaaagaaaccaggctatttgtcccatacagtttcccaaagcctagacttttcttattagacccccatgttggtatttaatacgttgctctgtcctctgtaattcttataaattagtactcagatctagaagccagatcaatttgtataggaacagaaagacacaagcttaatgtagcactaacaaatggtaaccaataagcttttataaagtattactatgaactaatacatgtttcagttactgtttttattggtattcaaactgtcgcatcattggtcaaaaagagtctcttcatgtatactcttgggtccttttttagaaaaatttggttttaattggtggataatctgtttacaacattgtgttactttctgccacacgttaacaagaatcagccacaggcatacatatacgtcccctacctcttgaacctctgtcccacctcccaccccatcccatccctccgggttgtcacagagcaccgggctgagctccctgcatcatacagcaaatttcccctggtttcctcttttccatatggtaatgtacatgtgtcaactctactctccatccgtcccacctctccttccccgtgtccacaagtctgtgctctacgtctgtgtctctgttcctgccctgcaaataagttcatcagcaccatttttctagattccatatacatgtattaacatatgtatttttctctaactcatttcattctgtataacaggctctaggttcatccacctcactagaactgactcaaattcattcctttttatggctgagtaatattctattgtatatatgtaccacaacttctttgtccattcatctgtcaatggccatctaggttgcttaccatgtcctagctattataaatagtgctg

SEQ ID NO: 42097 - DNA, 727 bp, Bovine  19866880790127
  misc_feature (1)..(1): n is a, c, g, or t
ncctgttgaccctagaactagctcctgtcctttcccatgggtgcttaaggccccagccacccacgggctttgaagttgcctgcctctgcagttcctgcagtctcacagagtagtcaagctcactgggaaatatacagacctgtgttggaattgtgataccgccccagtacctgtgaccttgagccctggctggactgccctgcccaccgtgtccccgagctgaggtctgtctgtaggactgtgaacgtggcccttgctgaagaggcctgggcggcccctcagtacctctcctcgcttcaccttccgttctcggcctctgcacctactgctgttagcactttcattagtatccttattgccagcattggttattttttaaaagcgcacctttgggaacagattagcttggagtttttgtggcctttgagtgtggacacaggccaggcttgtggcctctgtgtactgggtttctgcatgcttcccgcatgtgtcagctttccttgtagctgcggctttgctccttcctgggtgccttgcctttccagtggggtgtttctgatttctttttcaagttgtatgaagcagtactgtccaggagaacttcccgtgatgatagaagtgtacttacacttaagctatccatcaggtagccaggagccacacgtagctcttgaacatttgagatgggactgaggaacaaattttaaaatggtattttaattttcgt

SEQ ID NO: 42098 - DNA, 808 bp, Bovine  19866880808904
  misc_feature (1)..(1): n is a, c, g, or t
naaaaggtatcagagctcagtctagttgaataccaagctatcataaagctgggaagtatcattttgggtttaaaaaaagcagtgactgtaaggcaataagctggattttcgtatatgaatcacgaaaatggctcagagctgagctacttctgcagcagtttagggattcatctcatgagttgacggtgaagggcgccaagctttctcccatctcagagcatctgcaccactgtttcctctgcccaaagatcccagatatacctggacagttccctcacttcattcaggtctctgtttacatctctgcctcctccaaaagaaccccccctcactacctgacctaaaataaagccattcctgtccctctctgccctgtcactgcttccctttgctttacaggacttgacactatctgacacagtattttacatctgttttatttaagtgtgtttaatatttatctctggcactagaatatttgctacatgatgagaggggctttgttttattcgctgctttcactccaaagttctgctagatatccaaatttcaaattataaatttaataaatatatttataatgaaagaaaggaagaggaaagcaaatggaagaaggaagaacaaaaatgataacagagaagtagtgaaagagatgcagaaactctaggtgagtcataattggttattttactctgttacttcattttaggtatcagtttgaatttaaggcttctatgagaaaatttcagaatgtgtctctttcaagattgtttcaaaggaccaggtccccaaagaaagaggttccaga

SEQ ID NO: 42099 - DNA, 1061 bp, Bovine  19866880827899
  misc_feature (1)..(1): n is a, c, g, or t
ntgacgatgtagaccaaattagaagttaaactgggtccctacgtgggagctgtgtcaccctctttgtcagattcttccttctcattctcatcttggtttggctggagaacatccttaagtagttttgttttttagagagttcatttgggttttcccatcacatgttaaggaaaaatccgaacgaactttttgaccaactcaataaaaagaaaaggtgcttggatagtgtcgtttttcagtcttgcctgtccacgcatatatccctttgaccttggtgggtgaagggcggtttttgtctgcactgcactggactcgaagtttttctccctcagagccctgtgtgtggtactgtccaaatcgacaccatatattgcagccgaggccactatagatctggttcttctttgttgggagaaacctgctttttctttgctagaagcttgaaagttttctccttaccttcagaattcagacatttcaaaagggcaggtgttaagtgaaggatcgcttctggtggggccttttggaactcaagacttgtgcatccttcaggtcagaaaaaaattattccgtatgttgtttggtgactggccattcttctctgctctctcctagaattcccagtaagtggttatttccatcatctctctattctctgcatgtttcgttcacctctcttacagatttcatctgtactaagaattccttgacttggccttctgaatcactatcaatgtccttttctcaatttactgcccctaatggaagtgctcatctcctctgtgtctttttaattctcaggatcgcttgttgctcttgaatttcttatttttcagagcagcttgtttttatggatgcaatattcactcacatctcttcgtagatacaaattaggctttactgatcctgaagtcaaagtataatttccagaaagttaaaaaaaattaccctcacacaaatcttagaaggaacatgtatattacagatttattcgactcattaatgaggaatcagcaggatggtaattgtcagaaccagaaaaacaggcaaggaaaaaaaaa

SEQ ID NO: 42100 - DNA, 836 bp, Bovine  19866880864778
  misc_feature (1)..(1): n is a, c, g, or t
ncccaaaacaaaaaaccttaaggaggaaaagaagagctaattttaagagaggaaagcatccttgagaccaatgaaatctcccataatccacagtgacagacagggaccagccgaagagcaatttgattaaataaggatatcaggagcttagagggactctctagtttgtgtcacgtttgtctgttagtctttgaaatatatttctttagcttccaaacctataaaccaagtgccttctagctggggagatgattcccatttggaaaataggaaaaaaaaaaaaaatctcagggcaaagccaaggggtccaggtggggctggggatcccaggctggactggaactaagaggctggcagagggtctgcaggaggccctgatggagagagatgttagaagtttgggctgggtgccaccagccttgcagtggatggttatgggctgagcttgagtccatcccaggcagcacaccttccctgcccacgttcctatcccactgcctgctgcccattacctgacatcagggaccgctctgttgctgctttcctcagggaagcatttagaggatgcattgttctgtgtgggacacacctgtgcagggagatggcgtgtcccctgaggcttccgttcataagccacttcctagtggctccaggactggcatcagcaggtcagccgtcaaggaatcaccatcttcggacaagcttcaaaggccccctctggttgcatgtctttacccagggcggacatgccaggggatttatcctttcctggggcttgttgttgtcactgttgtttagttgccaagttgtgtccaactcttttggaccccatagac

SEQ ID NO: 42101 - DNA, 4894 bp, Bovine  19866880877754
  misc_feature (1)..(1): n is a, c, g, or t
naaaagatgaagactaaatagagatgtagggaaatacataaattgcaaaaaagtatataactgccatctcaggatcccaggaaaagaagagaagagaacattgcaaaaaaaaaaaaaaaaaaatatatatatatatatatatatatgttcaatatatatatatttgaacagtaatagttgagaaatttgcaaaattaatagacaacaaaccaacaaatgcaagttcatagaccatcaaataggacaagcaccaaatgcatacctgcatgatgatctcaatagaaacagagtgttaaaaaagatataatatccatttattataacaattttctaaaatacaaaactaggagaagaaagtagcattctcatctaataatggtcctctacagaaaacttacatcaaatatattaatggtgaaagattgagtacttttgtcccaagattaggaattaggcagctgctctcatcactcttattcagcatagtactgccaatcttatagtaataaggcaaaacataaaaagtaaaggtataaagattggaaagaaaataataaaaataaaacagtcttttttcccagacattttgattgttacatagaaaattccaaagcatctaccaaaaaactactagaactaatctatgagttgagcagggcatggaatacacacacacacacacacatatgtatatacatatatggtatttctacatattttgaatgaaaagttggaaaatgtaatttttaaaaatatcatttaaaatagtcaacaaaacatgaaatttagctataaatattacaaaatatatctagagtatgtagattgaaaagtgcaaagccttgatgaaagaaatatatagagagaatataacatattcatggcctaggaaagtcaatattgttaagatgtcagttcacttgaaattgcctcacaaagtaaacacaattgcaagcaaaattcaagccattttttaaattaaattcaaagatcttattttaaaattaaaatagagaaattaataaatgttaataaacatagagggagaaaatgacagtaatagaaaggggttttaacacctgatttacatcaatggacagatgacagtgaaaaaatcaataagtaaacacaggctttagataacacactagatcaagtggaataactgtgttgataaatatacactccatcagtggtatatgaaaatacttgaaaattttgtactattttagtaagatcttctaacttgaggatatataacaatttaatgtttaacctttccctttgcaaagacatctagaagaagtttctagtaaagaaagtttaagatttacacttacaacctaacttcaaggagcattccttgtgttattaagatattggtgaggtcataatactttcactgtaggatattcaagaaaacagcactgctgcagggcaaccaagaacttctctacccaaataaaaatctttactacactttgaaccaaacaatagtctcagtttgttccactgtgactaatctgttacaagcagaaatatttttgttgttttttaactaaaattaaatcagacaaaatagtttaaaggtagctggaacagaatgtacctggcacacaataggattgggggctagcaggttgacctcaattcaattgccagcttcaccacaccttaacctttaaatccccaagaagtcacatgaccttctcaagttttttgttttctgatttaagaagtgaagaattgaagaagaaatgaatggaaattcttcatttattccctctctcgacaattactttttgagtatctactgtgacatgccctgagctagaaaggtcagcaagagaatactctgaagcttactatagctggtcagaaaacatatcaatcagctaataatatgtctaagcatataaaatctttaaagaagctcaaaatattcaataagtgtcacagaaaagagagacatgacctagaaggggctggaaactttgagatgagggcaggaaaggatttttccaataaatattttttgctgagattgtgagcaaagaagaaagcctgggaaataacatgctacttgccattagttaagtgctcaatgaaaatgtcttattttatgcaagaaaataaaaacaatcagcctatagcacttatgaaatgccgtgaagttcagatggagtagaggagctgactggagaatgcagcagcccctgttagaattatccttgcagggggaacctcaggctctaaaaagcaatggcagagcttcacagaaacgtcttttccagaatactgagacttaatgcttgcccgtctctctcctctttcaagccccacaaagcttttagtaaaggaaatttctcagtgtctaactagctacaatcaataccatccacatcactgtccactgtgaagactataaaaatagaacctgaaatttaggcctaagactctggggaatagaaacacacataaggaagggaaagtgttttactttgaatcctgatacttgacatttggacttgaaatgacagggaagtaaagtaacataagaaatgagaggctcatagggaaatgatgccactaagatgtttcctatttatttctcttctttgtaaactctgactttaaggttataagaagacttctcagagctctctaatacaattttctgtgggtgaagaacttacaggaaatgtttgtctttggaactgctcctctccggaatgctttgaacaaactaggactggaagaattatttcttctctttatctgccatagtttgtgctctgcagaaggggaccctcgcagaatcagggcaagaagacaaaacagaaaggcggtcctgagcagtttggtgtatttgtttctttctctacggttttcttcaaaatgagtaaccttcattatccccttctttgtgaccttcatccttaggtgtttttcatcttagttataaaaatatatagctttagataagttggaagaaatcttatagagaatctagttcactgcccattttttaagtatgagataatgggagacctacatagatactatctgactttctcaatatactgctttcaatatcatggatttaaaacctattcagatgctggagggaggtggggggtgattgcaacaataccttggttgttgcaagtgttttaaacagtgatctctcaaatgatctagaccatatcaatcacttcttcaggggatattcttccaaatatgtttattcctctctaaacagatgcctgtttctccaagcattcttcatatgctcgctctatctcattagacaccatggcagtgtatcacccaaagacctctcattctacatgttatacaatgcaaacttgccagcttcaaacctaggcttgtgtctatattctcttcctttcacacttctgatggcttcatcacagatgtgacactgtgtgactttcgagtctgagtcataaaaagcagaggagatatgcagatagcaaataagcataggaaaagatgctccatgccatttgtcatcagggaaatgcaaattaaagcaacaatgagataccactgctgtttttcaaattggccaaaatccagaacattgacaacatcaagtgctgaggaggacgtggagcaatgctgctgttgctgttgctaagtcacttcagtcgtgtccgactctatgcgaccccatagacggcagcccaccaggctcccccgtccctgggattctccaggcaagaacactggagtgggctgccatttccttctccaatgcatgaaagtgaaaagtgaaagtgaagtcgctcagttgtgtccaacggactgcagcctaccaggctcctccatccatgggatttttcaggcatgagtactggagtgggttgccattgccttctccgaactctgctctaagctagttaaaaagagtttcccaggtggttcagtggtaaagaacctgcctgccaatgcaggagactggggttcaatccctgggtcaggaagatcccctggaggagcaaatggcaacctactctagtattcttacctgggaaatcccatggacagaggaatctggtgggctaaagtccacggggtcacaaaagaatcagatatgactaagcgactactaacaacacaaaactagtaataaacaccaaatagaattttgttaagggttgtttaacaacataaggggtaaagtgagatgaaatcccttcactctaggtcagtgttcctgagatcttattgtgcaggagaatcacaaaaggactttttaaaacgttccatatcctgatttggcaagtttcaggcaggatctgatactcagtcctaacaggttcccaggtggtatcaatatcacgggttcccagaccttccattgagcagcaaggccctagaacaaaatcactcgtgagaggtaggggaggggctatttgaatcgtaatagttacaaggtcatgagagcaagattaaaatttgtattagaagaacagtctagaaaaatgtgactgtttcttgcatttttctgtaaagaataaaacagctctcagagatgcgttttgaaatgtgacatttctattcgcttgaaattataaatattatacaagctacctgcaaaaactggtgagctgctatattagtttggcagaacttggaaaggtttccaaaaccctgatgcaaatctgaacttcaaggttttcatagtccttgttttagggaggaagaggctaggggtgcggaggcctagggaaggggatggagaaaggaggatcattttaaatggggccttgcaaagaaacagattcgtgaacctgcctcaaatgacaaattattccgtgctgaaattatactgacaccacatgaagttaatgcaacctcgaatcag

SEQ ID NO: 42102 - DNA, 1577 bp, Bovine  19866880887947
  misc_feature (1)..(1): n is a, c, g, or t
ntttgctaccggtccttgaagaagcgtctcagaccaatgccccagcttcagcacagcctccagcacaaagacagtggtgaacatgtagttgcagtacttgagggctgtctccagagactgcaggagcaacaaaaagaagcatgacccaggccccatgacctgtccgccacctttactccagtcagaagaatctctgccttgtaaggggagaatttactccattcacacttaatgcagtgatttacatatctgcttttactcttcccaccttacttaatgtgcactatttattttagattgcggtttccttttccttatttctgctggtctggtccaatcgccactcagtggaggcagtatggggtaatggttaaggtagtggttaagaaccaggccgcgtattaatcgatgtgaattcagactcagcacttattccttgtttgaagccttggcaagtcacttgacctctccaggacttagttttccagtctatgaattggatgataatagcacccacctcagaattaaacgaggtaatagtccaagaccagacagaataaatacttggttaatatgaacttattcttattccatttcttcatgttaatttagaagttctaccattacggccgcatcccatcaatggctgcctgcactcattgtatttcactcccaccgtttaaaataacgtaccaattcctcatctggaggctctgctctcccctcttcccccactccagttagtcttcccagagactcgcccctacataacacacccctcgtgtccctcatgaacactgcctgcaaccagctggggactggtcacctctcctaccccagtgtttgccctcagaggccctgcccctctgccaggctccaaatgcccaggagcagtggagccaggtggcaaaccacagttccagtcccacctccactcactggctgaatgactagggcagcgtgttttatgtctctgagcctcggtttctttacaaaatctggagaaagcccaccacacacacacactaaggttgctgcgaggattggagagttaatatctgtagtgtgtcctgcaaagagtctcagtgaacacaccacggccactgtcacccacgttcaaggctgggcctgaatgtcacccccaccccactcctaccccgttccaccccatcccaccccactcaccaggatcttgccctggaaaggggtgacttctccctctcactcatccatcctaccaggccctgagcttcttaagcataggaccccgtgcaggacctgctcagaccctggcccgcccatccctggggtgcgggcccctgaggacccaaccccaccacacgacctcgggccaggggccaggccggggctcaccgtgggctggttgtagtgctccagggacatggtgaccacgttgaggcagatgatgaaggtgatgaagatgtccaggtagtggctggtgcacatggagtggatgagcagcctcgtgggacagtaggtagcgtagtagggcagccgctgggcctctgcaggggtgcggggtggggtggtgcagaccacagagggttggggcagag

SEQ ID NO: 42103 - DNA, 2337 bp, Bovine  19866880899164
  misc_feature (1)..(1): n is a, c, g, or t
nattttttgttgtgcctagagcatgtaagacgttagtctcccgaccgggatcaaacccgtgtcgcctgcattggaagcacagaggcttaacagttggagcaccagggaatgccctcattcacacgttatgaatgagaaacgtgaggtgagagattagggtacatgtctgctggctcctaaggctgtgctctttcttctctgtcctagcgaaatatgcaagtcagttcaggataattgctaactagcttagggcccccgaaccttcctgggttgctgtccttcagccaagaaattgatgggaacaattctcacataccctcaaaattcaagcccattgctctttggtcaaagagcaaagactctaataaacctggctgacctaacaccaagcaattgtgctttctggcaattgcagacgtggaaacaatctcagttaataaacttacaaggagctgtcctcttctttcctttccgttctccctctctttctctctctccctccctgtttctctcttgtgatgccatatttttctaacctttcccaccatcaccttttcctacaacgtgttctactttttttttttttaatgtggatcatttgctaagtctttactgaacttgttacaagattgcttctgtcttgtgttttggggttttggcctgaggtatgtgccatcttagggattgaaccagcaccccctgccctggaaggcaaagtcttaaccactggaccaccaagggaagtccctgctctgcgttttttctctttttctgtgtcttcaaaacatcagcgaaacttaccatgaatctagttagaaaaagtatatctaaaatgtccctgtttaaaaatcttctacactgtttgtatttaaatagccccatgaaaacatcaatccaaaacaatagccacaaaaatgaaacagaaagagcccaccccgctgaggtgttacctccagcctgactctgctgcaagacgaatctatcatggccacttcctcattttatcctgattgtttcctaaagcaataacaattgtctgcagaaacaccacgaatcctgctggcgaaacccaaccaggagtgaagcattaaaaatgcccacacagaatcagaaattacttaaggagccctgttcggagggccgggggggatggtggtatatgtgagtggaagagaagaaagagacagcccaacagacattttacacatccccaggcttcattttttcacttcctattttctattcacatcatgagttcctctggaatttatgaccaggattttatggagccttcatgttctctttccctttcccccttctgttcacttcgcatttgtttttattgatttgggctctgaaagctttggctcatttatcacatatttgaaagccttcatcattcttactctgctgtcaccagggctgtaacaccattcacaaacaccacaaatactctcggcctccccctcccttcccgcaccacctgtgctcggggccaccttaacttcaccagagcacacagggtagagtggatgactgcgtgaccacagctacttcagtcttcttgtcacttttacttatattccccagcccccatttattattggaatgcgggtcattgttttagttcactggtcacaaaagcttgcaaaagcggacatgaacccttatgacagcttgccttccttcatttcatgcctatccctgagaaattggaggtaattacatttttattgatcaagtcaccccataaaggtactaaaaagctgccaacagaagggaggatattgtgaattgcttccatcaaatgaataactggaatattcttgttttttggatatgtaggtcttaatttgagtttgtttgaacagaggaacacctgtatgggccttgtttaaagtccttctctttcttttttaatttccagttttattcaagcaggccctaaatcttggattctcaaaggtgaaagtgattcagaaagttggtcttttcccaatttttaagatgatagagaatggacgtggcgggggtggggcaggtggacttgaaaggaacagactaacagcttggtgaactggttacatgaaaccaaaatgtctgatgataattttcagtctgaatttttccctaagaagaaaagaaaatacaagaagatgatgcttataagccccaaattcttgtgtctaagcttaaatatcagcctcccccaccaccattccaggtcctccaccacactaactccttgctctctgggtcacactgcagttttccaatattcttctcaaaatgtgttatctagaatggattcaggattcaagatgggtttcggctggg

SEQ ID NO: 42104 - DNA, 1091 bp, Bovine  19866880979853
  misc_feature (1)..(1): n is a, c, g, or t
ntgtttatgagttttttaagagcatctaaaggaatatagacaatgcaccccactccagtactcttgcctggaaaatcccatggacggaggagcctggtgggctgcagtccatagggtcgctaagagtcggacaggactgagtgacatcactttcacttttcactttcatgcattggagaaggaaatggcaacccactccagtgttcttgcctggagaatcccagggacgggggagcctggtgggctgccgtctatggggtcgcacagagtcggacacgactgaagcgacttagcagcagcaaaggaatatagatactattgtgattgatatctgtaatcgttcattttaaaaaatgcatggtcttctttgttagaaattttgtatcattctcttttctccttgaagtcatatttctatttcacatctcacagaatttttcctaacagaaagtatgcttatgcttgaaagccttctctacgtgaaatatgtatataaattgtgattatttttctaaattgtctgcaaccagaggctttaagtggaaaaatagtccctttagattgacttatcattgtaattatttttagtacacagtcaatcacaaccacataaatgtgttatacatttttataaatacttattaaacataaagaataaaattttattggaaggacatgttttttatgaactacatgaaactgttcatttaccacatgtgaatattacttattgcttgaaataaacaaggttcaatgaaaattgtttctgttttacatttttatagatataaatgctgagaagacttgttcacataaaattgtcggtgggaatagaaggtgttttattatagcagtgtcaatcaattctatgatttctttccaagtaatatgcccagaattatacagtgatttattataaaaatgttttccatcacttgtcaactgttaacatgattaggtctttcttcattgttgaaagcaaaggattggaaacagcctacttaggaaaagacttgttaaacagtcactgggagcaatttatgttctcaatttactgggaataataccaaaaaactttcgctaaaatgtat

SEQ ID NO: 42105 - DNA, 876 bp, Bovine  19866881019529
  misc_feature (1)..(1): n is a, c, g, or t
ntttactgctttccctgacaactgacgttgccaccccttcctacaaccccatctttcaaggtgggatccttgtcccatacctgtgctcctgagcacttagataaaacatctatgagaagccctgcacacggatgtatttcccactccagaccacaagcatctcaggacagggattgtggcttatacaatcagatttccttcaccccacctggtggttagtgcacgggtgctcagaagaaaccattttggttgaggtgaattttggattttgaaagaactgtttgtgtttcttgagaaacagtttaagcagttcaactgttagattaacttcgcgattagaccagaataacctaaactctctctggctctcctgggccccatgtcacctaccttcagaacatcgccagcgtggaagcccagttcatcttctcccgaggccatgaaatcgaacttggcaatggcttccatgttgtaacgtgaagctggaagagaaataatgtggtcattgtgttttctgccagaagggcagtcctagcggttggtagtggaggatccaatgtctccaggctggagagggaggtgcaggcacacaggaagggtttttgttttcagaaagagctgcctgagcccctaggatccgttttccgacatcgttctctgaatctccagatgccaggaacaggaaatgaaggccagtgaccgccttccccctctcctttcatccccatttgcagtcctggcctgtgatcatttctggggcatctctgtttccggttgataaggacagaagactcgctatcatcgctaccttggggcctgaggggctggaaggactgctctgtaaacactgtccctcggcagctatatttaaccagc

SEQ ID NO: 42106 - DNA, 776 bp, Bovine  19866881073996
  misc_feature (1)..(1): n is a, c, g, or t
ntgacctctgatgctgtgtactttttcattctgttttttcctctcttctgccatcttgactcttaaacagaatgaatatgtcgtgtgtgctgagcagaacgtttaggcctagccttttctctgccatgtaaacaggatgttttcagcagatttggctataatagtcatctctcagattcgggaacaattgagtctttatgcagaaaaggtccccttcgcccccatcctcagagttcaaatgcaacatgcaacactctaggtcattgttctgagtttgggtttttttctctgcttttacttatctattacatctttaggaatagagatccatttttagctggtaaaaaaaaaaacctttcttccagtgttttgccatatttcacgtatatgcattaactacacttcttagtgttactacaggagagaaatcttggtttcccccccctcctcgaggtgtacaaataaggttatgtgcgatagtgcagatgtaaatagcctcgcccatgtgtataaatgaactgtcaatctctagacctcagcagttaatcagaaaacgggctgccctccccctgggctgcagactgtgccacagcctctctgctttcttatccccaagtacagggtatccacacagtctagaaacaggcaagtatataagctgtcatcaaggtcatcatcagtctgttacaaaacatagaatattacctctatttccagagtttgtgcacaccgtgtgataaggcctgtaggtttaggccaggccaaaggtgtgtgta

SEQ ID NO: 42107 - DNA, 1258 bp, Bovine  19866881098698
  misc_feature (1)..(1): n is a, c, g, or t
natttgtacattttaataccgtaaaactaagccctatttagaaatgagacactgtaagtgctgtcccttttcataatagaatctcgctgcttgctttggcctcttcgtgagtggtgatgaaatattgtggtcttagttctgcctacagtaggtggggctggatcagactctgaccatcctccttcccgccgccgtcaaggtggtgaacagggaggagctgactccccgtggctgcaagtgccacgatagaaaggtcacacagaacaagcgagcgatggcaggcttagacagtgagcccaccctgcggtgaagcagcgcctccgatttctggagctgggtcaccttgatgctttgggctgtgatcttttacctccaagggaaaaaagaggcccaatattcacttgacaagcagattctgtatcccgagggatattgctacatcgtgtcatccagtagtctttgggtatcttgagatcgagtgatacttcattgctctaaatcagtacttctcagtcaccttggtggtctggttaaaagacacgctccaatgctggggatgtggaagctgcaggtgacagacgtgtttctttgagtagcgaggactcgggatactccgtctccgtgcctgcttcaagaccttcctcagatgcatagctttctccctcccctttcttccaggtgtgtgttgggaaacactaccatcctggctgagtttgccactgatgacgaagtcagccgctttctggcacaagctcagccccctacacctgcggcaaccccgagcgcgcccgccgcgggctggcagtccctggagaccggccagacccagtcagagcccgtcggacctgctctgaatcttttcggtgggtccacggggctcgggcagtggagcagcagtgctggtggcagcagcggggccgatcttgccggcgcttcattgtggggcccccccaactactcttctagcttgtggggagtcccgaccgtggaagaccctcataggatgggcagccctgctcctttactacctggtgaccttctgggaggagggtcggattcaatctgaacttagaactttcaactctgacctcgtgaccttttttggaacagcagcagcactaacttgaccttttcgttttttttttcaacttgcaataaatacatttttaaaaggaaaaaagaaaacggagagagaaaaaaaaaggtgggtcatcgacagactgtctgagcacatagttgcctccctctgacttcagtt

SEQ ID NO: 42108 - DNA, 1399 bp, Bovine  19866881141467
  misc_feature (1)..(1): n is a, c, g, or t
nacgctgcctccaagcgccgggtccccgtgtatatcatcctggatgaggcaggtgtgaactacttcctggagatgtgtcagggcttggagctccctgacttccgtattcgggtaagttgtacccctgggcagggcggggggtgggaaggaagtgggatggagaccccctctgccccttcctaggcctgctccccagttcaggggtccaggtgagcagcactgccagcccccttccctctgtctgaaaccttgcctcgtgaactgataaccctaaactgcacgcccagcttaacattttatcccaagactgctgaagctgaggtgggaggctctggcccagtcctgggtgctcagcccgcagagtcactgtcagggttgacggtagggttgtgtttctctgctgaggagctttgagagcaggccagggctgccctgggcccgtccatgcccaaagcaagacttgctgacctcctccggccgtaggaagcagagtcaaatacagataggggccagcaggcaggaccctgtggacaagagggcttgtcctctactcaagaagatactcggcacagagcttctaggctcccagcctgagtgacagcgcccttctcctcttcccgacagaacatccgtgtccgctctgtgacaggcgtgggcttctacatgcccatggggaaggtcaaggggaccctgtcgtcaaagttccttatggtagatggggacaaagtggccactggatccttcaggtgagttgggccctggttggggcggggggaatctttgttcttggtcagaaatgttcgcattcagaaggatgctggactggagcctccacagtcctacgtgtcgtaagtctaagacccgctcatattctaagtctgttctgatggcaaagaataaccccccggccgaccccttccctcaaactctctggctgacggactattcaagaaagacggtcaacttctgttgaccattcagcactgcctgccttccacggtccacagcagcaggttgcattttgaggctggaagaagaccctggcagatggagcaattaataaatggcatcagccctctcacatggttaaagtatggtgctttgcagatgccgtgtgttctaaaaattcagagaagaactaataagaaacgaaatgctcgtaacagtagtggcagctgcagattctacttttaaatgtatgtttgtgccaggaactgagaaaccttctgtatacgttgttggactttagcctcacaacagctctgaccacatgcctcacgagccctgttttacaaggcaggcagagtggaaagcaggtttggatccaggcctgacttttctcgccctcgccctgcacccactgcctgctttactgcacgtgaggccaagacctggaccc

SEQ ID NO: 42109 - DNA, 713 bp, Bovine  19866881149205
  misc_feature (1)..(1): n is a, c, g, or t
ncccacgactgcccggttcccttctccctgcatatctggctaacccccattggaagccaagcactcccggaagcatcctacacggaaccctctcctgtgccccacgcctccagcaggcacctccatgacactggaaatgcattgtgagcgcccgcccggcagacatgaagctgacctcgcccacctcctccttcctccgccccccctcctccttcctccgccccaggagccccacccagtggctggcaccaagtggggatgggcctccaatgccccctgtggaatgctgctgaggggcaagtggatgaccagctgatggaggctggaccagagcctggggcccctggcagggggaagggagaggtcccttccttcagtgaagccagtaccttcagtgtcatctcgcccacgaagatagctgtgaagatgtagttggacacagtgaggaagatgcgttcctgaaagagccgggagaggcccgtgggtccaggggcctcccagaactgtcaccctctgccttcagccaaggggcacccaggagaggctgccacttcacagtcattgggaggtggccccctctccagaagcatgctcccggccacacctccctccatggcatccggcctcatagagctctcccaccccctgcccccagcccggcatgctgtcccacagcaggcccttggcagtctgtccctctggcttgttccctg

SEQ ID NO: 42110 - DNA, 1568 bp, Bovine  19866881160230
  misc_feature (1)..(1): n is a, c, g, or t
ntagctatttttgatagaatacaaaacattttatagattctcatactgtgcaaaaatagaatgatagtttgattattctttgtcaggtttattaaacaagtatacatcaaaccaataaattcgtctgggtggtttattttttaaagagaaaaagaatcacctttgataatattttcaggtttaaatattagttcatttgaaactgaagagaatttcattcctccatgctctgaactttacctcaaaataacattgagcaatagtgaaagttgtggtaatgcttcaaacaacagatgactattccagagttcctggataagttggcagtaagaagcctctcattttccatcagtatggagcttcatcgttaacaagcctttgccttgtctcaggagaattgagtctggggtatatgtttcacaccttttcatgtcacctttcaggttctgcagaaaagggccaaaagtctttcccttcttgtggatgccacaggtggttgcgagttaagttgagataagtagggcatgaaataggtggggttttgctgtttttgttgttgttatatgcaaagtgaatttaaatgtgtacctttttcttgtattttggaaaataaatttggtgtttttagtcttttatgtatcttttttaattctttaagacagctttttaaatagaactgtctcaattatctatgggggaaatgatctggtttggggattacagaccagtgattctcaatcctgctgcgattagagtcaccagagaagcttttgttttgtttcatatttatttgaaagaacaatgtaaagggctccatgtacccattgttcagtctcggcaattactaaccaaaggctaaaataatctctgataattttgaagaaatatgagacatttaaaaaagaattctagtgctctgggtgctggtcccaaatgaaaactggttttcgtcatgcacactgggttaagaaccagaggacactgatagtgcaggaacgtggggggtgaggaaataagccagtcggaaggctgttgaagttacccggataagagctggacatggctcaagccagggtcagcacagtaaaagtaaatgagaagtgattcacttaggggtttgctgatgagttggataaaatatgtgaaagagaagagtcaaggatgaacccaaaggtattggactgagcaactaaaattcaagatgaagttgccatcaactaagatgaggaaagttgcagatagaaaaaaatttagggacttccctggcgatccaattgttcagactctactcttccactacagagggcatggatgggttcactctctgatcagggaactaagatcccacatgctgtgtggtgtggccaaaaaatacaggtccctctagtcaaggctatggtttttccaatagtcatgtatggttgtgagagttggactataaagaaagctgagcactttaagaactgatgcttttgaactgtggtgttgcagaagactcttgagagtcccttggactgcaaggagatcctaaagatcaatcttaaaggaatcagtcctgaacattcatt

SEQ ID NO: 42111 - DNA, 1389 bp, Bovine  19866881181775
  misc_feature (1)..(1): n is a, c, g, or t
ngctctgacccatctcccttcccctcacccatggtggggggcgctttcctaacttcccagggtccccacccccaggtcagtgtctcatgctatcccctcctagaatgtcatacctgtcacctctctatccacatcaccacctcttaccaagccaccaacaaggtcaagccgccctataaggtcatgctcgaagtgccttatgccttctctgattccccatgtgcaggcctctccccacactgccctgaagcctctgtcgttcccctagactcctgagggcagaacctgggtcctcagcgtccagcccaagggcggggtacagagcaggcaggtggggcaggagtggggagagggaccaagggctcagccaagaaaggaaggaagaagtagatgggaacccgcccatctctcacgccctgagctcacaattgcttctctggaggcaggactctgcctcagctccggtttgggcagatctggagagaaagggaagtcacagcccatgccccccaggggcccagcgtgacactgatgacggccaaggttgggcgaggggcggctcttacctggggcagagcttgcaccacggtgtccagcagggcccgcattcccgtggccatcttcaggagcttcagcactgtgggcaacacccaacccggcccactcagcccagaccagcagggacaggcctgtgtgtgtgtgtgcatgtgaatgcaatagagcgagaaagtggaggagcgtgaacgagacgccacactacaatcccctgggtgcagatgaatgggggtggtgcacaaaaacacgtcccccctggggtgggtgtctgtgtaaaaaagcccaagagaaggaggacaggcacaagggagcagacggatatcaagtgtgcgcgtgggcacgtaattcaccatgatgaggccacagtgagcagcgcgtgagggcccctgggtctctcccttcctctctggctggagaggccccagggtgactgctgagtttctccaccggatccctcaccacctcggaatctgggggcaacgggcggggcaggtagaagggtgaggccagaggcaggaggttttttgaaacaaggatgaggacagccttggggcgaaagggagacttctgggagaacaaagagggtttcaaggacaaggtgtcccagccagagctggagaaaggctggtgaggacccagtgtcttcttggctgccctggggtcctttcaaccccacctgagactggaccacactgggcagggtgttatatggagggggcatgccagggcgcagtacagagctgtcaggacgagggcaagtgtgggcacacagcatgggggcgtcaagtgtgtgtcaaggacgggctcctattccccatcctgccccgcccaacc

SEQ ID NO: 42112 - DNA, 1170 bp, Bovine  19866881234794
  misc_feature (1)..(1): n is a, c, g, or t
ntggaatcatattagcgtgcattatggagactcattctacaaaggaaccccatggtgaatccctgtattaaatgaaagggaaaatttgttatgcaaatagctaccttttaatttctctgttttaaaggctgggttttttcgtgcactgagtcttaaaatagatcgcacctgtgtatcttctcccaccttacatagtgggttaaataaatttagtttacccttttcttaacccccaaatgctttgtaaaaacctatatatattgatatataacattttaccttggagtatagacgtgtgtgtgtgtgtgtgtgtgtgtgcgggctcagttgtgcccaactctttgcaaccccatggactgtagcccaccaggctcatctgtccatgggatttcccaggcaagaatactggagtgggttgacattccctcctctaggggatcttccccacccagggatcaactctcatctcctgcattgcaggtggattctttacctgttgagccactggggaagcccgagtatagactagtaatcctccagaccgtttttgcaaaggaccagagagaagagattttcagctctgggggctgtacagactatgccacgaccaggcgtctgtcctttttcaggcaggcagcctgagagaacagtaaaccagcaggaggagctgggttctaatacagctggatgccgtcaccgactcaatggatgtgagtctgagcaaactccaggaggtggttaagggaaacctggtgtgctgccgtccatggggttggaaagagtcagacacatcttagagactgaaaaacaacaagttttatttatgctcactgaaacttgaatttcatataatttttacatgccaaaagatattattattataattttgccccactgttcaaaaaagtgaaaaccatctcatttgtgggaaaaatacatgagtcaaatttgacctacttgccatagtttacagaccccatatagtctttaaaaattttctttttgttttttagagagtttgggaataggctatttttattttattatttatatactttcggccatgccctgaggcatgtgtgatcttagtttccggaccagggatcaaacctgtgtcccctgcagtggaagagaggagttttaaccactggatagggaagtcccatgtag

SEQ ID NO: 42113 - DNA, 1597 bp, Bovine  19866881238064
  misc_feature (1)..(1): n is a, c, g, or t
nggattgtttttcttagtttactttatttttaatagaatggattctgagatgtgatttttaaaagcgggcagggtttagttacatggaattgagaaatttttatttcttgcagaacaccaagtcgtttggggaggccaaccatattattgttatgctagaatatattgtcaccttttatcagcaggcaggctcagaaaagagtcatttggctcagaagaagctaggttctgaagatgattgtgtttggtaatttcaaattctgttttctcacggatgatgcagaaagttcttaaagatacgggtaattattgcagaatgatggcttcgggcattcgaagctattcaaacagtaaaattccattataaaagatcacaatatgtgtgttcagttgtgctgcagttgagaacttgtccctatagtgttgctgcatcgttcttaacactgaagaacactgaagcaaaatgcagtaggtctaggactagatgatggcttaaatctgggagatgcaaaataagaaatgaatcaggatgagatccagagttctgggatgtgtgtgtgtgtatcaactcaacaataagaatagttgacattcactgactgctaactatgttctaagcacgttttaattttctcaacaaccgtaccaggaaggtattgccacgtttcatatgagaaaacagaggctgagaaaagctgagtttgcttgttcagggtcacacagatagttgtaagggtcaaagccagaccaggaaccctggtccgtctgagtgtagaggttgtgcttataatcactggcttcactgcctcacaattcagggtgaggctaacaaggtgggcgtcggtgtcattgcctgggatgacagatgaggaagatgggcggggctagcctgtctgccccgggtttggggaggagctggagctcctgcctccacagcagctgtccccttcgcactctgccctccagttggtcgcccccaacttctagagccacctggcagaagcatccatcccagaccttttgggtctttcttttgttggtatcccttttctgaagagctatctgcctccacacacactccccagccgttccctgccctctttcatgtctagaccaaattagcagaagctggagaaagctagaatatcataagagctggtttggaggtgaagagactgtcccaatttcttttttccacacaattaaacctgggaaatgtcatgtggctacacacacaggattttaattggggactgctttcactggttcaccccagcagcagagaattttcatttctcccttttttattttttgctgagccacatggcatgtgggatcttagttccctgaccaggaactgaacccaacccccctgcagtggaagcatggagtcttaaccactgaccaccagggaagtctgggaattttcatttctttaatggatctctgcctctggagcatataatgtgcaattgaaaaccacagagagcaacccagaaacagccaacagaagctaaagaaaaaatcagttctgacttcagtttcatatacaataatatgctcgtacttcattttttaatgggaaacactttctcca

SEQ ID NO: 42114 - DNA, 1038 bp, Bovine  19866881279671
  misc_feature (1)..(1): n is a, c, g, or t
ntcctacccaacctccttctggttcgatgcttccactcttttggtcccaactaccaagtaagctgcttcctgcttccctggtggctcagaatctgtctgtaatgtaggagacccaggttccatctctgggttgggaagatcccctggagaagggaatggcaacctgctccagtattcttgcctgagaaatcccatagaccgaggagcctggcagactacagaccatagggttgcaaagagtcggatatgactgagtgactaacactttcactttcacccagtaagttaaaactatgtgttaagtaagagtcagtaggagctgaattagcatctaaaggcctatcttggactgggactttgtgataacagtttggagggctcagaggccttttgctctcattttggtgtccaaccattcatgggacacctaccaccaactcacctgggcacatcccttaatctctctgctccaccgggagtaaggatggggaccaggtgctcaatggggagaccttcctagcctggaaacattctgcatgaacaatgccccaggtaaagccagccaggagtcccagggcaggggatggggggctgcactcacatagtgaagttctcctccaggaagcagcggttacgaagcaggccggcccagagctgcacgccgatgatgccaaagatgaagaagacaaagaagcagagcaggaggacattccccagcatgggcagtgtgtccaggagcaggttcaccaggatccgcatacctgggcgagggaagggtggagggattggcagacaggggcagagggcccggagaggagagggagagagcagggttagaggaacagagagggggtggtgagaggagaggtgggacacgtgggcaggggctccttactgccctcaacctgctcagtggccaccagacaccttctcccggaagccatgcaaatggctctgcgtcctgctatatttccactagatcatgggtgaataagcagatatttacagagcgcttttaatgtgccaaatgcttttcgg

SEQ ID NO: 42115 - DNA, 1769 bp, Bovine  19866881300697
  misc_feature (1)..(1): n is a, c, g, or t
ntagatgactattgaaataattttaaaaattgatgagtgaatctctgttttaaaaattcctacatttacatatgttattgcatgttatctactttatccattagtgtccttagtatattaatcttttgttgttcagtcactaagtcatgtccaactctttgtgactcatggactgcagcatgccaggctcctctatgctccactatctcttggagtttgctcatattcatgtcaattgagtcagtgatgccatctaaccatctcatccactactgtacccttctccttgtgtcttcaatcttttccagcatcagggtcttttccaataagctgactcttcgcatcagatggccaaagtgttggaacttcagcatcagtctttccaatgactattcagggctgatttcctttaggattgactggtttgatcttcttggagtccaagggactctcaagagtcttctccagcaccacattttgaaagcatcaattcttcagcactcagctttatttatggcccaactctcacactccaatacatgttaaagttgtggaaaagttccatatctgtactggaagaaccacagctttgactagacggacctttgttggcaaagcgatgtctctgatttttaatgtgctgtctaggtttgtcatagcttttcttccaaggagctgctgctgctaagtcatgtcagtaatgttcgactctgtgcgaccccacagatggcagcccaccaggctcccatccctgggattctccaggcaagaatactggagtgggttgccatttccttctccagtgcattaaagtgaaaagtgaaagtgaagttgctcagtcatgtccgactctgcacaaccccagggagcaaacgtcttttaattttgcggctgcagtcactgtacacagtgattttggatcccaagaaaataaaatctgccactgtttccatttctccccatctatttgccatgaagtgatgggaccggagagcccagagaagcaataactctgtctccagcatgttaggaaaggcttcctggaagaagcaacatttagctgaaccctcaagattcaaatgaacaggaatgggagaacagggtaaggggcacattcaaagtgggagagaacacggcattttggcaagctgctcagcaaccactgctagaccactgcgtgtgatggaggaaggaggaggcaaaaggcaagctgcagaggaaagtggaggccaacgaggaaggagcttatccgccaggctaaggtgacagactttatcctaaggggagcttctcagaattctgaccggaccagagctgcattttagaaatgatcttagtctccagttctgttttgacccctgactgctcttcataacttgtcctcctccaatcttttctttacaccacatccacagtcatcttcctgaaagcaaggaagatctggttgtctcatgtccttgcttaaatcacttcaaaggctccccatcattatccagacacaactgaaactcctccagcacatgcttgccttcgtccattagcgctgcgataacacagtaccacagactgggtagcttagagacaacagaaatttctctctcacagttctagaggctgaagtctgaggtcagggtaccaagatagctgggtcctgcaaggccttcttttaggtaaagactgctgactgctcaccgtgtattcagctggtgggagggctggggagctgtgtgaggtctaagatccccttccgacttcctctaccccacccc

SEQ ID NO: 42116 - DNA, 652 bp, Bovine  19866881359841
  misc_feature (1)..(1): n is a, c, g, or t
ntcacgttggcagtaaagccactgaggcctggtgagttggtttcggcctgtgccccagagttgatcagagtggggagctgcccagaggtgtgtttggcaggacggagagccatcgtggtcatcttgggtcctgtccagtagggctgcctggagggcagagagacctcagcagaaagagcagtgaccgccaacagtatatgaccacagcagggaccagtgaggaagagacagacccttgtcccttacctgtccctcacctgcccctgtgagctcataggagggagctttgttcctttaagtcgacctccagaagacagagggaaagaaaagtaaaagagcggccagagcaaaagccaggtgggacagcccctggtgtgcgggggaacctttgaggcacttgagaatggctgactcgcatggggcaggcagctggagactggaaggagagttggagctctggccacttggatggagcacctctcactcctcgcatccgtactgtctctccctctgatctctgtgctgtgcttctgaatctttgtacctgtcttccagttcccagttttttcttcaactggagttaatctgctgcttaaatcaaccagttacatttaaattttcagttattttatttttcatttttagaggaggg

SEQ ID NO: 42117 - DNA, 1882 bp, Bovine  19866881465817
  misc_feature (1)..(1): n is a, c, g, or t
ncttccaggatgaggatggaagctcgaatgtccccaggtaagggggattcctcatctttggcatcttatttaaggaaaaatgctaatgaaaggttaggtaaagaagatgggacttcgtctgatcagaatggctcttcggtcctgtgctctaacttttgattcaggaggtctggggtcttggcacctcagccatcatatccaggccagaggccgtcagctttaggaaagtcctcggaagagtcactccacctttagctcctggaaggtgctcaaggccaaggcccctcccagaagagtacatggggtgggctcaggatctcagggccgctcttccaacgagttcatctttctgccccccttccccagccgggactatgaagccagattccatcaccttccagagagactggaggtgaaggtgaacctgtgatggaccagtcaattgagtcctctgtcctcaagcccagagcccagccacaagcccaaagtgcaaacagaggacgctgagggtagggctttgtatgaaagagctattgaggaccacaggcatctgctgttcagcatcaccttgtatgacgatcttgtgggataaacacctctcaaattcagctctagaaaaacgcttcaataattaggcagcttgccttctgcttgatgagagctgtgtgtgccaacctgtttcctttttcaccacagctcccaggacactcaacatgaatcatccattagcccagattttcggtataattatgacctcatctctctgtattatttggctcctggtcttttgtcattgttctatcaggcctgagattcctatcttttattgtcaattaaccatctggttctttctggactcgatgtaatagtctaggcaaaattactcaggaaaaatctcagccagttccctctgaagccaacacccaagatcagggccatgggagctggcagggctcccaccctcaccttggctgctctcgtgtttcagccaggactggacggggttgaatgggatggcctccatctcgcacaggaagttctccggacccgatgagacggccgtgttgggtaaggggaagaagcattcgcccaggtcccctacctgcatgggctcaggcgggtcaggctcgccctacaggaaaagggaggtggaaggggcaggatggtggaggggggaacagcccaccatagctgccttcatgcccctgctctacacccctttgcttcgctgctctcactgcctgggacggccttctcttcccctccttcacctggccagcgatcatcatcttccaaaacctcctggaggtaaaaggaccccacctccaggaagccctctctgatgtcccaggcaggtagcaattcccccactcactccccttgtgaccctgagactcttgaggctcttctttgtctctgtagccaagtggtacagaccctggccagcagaaaggccaagcctaggctggtgaaggcaccagaagacagaccaagcagcttcaaagcctccttgtgagcgtgaccctgggcaggtcccttcctgtggctgagcctcagtttccacatccataaatgagagaggaaccactccttctggcaaccagctctccttcctggcactccctgagccctgcccttcttcaaccctgcagcccaaggttacctctgaacagtatgtgtctcaaaagctgcctctatgccccctccaagatagatgagccccctatgaactattatttgagtcctaataaaacagcacccaccaacaccaccagaccctagaaactgcaccccaacatcctgtgtgggagaatagtgcaggggtacaggagatgcaggaaggggctggcggcagcgggggacaggggctgtcagctgtcag

SEQ ID NO: 42118 - DNA, 671 bp, Bovine  19866881575745
  misc_feature (1)..(1): n is a, c, g, or t
ngaggtgacctgctcagctggactctgtggctctgacctggcatctacccgcgggtcgctgacactcactgtgcccccaggcagcgggccgggaggtcgagagagacttcgactccgtgtactcgcgcctggtgctgtgcaagacgtacaggtaacctggctcctgcgtcctcctgcaggtcgccctcccagcagcctggggccgggatggagggagggcgtggcccgagcccaccagggcggtgtgggcagctctggtcccccctcaggttggatgaagatggcaaagtcctgaccccagaggagctgctctaccgggtaagggggccgcgggcggaccggcctctagggtgggcagctggggacacctgagtgaccgctgtgccccccaggctgtgcagtctgttaacgtgacccacgacgctgctcacgcacaaatggacgtgaagctccgctccctcatctgcgtggggctcaagtgagtgtgtgcgcccccgtgagcgggggctgtgtgtgtgcgtgccctcacggggggcggggctgagctgggcggacggaggtgggttggcggccagggtggctcccgaatatcgtcctccagtgtgagaccagcaaccgcttggcagcgaggggcactgggcctggtgaagcactggttccagtgaggtgag

SEQ ID NO: 42119 - DNA, 1228 bp, Bovine  19866881685474
  misc_feature (1)..(1): n is a, c, g, or t
nttttgataaagtttaaagataaaaagtaaaattttacttggaagtacactttctaacaagatgaatgactttgtatctagattacttcagatattagtgattatgacttgatctagttcacactattctattcctatttttaaaatttttatagactttttaaagcactaagaaagtttacacaaataagtagatgagaaaagtaggagccttgtaatcacatcagttatttctttatattactttttggatatatttccttctcccagctcaataagatatctaaaaattatgttttagtatttattactaaaacataatttttagataggtcattatcacttgacaattcaattaggtatattttccattttgttaaaagcagaaaatattttacaaaaaacaatcagctaagggttagttaagcagtcatggaaagtcattcaactctttaattctgagaaaatatatcagtagaggctttatcaaaatgtactaagaaaaaaacatactatgaaatttttaattattcttgctagtctttagcctacaggttatcttttttcttttttactctgctatactaggcactatttatattcataatatatacattcattgtattacatctttttcgaaaaaactttaatctgtataaatgctttacctatattttcatcaaaaccttacagctataggtttagtttattcaaaataggcagccaaatcagacttgttttcagtctcagtttttcaattccaataaattgataatatgaattaaggaaaattgtaattgaaataaactgcaaaatgcatcgtgattataagtggtcatatcacaattaatatagacctaataaaactaatgtatccattgtttactaagttatcacatgaaaatgttagtaagtcagtatgttctttttccttaatttggataataaagcataactaaatttttaagttacttatgaaacaggaatatgatattaaaaaaccatgaaatgtatccagtaaatgtacatatgtataaatactgaactctgatcctttagtcattaagaatagttaagtataataatcacaaacaatatgattaatctaataagacatcatgataaaacttttctatataatattcaataaacaagagaagtatacatacactgctaaaaatgaacagatttacagccaacacataattttactttttaataggtgggt

SEQ ID NO: 42120 - DNA, 870 bp, Bovine  19866881706177
  misc_feature (1)..(1): n is a, c, g, or t
natgcacggccagtgaaagaggaggggtcccagtacacggtcccagtgggagtggtctggactgaagtaggcatcagctggatgtgctcggtgaggtcattttcacccccttcctgcttaaccacgggcagctgcctgctgtgaggacactctgattttctcatggcaagcctggcagttaccccaggctttcaccatggccataatgatgttctctgtggccgtgaaaggcagctcctgcagagcgcaccgctgggtacattgggatatcccaccaatccttcagaaatgttctacaacatatttaatacagtatctgcactgagaagggcttccctcatagctcagttggtaaagaatccacctgcaatgcaggaaaccccggtttgattcctgggttgggatgatcccctggagaagggataggcaacccactccagtattcttggggtttctcttgtggctcagctggtaaagaatctgcctgcaatgtgggagacctgggttcgatccctgggttgggaagatcccctggagaagagactggctactcactccagtactcttacctggagaatcccagggacagagaagcctggtgggctgtagtccatggggtcacaaagagtcgaacacgactgagcaactttcactttctgcagtgagtaatgcctcagccaaacagattcatcagtgggcactgtcaccgagtgtgggttcaaactactgcacggatgctgtctgcagggggtccatgacaagggtcatcaggtgacgggccaggctgcggcactgctctgagcgtggagggttctgctggtaggtgttgcacttagccgatctgcttttttcaaagggttcctccaattc

SEQ ID NO: 42121 - DNA, 1240 bp, Bovine  19866881817384
  misc_feature (1)..(1): n is a, c, g, or t
naaaaaggaactggcatgaaatcataaggaaaatcccgtttccttactgatccaacagcatttaaggaagctgagctctgccaatttgtagctgggcagttttttaactgtgcagaatttgaaactgggcagttaaaaccaccatctaagctggcagctgtgattttcccagaagcagagcttcaggaagaaaaatatcttttaaacgtcagttccatttttgcaaaattggatctgttcatgaaaaattgctgtaagtccagggtttttttcttttctttcctcattagtaaaggatatgatgatttcttttttgcccacatggaaatgcattcatttactcaacaaataaatatgtaccgagcacctaccattagccaaacactgttttaggtgctggggatgcggatgtggacagaagaggcaaagtctttgatctttggggcttgtcctctagtgaggaggggggtggagagactgataataaccaagtaaatgaataagtagatatcttagtagttatcaggcacagataactgaaacaatgctaatatcttattgtacctagaaaatcaatttccggaaaattaaacattaagactcccacatcagtattatcttagctcatgtaagtaacatatattaaggggtcttttgaaaagaataactagtagggaatatacgtatattactctttgcatatgacattgacattccctgctgacctttaacaagtcttcgaggagcatttctagaaggatttgtgccacttgcgtttgctccgtttgggcacagtatggccctgtggcccgcatagtggtccaccctggaaacctctacgtccttccgagcgcctctctctcttctcctcctattccccaaaactggcacccctctctactgggtctttatttatttttaatttattttttaattggagtatggggatgacagaggatgagatggttggatggcatcactgacttgacggacatgaattgacggacatgagtttgagcaaactcagggagttggtgatagtcaggaaaaaccctgggggtgctgcagtccatgggggttgcagagagtcggacatgactgagtgcctgaactgaactgagcaagatgattaaagaatggaattcatcaatgataacatggataactaaaactggccatgagcttaaggatgaagggggtaccattttatgacaaacaaacctgaaacctcaagaagtta

SEQ ID NO: 42122 - DNA, 2901 bp, Bovine  19866880371900
  misc_feature (1)..(1): n is a, c, g, or t
ngcaccccactccagtactcttgcctggaaagtcccatggacagaggagcctggtaggctgcagtccatggggtcgctaagggtcggacatgactgagtgacttcactttcacttttcactttcatgcattggagaaggaaatggcaacccactccagtgttcttacctggagaatcccaaggacaggggagcctggtgggctgccgtctatggggtcgcacagagtcagacacgactgatgtgacttagcagtatcagatttatatttacatgtatgcaacatatacacacatatatgtatgttaatttaaggcagaattttattaagggttaattcattttttttgatgcaataaagtgttcattgccttaatggcctaaattatacatcacttgtaaccaaatatgaatatcaattcatcccagcttcattgagctgggcgcaaaaatttgcatttttcaattcagtttctttctggtaggccaaagatctttagttgagaaaaaggcagaaaaaaagataagatcctccttatcagattgaacaaactctctcagagtcaagctggaaaatgcctcctggtgctgtcagaatcaaatggaaacaagtgttacataagggctaaaaaatcttctgaaaattactgcagcatacccactgcattcttagatatagatcacagaaaatgtcagaatccacaggtatggaataaaagctaaaatagttcatcaaatgaaatcaaatgaaatatttaaatatgtatgtacaaattcaacctactgttttttatctgcattcaactctagatgtgacatctaatccatgaattccatgtttagaggctggaaataaagagagactttaagctcttcaagttttaaagtttgaattgtggtttctttttgaaaatcttaaaaatccatcaattcttcaagagatacaaaggtatattattatgctggttaatttgtattttgcagtagctctgttttttatgagtgtatttattaaagtgcttcaaatacattaataaggaaattctttctaatctaactatcccttaaaagatacatttgaaaaaaaggacatttgctctctctctcttattttcatcctattagtttggtgagtatattcctttcctaaattaacaaagacagagactggcataggacttgataaactttgaaaaataaattgggaagcttcaaaacaggtgtatgtggcattctaacccatttttcagtttgctttttctttttaaaaaaattcatttatttaaaaagaattttatgcattaaaaaaattgaagtatagttaatttctcatgttgtgtaacccatatttttaaattaagactacctagaagcagaaagagcttgaaatacacacactcccttctgatgaactgagtattttcactcttgcatgtttcatctcctccccacccaagaaagtacattgttggctcactccatcagacctctccttattaggagcctctcttcctgtctgacattacctaactccattgtgtgcccgagtgaaacgcctccgttctgtggaaccaggagtggagtgggtgagacggcaggaggggccctggtttcctcttgaggaaatcaaccttgcagcttgattaccacatttctcactgtggcctgtctcgttctgagttatttatgcgtctattccttcacctggcagggttgtgttgagttgaactgaagtcattagtcctggctggatctgtctctggatcaacggccttccttgtccagagtcactccctgaaagttgatgaaaactcatcgcatcctcaaaacagatgagggaattcttgggccaatgggcttgggagccgagagtgagagaaccaccctccctggaagaaaaatttctgctctagttcagaacacgctggtttcaggatcagccatagccatagcccttttcgcctagatttcttcctgcaagaaatctacccctgtaggcatcctgaccttacgtggatttctcaaacctaatttagatcagggtgtgagtagggaagagagttcaaaagaagaggcccctgaggctttcggaaactttctatttttaggatgtcaactttgatgtttcctggagtcttgagccaagccagccttggaacaaggagccagtgaggaatggggtgaggggcaggctcaaatgccaggtctcgtgccgaccagttgtgtaaccttgtggtctaacttctcagtgcctcagtttccttatctgacatgtgaatataataatagtatgcgtctggtgtgggcttcgtaggtggcacagtggtaaacaacctgcctgccaatgcaggagtctcaggtttgatgcccgggttgggaagatctcctggagaaggaaatggcaacctgctccagtattcttgcctggaaaattccatggacagaggagcctggcaggctacagtccatgggggtctcaaagagtctgacacgactgagcaattgaacatgagcgtccgtctggtaaggttgtcatgaggatcaaatgagttaatacacatcaaaagtttaaaacagtgactgacatcaaagaagcatgtgattttaatctaattgcgtgtatgacgcctagggcttatttgctttcaaagtttttttgacttttccttcaattctaagaggttgatcaaatgctcaaatgcctcttgctcccttgtttctaaggcaaaaagatactaacaagtcacggagtggaaatgaagaaaccaaacaatatagtcccttcacaatagtgtgtgtgggtgcctctgtttttgatgacctaagaacaccttggttctttccctgtctactttgaatttctaaaaaaaaagctaaaacggactctcttctcaaaattatta

SEQ ID NO: 42123 - DNA, 3300 bp, Bovine  19866880592067
  misc_feature (1)..(1): n is a, c, g, or t
ngggaggaggggtccaggggacttgtcagagattgtttttagaagctttgatttagagcaataaatgtagcaaagatacattccttcccattttattataaagaataaaaacatgttttatttgtatttgctgtattattgtgtggcttgagagccggcagatggatcatgaggggaagatttaaccaccacctaccagtcaacccttagacaaaaccaccaaagacagatcagtgggagaaaaatcgggaaacctttaccttcaaacccctcaatttttacaacaaataaatatatcagcaccaaacacatgtgtgcttgtgcttctgtgtgaaagtttttataaaacactctgggtcagaccatacgaaattgccttttttggcttggggagtggggcggggggcggctggcaaatgagtcattgtcagcaaatgcagaacctgatatttcctggatttgctgtagaaaaatcactgacctagctgaaaaggttggttttaaagataaaggggacgcagtgctatagactatttcgtcctttcatggaggaaacaaaaacaagccctgctaagcaccaattctattttaccatcattgccacgatggttctattagctgcattaagaagccatcacgtaagatattctgctggtgaatcctttagtgaatgtgggtagatttcagcccttgactaatgaggaagggttcatttgattagacactgtgatcgagtatcagtgtggcttagacgcacactgtatgcggtacaatgtctaactggcacagattctaattccgatgtttttatgtaggctcggcttctctattaaaattcaaagtgttaatttagcggtaatcactccactctctcctctcctctcactgaaaggacaggcccttactgcatgggatataatgtagaaatgcatttagtgctaggccatgattttagacctccagctgttttactggttgtgtaactaaaaataagataatgttgtgctgcgtaaccactgctttcgccggcactcacattttacaaatcactgcacagtatgtaaaccattatattttttaaatgctgaaaattccagcctaggagtcaaacacttccattattttttttaaaaaagagctttctggactgtaaagtggaatgcatcttagataggaaagccactgggctgaggtttacaccatcagagtctttcctgtccatcctcattccggcagcagagctgggaatgagcattcctccccatctgcggtgtagagcaagatcttcaaagaccatcattgtttagtctctaagttgtgtccgactgttttgtggccccatggactgtaacctaccaggctcctctgtccatgggattttccaggcaagagtactggagtgcattcccatttccttctccaggggatcttccctatctagggatcaagcccacatctcctgggaatctcttgcttggcaggcagattctttaccactgagccacctgggaagccccttcaaagatttgtgggttagtttttggttctaaaatgtctgctctgtaaacttacaacttattccaagaatgcaaacctgagaagagtgcactgaataagaacagtggagagaaatagtacgcttctctacacaggattatattaaaaagtaagggtcagaggaaggaactttgctggttcacatcatacagacacataaaaccccatgatctttatacttctgtgatctaatcagaagcccaaagcgtgcacctttaatggaatatttgtttcacatgaaagccttgataagtaaatggagttctacactgcatttttataatagcacctgctttcagaacttcgtattagtattcttaggaattcagaaacattaaaatgtaggaaactcattttttttcctaccaagtgcctcgtgtcctctgatcctgaggactggaagcactccctccccacatcactccctcctgcgcagaccacatttatcacccttatggatgcaaaacgaggtgaagcaggaagggacagtcctgggtcgggctaaaacgtatcttctgttggtttgggatcaggatatttagagctagaggggaaccaaccacccaggaaatggttgtgaatatcccttccaccatggacaaagatgcgtcagaggagaaaacttgatcagcctcatttaggcacagacagcgggcgtggagtgtcagagcctctgagtagacctgaggctttggcacaggcgtggccagtggccagaaggcggtaggcaaaggccttggctgggaggccagacagtcgagcacagccttttctcttgagtcgctgactcaccgagtcccacctttcctgtctagctgacttcggcttaatctgaagggtgcggtgaagactccccgccttaagctggagatttaacctcacttttttttctagggaaagtgaatgacccaaaggatttcgcttgggacttggctgctgttgtgaaatctatattttaggctaaatttataaaactatgctacatatgaagaagttggtttttgattttgctttttaatgccctaaagaaaccacagggcctttgcaagcattttcaaataaagataagttcctaagagcatattctaactctacatgttgcaggtaattttgccaatactgtttcaatatttaagaactagacttttactttattttattagacaatactctaataaatactctattttattagacaatagcccgtgttgatacagtgtcttcacatggttaccaggcccccagacatggctccttcatcagtggccaggggagtttctaggactcagggttctgaaatgagagctctgtttcctggctcattgaaacacatcctgtctgctctctggcccaacctccaaggccccttcctggcttctcgatgtctcagcctggtaacaacatattaatttctttgtttggtaaattctactgttgctggaaagtgaaagtgaagtcactcagtcatgtccaactctttgcgaccccatggactgtagcccaccaggctcctccctccatgggattttccaagcaagagtactggagtgagttgccattgccttctccaggggatcttcccgacccagggatcgaatccgggtctcccgcattccaagaagacgctttaacctctgagccaccagagaagccctagctcacacaaattatgcatgtttgtgctcagctgcttcagtctgactctgcaatcccatgaatgtagcctgccaggcgctctgtcca

SEQ ID NO: 42124 - DNA, 1172 bp, Bovine  19866880592651
  misc_feature (1)..(1): n is a, c, g, or t
natgcttactttattacttcagaaatgtactgtactcctgattcatcgttgtgtttttatttaaaccaatctacaatgtagctcataaacattactggaaatgaatttacattctacaatctattaatctaaccctactcattacatacgtgaaccgataaatggccaataaatcaagccatgtgaaacaataaaacaaattaaccagcatcatttaaataattgccatcccgagcaagcagaacaaagtctcaccaattaacactttaagggtgttctcacgtgaatctcgtccttacacaaatagcactaaacttcagatggattttggaaaccatgtgagaaaaacagtggaaatcaaggttgttggaactggccctgagtttttcctgctcctgtgaatgtttaaatttgaaccatctccaaaggaaggcccgtctgcttagctccagcctcagcatccctgggttactttccctttcccagttttgagggacagggccgcgaaggcccgtgccacgtatcatctcggaaggccattttctggagcaggcgcaccttgcagcagggaggaccaccggatctccaggcaggtgttgtagccttgctggttatttcccagctgggtgaattaaacttctgtaggcctcgatttcttcatctgtaaaactgagatactgatgggatttgcctgaagaagaccaaatgtgtaatgtatggaaggcacttcgcagcggctatcgtggtgttcagttaacgactgacgctactactgctgtaagtccttctgccactttgcgcttgcactcagtcgctaagtcgtctgactccctgagaccccagggactgcagcctgccaggctcctttgtccatggtatttcccaggcaagaataccggagggggttgccatttccttttccaggggatcctcccggcccaggcatcgaacctctgtctcctgcattggaaagcagattcctgagccctgagccacccaggaagcctttactcaagggtatactcccttcctttccctactgcattttttttttttttacattctgctttgttcttgggacttaggagtacttgtggagtctgtgtgtgtctgctttttgatattgtgatgtatgtctatattgatacctagaaatagaaagggaatcaatt

SEQ ID NO: 42125 - DNA, 1835 bp, Bovine  19866880649072
  misc_feature (1)..(1): n is a, c, g, or t
nttgttcccacaaggctgcttttaaagataaattgctttggtaaactgaaataattcagctccaaagaaagatggccatgccgttttctactcggcacacaggaaaggaagatgcagattttcagggccgtcttcagaaatagagccagttttaataggatcccaaccagtgcactaattaaatatttcacagctcccaaagttaatgtgctaatattgggattctttttccaccaaatcagacaaattggccttctgtaacaccatcccccaccccagcgacccctcccatacacacacacacacacacactcacacacacacacacacacacacactcccagccacaaactcctaccgaatggttttctgaatggcattacaaagaattttgttaaagaaaagtcagactaattgctgccagaagacccgtctcatagagaagtctggttttcataagccagattcagtaagggttgtggttaaatctaaacctagtagaaggttcttaaggttttctcggcaaaggggagaaatacaaaggaacacaaagttcagccaaaatattccatgaggagggaggggaaggtagggaggaaaagggattcaggaggatgctctgaactcctgtttccttcttgaaggaactcttcttgctaccttttcttaggactttctccatacttattaacacccactgagatagtttctctaagtagctgtagctctgcactcagaccagtgacttaactctcttgacttccaagggctgggaggaatttcccaaccccaccattatctgagccacctctctgctccaggcttctccctcagacctcctggtagagttagtagcaaaaagccccttcagaaacaagcaggcggattcttctccgtctaagccatgtcgctgagggacacacggcttttctggagcctcaaggggcatgaccagtccaagcatccctgtcagctctccccggctttcctgaactaacccagcaagatgcttctcagccttgaaacagagctagacagcagtggtgtcagtgctgttgggtgagatcaatatctcttcacgtgaaaataaaatgaaaagtccccctaagaatggtctccttattaaaggattggtttaattttagatttctctcatcagaactttattctgttgttcctggaacttttttaggcggagtccccgggggatgattagaagccccctgcaattcatcatttccccataatcagtctccctcatcccacgttgtttcaggagccacccgcttatgtctcataatgtaagaggagaaacccacccagttcccaaccttcgagcttaatgggaatcttcaagaccattttaacttggagaaatagcctcaaggttagaactcttcactaccatattccctaatattccagaaaacacattcttttctggagcccattcaactgaccatggagggagtgatgagaaattgagagattatgtaacaactatgtttattgagcctggtcttccccactggagggttcttacagtccctgccatcatggtttttaacttctctctcctttccaagatgactacttcctttctgaattcccctctggccccctcgccacccccaacctcaccatagagatgaaaagagaattggaggaagacttgatgttactgtgcatttcttttgttttataactacaaaaagatcataatgtatgcaattgaataaaaactgaaaactcactctctttttccctctgacgatcctcatggtttaaattttgaaagatttccaccatcctttagtgtttcatattcataacaa

SEQ ID NO: 42126 - DNA, 2127 bp, Bovine  19866880696974
  misc_feature (1)..(1): n is a, c, g, or t
nttcccatccaccccaccctgacgcggcatatttgagaatggaggctaccgggtacacccaggattgtgctgggagggtcgagggaccctcccggtcacgggaaacaagctggggtgagtgtcgcagcctgtggggtgactagcaggaaatggcatgcgaagcgcatcatttcgacttttttttttttaatgcatccccccatttcgacttttgacgcttactcattctccgaatgaccgccgcaagggggagggggtcggggagagaaaaaccttgtgaaatggaagaaaagagacgtgagaaactaaagcctcaggcggcgtgggaggggtggggggaaagaatgaccggagttgtagtgaaaccggcagctacggcgagccgggaagccgctggaaagggaagaggctgggcttaaagaacctgctgcgggttgtagacaaaggcggcttgggaggcagaggccggggcgggatccgtcgctactatcaccctggggagagcgccagcggctggactcccgcgtggaaacccgggaaattcaccagccctcccttcagggcaggaatgcccggagtatgcaccaagctaagaacccagagggaaaaagtaagtttgggagaggacttaaccgatcttgacggtctttgaaccctcaactcctcttggaggcatgccttcaccgatgcgttccctcttcatcatttctgtctcttgtgtcatcgttttcatcgtgttttgtgtgttcaactttgggggagagcaaggcttccagaggctaaataactcagacacttgggtgctgactcaggtttgcacatcccttatcaaagacaaaacaccgttactttggagaaacaaactcatgatgtatgagaagtcttcctgcgaggcgtacctgacccaaagccactacatcacggcacccttatcaaaggaagaagccgagtttcgtttggcatatatcatggtcatccatcacaacttcgacacctttgcgaggctcttcagggctatttacatgcctcagaatgtctactgtgttcatgtggatgagaaagcgacagttgaatttaaagactcagtggagcagttactgagctgcttcccaaatgcttttctggcttccaagatggagcccgtggtctatggtgggatttccaggctccaggctgacctgaactgcatgaaagatcttgcagcctcggaggttccctggaaatacgccctcaacacctgtgggcaagatttccccctgaaaaccaacagggagatcgttcagtatctgaagggatttaaagggaaaaacatcacccccggggtgctgcccccagctcacgcagttgggcggactaagtatgtccaccgggagcacctaggcaaagagctttcctatgtgataagaaccacagccttgaagccgcctcctccccacaatctcaccatctactttggctctgcctatgtggccctgtccagagagtttaccaactttgttctccacgacccacgggcccttgacttgctccagtggtccaaagacaccttcagtccggatgaacatttctgggtgacgctcaataggattccaggtatgtgggattccctacttcacgtgaaggcgacattctgtacttgaaagggctttttgagagcctgcacctttttgattaggagataaaagctgaagtatgtggttttcacctgaattctttctaaaccctgaaagaattgatgttctttaggtgacaattcagtagtctaaccaagccaaacattggtggtattgatctgcagttggtcttgttctcttgcatttagcatcttattaaatctttaccgaagtcaggatgaattgcaccccatccccgctggtgattttcttctccccagatttgtcagacttgctgtaaccccagggccattggcttggccactcccctgcccattcgtagattcccccttatcagccagatgtcatcaactctgagaagctgaactgatcatccctctcttttccttcagagatttttatcatcttctggaattattaaatctacttttttgaatgcgtttgtttttggccttcttcgcattatctccatgaagcaggtcattttctattt

SEQ ID NO: 42127 - DNA, 2659 bp, Bovine  19866880857152
  misc_feature (1)..(1): n is a, c, g, or t
nttccagatgggagaggatactcctccagcgccaggccacaacacctgtcagctgtcagggcattgtgtgctctggctgcagcagccagccagcctgttacctgatggtgatcacacacagaggcaccgggtgctggtgaagcctgcggggagaccatcaagacagcaaaagcgccttaggttccctctgtcagcatctaccacccgtgactctaaggccagccccgatcacaaagaagtatgtgttgaagacgctgttgtttagtggctaagttgtgtctgactcttttacgacccatggactgtagactgccaggcttctctccaggcaaaaatactggagtgggttgcccatttccttcttccaagggatattcctgacccagggatcaaactcatgtctcctgcattggcaggtggattctttaccactgaagacgagaagaggccaaaaaccctaacagtgacttgtttacataaccatgattttttcaaaactttctctactaaatcttcagtgggaccctatttcctctttctggaaatggagcagccctgaggcaatactgaggccaacactgctgctgaaatactcttggctttatgagtcaacgagagagggttttctttggaaatttttctttaaaggaaaccattgatcaggatggagggcacatatgtatacctatggctgattcatactgatgtagggcaaaaaccatcacaatattgtgaagttattatttgccaactaaaataactaaataaatttaaaaaataaagtacacactaggcaacaaaggtttactgtatagcacagggaactatagtcaatttcttgtaataacctataatggaaagtaatttttaaaataatataagtgtatatgtataactgaatcaccttgctgtgtacctgaaacattgtaagtcaactatacttcaataaaatattaattaaaaaataaaatagaccattgaaaagtctgcttcactttagtgagtgaatcacaaaaggagcagaatatcacttagggctggatgctgtgctgtgctcagttgtgtctgactctttgccaccccacggagtgtaaccaccagtcgcttctgtccatgggatttcccaggcaagaatactggagtgggttgccattgacttctttagggggtctttccaacccagggatagaacccacttttgacttgatccaaagtcatggacttgattctgcgtatctcaaaggtaatggattacttaagcagagcacaatgagttcgggagaatatctaatttggaaaggatggtactcaaccatgctcaaaaggaatgttttgtgtttttttgtgttttttttcccccataacattctgactttgggctttgcaaccaaaacctccaatatgagatatgaaagtaatctatcaaaagattgctgctaagtcacttcagtcgtgtccgactctgtgtgaccccataggtggcagccccccaggcccccccgtcccagggattctccaggcaagaacactggagtgggttgccatttccttctccaatgcaggaaagtgaaaagtcaaagtgaagtcgctcagtcgtgtccgactcttcgcgaccccatggactgcagcccaccaggctcctccatccatgagattttccaggcaagagtactggagtggggtgccattgccttctccgaaaagcaggttagaaagtttaaatgccaacagccagaacatttctatctataaccaaatagtaagtacacttaggtatcttatcagttttgtgattgcatttttcacacatttatcatattctgaataagcaatttctccttcctcagaaaagaattctgaattgcaacacaagtttctgttgtccctgcccctttggtaaagagtagttacacaagtggccttttctctaatgctcatataataggggtcttgatgctaataataggcactctctcaggtacctgggttaaagaccaaatcctcttcataatcctctgaaggagtttctcaaaatcagagagaatagcttcactttaaaatataccacttgtaatgaaaaaagaaagttctggatacgtaaaccaaatccacctcttctttcatttaactgaggtagtggacatgaaataacgaaattccaaatcaacaaaagaattggcatgaagttttgggacctattttatttatttcacagtcattttttttaatcacttttgtttctttcattttttttatttttgactatcctgggtctgcatcgctttctgccagggctttctcgggttgcgcccagcggggtctattcttcctggcgacagcttctctagctgtgacggaccagctctagggcaagcgggcttcagtcgctgcagcacgtgggcccggttgctcgcagcacgtgggaatctccccggactggggactgaacccctgccccctgcactgcaggcagcttcctgtcccttgcaccaccagggaagtcgttggaacctattttaaaagatttgaagtctagggtaaatatgagcagctactcacagggcagaaagttacagaggagaatctcccagcttcatgactggacatcgaaccaacaaggaaaaaagaagaacaggaaaccatttaagatttattaaag

SEQ ID NO: 42128 - DNA, 1588 bp, Bovine  19866880899483
  misc_feature (1)..(1): n is a, c, g, or t
ncagactctgcagttgtccctcggtgtattagtgctttttgaagcactagactcctccagagagaatgtcagccccagccctgggcagttttgacaaacagagtatatattgatacatgataaagtatgctagaaatcaccccagcgctaagggctactatagttttaatatcatcatttgaattaacaagcattctgtggagaaataatgagctttcattattcagaacatcatccttacccggggaactcagaaaccattagctcttgagaacttaatgaaaagatgataaagaatgttttagataaaagtttgaacgagcacacttgataaccgaggtaaaatattaatgtttgcttggatgatgtattggggtggctgagctgggctcagtgaagccacaatgccaagtgtgtgatgagcctgtgggactgctggaccagcccaaggctgggcgccggagctgtcatgcccagcgtcacctcgctgacagcgtggccaggtttcttttagacttacagacaagaggggattctggtggttaggaaaaagaaggaatattgctaaagtgtgatcaacaggtattgatggacagattcagaaatggcttatcaagtaatttttttttattggagtaaaattgctttataatgctgtgttagtttctgctgtacaacaagtgaatcagctgtatgaatacattatatcccctccctcgtagacctccccccacgcccctcatcccatccacctaggtggtcacagagcaccacgctgagctccttgtgctatacagcagcctcccactaaccatctatttttttttaggtctctgatgttttaaatatagataaaatactagagtctatatggtcaatattttgtttctcatgtcttagtgtgattaaaagactaggaaattttaggttagcctttcagttctgcattttaaaataaatctgcattgggaagaggaagaaaaaagaagtgaaaaacaagcaaaaaaagggattgtatctttaacacttggatatcaacgtgaatggtctctgaactggcagatggaacttgatcaatgtagacatgaaataagaataaagcttacagttgggctcttggaaaatgtagaaggtagaatacaaaaaagtgccattcacttgttcactgtacaaagatcacccctggtaatacttttagcctttttttttgcagggtttagattatttacatggcagcgaccatgtagcatatgcagaattatgtatgttgtcatttttagagacagtttctggttataaaaataatacagaattatctaaaactggaagatactggagattattaaaacttttgtccatgaagatcaccctggagagcttattaaaaggcacagtctcctggaccccacctcagaactactgaataaaatatccagcgaagaggcagtctcaggggtagaactgtccaggttagactcttttggtctcatcacttagcagtacgttgccttgagcgtatttttccacctcttgaagctgcagttctctcatttataagttaaggctaaaaagagtacataccttaagg

SEQ ID NO: 42129 - DNA, 1153 bp, Bovine  19866880902066
  misc_feature (1)..(1): n is a, c, g, or t
nctattttcgctaatttgtgttattgggcgatcagaaatccttacttaagggattagccactgttgtactgttttactccagtgttccaagaattccttcagagattaagaacaaatcccttggaaaaatgatccaattttttttagtccaaaattacttcccgggacaccagtgcaaaacatcagaaatgagctaatcccttaagaaagggatatttgataactcaatagcacaaattaattgtgagaatgctcagggaatccaaatgcattataattaatttaattcttgagaaatacgttgaataatgtagttaatccccataaatgtaacctagtggagggaaggtgggagttgccgctcttgcccgtctttgatttgataagccaacgatcagcctgaagttcgagaagcgtgtttcattctgcagctctgcactctacacttccacacggaacagactgtgaaagcgtgtaaactacatagaaatgagacgaataacatttttgttgtaggaatagatggaaacaggtatggacttacggctgttattactcaagttagtcatctctcgtgcaggagaatatctatgttcttttcttctctctctcttcttggtttctctttttttgacggcactgggttttcatagcctggcatgagcttcctctagttgaggtgggggtttagttgcctcatggcatatgggatgttaattccccacctaggagtcaaacctgagtcccctacattggaaggcagattctcaatcattgggccaccagggaagtcccaaattctgttcttctgataaaggcaaagcgccataccatcagatcagatcagatcagtcgttcagtcgtgtccgactctttgcgaccccatgaatcacagcacgccaggcctccctgtccaacaccaactcccggagttcactgagactcacgtccatcgagtcataccatagagggaaaaataaaagtctgttcggtgaacacatttgaagctgaaggcatatattggctttcatgaacttaatgactcattttattctttccccaagaggtccagagttacaaaagcattatattttaagttgggaattcctcattacagaaatgttttatgtactactgcattcagattaagctt

SEQ ID NO: 42130 - DNA, 1344 bp, Bovine  19866881090605
  misc_feature (1)..(1): n is a, c, g, or t
ncggcaaacatggcgggggaggaggaccccgccggccaatcagcacgtgccctgggttcggatgcggatcgctcctgacgtctgctgctgggccgtggggggtgtgacccgagttcattgcccctcgagctgtagttttctggtggtgttcttttgcaactaaatatttcaaccaggctttcagtgggtccttccagatctgtcatctacactatttttactaatagctgactgtggatagattggcatttccgtgagttgcctgtttgctccagaaacctgctcaacttgtctccagcggcagaacaagagttttgttctctgaacctgtcacttaactataggtttatgaacagaaagttgaaggcacccaaaccccaaggttcttccctgcccagtgctgtgtgctatgcttagctgctcagtcgtgtccgactccttgtgaccccctggactgtagcccaccaggctcctctgtccgtggcgattcacccacctctgattccaattcccactcttgttaaacctgcttgtgtccgtagctgtatgtgtctggtcttttatgttaagaaaatatgcatacatgcaaaggagaacagccgttgagcttaagtgttcctgattatttgcaacatattgttcagccagattaaactttttcatctttttctattgcatttctttatctgtctttatctactggatgtaatcacaaccaaattgtgctatggaaagaaacacattccataatttgggcttattaaatttcccatcatcttccttttatgtttctttcaacagacattttatcatcccagaagatctaagacattttcccatgtaaatatacatctaaatcaccaaattcttcattctcgtttcttctcactcagtgcatcgattctttttccttttcactttataaaattgtaaataaatagccaattaaatgttaaatcactgcactgattgtattctacttgtttagtgataaacttctcacatatttacttagtgtgtcattataagtttccttcttgcctgataatactttgaacattgggccatatgctttgttaaagatagactttgagtttgtttctgagagaattctcactacgaaatccatctctagtaatggtctctaaaatgctgtttagcactctgattttctctcattatttccattggcttaacaggtagtcaaagatgctttcctctgttgctgtattaaagacccattacaaattaataatgagaggagcagcaaatttccccctaatattttctcagtcttccactgattgaacacgattctgcgcatacaccaattccattaaaaag

SEQ ID NO: 42131 - DNA, 834 bp, Bovine  19866881149475
  misc_feature (1)..(1): n is a, c, g, or t
ntgctgctgctgctaagttgcttcagtcgtgtccgaccctgtgtgaccccagagatgggagcccaccaggctcccccgtccctgggattctccaggcaagaacactggagtgggttgccaccaccaggctcccccgtccctgggattctccaggcaagaacactggagtgggttgccatttccttctccaatgcatgaaagtgaaaactgaaagggaaatcactcagtcgtgtcccactcttagcgaccccatggactgcagcccaccaggctcctccctccatgagattttccaggcaagagtactggaatggggtgccattgccttctccgaataagacagtagagctgccactaaaaagcaagctgactaatcgctttccaggcatttatttatttttcccaaataatttcaaagaagagctgaatgttagcaaactcaatctatggataagtgaaaaaaaaaaaaaaaaacaggaatggaagttcatacccacctgggatcctattaagagtcacccagaaatgttcatcgggagaataggtatctttggaccactggagcagatcaatggcccttcggtcttggaagacaaacttcacaaactctctggtgagggccacgtaggcagtgccaaagtagatggtcaaccggtggggaggtgaggttttcaaaataccggtatttttcataaaagagccacctctgcccaagtgctcccggtagacatatcgagtccgctttactgcatggtcaggaggcagcaccccggggggtgatgtttttccctttaaatcctttgagatgctgaacgatctccctgttggttttca

SEQ ID NO: 42132 - DNA, 1056 bp, Bovine  19866881196208
  misc_feature (1)..(1): n is a, c, g, or t
ntctaaccagggctggtcatttcccaatctcattttccccgttgagttggcatgagaggcatgagcaaggcaggaagcggtcctgcctgttatttggtttttattaccttctgcatatacagagaggtccctggtgtccctttccatatctaagttcaacattttgggcacagaacccaaattcagtaacacgcagttatggaataaacaaggaaatgaatcacaacggcttggatgaagtcagagctctggagccaaggcacccacagagcgcccacatttacaggcatggtcgatggtgctgctgattttatttaaagctggggaatgctggactcaggctgcagcagagagaggccgtttcaaggtaaatgcatcttttgcaacttaagctggtgctgtttgtaagcctggggttggagagccttgtgcaaaatactttccaaccaggcccataattcccaacaagatcagatccaccagccagggacactggcgagaactttacggccgccctggttcatcagcgctgcagtagacatctggaatgccagagtgtgaacctgagctgatggagaaagaaaaaggcccctgggaggcataatttcctcctccatccaactatgcttaactttcctctgcattccgagggcttcccacgtggcttacgtagtaaagaatccacctgccaacgcagaagacacaggagacatgggttcaatccctgggtcgggaagatcccctggagtaggaaatggcaacccgctccaatattcttgcctggaaaattgccaggacagggggagcctcgcaggctacagtccatggggtcgcaaacagacacgactgagcactgaacaggcctctgccctccaaaagcacacaaactctactgccttgaatcagagtttgaggatgccagcctgcttcttttccttctcaatgaaatgtcccagatagccaggccctgcactgtcatgagatgacatctgccacacaaaaacaccagttcatcatccctccctcctcattctgtcatttcatggcagaagtgtc

SEQ ID NO: 42133 - DNA, 937 bp, Bovine  19866881261166
  misc_feature (1)..(1): n is a, c, g, or t
nccgagccggcctcggtgcgcagtcgggccgcggggacttcggcacatctccgcccggccgcaggcgacgcttccatccccccagccgccacccctcccccctttccctcacccaccctcctggcctgggccccctggggcgaaccatcaggcgcgcgggagccacggcagagggccggggggcggggggcagccctgccggaaagagggacctcccgtggggccgggaagcggggtattcagcagcaatcgcgaaaggccttggttagggaggcgctcggtcccaagctgggcccaataacccgcctgtgggccccggggaaagaagtcaaaagtcctaggcggccttgacgcttgggggaataaagcggagaccccaagacgctgcggcctgagggcgcagccaagtgaccccggagccaggtgacagatgctgggggaaatgaacacgtgagcaccgccttgttgtgctctaagggtaaaaatgggaaacagtggttcaaactcaagcatctgtgtgtctaccttgatgcaaaaacaataccctactctccaggaaatcgattatttggtccgtgagatgtttttctgccagacggctcccaaatcagatctgatgaaggaaggcctctaagagcggtcagcaggtgacccggacaggggcaggggcgacccggctgtccggcctcgggagaggcggtcgcagggcccggtgtggaccgggtcccggagcttctcggatttgctgagtcagctgccggcgccgcggctttggctgttttcaaccctggcgactgtgcttcgctgactggtgtgtgtgacttggtggtgtaattattggttttgttttctaatatgtaattactctttgtcgtcgctattatgaatccgccgagcctgattcgagcagcgaaatggatgcaagttttgggggtta

SEQ ID NO: 42134 - DNA, 1046 bp, Bovine  19866881631009
  misc_feature (1)..(1): n is a, c, g, or t
naaacggtcacctgctgaaacaccctcaggggcctttcaggaagatcaactgcatatgaaacaagtatttcctgccgccctgccattttgtggattctgtcagataaaatacagagactcttttttttccccccatctgcatgatatcctttggtagttgtcgcctccataatagggagctcttgaaaggaccaaggaagatgagaaagcaggtctggacctctctttggagatgctctgcggtcttgagcaatttggtgaaagaagaggggcaagtcagaagacagggggagagaggaactgcagcggccctgctccgaatatagaaaccttggtttgctctctggatctgatttggcctgagaatgcaggcatcggataaaaataacaagtcacccagtagaggacggatctccggcttcgcccctgcccggggctgcgcatgcccagtacgcgcctcttcggtggagaagcgccccgccgcatcccccagcagaaggcccgagtgagaaagggcctgtgtttgatgtatgagctccggctcgccatcgtgagtcaccccagaactagctgcaggcaaaacaaaaatcttttgtgattaattagaaaaactggacaattatgaattgactgcacacagccagggtatggtaatataaatagtaatgactctggcagagccggccgaaagctccatgtttgtgtgagctcactggaggagggcacatttttaaacagggaatctgctgaaacaggacaattcctgatttttgacgatctgagggtcttggtggagatttcagctgacaccttggaaagggattccagttgaccactctccgacgcgcctccaaacattggcctctgtgccaaatcgattgttcttttctttctttttttaaaagaccccagacatatccttttcagcagctctgtgaaaccgctcacatcttttgctaacctccctgccagcgcacgtcctttgccttcttggggtacttgcttccactcttccactctctgaggaaggaacacagataccgttt

SEQ ID NO: 42135 - DNA, 1059 bp, Bovine  19866881888778
  misc_feature (1)..(1): n is a, c, g, or t
naggaggttacaaaccagaacagcttgctggcgtataataaagatggaaagtggcctttgagagcatggctcttcatcctctttgatcatatcttcatcacctttgatcatatttcctcttgtgactgacaggtgtcagctgtcaggcagccaaatttatctgaaaaatgtggctgagcgttttttagaagaagcgtttttaagaagctgaattcaagtctgtggctcaatatgttttagacagttttttctcctgtttttgctgcccccttctcacaaaggtgcaaggaaggctcccaaacattccccgcccacattcctgctacctcccaggcaaaataaatattacacatcttctcatttcatactggtgcatgtccgtgaactgcttaaccagagctttgattccagtctacgcttttctgtgttccttcgagttgaatcattcctgggttaacaaacagtaatgatttagagacatttagaacaaggacttcatttgcctcatgtaaatacttcgctgttttttggcgctaaattgtgtctgactctttgccaccccatggactgcagcataccacgctcctctgtcctccattatctcccagaatttgctcaaattccatcgagtcggtgatgctatctaaacatcttatcctctgccacccccttctgattttgccttcaatcttttccagcatcagggtcttttccgatgagtcagctcttcacatcaagtggccaaagtactgcagcttcaacttcagcatcagttcttccaatgaatattcagggttgatttccctttagggctgactggtttcatctccaagtatcaattcttcgggtgttcagccttctttacagtccacagctataactctcacagccagatgtgactactggaaaaaacatagctttgaccatataaatactacatgatcaaaaaaaagtgtgtgcgtgtgtgtgtgtgtgtgtgtaagattattaaggaaatatgagaagtttgatctacatgagcaaggcagcacttttttcatgatgccttgatggtttctt

SEQ ID NO: 42136 - DNA, 2154 bp, Bovine  19866880279966
  misc_feature (1)..(1): n is a, c, g, or t
ntccatcctaaaggagatcagtctgggtgttcattggaaggactgatgttgaagctgaaactccaatactttggccacctggtgcaaagagctgactcatttgaaaagaccctgatgctgggaaagattgaaggcaggaggagaaggggacgacagaggatgagatggttggatggcatcactaactcgatggacatgggtttgggtagactccgggagttggtgatggacggggaggcctggcatgctgcagttcatggggttgcaaagagttggacacgactgagcgactgaactgaacatgtgtagatgtgacttactcgaagttaatgtgtctgagtttccttctcaggaaagtggagaggacgataatatccccatgtacctcactgaatgcactgatagttttgggggcctcggacagaacgcagggttgagatcttgggaacatgcatcaaggcatggaagaggaggacacccatgaggcaagcaggaagcaaccatgctcttctcatccctcacatgcctcttaatctgctttgccagctacttctttcctgcgtgaaatctcaggctggtcctcagaacttttccgaccattggaattatatagtcttctcatcacttctcaaaataataacagtcttatttgagaaattacagcgcccagtcctacatggtcaagtgccaaacttcatttagaaggacagcgtctctctttccccactttatcctggcttcaaagtgaatttgtaacttctgctaagaaggttgatgaggggcaagaatcgtgaaactgactttcaccacctcctttgaaggacacactgtcctcaccggggccactgtgactgtgtgacattaagcaggctgtcccctcccgggcctcgtgcttctcatcattggaccgaaggaggatgactgcacatgggagactgaggtgtgagagacatccctgcgggccccggcgtagacagagcgcccagtgaatcaccattgctgtttccccgttactttttttttagactgacagtcttgttgcaattgtgtaagaacaggctgcaatgcatttggcagattgagagtcacctgcagccaaagctcgggttgtgcaggctgccgagggctcagggccctgccctgcatggtgaagagaaaactgagaggtcaagttctaacccaggtgggaaggctggtccctcgggcagtctgactcccttgccttgctctcaggaaggcaaagggcatcatttccccgtgttgccgcagtctccttggtgagaggctggggaaggtttacgaaattcccagggaaggacaggacctccctgatgagcaccccctacctcccaccccgctgattgttgttctcttccagccacttcccagccctggccaccctgaccgcctacgaatcaggctgtgtgttcccataacctgccagcagtacatcaaaattacacgctgtaactgttaccctatacatataatgtgattatgcatattaactatgtttaatatgaactggaaaagaccctgatgctggggaagattgagggcaggagaagaaggggaccacagaggacgagatggttggatggcatcatcgactcaatggacatgggtttgagcaaactccaggagatggtgaaggacagggaagcctggcatgctgcagtccgtggggtcacagagagtcagacacgattgagcgaatgaacaacaatctgagtcgtctaaagaaaagtgaagatttggagtctggctggataccctttccatgggctcttcctgtggacaactctgtctcatgaatcatattccatccagaacctatctcctcccctgtatcctctctcaagttgttgtctgcaaggaggcatggatcttagctatttgaaactacccaattaatgaagaatgttggactctactcaacactaaatctactttataactttttgatgttttttatctggtgtctcaaacttctttaaaaggaaaagaatttcaaccttgaaaatggcatcagtaactactgaggacttttcttgagaacacaaagccacctcttattcataattagtttttcccagacccctgcccataccacctatgcaaaatcacttgaagacaaatggtattattcattat

SEQ ID NO: 42137 - DNA, 1383 bp, Bovine  19866880591663
  misc_feature (1)..(1): n is a, c, g, or t
ntcataactttccttccaaggagtaagcgtcttttaatttcatggctgcagtcaccatctgcagtgattttggagctcagaaaaagaaataataaacatgatcacctctgctctacaggtggcctcagtcccaccccagcaggtggaggagctgaacccagtgtggggccaaggtcacctcagggggcactgtcgatgcgttgtccagacatcaaaccttgcttccacacctgtgaaatgtgggagaccgcctcagagcccctccagacaacatccagggaccctctggagggaggtccctgcaactccagatcctcatgaaataaggaagcactccagctcccttcagtttgaaacccgaagtctttagcaaaagcttatttaaaaaatgatgcttgagaactttactgaaggactagcaaaatgattgttccaaaggactttaaaaaatcattattgttcttataaaatcagcttataatactagaagccccatgttttttatttgcttttctgcacagctggaaggtaaaacagacatcttctaattatatacctatcataagaggttggtaaaagggattctttttccactgatgtactttttaccactgaacaatttttttttgagaaattttctatctccgtttcactgtagagattgtctcacaggaggtctagttaacagctttatttgtggaaaaccacagcgctcttgtaagtcagtactttgtgctttgggggttttcaatgaatcgaattcagggtttttttcccattgcgctactttatatttaaaagttcttccacaagtttggtagagaaagcaaaaggcctgagaaagattggtctgaggcattgctgataaaggagaagttgctagaaaattcctgcatgactacatcttcctgctacaggggctgaaagaatagtggaaagcttggtgtttctatggtccttccccgtgacacctccaacgtgccttgtctgtctgcttctcgcatataagagcatccctgtagatattagaggttaaagaaatcacactgacagaggagagattcaaagggcacctgctgcaggtgtggggagggagcaggcttcttcacctgcagaccaggtgagatgggaccgcagaaggagagggagcctgggggcccccgagcatcacaagctgtgcaggtgttctgctgggcagggactcagtcacatcgcgataggagcttctggaacgacttgtagctgggaggccacccaagttgcacctggacccacgctgacacctgagagctgggggccgctgtggcaccaggagctggtcagggcatgctgcagtgcagactgggggtctcggtgccgcgaagggtctgggtcctaaaggag

SEQ ID NO: 42138 - DNA, 2324 bp, Bovine  19866880710622
  misc_feature (1)..(1): n is a, c, g, or t
naggttatttacacaaaaacatctcttctatctggggtcaagatacagaagaaaagttaactcacttcctagtctttatatagagaaaagatatatgtgtatatatcattcccaaggcttcttacagccttcgtgctttacttgtcatctgtaattctcacaataatcttatacattcatcagttttatcccatttcacagagaaattggggatgagaaggtcgcataacttgttgttggctctctgtctaaccctggaggcgggtggcacaataccctttgattgacaggcaaatgcaccaatgagctgtgtcccaaggaagaccacttgttgatagtagtgtagcctactctatctgaatctgaaaatttcaacattatttctaaaatgagactttttccacttggttacctcgacctttcctagagaaactgtgtttgtgtgtgtggtcttattttctataatcactcaagtgaatgtttgttcaagaccagaaaagcctaatgacccggcgctaagcttctctcaggtttaacttcatatttttttttatttgattcccaaacagaatcatgtaaattaggtagaaaacatgtttcctgggcactttccccggaaacttttattcagtataaaacagtataggagactgccttatgaagcaaaaggagttttcaaaaccgaacttagaagcatttattctcattctgtatacctgcataacaagaaatgcaggctgaagataagcaacaccagatggatctataagaaggaaaaactgcactagaaattatattatatgccactataaagagttataattttattttagctcatttgagacatgactgtttaaagctaatattacagcaagtatatggggataatgtcatatgtagttgtaatatataatgtcaacagcacaaaggatgggggaagaaaactacactgttgtacatttcttatttattatgtaaaatactataatactaactctaagcaaaatgttcatagagatgcattgtaacctttagcgagcatgcatgttaagtcgcttcagtcatgtctgactctatgtgacactatggactgtagcccaccaggctcctctgtccatgggattctccaggcaagaatacgggagtgggttgcctcgccattctccaggggatcttcccgacccagagactgaacccgtgtctcttatgtctcctgcactgacaggcaggttctttaccattagcaccacctgggaagccccgtaatctctagaatagccactaataaatgatgcaaagtgctatagtcaaaaagccaactgaagagttacataaccccaaacaagatgtattttaatagaaattcacagactgcttccaaaatgtataaggaaatgcaaaaaagccaagcagttataaaaaatcttggggaaaaaaaggaacaaacttgattctcacactacttgacttaaagtattattactgactctctaataaaattataatttgcctctgcttctgaaggataacttagagaaaaaaatcataacaaccaagataaagtttctttccaattgacccactcagcctgttttcacacgatcgagacctttagcacaaaaagaagtagatacaattataaggaagaaagaactgaagggaagatacaaatatcttcccttcaatacaaatctattgtctccagctacttgtaagaaaataaactatatgaatgttcgagttaaggagaaacagaaggaattccataaaatacatgtgaacacgggaagagaaatggattgtttggacagaattatctaaatttctcatgcaaaaagaatttaccaagcccatacatttgataaattcatggattcttcaaatactgaggaagatccatgtgcataattccaaattatttgtcctgagattgtattatactggttttgtagcacatttactatcaaaatgaagctccgttcaagctaataggaaagttttcttgcaatattccaaaacaaaaacctcagatgattaaacttcaggctggggtgaacattgtgctgtgcagagtccacagaagcggtctgcatgtgcagagctagaacatgattataatttattttctcaagacacagagtctcagatggaaattttgtgcagtctcacttatacatgtttggaatattatgtattatcatgctgttccaccaataaattcaagtattaataagtacaaaaaaaagaacaaataaaacacaaagattaattcactacccaagactgagggtaaatcaaggcctaagccttttcttagcatgagg

SEQ ID NO: 42139 - DNA, 715 bp, Bovine  19866880808278
  misc_feature (1)..(1): n is a, c, g, or t
natgggaaccaggactgtcctcaagcccagttttgtcagttttgaaatctcgaatctcagatgccccaagtcacacagctcattcagaagatgggaagacatggctctccccacacccctcaccgcagcgtcacttggaaggaacatccctttggagaagccctttctcacctgggcagcctcctaccatccagtgaatctgcgtggccttgcctttctatcctcagataacaaaattcataaccttactctgtggttgactgcaagtaagaagcgagtacaacaaagcacaagcctataaacaggtgagtgactgactgtgacgaccatgggagacattccatttaaggatccaggaactagtaagggttcaaagattcttgagacctttgttatcaggaccccgtggaatcgctttcagatgtgggaataaaaattgtaaatacctttaagagtgccctggggatttttgacataaagaaaatcatcccaactttcaagactaagtctgtttaaattgatacatatgtgttaagctctgggttctggtctagaaattgaaaacgacctcagttatgcctgtaaagtttttaccatgaccgttactgtgagccattcaaagttctaagatttcagcatctccttatctattgagtttggggtttaagagtgaaattggcttttgcaaaggcagtagagaacacagtgctttctt

SEQ ID NO: 42140 - DNA, 1583 bp, Bovine  19866880823702
  misc_feature (1)..(1): n is a, c, g, or t
ntgttatgaagcagcaagcggcaggcaatagagagaatgtctttagaaaaaaagggccctgatgctcaccaaaaatctgtgcaggagtcattcctaatgctttcccccctctcggcaatatgaatgcagacctggaagcctttctcttgcggagtgagcagggtaatttaacgagctgtttagaattatcagatgcctttgaaatttccaaatattctattcctgaaaatagcacatgaaatggcccaggtatttttcttttctcctcccccaggcactctccctactgtgccattatcttcggctgtgatttactccggctctcccaaacagacaactgtctgcacgatgcagagatggggccagcacccaagcagtccccacttcttggaaattgaagggcagccatcactcacccgagttactcctaatgaaggaaatgtatgcatcttggaacacgtgaccggatggcagtaaacgaaacagcacagggagctagccacccagcggccagagacaagcgtgcttgccatttttctgagacttgtcagaataggaatgactccatccaggagaggtaatggatgtgaaaatgggagatggagccgtgggagtggaaagccgcatcactgctttatttccacgcctgtgggttttactctgtaatccaagaccatgttcatgggaaaggtgtgtgccggccgtttttcggccagggccaccactttgcacacgtccaagactgctttttgcatcagggtacccttgatcatcagggtgcctttgccttttgcatcagtgtgccagcctccccagcccccacccccagagtgctcgcctggcactgcctcatctgagtggccctgctgcaaatccaccctgaaccaaagctgttagagacctgcaaaatcctgctcccgtttctgcacttttcctgagattggtgttgtgcgtcccctgtacccacgctgtgggcttggtttgtaatatggcatcgagggacctaccagggcccccacctgggaccaaaggtcatcctgctctgcgtgcatgctttgcttctcttctcacgtaaatggtggctttattggagagcaacagtctaagctctatgttgctcttttaggacaaatttcttattgtcacattgtcactattatcgtataagaaaatatcaattgaggaaaagctctgtagttatttcgaaatagctctcccaatgtaaggagtctcccttacatggatttttttatccctcaatacttataagatcatctttcattactaaaaacgctccagggctcagtggtcacctcgtcctgccccattgtctggttcagggtgtcaagtgtaattcctccaggtctctaaattagaccaaggctgacctggtgtctctggattatatcacactgtctcaaaactctcggatcaggttttgatggaagaaataattgtttaggggttgatcttcaaggacaatagtttaatttaacagagaccttcagaaactttacagagcagtcctccaacctggcttgggtcaggccctccgatttgcaggtttagattttccagggtcc

SEQ ID NO: 42141 - DNA, 2752 bp, Bovine  19866880899528
  misc_feature (1)..(1): n is a, c, g, or t
ngcatcctatttatgtaaataacagcaagggcaatatctgcccccaacacacacacactgacctgctttctagccttttacttaaaagcagcatttctctcccagtataagaaaacagatcgccattaatacttctcaaatattatctcattcttctgtgcttctgtgaaagcacctggaagtccccaccatcgagtaaaagaaagaattgagcccaagaatacagagggagataattgcgtgcagtaagccataaaccaccctgttaaacattaccttccggggtagttctgtgagcacagaactcagccccagaaatggcttgtgaggagcacacagcagataaatacttcaagaagcaattgtactaaattctaagcaacagcttacaagcattttctgtaagggtacactgaattgagtccattttggcaggacagcagaaaggcatctcatacaagaagttatttaagattctgtttaccactgtaccgacaccaatcgatactgtaagaggatcaaaattataaaaggacaagtgagtaagtgatagttgcccagctgtgcccgactctgcgagcccataggctgtagcccaccaggctcctctgtccatggaattctccaagcaagattactgcagtgggtcgccatttccttctccaacaaaaggacaaatctttccccaaatgctttcctatataaagcacatataccataaccagtttaagtttttcagatccacgactgccaacaactactgtaacatgacctggtttatcactaacccaagcagctggatattccagcctcttaaggagagtgatctagcagagaatgtttacaaagcacaattcttgacaagaacatgatgtcacatggctgtaggacgtatcctccttcctgtctaaaaatatactttcaagcacagttaatgacacctctctgcaagttctgaattctgcagataaaagactgtctatactttccctgcaaggataaaagaataaacaaacaaaaatccactttcagcccccacaataacgttattgtgtgattcagctactcaagttaagaaaattctgcacaaggtcatagacgaacttgcagaaatgaggacggaagtgtttttcctaagttgaagcatcttacccagcatcagcttttggaaacagtaaatataaaatacaatcaagtttttccttttttttttttaaatttcagagctcccagccccaccccactggtccctggagagaaatggtatcgcacttgaaatggagtctctccactggcagtcgagcctgaatatttgggaagagctgtgcttctgagctcaggacaggcctgcggtgaacagagaggcagcaaggggcagagcaggtgctgcaaacattttccagaaacccataggccaagatccctaatcagcgaccacgtccgtctggttctggctcagaaccgggtccacactgaagggcgctggggtgccccttacctctctcactccccacctccactctctactacacatcagaccccagacgccctttctcgacggggttttcctccgttcagccaggtgctgtaagctgcccagaacaggtgaagggccacgtgggcactggtggcagacaatccaaagccaggccagcggctgccaggctgtcgggggctgcgtccaggtgatggacaccctggtccaggaaaagttacacaggcctgggaaagaaaacagcgggacctgcgtgtcctgcccacgcaattcgaaacaaaatgcaatcgccctaaagtacgcgttcccaactcaaccgtctaaatgagcttctgtcacattacgtgataaacacaactaacgatcagaagccgccctgacctcccgagcagactgggcgcgagggtgactaacagttcctgtccagctcaaggagcaagcagctcccctcaacttgagatgccttcacagggctccccactcccagaggaagatgctgtgtctccccacccctccttgcccgagtggcaggtgcttcctccactctcgctccgaaccagcctcggtccagcggaacctgtccaccctcctgagcccctgaccagcagctgtaccacttcaccgacggggatccaaatccgagtctgaaccatcgccggggacttgttggcgagagaagtgagcaaacccaatgacgagcccagagctccagctccttccgacccccaagtagcccaatgcgagctggtgagtcccagcattggagcccagagacgcctggtgccaggtcgcagatactgacctgttcctcagtggccttttgggcaccaccgctcccccgaacaaggggcccgtccccggacagaagctgcattaaaacaagagctgtgattcccacaccacagaatccatggtacatgattgcctccgttcaccatgtatcattgccttgcgccttgtctttctggaagccacgaggagggcagaacagactttcaccaccagactcctcagtgatgtttctgacacagaactggacactggtcaccgccaccaaggcccccgctgcaggggggtggcgggacactcctctgggaaccatggctgctcccccacctctcaggacagcggcccctggaaaacaggaccatccatcccacatgcgggcaagtgaaggaggcctggggcggggcggggggggccagaggggtcagcatctcacgtgcctggacccacgcctttgagaagccctgtgta

SEQ ID NO: 42142 - DNA, 1098 bp, Bovine  19866881278843
  misc_feature (1)..(1): n is a, c, g, or t
naacgaaaggagcgtttacactacctaccgaagcattaactttgtgtatgtaagaaaatattttaaaaacctcttcattaaaaatctgcaaatatgggactttctttttccgtctcacagatcttttctccttgtttttcctctgacacattgaagtacatcttaaacttttcttttaattaaaaaggagtataaaaatgtaagggcgggaaggaaaccaagaagagggggtgccctgtgtgcttgctagcggaaacggatatttgatatatgagacagatttggagaatggaaaagtaaggcataaaatatctttctcaacaggagaagaaaacttgtgatgcccagaaccaagaaccaattatttttttctgattggtgtcttaatttttgaaataggaaatgctatggaaatccatatatgccaacaagggtgtgaaagtgtgtgttggtagtatttgaaggtctgttgatggggaatttagcttttccatgcaatttattttgcctcattctggaataacatctatctattgagtctctataaatgatgggacctctgtgtgtgtatatgtatatatgtgtattatctatgtgtttgaagacatcctttaaatcaaacacgttcactgagggactcttatctgtcaaatattgtgctaggctctagaaaaagtcaagactatattaaataaaagcatttatccagaaactttgcctcaatcatggattttcagactgttcaggtgttttggcatctgcatgaagttcaaaggagcggagtagatgacaatagaaaaaacaacacgcacacacaagtgtgcacatgtaaacacacagatgtatgcacaagtacacccgtgaacacacgcatacacatacatattagcgtccagcatactccagaacacaccagggttttcctcagtactgctcccaagggcaatgggtgttctcggggaaaggattctgtgatcaacccgagtttgagacacccgacaccctccctttcttgcagagtcacagtctgcggccgtgacaggtcctctgaagaatctggcactgaagagtccatttccgtcagcgtttctccatcga

SEQ ID NO: 42143 - DNA, 627 bp, Bovine  19866880411796
  misc_feature (1)..(1): n is a, c, g, or t
nctctgctgctgctgctgctgctgctaagtacttcagttgtgtccgactctgtgcgaccccatagacggcagcccaccaggctcccctgtccctgggattctccaggcaagaacactggagtgggttgccatttccttctccaaggcatgaaagtgaaaagtgaaagtgaagtcactcagtcgtgtccgactcttagcgaccccatggactgcagcccaccaggctctccgtccatgggattttccaggcaagagtcctggagtggggtgccattgccttctccacaagttgctctagtagcatcaattggtctgacctagttcctttaaaagtgaactctcttgacgttctggcattggttccaagtcaaaggggagggcgtgaagcccaaacctcagtgagccccttgagatacaaagatgagtcagttaaggaacttaaatctagcaaagataaggcatgcaaatataaccatgatgcaagttacacagtgtgagaagtgtctgtgtaaaggatgtggagtgctgagggaattcaaagggtagacagcttgtggaggatggaggacatctctgcttccacgaacactctttcctgtgagaatccaatccaaagatactcagagt

SEQ ID NO: 42144 - DNA, 2586 bp, Bovine  19866880560067
  misc_feature (1)..(1): n is a, c, g, or t
ncctttatctgtatctttatattgaagatgtgttaccttagataatctacagttgggttttatttttatgtttattctgatcatctctatcttttactttttgtatttaaaccattcacatttaaagtgattagtgaggtaatgtgttaatattcatcatttataaatgctttttgtttattgcacatattatttgttttggttatttttaatcttctctttttttgccttctcaggctttaactgaagcctgagatatatgattccatctcgattatgcttcattttgaaaatttttagtggttcctgtcaagtttgcaatatgctttctaaactactttaagtccactttcaagtctacactaaattgcttcactggtagttcgagtgccttataatattcattttacttatccatatactataatcactgatacgttattgctgttattactttgaacaaagttatatgttaaatcattgttttaaaaaaagaaaaggttttattttgcccttatatatatatattccttctctgatgctcttcctttctttatttagatctgattttctggcttacatacttttctagaaaaacatattttttacatttttttgcaagccatgtctactgatgacaaatttcttccgttcttgtttgtctgagaaaggtttttgtgttcctttttgatggtaattttgctggaaagagaattctagcttgttgttttttctttcaatgcaagatatttccttttactctcttctttcttggatgatttctgatgagatgttcaacataattcttatcctgttcctttataggtaagatgattttctttcttcctctggcttcttggaaaattttctctttgtctttgattttttaccatttgaatatgatatgccttagagcaggtactttggtattcaacctgcttgtaactctgagtttcatgggtctgtggatggtatctattatgaattttgtgaaatttttggtatcatttcctcaaatatttcttttgctctcttttgtctttcttctctttctataattgcaattatacatatgttacagattttgatttttcccacagttcttggatgttcctttttgtgtcttgtttttttctcgccatattttcatttgggaagtttatatcaccatttctttaagctccctggttctttccttggtcgtttccagtatactgataagcccatgaaaggcatacttcatttctgtttgtgttttctataagactgctttattcttaaggccttgaagggaactcaatggtttatttattcttctctccaaatgatgtatggcaaaaccaatacaatattgtaaagtaattaacctccaattaaaataaataaatttatactaaaaaaaaaaagaagtccagtcttctactgaaaagacccttggtctgggtctgaataaagaaacatctgcaccaagtactaaggacagtcattttgctctggtgataggatatatgtcctgggttaataggggacaagttatcgattcgtttaaagagaggcgatagtttgattgcacactttacataccaaaccatattggaaagttgtgtcccctttggagcaacataatttaagaaggaagttggtaacagtaaaatgtgtccaaaatgggtgaccaggatagtgataggggtattagtaaatctagaaaccttgctatatttggatgtgtattaatttatcagatgtctttatctgtatcatctgtctttctatatatagtgttaaaaatagaatgttttctgtttggtgccaaatttttcataatatctctgattttacattgttctaatttttcctggatataatgcttgactttttcccaggaaagagacagaggaaaacctcccctagcataagtgtaccttattatctgaccaaaaaaaataagtaggctgaacattttttgcagtaattctagctcttggcttcatttcaggaaacctcaagttgccaacttcaagctgagcgtcacttttcacctggtgttggttcctctacgtccccaaggagtctttgcttgagtagttatggtttgggctgttgtcctgtgatatagaagtaagggggttgggtaaaacccagagatgtgctaagtggattctgagctgtgaaagttggagcagggagcacatgtgagtttgaggttgcatatgaacccctagccctttccccctgcaatatgtgttgttattattatttctggagaagagttcgtgatcttttataattttcttttcctgttgatccagcagtgctagtaacagaaacttaaaacagttatggcatatagtgtatggaatttcacggtcatatatcttgcacattagagaataaatgtactgtgccaaagatgaaatttgccttgtagagaattcattttagggtagcttcaatgactgagatccacagggtagcatctcagcagccgtcttccttctctgaccttatgcagccccaagacaaaggtgaaagtacaattggctttagccgcaatttctcccagacttttccattcggagaggagaa

SEQ ID NO: 42145 - DNA, 1870 bp, Bovine  19866880795586
  misc_feature (1)..(1): n is a, c, g, or t
ntaaaatgggggctgtatagtctgaatatctctgcctagttctgaagccccattattatctttatcagagaggttgagtaacggtacccatcaataaaaagcagatgtgggatttgaaccctggtcttatctaattccgagtcttgtgcttcttccccatgcatcaagatattgtcttctccagaaacccctttgtctctgcctatctatatgtcatcttcccttcacaccagcctacagggctatttcccacctctgatttcctatagctcaggctcactaggcactgacgccttgcttttaggcctctctttagtcttccctaaatattgtggtatttttgtcttgtctctttaactgagttgtaacctgggactgtattttatccctttggacttacattacttcacactatgctgcccaactattggttcattcattcacttaacaaatgttttctcagaaacctctatgtgctaggcactgtgtgagagactgcaaaggcaaaactaaatgtttgtcaaaaaatattctccaagtcagttgtaatagattcctgccctgtagcacagccccagctgccgggatgctccagtcacagaaaggtatgaaccaacagcttccttcctggtccctgtgctctagctttggcctgaaaatctgtgtagaattggctttgctgctgctcactagggtaccttcaggcctggaccttgggggtattgtgactcccaaatatggtccctttttactaagctcttatcaaggtttgtatcttcaataggtacctttttaagctctgctgctgctgctaagtcacttcagtcgtgtccgactctgtgcgaccccatagacagcagctgttaatatacatttttttgacatattgcaatttgcagttttgtagtttgtagttacaatatttaattctaataataaatgtgcatgtgagatgagtacctgagataactttttccatattcattttaaagaagtttttcactaattaatttgcttttctggatggataatatacattcacgtggtttataattcaaaaagtgccaaagagtatatacaagaataagtttctttatatccttgtagaaataaaaaatcggtgattatgggacttcccttgtggtccagggactaagactctgtgctcccagtgcaggggacctgggtttgatccatggttggggaactagatcccaccatgctgcaactaagagttctcaggctgcaagtaaaatcctatgtgctgcaactaagagctggtgcagccaaataaatatataaaaataaacattcaaagcacgtgtctaaaccctaaatcatccctgcatctttgtgcaggtataacactctcaatctttcatgaaaaaattgaattttattttagaaataaacctttgaagtttaggggaaaaaaggcagaaaagctgctttcaagagccaaaaaagcaatatatttcaaagggtaatgacgactccctctgaaggccagagttaaggagaacagaacacaatggtaagttgcacacccagcgcctgccaggtcttcagctccctgcctgtctccctctcttttctgctgcccatcttgctgtttccctctggttctctctttggactgattttatcctctctctctgtttctggctttggccgtttccccttttctttctcttccttatgactcaatctgtcctctcccctcaacttctgtgtctatctccctgtctcctacacctaagaatgtccgtaatataaaatggaagaaagtcttttaactactcgtaaataggtttatggtttcaagtcttaattttaaaagcagctgagtgaactgtcatctatttctcaa

SEQ ID NO: 42146 - DNA, 825 bp, Bovine  19866880900336
  misc_feature (1)..(1): n is a, c, g, or t
ntgcagcctgtctaaactgtccttttcccctcccacacttacattctcctattcctgctactctgtcactaccatcaccaccaaatagttgtgtgaaatagagaaggaactcaggtaagatagccagccaagctcttcagttctagtagcaagcaaaatgtacataccccatccaccaaagagccaacaaggaaaataatttatcataatccctaggacatatacaccaccaaaatagcacagaatcaagctctgcccaacactgaatacaaattagctggacttggctacatggtgctcttcccagaccttgtggttaaatcgtaatgagctttttaggaaaaacaaggggcctgtatgagaaatggattcctaggcagagccaataggagaaatgcttgatgaggtttggaatttaagaataagaagcaatgattagagaaacgcagatggggatgaaaatgattatatctgtactagactccaactctgcttatttacttcagagaagtgaaattaatctaagatatgctaccaagtggcaagtatttccatatactaagtgagtgagtattttatttaggggatgaaaggtgagtgtgaaggatagtttagccaaatgctaagtagcagttatttcataagtatatacaatcaacccagcagaaacttctgcaggtgcaatttctaaaagtatttgtattttgtaaataagttcatttgtatcctagtttacattccacatataaatgataccatatgacatttgtctttgggttacttcacttaatatggttatctatagattcatctatgtcggtgcat

SEQ ID NO: 42147 - DNA, 977 bp, Bovine  19866881720004
  misc_feature (1)..(1): n is a, c, g, or t
ncgtatgacactcagttattaatgaagtggtaaagacgagtagtcccatcaaagaataaaaacagtctccaagttataataacatttctaggaggtttactctaaatgtactgcttttcagaatgtttagacctaaaagtttcccagaagagcaagagaccatgggatgacgatctattatcaaggcagcataatccgagatagcactggtgtcctgccagacaacgtgatctaattgtctgtgtgactccttttccccctcccaccatacacacacgtttaacaaatactgcactgcgctcctgtacctgggaccactgggcacgcaacacaccaggagctcgtgccctcggtttacttacagctgaggcaagacgacacacgtgtgcctgcgcacacgatgaactatgatacaagacagctgggtgcaaagaccatggatctgattcaagcctgggtttcagaaggaggcacataaccctgcgggggttcaggagtgactcaatgaaactatcatttgagatgcttgaagccagggaagctcaaagcggaggaatgactccactcacagcactgctgaagggaaaggaagctggtgatactcaggatggaatggggaagggggacagaccagaggcaggtagaccagttaagaactctttaaaacagcctccctacctttatcccccttgcctcaccaaccctgaactcccagtgcgccactagttatcttccagaaacagtatgactaataacattcccctcctcagaagctatctttggctccccatggcccaggaaatacaatttacagttaacattagattgtctccattagggtacagcatcagcatagtgctgtgatgatggtctttagttagttactggttctttcatgggcttcccaggtagttcaggggtaaagaatctgcctgccaatgcaggagacacaggttgatcccggatcaggaagatat

SEQ ID NO: 42148 - DNA, 1175 bp, Bovine  19866880427223
  misc_feature (1)..(1): n is a, c, g, or t
natctgaggttttgatatttctcctggcatcttgattccgcttgtgtttcttccgtccagcgtttctcatgatgtactctgcatataagttaaataagcagggtgacaatatacagccttgacatactccttttcctatttggagccagtctgttgttccatatccagttctaactgttgcttcctgacctgcatacaaatttctcaagaggcagatcaggtggtctggtattcccatctctttcagaattttccacagttgattgtgatccacacagtcaaaggctttggcatagtcaataaagcagaaatagatgtttttctggaactcccttgctttttccatgatccagtggatgttggtattctatttcaattaacatattaacgtgtatgtacatgttgaaaacagaggctggcagccactgtctcatgatgttaatagaggcttccccgagtggtgggttttttggattcattttctccctggatgttccgattttctgccataagcatgtgttaactttattacataataaataaataaatccatgtgtatcctaaaagaagagctagaaaggaacccttaccagtccttccctgaatccaaagctattgtagcaggaggtgggggtttgagcggggaatttggtctgcccttccaatctgttccaaataaatatttttagccccattacccaccccttcaaatgtcctgctaatgatttgtggctctgatgatccaaagagactttctgtggagcgtgtggcttggcagttacctcacctgtgtcctcttctggagcgaggacggaggtaataatagaactgacctcatgggtggctgggaggcttcattggaataatgcacgtgaaaccctctgcacggggcggggctgccacgaataccctcccgattaggaaatgcacagaccacagtggcaggcatctcgctgtcctagttgagtggctcagctggttaagggaaatgatacctcgtcccggagcacatggtcatccttgggggatggtcaggggctgatgggggcttcccttcccggcgtgttttcgtgttttgctcccttttaacacagcttggtgctcttctcctgctgacctccttacctgttgcagctgtgtgctaattaatcgtgtttaaggccatgcgctgacgt

SEQ ID NO: 42149 - DNA, 1062 bp, Bovine  19866880511782
  misc_feature (1)..(1): n is a, c, g, or t
naaagctgagcgccgaagaattgatgcttttgaactgtggtgttggagaagactcttgagagtcccttggactgcaaggagatccaacgagtccatcctaaaggagatcagtcctgggtgttctttggaaggagtgatgctaaagctgaaactccagtactttggccacctcatgcaaagagttgactcattggaaaagactctgatgctgggagggattgggggcaggaggagaaggggacaacagaagatgagatggctggatggcatcaccaactcgatggacatgagtttgagtgaactctgggagttggtgatggacagggaggcctggcgtgctgcaattcatggggttgcaaagagtcagacacggctgagcgactgaactgaactgaagctcctttagtaaatctctcaatttttttaggataaaaaatattacacagaactaaaatgtgctaacacgttactctggcatgacataatgagtctgtcggtaaaaatagctactatggatggctagttcctttgggtcttttggggtagaatattagcatctgcttttcaagctgtcataggttcaaaatatagcatatgatttatactgatgcattagtggttggaaactttaatgttgccaaagtcttctcaattgatatctgaatatctcaattatgtttctggtaaatttattatttaaaaataccctgccagaccatactgctttacaaagttggcagcatattgctgatgacctaatttattatttaaactcattataagtgttctaaatgtttcaatatacaactattcaatttatctgtttgagtacatttttggtgtattttattacatagaagggttgttttcctctaaacaagcataaaataaatgtttaagtattttaaaccccgcttcccacatttgttctatttttagatgcaaagtactttccagaacatcagaaagcatagtccagtttccagtaggatttcttcagggtaatagcttctttcgagtctacactcaggcttcaatttttccctgtttctgctggctctg

SEQ ID NO: 42150 - DNA, 783 bp, Bovine  19866880640843
  misc_feature (1)..(1): n is a, c, g, or t
naaaaaaaaaaaaaaaaaagtatctagtgctgcccccttgtgttctttaaagaaacacaggagtcgttcttctcaataagagagagaaaccacaagtttaatttccaccatatgggaagtacagtcatatgaaaagtttttacagatgtgttaagtagctacagacctttggccagaaagctatactgttctggcattcatttcactcagccatataaactcacttcagaaagaagcaaatgattatatttttacctgaattctcttgattagactatatatccaaaatatgtaaaataaggaaaaggaatgagtgtatgcatctgtaatctattcaaaaattcattatatgttttaacattaaaaatttacaatcagaaggaaaaaactcccacaattccactatgcaaagacaactgctattcacattttgacatatttatttctagtctttcctcaatttcttttttatcttttttgttttttcagagaacaagaggtgggtaggggggcagttgtattggaaagtgacattaactgaccagaattctaaagctgttagcagcaatcaggaaaatttcaaactataatttatcaacaatagttctgattttttaaataccttaaaaggttgtgtgctggccatcaattttgtatccaagagcctaaaaacagaattttttaaaaaggtaaacaaaatggatagcaacgttcaaaatgtactttactccaatgaataaccgcggatgggggcgttaggcacatcagtcatcgcatctccat

SEQ ID NO: 42151 - DNA, 1409 bp, Bovine  19866880901304
  misc_feature (1)..(1): n is a, c, g, or t
naacatagtttacaagaataattaagtgaaaagtagttactgaccttagagcagcaggcatttaatactgctgggaccaagacaggcttagaggctttcccaggcactttccaggaaataaatgaatggaggaaaaaaagccactctgacgtgcttgaacatccagggttcattaattaaatatttaacaatcacctctctgagggatcgtgccctatgctgggggtaaggactaggacttggtctccccaccccgccaggttgctggtcagcacatcacaccagcaagttagccgtcagaactgaattttttcctccaaagaccatcacagtgttactgaaacatggctgtttttgaaaacgcgaccactgcagcacttgtctcagtgaaagataacagagaccacataccccacagggagtctgccagacgactgagtcataccagtaacagcacaagctccccttaatgaatctggggactcaagaggcctcattagagctaaatgaggcagcagctcctctcctgtgccattcatgcttgaccaggccttcaatagtggggcacaataaaaactttaatggctgcataggctggaatggaaatccgagactctgtctcagatagtacgcacagaaagataattctcaaccgaatccagatttacaagctctgaagagaggtcacatgtaatcttaccgttgcgaaaaactttattaaaatcaaatccttggcttgctagaaagtcaatgcttgagctctgaaacaagagtaaatagaacatgcatttcagtgatgttcatggcaggtgtgtgaacagaagcagagaaataactctggggagtaaatgaaggcaaccaggcaagggggcagcatgccacgggtcagaggacaaggggtttctactccacggctgctgaactgtccattcattcccttcaactatctgggcttctctcctatagtttatgagagaaatatcctttgttacccaacatttaagaaaattttacttggtgaacttatattctcccaacaggaggaaactcctgaataaaaattaaatgtatttctattatctcaccccaggttcaagtttaagggaacaactgtgcaaattataaggtatcaatattcacttcaacttagattctagaagcccaaaatcttaattggatgttctttacattcaacataataatatagaaaaattcccagtaaagagacttattaaacacatatttcaaagtcaaaatataaaagtaaaggtagcaaaaatatcaagtaacaatacacaagaatgggaaaaatttcacaaagtccttactcaactgactgaagagtggaaaacatcactgagcttctctaattttattctgttttaagtcagaacagcctgtctaactca

SEQ ID NO: 42152 - DNA, 1337 bp, Bovine  19866880949911
  misc_feature (1)..(1): n is a, c, g, or t
ngagacaggaagttttaaagaagctcgctcacatcaagtggcctttgccctcaataaaatagaagccacgttcatctgctccgagtgacggggggagggtgatgctggagactgaaagaaagtagaaaaccaccgcttgccgtgggctttggatgggccttatcagaggtaaataaaggatttactgaaaaacattaagaatccagttgaaatgaattaatgagtttgtggtgggctcatttcagttttctgaatctgttcagtggggaaaccctgacttggcgtcttgcagttgttgaatgggggggtatcccaccgctcccctctgccccgttctaagctgggtgcagaggcaagtgagggcagatgggctggtgagcttagcacaggaagggctgtggcctcagagacaggccgcatcggttcatcctctcactctgcagtttctcctttcagtccttgaacacttctttccttgcctcacactcacttgatggcctcgctcccattcactgagaagcagccagaagagaatgtcctcaagcctttcctgcgcaacgcgcacctggcctttcctccccaccgcccccccacccaaaccctgcgcacagttctccgctcacttcgaaggcattgctctgctagcttttggctccccacccccgtcatttttccgtgttcagggctagagtcggggtagcatgagtttaaacagcattgagaatctcctcattggagttgagagactcactgtggagtagaggaggggagagaccatcaaggaacgaagggcagtaagaaggtggtgggtcagtggtgtggagaccccaggaggtgaatggattgttggattcagaattagaaagaaagtgagctgggagtctgggaggcagtggccagggggtaggtgcagggaattgcggtgctgaaggctacgtcctggtctggtgagtgatcgtgggggcaggtggctgaggaagagtgagggagatgttggatcacagcctcagcagtcgtgacagagtctcaggatatgacattcaaagccgagggacctagggaggagggagagaaaggtttgggaaccacagtgataaacaggatggtgcacctcagttccagcccaggagcagcagggctgtgcgaggcaagcccggcactacttgagaaagctgcaggggggccaggtaagagcctggtctgcttctgctctcagcccagaggccagagctgaggtttcccagaagaagccactgttctcatccccatcttactcagggcacttttttttactttgaccttcttctccagggctggtcattcaggtgtctccttct

SEQ ID NO: 42153 - DNA, 1637 bp, Bovine  19866880975567
  misc_feature (1)..(1): n is a, c, g, or t
naaaaataggtggccacaggaatgttgacacgcctgccattactgagactctagatgtatggacaaaggaatttggtgaaggtataaatgaggaaagtggttgtgacaaaaaggaggaggatgtcccagaaaaagtgatattgaaaaacatctgacattagagaaaaccttagagcgatttcacagcattgaaagttcagtggataaatgttgaaaagatccaaaggagcatgaaaattcactaaggcatgtaaatgatgcttgccctgtattgcgaattatgtgaagagaaaaagaaggcaagcactgttcaaactactcttgataagttttttcttaaaccaagaaatagaacacactctcaaaattcctaatgttttaaataacaatgtattatataaataatagagttactattttttccctctacctttataactgacagtaagagggttttaattttgacaacaaatttaaaggtcatggaacaatcctcatttttcccttttgactatttaggtcagtttgaatggcgtcagcttgcatggttatgtttatggtcctgtgctgctgtgcaaagcaagattacctttacttcctcctggaaaagtacagaatagcattttttggttgttgttttaaattgtggtaaaatacacataaattaaccattttaatgtttttaagtactcagtttagttacatgaagtactttcacaatgttgaacagccattatctccagaatatttccatcatcacagactgaagctctgcacctattaatcagtagtgcccccttctgcccctccccctgcctctggtaaccacctttctttccgtctctatggatttgcctattctagatgagcttatataagtgggctcatacaaggacacattcttttgtgtctgttttatttcacttagcataatgtcttcaaggtcgatccatgctgtggcatgtgtcagcatttcattcctttttatcatctaataatattccaccgtacaaacatgccacattttgtttatccacacatttgttgatggacacttgtgttgcttccaccttttgaacattgagaataatgctgttacaatcatgggtgtccaataagagactttgaagagtagttatctctgaacagtaggacttgggcttacttttcatttcagacccttctgtactatttgattaaaaaaaaactatgagaacatgatatgtttataataaatagatcaataacatataatactgtggaatttggaaaatcctaccacatgggagtgggttaaatgtatacagtgtgtgtgaaggcaccaagcttgccgctggaacatagaggtaggtacctggtagctgctacttacactggagttagaatcggatgcttctctctgggcagagggtatggggtgccctagactggcaggagggtggaactcaaagggctgtgctagaatttgccttggtgacccatttggaggtggttacctatgttttggtcccttcccaagaaacccaaggtctgttactgctccatagtcatcccagctttccttttgtgcccctatctgggcttgtcctcctcaaccatgaataccaggtctcaggcagcataccattcttaaatcc

SEQ ID NO: 42154 - DNA, 1368 bp, Bovine  19866881028018
  misc_feature (1)..(1): n is a, c, g, or t
nttactgttcagcttaactggtcttcctgctagaatcccattctccagaggacaaccaaaagtgaggttccaacataactatgagcatgcatctgtaggcccatatcgtctcaactttgttttaggaaaactaggtaaccgggcctgaatttagccacagggagaccacttaatgggccgagacgctcagtgacacaaagtctgaatgctaaccactaactcttgctctgagatgcttcatggaggtgaagacggtccatcgtgatgccaccctcacttggctggctacgtctaaatacctactcttagatttccctcactctctttcaggttttgctatgaattcaattcttatacgggagaaaatgagtcactaaattgaatccaacataggatctacaattctgttgccatttctcacccaaaggaaatgagtgtagttcaatcacctgttccttagcatgtttctgttgctctcttcttttgcgttcttcttcatctactttgctgataacaatatatcgctctttctaaaagacataaaggagatatacaattttctggaagctacctgaccctcctcaccctctgaaattcaggttctgccaccattagaagttataatttttatcagtgcacagtctttcaggggctaaacacactcaaagtatcttgaaatgccaccaaaagttgagttgttgctttacaaactagaaattcatttccttgtttccacgacattttcctatgatttattaattcaccccaacagagtcaattataaatatcaagagactgtgtcagtaagacacttcataatggacactaagatgttgcatttgaacacggatttcaaagtagttggttttgaaataaaaattctatgtaacccatataaatttgaatcatattatatacctaaaactaatactgataagtcaaccatacctcaattttttaaatttctatatcatttctcattaacataaaagaaaaatcctggattttccagtaacctgtcagataactagcaccttctttctcacactgcattctggatcaatcaaacaccacaaaacctcctgtgtcaaagtttgagacttatcttctagcaagatttaatttatgcaatctcttatgtaattagacatctcacttaagaacaagaactaaattctaaaattctatagttctgtcaaaggaacccaccatcagcccaccactacccatttcggttctatcactgctctccgggaatacatgatgacagactgctgatgccccagattctaaaacccaattttagtggcccatgtaacaagaagaaattactacatgagtaccatgcatatcagctttccgtgatga

SEQ ID NO: 42155 - DNA, 1969 bp, Bovine  19866881036206
  misc_feature (1)..(1): n is a, c, g, or t
ntttttaagacttaggcagtttctgaaatgtcaggcatcatataatacagtcaacacattaccccacagtcgaatcttgcttctaaatgtcacaatgcttacttcctaagtgaagaattttgaaggtctctttggatggtctggggcacacaggggaggtttgagatgagtagctctgtggtaagctgcacagtagctggcatctgccaaggagagggatctggaacccatggggagtgtgttgcaaggataacatgagaggaaaggagcctgatcaaataataatggcccttttcctagtctggtcaaagtaaattcccagtgtacatgccactggcagattctaacgaaagaacaaaaaccccaaagtcaagtgcaaatatccatctgtccaatcctgacattcaactgctaagttaagagattcacttgaaaatataattaaactaatggaaatacctccagaaaaaaacacatacaaaattttggatattatttcaggagattcacaggcatcctgaaacccacccatggtctaatccctgctttagaaaaagcattcgcctttcatttaatctaatttatttcaatatttcttataaacagcaaaaatatgaaattaaaaattctgtgtacgatgctactaaagtatagtaaagaaggcagcctaatataattaaatattttaagctgcataaattaaaaagttaacttaaatgacaagaatctaaataaaaattatcctgtttcaaaaaagaaaaacaaagagcattcacctgagtatttcccaggtcttaaagccaaatctttatcatataccttcaaagaacaaaaaccaatactacaatttaggattcgccaagttgatcattaaaagaaaactataaagcctttacagcagctactaagaagcaaaagcaaataaattaagcgggtatttaacctaagaaactggggggaaacagtaataaaatgaagcactgcccaagaacatggtatggtcaagtcaccaaaaccagcagaacatcaaaaatgaaataaaggctaaaaaactgcatttaattttttaattctgggtccctcacagaaccttcatgtataatataaacacttacttccagctcaaagtctgatatatcagttttctttggaacctacgaaaacaagtgaaaaggtattaatttgtgatcattgaaggaaaattcaaactgaccaagcactgattgggaaagaccgtatcagttttaaaagaggcttcattagaagtgacagttaacatgcaaaagagaacagagaggatgcttgaggtgggaggattcctcaccacttttcttcatcaaaatgctctttactgggacttccctgatggtctacttttcaatggagaggactcgggtttgatccctagtcagggtagtaagatcctatatgccgaggggcaattcagcccacacaccacaactagagagatgcactcaagctgcaaccagagaagcccgtgtgccacaactatgtcaccacacagtctaattaatgaattgaacataaaagtgaaagttgctcagtcatgtccaactctttgcaaccccatggaacagtccatggaattctccaggccagaatactgaagtagccattctcttctccaagagaattaatgaattgaaaatgctctttatcactgctattattatactgcctttataggagaggcagaagtccttatccaaccaaaatattacctcctgtggttgtatgaagagaattttaagtagacagatgcattaacacttctgtgaagctagtcacaaagtaaaaggaaggaaagcaggctgtttcagttactgactctttgaaacaccgatgctttttactgcagagagaaatgaaaaggacagaaatagcctaacaatggactctgctcttccgaagcctttctgtatgaagcacacatcaaggctacaatagt

SEQ ID NO: 42156 - DNA, 1836 bp, Bovine  19866881059014
  misc_feature (1)..(1): n is a, c, g, or t
nttttatttgtttattttttaatggtgactcctagaaaatttaaaattgcatatctggctcacaatgtatttctgttggccaagcactcctccgagattacagtacacctctttcatgaatcacacttgaagaactttatcttcaagtgaaggttacattgcttcatgaacagtgtaagattattacgagagtgtatttccatctgcctctctcatcctttgtgaacttttgtatcatattttacttctacattctgtaaacttgattatgttgttgctgttgttccttttctctctctttttctttaaaagagttaatactctttaaaaaagaggggggactgaagtatggggaaaatagcattagtataaacaaaaattcaggcataattagaaaagtccagttaagattgtcagggcccttacggttggctctatgacttgctcctgttggctttagagaattgacctgagaccgtgggagacacctcatgactactgagtttccagggttggctgtcagcgttttccctggaggtggttgtcaatttcttcttctgtttgcactgatgttgtggtggaagtcttttctgtaatagattcagaatattcagggagtttatagttgataactggacagaagatagggcttcggttctgggaaactgtactggatttgcttgagaagggaaaaaggagatttggtttggtggcaagagatctgagtgcataagtacacgttggcatagcatttgaagaatgctcctttgcaatggatactgaaatctctaagatctcactaatagatacttagtccccataagcagacactgatgtctgaacagtcttaaaaaaatagatgctctttcccttctcattttactaaggatgttctgtaattaaagaaaatggttttccaaagccactttgcccttaacagaggtttggtccatcatgtctgtgggttgtttgctgtttttggcttatttcaactattaggaaaaaaccctttggcatatcttccttctagcctttcctttctgtgagactgaatttcagcgttccttgaaaatgttgttgttgttgtccagttgctcagttgtgtctgactctttgtgaccccatggactgcaatacagcaggcttcctgtccttcaccatctcccggagtttgcccaaactcatgtccattaagtcaatgatgccatccaaccatctcatcttctgtagctcctgggaattcctccttatgtaggaaatactaaagcatacatcaaagctatggttttcagatttcatataattttcatctgaagttagtggtttttgcaagtaattgaatgtacatatttcattaggaaatggagggaaagccctttggaggcacagaagattcagatgaagcaaactgggtcccaggacccattgctctgtcagactgcttacatgtttattcataaatgggtctgtggagcaagtgttttctctcctcctactgaaaaaaaaatgccatagagacagcagagcccacaaagtgaaaagggaactgacttacaggcagctggacaagaagtgttctagcttacattctgctggtaccttgggaaagactatgttcattcttcccttcggtgaataccagcaagagcccagtatttgtctgttttctcatcttaaatgaggcatcttattggaaagaaggccaaagtcccttctagatcttaaatccaagtgtttttacattgtgtccagagtaggcagggcatgaagaggaaactgatacaaactcttaagaccctttgagaatctcctcaaatagcaggtagcttcttctca

SEQ ID NO: 42157 - DNA, 1307 bp, Bovine  19866881132191
  misc_feature (1)..(1): n is a, c, g, or t
naatgacaagaacaacaacagtgggaatccagctttgaacactaccacatctaacacaccaagacagaatacacctgctcctgtgagaaagccaggacctctgccatcgagcttggatgatctaaaggtgatcattgcaagtggggtttattcacccgtaagaaccacaaaactgtaaactatgccagatctgtccagcagatgtaggcagtttctaataggccttcaactctaccagcacgaggataaccattacagaagtactttctttttacatccattaagtttcctttaaaatgaccagtaataaatttccatttattgagcagatgccatgagcaagcaccttcatccctgcttgttgggaagtttgggagaagaggaagatgtaacagttaagaacaccatctccaggaccctctttactgggttccacccctatgcagccttctgttatctatgatagcttggaccagtgacataccctctctccccatctgtaaaacaggaataataatatctacacctcatgtgaaggttaactgaaagagtaaagtacttctggcactgtctggcccatggcagttacacagtaaatgtaactgttatcatttctggtagtaaatcttttgaggtagcaaaggaattagcctctaataacccttgctttgtcactggcctttcaggtcctttatgtctataattctgtgtttttgtgtgtttaaaaaaaaacaaactgtcacacttacacgcagtcatacagagctgtctgacagatgtaggcaccttttccagcacacaggtgtgctatagatttgccagaaggtcgtaacaccgaaaaaagcgatctgattgatttgtacttccaggtatcggagctgaagacagagctgaagttaaggggtctccctgtgtcaggcaccaaactggacctcattgaacgcctaaaaccctaccaggaagtgaacagcagcggccctgctgccggtggcgtcacagccgtgcccacacccgccatcgtccccagcaaccccgaagtcaccgtggccctgccagtgacaacacgacagaactctgtgaccagctcaggctccactttcaaggcagagctgccccccgccagcagcagcagcgtggcccacgtggacagcggtagctccccactgcccatctcacctgcaccttccgaacagtccagcctcagtgctgaggacacgagcatggctgatacgttcaccgagatcatgaccatgatgtccccatcgcagttcctgtgctcgtcgcccctgcgggcaaccagcactgag

SEQ ID NO: 42158 - DNA, 1302 bp, Bovine  19866881137488
  misc_feature (1)..(1): n is a, c, g, or t
nctgggtgtgcagctggagttaagcagggttcactagctctctctggtgatgtttcaggtgccagatgcaaacatacaccaaacagaaatgtcccccgcgtacagcaggacaatccttttggactactgaccttggcagtttgggcactttatgaagcattacatctgccacagtattagcgctattgtgaacacacataaacgcaccatcttttctttatgtcccaagaccatgtttatagaaagcctgacagagcagcacgttttcagatttaaaggtttcacagttgaaaagcttaaaagtctgtttgtgtatcagccaaccagatactgcgggggatgctgagccgcaatatttacactttcactacatgtctctctgtggctgttttgatgtggttttcatttgataaaagaatttacttacacctcgtgactcagcttattcattaaccaagtgaaacccaggagggcaggagggagagaatgaaaatgacaggcccttatcagcaggcagggctgagctgtctcacctgcagggtgagtcattacccttgggaggaagggcatccgctccccaaagcgaaggggcctctcccaacccagaaagcagtcacagaaattccgtataaagtgtacacagggcgattccgtgtatggttcccgttaacccttccttgccgcactactggtctggaacctctcagggttctcctgagggcatcgtgatgccacccataaacaagtcctcttcctcgtcctgccttcttcccttccacccgcctcgcccccaccgctatgatccacctacagatgtggaaccctccgaaatccccatcagatgtgacttgcctcttcagtgttttcaggacaccccatatatgacctgtcaccaccaaaaagatcaggaaaaaatgcccagacaacctgctctaacactcaggcctgcggcctcggtgcctgcacagagccctcactgacagtaactcttcttacctgttcacctcgatgccagtcctttgtacgccagctgctgtactatactagagtccagtctctatgcagggagaactgattcacaacaaaacgaatggaatctgctcttcagcccacaggttgccttgggaccatgcaatgtatttgttataaccggcaacatctgacttcaagagtgtatagagagagaatcgcatgcttcgccaatggggaaataaaccacaaatgataaagttagccttattttccacatcaattttactctttgcctttgctgagactatgtgcccaacgactgattttttt

SEQ ID NO: 42159 - DNA, 2544 bp, Bovine  19866881182315
  misc_feature (1)..(1): n is a, c, g, or t
ngtgaagtctgaaaaatacagatttttaaatgtaatctttaagtgaaagtgaaaatcactcagtcatgtctgactctgtgaccccatggactatatagtccctggaattctccaggctggaatactacagagggtagcctttctcttctccaggggatcttcccaatccagggatcgaacccaccctgcattgcaggtggattctttaccagctgagctaccagtgaatcccataatcttaaagacgcttaaatgagcttttcctttaagatttaattaactcatgaacttagactccacagtccatttttttgcatagctgtcccattcactgggcagctttcccagttaggataggtgatcactatattttcgtggcctccatgatgtagaaactatagttgcgtgtggttagcccaccctggagctgaggtgttctacgtttctactttgtttcctttaaggacttggggccgtcacagtggcacccgtgcttttgttggtcagataataaggggtaaaggtagtaggtgccaggaggaagggaccttgtatttttttaaaaaaagaaaaaaaatgagatgtgaatgaatgctcagacattgaaatttaatattatagaaatcagcaaactttcagaaagtaagcagcctcattaagaatgaaaattgaacccatttttcctttccttggagttgaaatgctgagctcggagaggccttgagaaggtcgtcttatcctaccaccagcaccatgccccattgtctcatggaggccatgtttcaaattagcccagaggggcctctcctctaatctctctgtatacagaattgtccatgacatattttataaaaaggcagttgtcaggaaggagtggcatttattactttaaaaataaaatgtcacaatttatatcttttgggctatgggagtctgacatacagctatgacctgattaggtgtattgttcttgagtagacattttagatttgttaagtaataagattctgtccttttgttaatggaaattatggtctagttatgtttgaaaaattaaatttcgatttatcgttagtggtaaagctagagtgtttttagagaggaagttacagaaagttaaatgctgtcattctgtctcttcatactaagaacaaaagcaaataattgtgaactatttcagtgagttgaaccttaagtcagaacttgccttttccggtatcataagaagcactttgctagttgctatggaaacacatttaattattgagttggaatttgtgatgtagatcctctatacaaatctgctgtgaaagatagatgttgcagactaagactcttaatgctgctcctacgcctgggtcaagaacaaacactgaccacgcacttgctgtaggaaggtcctaggtgtacccaagagacctgggtacacagacgggaagacaaggctcttagccttgaggagctcagattcttgtagggaaacagtgatcagccatgtggacccgagctggaccagtgatagaatgctggtgtgtgcagagtgcactgggagggaacatgtgaggtgactttgaggatgtgtgaaatttcctggtagacagggagttgagatgaacactgtgcccacaacggaactgcctggataggggctaagaggtgaggagtttttggttgttgtttttagtcactatatatctccatagctgtactattgggaaatatttggggaatcttaaatttttaaattcatgagccagttgagtgtagactgtggagtcaccttgccagctgcccacttgactgtgccactctgagatatttaacttctccagtcctcgtgaggatgaaatgagagactattggtgaagggcctggttcaaagtttgacatttagtaagctctgagtaaatgtgaattgctttttaaacagcattagctttatcattgttcattctagcctcctggtaatcttgaatgtgttttgtaacagtgaggggtctgtatttgtaaaacatgttatgcttgcttgtcttttgggtgtctcactgtgtgtcctgttgagtactgactgtgtgctcagcactgggctgggactcgatgttggggaagtgtgccggctcctgtccttcggcagcttacaacttagttgacaatgaaaacgggcaaacctgagctaaagcaagtgcgcactcaactgtgctgcgtggcggcctgtgcacacaccccgagtgttacagtacaggcctcttccgttttgctgcgcttcattcactttgaaaatcctgcatgtttttaccactgaaggtctgtgtccagcctgcatcaaacaagtccactgttgctatttttccaacagtgtttgctcacgtaggtctctgtgttgtattttggtaattctcacagtatttcatactttttcattactgttatatttgttttgctgacttgtgatctgtcacctttgatgttattttactcaatgaatgctgagatgatcgttagcggtttttttttttttaagcaataaaacatttttaaattaag

SEQ ID NO: 42160 - DNA, 2735 bp, Bovine  19866881227601
  misc_feature (1)..(1): n is a, c, g, or t
naagtcttaatgtctgttatttactgtaagaagacatgaactccttatcctaatctgaaatatgtataatccattttaaactttgtaccacattactattttattagtctcttctgttcctggcttgttttaaatataaaaattattggaagaaattgtttctctttaaaggatttgaagcttaactgtctaaaggcttaaatataatttcttcattgttcctttgcaatttctataaaaatacaaaattattttcatacaggaagctgaaaaagcgggctgttgtaaaggaagctgctgtgcagttccttcctttctaaacttcaagctgaatgcgtttcctcactccaagttcaagggcttagtttacgtgcctgaagataaactgaacagcacctgcctcttagtcacaaagggaatgtcttgaagctgcgaagcaatcatgtgtactcagtttcagcttttgagattctcaaagcatgtggaaaaaaaataaattcagtaacgaatagtataggacattccagggtttcggcagctcaccttgggcttccctggtagctcagtaggtaaggaatcagcctgcaatgcaggagacccaggtttgatccctgggtcgagaagatcccctggaggaggaaatggcaaatcaccccagtgttcttgcctggaaaatcccatggacaaaggagcctggtaggctacagtccacaaaatcgcaagagtccgacatgacttagcgactaaaccaccaccataggaaattaaatcagaagaaagtataaaccaaggggtcaggtttgatgcctgaattgtgtacatgttaatcacagtactgtcatcactgcagggactggtacttggaaaatctgtccttgaaaacataaaattgtcactgttttcccagagaaggatttggcatgttttatagctttttaaaatttcttttaaaaaaatttgttgttgcaattctgtggaatggcaagaggagaaaaaataaacaatactaaatacttctgctataaaattattcagagttatctattgacttcagttagttcaggacagactactctaaatatctctgttaatgtggacagcttgctgaagtccatggtagcttgttaaaatttttcttgacatagaagaaatgagatagccaacttgtccatatttttttagtgtaaataattgtgcttggttttcataaaatactggaagctctattcatgttaacttctgtcaaggctcaaagttcactagcaaattacctagaaactccactattttctaattgggaaaatatgtagaagccttgctagaaatactagtggctgcattttgttatcagcagagttctgtgagctgacagtatgaggaataacaaacacaaattccggtctttgccaaggaatcatacaagatttccatcacagatgaggcaaacagcatctgaaattctgttactgagtcagaataggaggggaagaaggaaacaataagggtcagtatggtttaccctttaatttccagatcagtttaatgacccttagggcaggacttgtgtcttggttactctgttgccctgagacttactagaaacttcaaaactgcgcctgagctgggctccccatgaaaggacaaggcaggcttatcttcaggaaggtcctggatggaggcagtccagcagctttgaagctctgatggttaagagctagctctcctggaccagatacgtgcggaggccaggctcaggcggccagttccacagtgcagtttttgtcactgaagtgtggccctgagggtctctgggcaaatcgggctgttgtggaaggcactgcagaggtgaacaggagacaggggtcccgtcccaacccttgcagcgactggttttgggacttaagaccaatcacttcacttccttgggcctctacttcctcatttgtaaagtgagggagctgaatcctctgctctgaggtcccagcccctcctggcccccaactgctctgattctgagaacttcacagtgcagcgtcctgtcttccatcttgtgaggagttacaccccccccccctctcctggagttggggttgaaattgtttgacagtatgtggtccattcaccaggttcagttcatttctttctgggaaatgtcttttttcctttcctttcttccttctcattgccttcacctttgaccaggctctcaccatgcgcatcaggaatgtttgccttcctctcttgcctttcatccccccatccctccatccccaagtgtaaatccgtcctttctcatccccccctcatcccacgctgtgagtcttatctcccttaaatcctactttcgtcacaagcattttcttgttcagaagtcatcagcctgacactctgtggtaagattctctgtaatcttgtcccaccctatccatctaactttgtgacttctaccactttccaacacaccatgctgtgtaaaagactggttttagcactgttttcataagtattccatgctctttcctgcttatttaacttgttcattttgcttctttcatctggaatacttttttcttttcataacctatacttttagcaaattcaagatgctcgaaagggggatatctgaataaggtggcgtagcttgtggtggggagaggtgggttagctgtagcatgaaggaaagaacatttgggggccaggcccggaaggacagtagatattaaacacacacaggt

SEQ ID NO: 42161 - DNA, 1376 bp, Bovine  19866881239489
  misc_feature (1)..(1): n is a, c, g, or t
natttagtaaaagtctcaacacttataagtagatttcgggggggttttttttttttttttttttcagttattttatattttgtcatatacttaaatgactagcaattgactgaaataattttggaaatcctgtgacagttggcattttagaaaactctgaaactatcctactcgacaaatatgactttttcaatataaaaaactactaataaaacctccagtttctcaaccttcagcctgatgatacagtgagagctcaggtatgacatccagttacaagcctggaaaacggtaaccagggattggtgaccgagaaaaagaaggccagggctgggtctgctggccgacctggtgccactgtgccacctgaaccgtgctgggaatgcccttgggggacgacagactgctgccttccttctcttggcagcttaccagcgcagaaagatatttcatgccaaagccttttcttggttctttgaaatggacctggttacctgaaagttagtcagcaattccttaaatacggaaataaacatggctcaggtactctaaaaatattcgagttattaaaacaagtaggaccactgggtatccaattccttactccaatgtaggctgtacaaatcacaatgtcagagcatacatacaagtgtctaatatacacattaaaatcaatgtaatcaacccggagggctgctaatagacttttcagtgttatcaatacacctggacttcttagagtggattgtttatgacagtattttgtagacattgtctggtaatggtgaaagatctcccatttcaatttaaatctggagatccgaagtaagattcccccaaatcacaaaataaactagaacacacacaaaaattacattggtttctgaatggaaccaaaagtcttcagcgggaagctgtcactgaactggctggtgctggccactgcccttgaccctggctgcatcttgggccgggctcaggccatttctaggagataccctgtgcagtgatcgctcacctttctttttgagtggagctgtctgccttttatttaaggtcttaaaatgaccacagaggtttaactgtagctgatgaccagaggccctcatgttgtcaccctgcataccttattcttcgcgtttttaatctaaaggtacctttcgttctttactgaagtctggagaaacagatgagtcttcttggagtagtgttattttcagaaggctctgtgctatattaaatcacaggcattcactgctggatgcaatgaaatgttttcaacttggtttccagcctctgaccatccatcccattcctctgtgacaacatattataattgcaatgatgcaactctggatctgtctctaaaatctgac

SEQ ID NO: 42162 - DNA, 1088 bp, Bovine  19866881331791
  misc_feature (1)..(1): n is a, c, g, or t
nctgacattactaccgttttcctgcttacagcttccttcttctggaactgtttgtggaacagtccaagcgtttctgtcctttaggcatttatgcctgttccctgcctgaaatacccttcccccagctcttgcatgtctgatccatgctcaccttttgggtcctcctgcccggtggccttctctggttgtcctaaggtgttcccttcactagcaagcaggatgcatcccccttgttcatcattagctcattggtgcctggtacagtgcctggcacagtgtgcatgccaagtcacagcctgagagatgaatgaatgaacgagcacatggaatgaaggaaatagacatacacgtttcaaaatcacttgctttttccattggattttttttttttttttttgagctgtagtcaaatatggtctttcccgagtcttttagtctctgtggtttgttacaaaattttttatgataaacagtgacctctgttaatgcacacttttaaaaattctgttcaggaattccgtacttaaaccaggaagaagaaagacagttaagagagcagtatgatgagaagcgttcacagtccaacggtgcaggtgctctgtcctacacgtctcccaacacttcaaagtgtcccgtgacaattcctgacgatcagaagaagtttattgaccaagtggtgtaagttctaaactgaaaccagacgtgcggtgagacgtgtgtcttggggcaggattgatgcctgtatctcaggcttgtgctacacacagaagtgtgatgtgagggtaggatttaattgtggcatacctgagtttgtgttacatgttgttgttcaatcgctaagctgtgtctgtctctttgcgaccccatggactgcagcatgccaggcttttctgtccttcactgtctcccaaagttagctctaactcatgtccattgagttggtgatgccatccaaccatctactgtcagttgtaaattgagctctgtactgtgcgcagaattgcaatgtgtcaccaggccagagactgccttggcaagtgcgcagacctcttgtgtggaccacaggcctgacagccactgttcccccg

SEQ ID NO: 42163 - DNA, 1077 bp, Bovine  19866881352442
  misc_feature (1)..(1): n is a, c, g, or t
naaaatattgtggcaggcctctggaagcaacagacgttgtttatgtcacatccaacttgagttttgcttagcgaatcaccaggctggcgcacgacacgcttttcctgaggctgtgttcccttcggcccctgccctgcccttccaacacaggtgagctgcgctgatctgtacttactggggggattaaaaagaatccctgaacccaaggccctgctggataaaaaaatacatatctgtaataattctcgaaacaggccccaataacaaagtccacacgtccctttgagacgtgctggcgaatggactctaagaaatccattacccttccttttaggatcaacacccttgtgttaatcccttcctctgaaatgtgagtggggccacaacagcccacaggctacagtagaggtgtcacaatgtcacatctctgttgtcacattagatggcaacacccatcttgctagaagactctctcgctgttgtggggaaacaggcggccatgggagggagccccaaatgacaagaaaccgaagccttctcgccaaaaccaggaaaacacggaggcccttagtccaacaggctgcaaggatgtgagttcatcaacagccacatgaatgtggaagcaagtcccccgctgggtgctgtggcctgaatgtttgcagccccccaaaattcacgcactgaagccctaaccccttgtgtgatggtgaggcctttgggaggtgactgggggtcgattaggtcacgagggtgggaccctcatggtagaatcaacgtcttaccaggcgctctatctgatatggagtgaagtcagtcagagaaggagaaatttcatatgacatcccttctatgtgggatctaaaaatgaaacaatacaaatgaacttacttacaaaacagaaagagactcacagacttagaaaacaaagttatggctgctggggtgggggtgatgggtgtgtagtggggagaagaggcaattaggggctttgggatggtcctgttcgcacggccatttataaaatgaataaccaacaaggacctactcacggaactctgctccatgtcgtgtgccagc

SEQ ID NO: 42164 - DNA, 1133 bp, Bovine  19866881409420
  misc_feature (1)..(1): n is a, c, g, or t
nataccccgatccctgggcagttatatctttaagcagctgaaggcagccgttaccctttcgttcccagcttgacctgcaaatccactcctgctgctggaagcccgaaactctctcccacgttgggaggcagagccacggaggcacgatgctgaaatcccaccccttttcccagccagccccctttcccttgccattccagcctcccccgcacccgggacttcaatctgcagtttgatggtccgcatcatctgacaaacactgactcaagcagttaaaaataaatcccctagttgttaaaagagaagactttgctgatacctaagaagacaaattgctgcctgtggtctctctccggctctctataaacacagccgcaggctatggaaatactttctatcagccagccaagcacatccattactcattaagttctccagctaaacaaacggtggtctagggcatccgaaggaagagggtcttatcacagcagacgcaacacagtgaatacacatgcttctagcatatctggataaaaacagaggcatgtcaccaccaactgctctcgtggggtgctttttccgcgtccggctctcccggcacagccactgccagtgctccctgtcgcagggaaatgcccgtaactgcagctttctgctttcgccagtgcagacccaggcggcagttttcctttgtgccactagtcggctgagagagttaacatcgccatgattgtgggaaggaaaaatctcctcccctgtattgaaggcagacacagagagcttctagttcataacatattccaccagcaaccagccacgtttaatttcacactagctatcaacaatgggtacctctcccccgggtcactggcttccactaaggcacagggatgctgcctgaaggaaatctgcagggaaggcaactccaggcaaagtaaaaacgcctgcttttacacacaccaaacacctatctatccagagctggagccaaaagaatctcattttcacggtttgaagtcagctcctatgaaaagagctcccataaaacccattagaaattttaagagcaggagactggtcctcttccatgagcaatctgtttttgttttgtttactttttaagtagtcaacat

SEQ ID NO: 42165 - DNA, 1717 bp, Bovine  19866881152718
  misc_feature (1)..(1): n is a, c, g, or t
nttctcttcatctatactgaataaaaaggatctaattaaaaaataatattttcatagaaaatatgaacaatttctttctttagaaatgatattcccttggtacgctaaagcaaaaatggtaaccaccatcctcactgaaaagaatgatcagccaagtaatcaaggatttcttgtagttacagcccaacaccaaacacaatctccagtcatacataatgtttccttctctggacactggaatattttaagttcagatcttgggacatcacgtgtttctattacccagtatgccaaagacatatcctaagttcaaaaaaagtatcaatgggcaacataccagcactgtagcagactcctttgtactttacaatgttgtcatgctgcaaggatttaaggatttcaatttctctttcgaagtctctgaggtgctcttcagtactgtgctggagctttttcacagccaccacctccccagtattgtcttgtagagggtcataccggcacatctccacactcccaaaattacccttaaacagcacatatcacattaagatacaaatctcaagttttctagaaaattactaattatgattatacagtcaatttcagcagctagaattagaagatgtatctctaaactcacattaaacaactttcagaaaaaggagataatattttagtaggtggatagtaagcctaaatatttaatttctccaaaaggaattagaggctgaaatataaataacttcaaaaaggcattataacaaaacataaacattattttttaagataagccaaaggacatgccagggaatttctaaatttctgtcactaacttccaggaagaacttttctttttcacaatatagacattgatatcactgtcagtgagctgtatagaataagggtctgttatggactgaatgtccatgtcccatcccctcaaatttgtatgataaagctctaaccccaatgtggtggagacagggcctctgaagaggtcgtaaaggttaaataaggtcataagagtgaggccttcatcctgaaggctagtgccattacaagaagaggaagacacaccagtgctctctgccgcatgaggacacagtggagaaagttgccatgtggcaagctaagaagagagccttcaccagaacttgaaccctactggaaccttgatcttaagacttatctcaagaactttgagaaaaaaaatgtctgctgcttaagccaaggtcatgctgtgtcattggtagcttctgtaattatctcctaatattctctacattctgatattcaagctcttttaaaatccccttcctttgagtgtaggctataaactcatttatactgaacattgactgaaagtgaaagagagtgaaagactgaaggcaggaggagaaggggacgacagaggatgagatggttagactgactgatggacatgattttgagcaagctctgggagttggtgatggacagggaagcctggcgtgctgcagtccatggggtcacgtagagttggacatgactgagcgactgaactgaactgacagtgaacagaatatggcaagagtgagaagatgccacacctgagataaggatataaaaagtctatggctttaatcttgggtgtttgctctcagcaaccatgttgtgaggcagcctgtggagaggcccatgtaagtgagctaggaagcagatattctaggcctat

SEQ ID NO: 42166 - DNA, 896 bp, Bovine  19866881409427
  misc_feature (1)..(1): n is a, c, g, or t
ntgtgagtccgtgcgtaggaaggttggaagcgtgtgtcgacaggcaggggctcattgttgcttacttctttgaaaatggcagtgctgaacttggaatgaacttggagggtagttctgggctttattgttattctttaagaaacagtcgttatttgtttctctgctgaccgtacattgtttttctttgcagagaaaacgtcatccaataccctttctcctcaagcaaccaaagattcttaatctttgaaggaggaacattttcaagtaataagagatacttattgagaggacacgttagctgctcttgctggggtttctgctaccgcatagaatgcttcctgggcagttttatctgcttaagtttactttgtcggttgaatttacccattttgctttccggtggttattaatctgtccggaggaactctcttttctctgaatgaaaggacagaggcagctgagtatgtcatagaggggaggagaaatgtggaggaggaaactgcaagtgggaataagtgatgacgattggttttggtttcataatagttttgttgggctactgcaggtattctgatataacacccaacggatattaagatgaataatcaacctttttcctccctttcccttccccctttaccacttgggtatgagaatcccttgctcctgtgtgcgcgtatcttttaatatgtaacatatctgcaaactggatgtgtccagcatttgccttaacatgtatttacctgtacaggaaaactacagtacttgctgactagataagcatacaatacttgtttctttctctgagtgtcctacgtttggagtatttagcatgttttaggaacccattaaagaagagtttgcttcatttgctggtttttcctagtgatttgaga

SEQ ID NO: 42167 - DNA, 722 bp, Bovine  19866880394953
  misc_feature (1)..(1): n is a, c, g, or t
nctgcactgcagatggactctttaccgctgaacccccagggaaaaccataaagtagaaggaagaaattgagtgatgggtgatttcttcactgataagccctatccagtcagagcttgtaaaaacaagttgggctaagaaatacagaataaatttactcagagaccactctcacaaagacaggcaagatctcaaactagggataagaccaatattatcattgatataaccctaattaaataataattgatttttccccttcgatttgtgaacagaagattaaccagtagcaatagtaagaagtaggtatcaggagcaggaaaaattgctattaatttagtgaccttgggaaagtcacacaatatttctgggcttcagtttactcataaataaaataaggaagttaatttacataatctctaaggtccctttcatctctgaagttctgcctctataacagggacctttggctactgacaagtttacccgagacattaagcatggtgaggtggatcttagagtatcaaaataattaatcttttgacaaagactggaactcagataaatatgtagcaacaagaacagattaaagcattgtaaggatattggagctgctaagctggtcctggaataccagatccagtgtatccacctctccaagaatgccaaattattttctaaacagcatctcagggaagagaagccctgctggttatttaaaagt

SEQ ID NO: 42168 - DNA, 3454 bp, Bovine  19866880490116
  misc_feature (1)..(1): n is a, c, g, or t
nccactatggaaagcaatatagaggttccttaaagatctaccaaggggttctctgggcaagactactgaagtggtttgccattcccttctccaggggatcttcctgacccagggatcgaacccagttcttctgcattggcaggcagattctttaccatctgagccaccaggaagcccagaacttccatttgacccaacaatcccactcttgggcacatacacagagaaaagcatagttccaaaagacacatgtaccccagtgttcatagcaacacatttacaatagccaggacatggaagcaacctaaatgtccagcaacagaaaaaatggataaagaagatgtgttacatatatacaatggaatattactcagtcagggatgttatttgaacccaggtttcactagctccaaagtttcttaggacaaattttgtattgcctaaatgaggatgtttcttgaaatggtcaatgttttggaagctgcgtctttgataacaaatgactccatataatttcaagtagtctgtttactttgaagaaaatgtttcagtactacctaataaaactgaagaatttagacacgtggtgaaatgactgtataaatcttttcaaattgatgtttgaatgctctgactttgtattgattacatttctgtgtctgtcagtatctaggtggggagatacatcaagtatctcttgatgttggcagcatttacatgggtgagtacttacataaaagttttgttgagctgtatgtatatttaagattggtatgctatatttgtaagttatacctctataaagacttttaacaattaaaagttaaaatgccttaaaatactctgacttcattgttatttgatgaaatcttaaattattgatttaaaaacctttcttgttttctaatagggatagctgctgctgctgctaagttgcttcagtagtgtccgactctgtgcaaccctataggcgacagcccaccaggctcccctgtccctgggattctccaggcaagaacactggagtgggttgccattgccttctccagtgcatgaaagtgaaaagtgaaagtgaagctgcttagtcatgtctgacttgcagcgaccccagggactgcagcctaccaggctcctccgtccatgggattttccaggtaagagtactggagtggggtgccattgccttctccaatagggacagaatgcacctcaaattccccttaagcactgcttcagttgtaatacctatattttgatatattgtgttgtcatgctcattcagttcaaaatattttctattttcccttataaattcttcattgacccattagctacctactggtgttgtttaactttcaattaacaattgggaattcttctatttttaatttctagtttaattgcattgtgtaaaaaaaatattcagtatgccttcttgtcctttaaatgtgttttatagcttataatatgacctatgttttatgtctttgaaaataatttacattgttctgttgttggataggatgttctatagatggcaattagattagttgggctgacattagctttcattttaacaggtcctggaaatcttaaagtctctattttaacctaaatttctgtctgctatcatatttattttacttgaataacattctttttaaaaaatttatcgaagcatagttgatttacaatgttttgttaatttcaggtgtaagcaaagtgagtgtgtatatgtacacgctaagttgctctagtcatgtctgactctttgcgaccccatggactgtagcccaccagactcctctgtccatggcattctccaggtagaatactggagtgggttgccatgccctcctccaggggatcttctcgacccagggatcgaacctacatctcctgtgtcttctgcttcggcaggcagattcttcaccactgccccacctgggaagctctcagcggtagctgggtatatttattagttgcaggggacctgtaaccatctgcttccaaagaaatcctggcggtagcactaactaaatcttagggatctttgactttctgggcctcagtttcattatctgtaaaatggaggcagaggactgttttaaaggaaagtatgatggcctattaactgagtcaataaagggtgagtcaataaagagacagtactctgactagtagccagaacatagtcagtgttgggtttaatggtcgctgttatgatttcaaaatgttcccttcaccagagacaggaagcagcagagaatattattggcttctgttatggatgccatctcaaagttctttccttctgcttttttttttcctttccagaatacgttggaaattataagcaaatatgcaagtgatgcgtgtatatttagtttcacataaaacctcattgttacttcctggcgcgcttccaaggtatcttacaagttatcaatctcaccaggacagagtgtgttttctgaccacttcccctttgcaattaaggactctgaccactcgcttacgcagactgagaccagcatccgtaaccccaaaggaggtcagaaacccccagctcttgccgccgagggagccagctgagaacccgacactgtgtttcagggctgtggccacgaccgtgaccataggaactgggaacacccaccaacaccctgcttcccccagccccacttccttcgctccagtgccatcaagtatggttgcagtgccttcgtgaatgttttgagtggagttaggtttctggtgtttattattgaattgctaaagatttggagagaagacaaacagacagacgaaccagcaaagcaagagacagaagacacccttgacggacgcgcactaagtgcatagctggggtccgtgacggtctgggctctccccagagcccagggttttgtcagtggctctgcaaataaaacctgccctagacacacacagaggaggctgtatttgcctaggaaacctgccactctggccctgcagatagcaggccatagtcaggggggtggtgagttttcctgtttaccttccaccttcacagaaatattgcatgcagggcctggggagggtctgggagggtcagctcctctcctcttctccagacagactggggtttcgattaaatcccagccattgcctctttgctctctgtattgcctctcctcaacagcatggtgaacacagagaagttaaattcacagtgacttcccttctgaggatgtgggagggcttgagggtcgggctggtcaggctggcagctgaaaggccaggctgcactgcgtcgtccacaggctctcccagctgagcaggaaggcttccccatctgacttcttggcgcctcttacacaaactccctcagccacagaaactaaatccacgtaggtggaggctgtgtctatgttctttgccatttgcaatcccaacatctaccacatgtgtg

SEQ ID NO: 42169 - DNA, 2589 bp, Bovine  19866880712080
  misc_feature (1)..(1): n is a, c, g, or t
naccaaagacccgcacagccaaaagaaacaaattatttaaaaaaagaaaggaggtgagacaaagacagatatgataggatatcacttgtatgtggaatctaatgatacaaaggagcttatttacaaaacagaaatagactcagacaagaaaataaactgagggtccccaaaggggaaggtggggagctaaattcgaagtttgcaattatactcactactatatataaacaaggacttactatataacacccagaactacactcgatatcttacactaacctataaggcaaaagagtctgaaatagatacatgtgtgtgtgtgtgcgtgtgtgtaaccgaatcatgctcctgtgcacccaaaatgaacacaacattgtaaatcaactatcagttcagttcagtcgctcagtcgtgtccgactctgcgaccccatgaatcgcagcacgccaggcccttgctgtccatcaccaactcccggagttcacccaaactcatgtccatcaagtcggtgatgccacccagccatctcatcctctgtcatccccttctcctcctgccctcaatcccccccaacatcagggtctttcccaatgagtcaactcttcgcatgaggtggccaaagtattggagtttcagcttcagcatcagtccttccaatgaacacccaggactgatctcctttaggatggatgggttggatctccttgcagtccaagggactctcaagagtcttctccaacaccacagttcaaaagcatcaactatagtttaatggaaaaaaaagagaaggaaggtgtttgaaaaaaaaagaaggaagcaactaactggatgcccaggatataaagaattgtaaacgtatggttccattgtggagctgaagtgtggacatgaagttaagtatctagttgggaacaggatatttgcatgataacaatgttgaggactgtacttcctgcctactcagagtcttgctgatggtctctgccacttaagcttcttatttctgtcacttacgttgcttcagcttccttctcttttccagttcccagtctacatcatggcactgaagatacaaactccccctcacacaagaaattccatggctattcttttaagatcttacaatttttattgcatgacctagcagtagttattacactatttttgagtccgaatcacacattgtgaatttgcagggtgatatcatttagatcgttaatctctctgtgtccatttttttacatttgcaccttgagaatgttattatttaccccatagtatgtgtctagaaggcttccctgctggctcagatggtaaagaatctgcctgccgtgcaagagaccggggtttgattccggagtttggaagatctcctggataatggctacccactccagtattcttgcttgcagaatcccattgacagaggagcctgtgggctacagtccatagagtcacaaagggtcggacaggactgaacagctgtgcacacacatgtaggtctagaggaagaaaaacaaggagatataaagaggatgaagcaagtctgaagcaagtcatgtttctattcccaaaggaaatccaaataacttttcaatcgctaccacatttctttgaatctgcctcccttaatttttagctgagcagtatttctgtatcactaagaaaaaacagggtttccctggtagctcagctggtaaagaattcatctgcaatgcaggagaccccagttcgatgcctgcgggaagatcctctggagaagggataggctacccactccagtattcttgggcttccctggtggatcagatggtaaagaatctgcctgcaatacgggagacctggattagattcctgggttgggaagataccctggaggagggcatggcaacccactcagtattcttacctgaagaagcccatggacagaggagcctggtgggctacagtctcggggtcacaaaagtcagacactactgagcaactaagcacagcacagaaagaaagagcaagaaatgttgtcaactgaactgtgacacatgttttcttaaaacgtcaattttaagatatgtatcaatgttggagatgttaaagcgtgaaaaaatcgacaaaacatgcatgttcagcttatatcattagagccagtggtatgccatgaccaacccaagctacatttcaaaaattataaggcaggcataatcgactacgtgtgtttttattttagaagccttttttttactacaattattgtcatgtgaatcctgaaagaactgaaagcacagagcttctgagagctgttttcatgggcagtggatggacaccgtctaatgctcagtattggacttacattacagttttattcagcttctatgaccatttatttattttaaatccaacattctttctctgagaatttcttttaaaataatagccactctttggtgcctcccacaaataaccatccttgcacgcttgctgctgactcggcactggcagttaaacacagtctgtttcccagggctatgttggctctcccatccagcagggggacgctgaggcagccgggccacagcgctagactccgatggc

SEQ ID NO: 42170 - DNA, 2294 bp, Bovine  19866880974837
  misc_feature (1)..(1): n is a, c, g, or t
nactcaagacattccaaagatgctatatccatctctttgtgcattcattcagagttactcagcatctgccaagagctttccttccaagagctttccctccaagtgcttatcctggagggaatagtcacaagattacatctctaccagtcgttcaatacaacgatggatgcacgttcagtcatgtccgactctttgccaccccgtggactgtagcctgccagctcctctgtccatgggatttcccaagcaagaatactagagtagattgccatttcctcctccagaggatcttctcaacccagggattgaacctgggtctcctgcatattcatagtctttaccgagtcatctgggaagtcaatacaataccgtactgggtaaataagttgcaaaagcaaacacaccgtaggagtttaggggaagagaaggcgaagagttggcaggttacaacttcctgaaaagcaggggaggtgagttggatgatgaagcctcagtcagcatgggtcacaggagaacggaggagcctggctgtcatttccactgccagcctggagggctgcagggaatcattatcctcgcacgcctgaagcatgatgtcttgaatgttcccggcaactcaattacggcatgcaaattttccgcggagttgacttcttggtcttcgagagccacgcacacgctcctctgggctgtctgcacgggggaaaacattgttgggaaaggagcctgaggaccaaccactggaaagtgcactcaattgcactttggttgagataattgctgcgttttgtgtgtgtgtgtgtgtgtgttttaaattgtaggctctggaggtgaccgcaagcaaaatttgtgacagacatttgacactgagaaactgccgtgtacggggtgaaacttttcacatccttcaaccccctcccctccccccagactggtttgttgactaacaaaggaaaattatctaaaaccgctggagtacgttagccaagtcttctcttttgtcgtaatgctctttgtgctgggcatcaagatttctcatggttacaggcacgcggattcccttccaggcaagcccattcaagttcacggcctgggtgaccttggcagcccagcagcccaatgggctcaaggtgatgcttcttgagctcgaaagtacggatttgcagagacccctacctgcaatgcaggagaccgggtttgatccctgggtcagaaagatctcctgcagaggggaatggcagtgcactccagtgttctggcctggaaaattctacagacaaaggagcctggcaggctatagtccgtgggatctccacaagtcagacacgactgagcagctaacactttctcgcccattgtgggctccaaagacttcatagccttgatcagttcctgcacagcaaccttcatatcctctggggagatgtcctcctttctgcctgtggccacttctgtctccaagaaagctggcgggcatgactgtacaaagcacaccagtccatcaagtggggaaaaaaaaaatccccagcctcatggaagtaaaaggcagggctgtcagagacattctccctgcccgcagccatcaggaccctgtgatgactcccagcattgcaaggatgtaatcagaaggactgagtagagagcttagagagacactttcatggcaaatctccagcctcagccggggcggcaggtccagaccagctggtgggagctcacaagctgcctccatggtcactcccaagggcacctccaacaagatcccaggactcctccagctgacttctcaagctggcttctctcccagaggagcattcttccctattggccttcacaatcctacttctcattgtcaagaaggcatgacagcagaagtattagattgggaggtcatactgactttgttcctgccatcttttggactgggggacctcagggaagctctccatggcttggttccatcacctgagaaattaaaataatattcatctcctggggtcctggggaagactcagtaagacagtggaggtgaaaatgattacctacatggcgcctatcccatgatttgtcacaaatgaaaataaatagccccacaaactaccttaatgaatcaaccaagaagcacttccagggaacctgcgtgtgtgctcaaggcttcccctgtggctcagcagtaaagaatttgtctgcagtacagtaggctcaggagatgcaggttcgatcgctgggtcagggaaggtccctggagtaggaaacggcaatcatggcagtattcttgcctggaaaatcccatg

SEQ ID NO: 42171 - DNA, 1216 bp, Bovine  19866881104308
  misc_feature (1)..(1): n is a, c, g, or t
nttctgcttaaaagcccacttacaccatgaagtttcccacaaaaccgagaggcttgggcaactgatatgaagggtcactgggtttagacctcaagaaagaagtttcctgcgaaggcctcagttggctcaccaccagaaagccgctgagctagagagacagtgtggtattagtggggaaacgcctggggaccctaacattggttaagctccaaccccgctgacaagctgagcgccatcaacagaaacagtagcccccatgactcttgctgtgggaagtatagtcctgtcatcttcagggttacaagatcagccagattttgttagaaatgcaggtgcccaggtcccaccctgggcagtgcctgtggatctgcattctaactctgattcgaggtgattctcttgcacgttaaggtttgagaagggatgctttcaaataccaaaggtacaaatatcaattgtctactattaaaatgtctccaaatttccttggatacccacttttaaaattttttcacaagtaatatcagctagcacaaaaatactgatatggtcaataatggctaaaggtttaatgaagagaaatatgatgcaaagattttagtcttttctctcttaaaaaatagccctgcccaggtcccaccctgggccaatttattcaatatccctaagagttgaggtcaactgaatctctctccccgagtgtatctaatgtgtaagtgagaaccactgtttcagatggtcatgtagggcttgtttgttgtttagttgctaagtcatatctgactctttgcaaccccatggactgtagcccaccatctactgtccatgggattctccaggcaagaatgctggagtgggttgcccttttcttctccaggggatcttcccaacccagggatcaaacctgcgtctcctggattggcaggtggattctttaccagagtcatcagggaagcacatttagagctaaacatatataaatgttaccaattattttccgaaatgaaagtgtgacatcattcagtttgatattatactcacttattttgtttacttaagggtcatacattagaaatttatttttaaattttattttattgaattaatttgcaatgttgtattattttctaatgtagagcaaagtgattgagttttttacatatatatgtgtgtgtgtgtgtgtgtgtgtgtgtgtgtgtgtgtgtatatatatata

SEQ ID NO: 42172 - DNA, 3223 bp, Bovine  19866881158399
  misc_feature (1)..(1): n is a, c, g, or t
ngagtaagaggccgtgctatctgctgaaccccagcctcagcccccgtgtgcccggccagcctcggagggaagaccgcagtgctggggcgccggccctttcagccgccgccttctttcctaaggtccttaacgagcatgctaattagtggcaatttccctggtggtttgtgtgatgtggagactcctccactaagaaatggcccagaaccacaaactcatttaaaatagtcaatcctactggagatagaaataactccttgtctgtgttgatcctagctagtgaccagtgagcaggaggttaagtcttgggaagagaaggctgggctctgactcagcagaaaccactgtctgacatttttagcctcttctttggtcctactggagggactcttcttcctacagccaaattagacagagtatctctaccagctcgccttctgctgcaccagctgccctcctgccaatcaacttggacttatcttgttacccttctgatgcttgagattcatagcacacatctccgagcatgatatccaagaagaggagacaaaactagcatccccagagatcagtagtgctcagccaggagtgtcttggattcctggggacatttcagaatgtctggggacctttttggtcatcacaacatggggagagcagggctttggtgctactgggatggctgctaaagacccacaaggccagagcagcccccatgactaagcattctccagtctccaatgtcaataatgctggtcttgagaagccctgggataaatgaaggcaaagaaatgtcttcatatattctgcagtgtaagaaatgagaaaatttcactgagcatctattgtgcatgtaaatgatatgttttatgagagagtctataagaaatgagtcatattcactaacatcaggaagtttctaatttatttggacatagtacatatgcactgaaaagttgtgttatttgctacagcaataactcacttgcaagggagattggtatttatattagtttgctagggctgcgataagagagtaccacagtctgtgtgacttaacagagatttattttctcacaggttttggagactagaagtcccagatcaaagtgtcagcagggttgatttcttctgaggcctctctccttggctctatagagctgacttctcccggggtcttgagatggtcttccctcagcagctgtgtcctaatcgcctcttcttttaaggacaccagtcgtctaaccaacaagggccactgtggagcacatggacctctgctcccatgttatggggcagcctggtgggaggggagttggggagaatggatacatgtgtatgtatgactgagtcccctttgctgtccacctgaaactatcacagcaatgctattcagctgtactccaatataaaattaaaaaattaacatacatgttaaacggataaaaaaattgagtaaagggcaccagtcctatggattgtgcttagtcgctcagtcgtgtctgactctttgcgacctactggactatagcctgccagctcctcggtccatggggattttccaagcaagaatactggagtgggttgccatgccctcttcctattggattaaggcctatctaatgattaattttaatgtaatgacctcttaaaagaccttatctctgaatacagtcatatgctgatttatgctagggcttagggcctcaacacacgggaggagacaccatttcagtccatatcagaattattttgttataacttgataaccaggggtagcaatataagaagcataggaatgtgttccaaagtattagaaaagtactggtgtgctttaagaaaaggaaaatgggcctaacacaaattttaaaaaatttttgagtcttcaagtaggaaatgctgttgatctgaagagggatggtatttgaggaaattctctgggatgaaggccagattacttcctaccccagctcattcgttcagtatattaatagctgcattgagctcatgttaggtagtacctggattatatatgttactctcctagttaaataaagattcttgccttcgggatgctcacaggcacatttgcatgtatttgtgggtgtcagtgcagtggggagagtgggtggaggataaggcaagaagacatacagaacagactttaaatactttaatatttgtgtggtcccatgggcgaggtgatgacctccgactagggtggtgacagggtagaaataaagcttggaacttgggaaactggtggctgacagctggtgtccattatgattgcccagctggctgctcagtactttgaatgtcatccccaggttgttgaggaaggtggcagaggaggaagagtgtgggctggatcttgtgaatcagtaggactttgccttgctggggagcgggctgtggagttgtaggaaggctgaggatcatgaatagagggaacagaatgcagtcagtctggaaaagaccagactgtgggcaacaggaagtcaaggagaacatctgtctcgctaaccattctgttctcagggctaccatctgacgcataataggttttcaataaatactgactgaatgaatacatgaacgaaagagcacagcacatttggaaaagggtaaacagtggagaaagcagggtttggagagaaagtttgaccatgtgtcagggcttcccaggtcatggggaaaaaatcaaagacacagactccagcacgccagagaattttcaggggggaggtgagagaggacatatctggggattggatgggaaggagagaccgtgtgttgccttactcatgaatcactcctgaagtgtccttttaggatgctttaatggctctgagttctcattccattcagttcagttcagttcagtctctcagtcgtgtgcgactctttgcgatcccacggactgcagcacaccaggcctccctgtccatcaccaactcccagtgtttactcaaactcgtgtccattgagtcggtgatgccatccaaccatctcatcctctgttatccccttctcctcccctcaatctttcccagaatcagggtcttttcattagtcacacacaaactgtggctgtatagtcatggtcattgtaatgacctgagtcttctaattttctaagtctcggttttctcatctgtaaaattgaaataacaatcatctcatcaaggaggattaaattacttaaaacctataagcatca

SEQ ID NO: 42173 - DNA, 721 bp, Bovine  19866881171382
  misc_feature (1)..(1): n is a, c, g, or t
naataagttggggactcaaaatagtcaaaaaagaaaaattcttactgcacaatctttatagacattttattttaaagcaactttttaatgttaacagtgggtttgtaaccagaaaagagtaaaataaaatagggtacccaccacgagcaaggttaaagttctcctttacatacacacaaatacacacacacacacacacacacatacactcactcactcattcactcactcaatttcatgtcagaacaattggaaacattagcgaataatatcatttaatgaaaggctggggaaactatcatttatagtatttatagaaacctaaactactgtttataataaattaaataacttgggggattcaaaaaaataccaatagctgaaccatgaaaataaaactgacccctaaaaatagaaaaagatgtcagaaaaataaattagcctcaatgctgttttttcgatgtcagatttgttattaacaggaaaccatttgcttgaaaaggagtaaaattataactctttatccctggaacccaccttcagccacttcagtgcaatttctagcagcactatttggatgcgaaaagaacgccgtcagtcaatgtttctgaaagcctcacagtcagaccttccttcaaatacatgttcttagggtcttacttaacacactgcgcatgtgtacagaagaataaatgaagataatatctgacagattacgaaa

SEQ ID NO: 42174 - DNA, 740 bp, Bovine  19866881171628
  misc_feature (1)..(1): n is a, c, g, or t
ntgaaaacactaaaagtgaaaatgtcgaggacacactcaaaaggtgacctcaaaatgtcatcttttaactttaaataggaatgataacagaagagtttaacgtaactttaaggctaatgagcaaattttccatgctctcaaaatttgtttcaaataatctctcatgtccctttccagttcaataaatcgaccgtacctgtatatgagcagcatctgtttcttcattaaaacctagaaatgtgacctgaataaaaaaggaataaaggtccattaaaatttttaagtcttgtctcaattagattgttgacagagctgagaaacagaaagcaaagcacacaatgcattaaaatgctgctgcaagatgattaattttttcaaagatgatcacaaaggtttttcaccaaaggtctggctccaactggggttcccaaacctctcccacacccactcattagcaaattcaatcctcaccctcaaacataaagcacatgtctcttctctccacagcctctgtggccacttctccccggcatgaccccagtcctctcctacctgcctcaggaaccatcctgtcatttccctgtcaaaacctttccaagcttctcaatgcagagtcctaatggaggtcccaaggctctggcttagctggtggcttcaactttccctcaccttcattcaaacacatgggccccctcgctgggtccaggacacgcctgattgttcctgcctaagggcttcag

SEQ ID NO: 42175 - DNA, 864 bp, Bovine  19866881214874
  misc_feature (1)..(1): n is a, c, g, or t
ntagacgtgttgctttgctgggaccctgtagccagctgcagatttttatcttcccttattccccttctggaattgttctgggccttagaagtgtaagcttctacctttctgcatcatttttcttcaagaatcttgtgtgctatttagtgttctcataactggacccctagaggttggatatgggaagtttggctcctctgcatatcacaggtgagaatgatctggtccttctgaagcctgaaatctccagcagactattcctatctccacccacttaaccttggaacgtgatttcttgaaatattggtgtgtgtttgagcctcagctgtttctgtcagagaaatcactttgaaagcttcattttctgggataataggacttcagaaatatgaaatttctcactgtccatagttactggattattttaagcaacaaaatcatgtataaaatgttacaaattgtttagggtttatatctttcttactgacaagcagggcttggcataatctgaaaaataagcattcataaactgagtctactgaaatggaaaaagagaattacacactaagaagaaggagaaagccaaatgggttagcttatctgatacatctaagtaaaccagttccttgggagatacaatcatttcctggtactaaaaggaacatgttgtgtctgtatatgttctaacatgcggaacacaaagccacttactgaacgacatcttcgagtgcagttttggagacaacagaatgagcccaggtctgacaatggattgtgtgtgctcagttgctaccctaggagggtagggtgtgtcctaccctcctagactgcacaggttcaaatcccagctctgctgactgccac

SEQ ID NO: 42176 - DNA, 827 bp, Bovine  19866881322373
  misc_feature (1)..(1): n is a, c, g, or t
natgtcatttgtcacaaggtcccattccttttgaaatgtttttcctctttggaattacagtcaaaagaatcttatggcttgagagcattttgttttcttggttcctgagatgtactcatacccaagccattatatgtgatcattatttcctaacattttgaaacattcatgaaaagctacaagatcactaattccaaggctgaagacacttaaagtcaaattccattagtaataaataatcaagcacctagctttgaagtacctgatactatacagcatgacaaaggtctgatctctatatcctatggaagaagtgctcggtccagactggagaattccctaacacacttatattcaaggcaatcacaatattctactttgcactaaaatccaaaaggcaaacagcctgtcaagtcatcctgtcagcattcagaggcactcaaataaaaacttaggattcagtgtccaattacaaatactctagcttccgttcttctttaaaataatgttagaaacgtagaggttgtttgatgtgccttctatgcttttgttttagtccagtattgagtgtgttaacaagatactacagattgaaaaccaaagtcaggcatctcttaagtttattgggaaattcttaattgggagagaaagatcacagacttaaacaattggaaaaaataaaagaacaattgatcgcaaattattacaaaagtaatttctgaaatgtttatttttgagccactgcaaaaacaaaattttagtgcatcctgaagttcatattttggtaaatgaacatattaaattactgaaaaagcaaaagaaaaaag

SEQ ID NO: 42177 - DNA, 1362 bp, Bovine  19866881341614
  misc_feature (1)..(1): n is a, c, g, or t
ncctataccggggatacatcattatctcaacagtcattgagaaagcagtattccattttatacgtgagaaatgtgaggctcagagagatgaatggagttagttgctcaaggtcacgtatttggttaacaatacttgacctccatctttgcttgtgccctgtaaagcattctaaccaaattttttatatttatttatctggctgagctgggtcttagttgcagcatgtgagatctagttccctgaccagggaatgaacctgggtccctgcattgaaagcacaaagtcttagccaccggaccatcaagaaagtcccccctaacaatattttgagttggatctttcctccaaatgtctaggacccataaaaaaaaattgaattaatacaatcttaaaatgccaaaaatttatacatgcctgagtagaacagtttgctttacaaggtttgctcatgttattttttgtgaattatgataaatgcaaggaaagtttaacaatcatggaatgaaagaacccaatatgattttacaaatgtgtataaatcctttcctcaaagaaaccctcccctggacctggaataatcatatgcctctcagttgaaaatccatattggtgtgtaaataagcagctacaaatttcactcacccaattatttgtcctttcctgagtatgcaatcaatttggtgtttctaagcatcatttatttggaccacaatcacacatacaactgctcatttttgcatctaattcaggcttggttcctccagtggctgcctgtgggccaaagtccttgaatcaatttgtcatcacatcagatgtgagtgcatttgactgtgacctacacaattttagaaatcaagttttttcaacaaggtattgtttcttgaaacatcatttggccttgcgggaaattgactggaaactggagttactctctgactcagagttccaaatccaggcattgcccgaagtagccaaggcagtccctgaagcatgtcaatgaggtgatgctctgcaaattacacagggctggccagctactaatgaaactcactgtactcaatttggccctttagattaaaatataatcactttcaatcaaatacatggcagtcatcactttatctgaaataaatctgtatgcacttaatgttactgttgtttcgtcactaaacgtccaactctttgtgaccccatggactgcagcatgccaggatcctctgcctgtcactatctcctgaagtttgctcaaactcgtgtccattgcgttgatgatgccatccaaccatttcatcccctgtcactgccttctccttctgcactcaatccttcccagcatcagggccttttccagtgagtccact

SEQ ID NO: 42178 - DNA, 1024 bp, Bovine  19866881380682
  misc_feature (1)..(1): n is a, c, g, or t
ntgtattttgttccaacattatttctaatggtttgacatttattaaatatagtaattagctggactaattttctttgtgccaataattgaaaaatatgtcatacatttgattttatatgcttcatgctatacttggccttctcatgaacttttgagaaaaaattttctttctcactttaaaggacaggaaaaagaataattatctgtaaaaggcatcaaaatggtcctgtaatttttttaatattatagtagtatttttctaggggaaggattccttatttgtccattcaggaacactgtaacttgagcagttatacctgaatgactgaaaatacgtaaactcattacaaaaatacagtataatataacagaaggcacttcatgtatcattctctcagttaaccttgttcctaaaaccagttttagaatattttattaattagaattatttcctttattcgtaatgctgtacagaccttcctgagtaacctataaaatgttacaaaatctttattcacattaagtgatacttggaaatagtaaacactgaccatagctgagcctagggagaggagggggttttgggcacttgtagaaaggaccctgtgaagcttctgcagaacaggcccttggaatggacttaccaggaggaggaggaaagaggggatgaggaagcagaaggaaaggaaatggtttttcagctgttagaacacatcatctcggagtacttggtttgatgcttggattaaccagtgagtgttaatatttttatatttttattgtcatagtttttaaaatgtgacacaagccaccaacattttacaaaatttaaatccaaaaaaggcagtctttaaaattagtagtaggaagtggggtaatatcacagattatcatttggccctctccatagctttagaatgtttacacttaaattcttctctcactttgagaaacaggcttctagaatttcagtggagttgacattgtgcttagaaatccggtgttaaaggggagaacttaaagg

SEQ ID NO: 42179 - DNA, 3553 bp, Bovine  19866880391618
  misc_feature (1)..(1): n is a, c, g, or t
ncaaaagagacactgatgtatagaacagtcttttggactctgtgggagagggagagggtgggatgatttgggagaatggcattgaaatatgtataatatcatatatgaaatgagtcaccagtccagattcgatgcacgatactggatgcttgggactcgtgcactgggacgacccagtgggatggtatggggagggaagagggaggagggaggagggttcaggatggggaacacatgtatgcctgtggcggattcatttcaatatatggcagaaccaatacaatatagtaaagtttaaaaataaaataaaattaaaaaaaaaaagaacctcaaaggcttaattgtcctttatattacatagccatatgtgctggccggtactgctcatcaaagccactcagatatcaagcaggtgaggagctgctctcctagatatgtcaggcctgaacaccaaagagagaggagtgtctgtgtgtgtgtgtgtgtgcatgtgtgtgtgtgcatgtgtatatgtgtagaggttcttgtgtgggtatttacacaaggctccagcaggaagcattcatgaatcatggccacatctagtcatatggcctctcccaacctcaaagatgtggttactttataaagtggctgcaaagagcactcctgccaaaaaccttcttggggagaaacggcaagcgcccaaagaccagcaaaggtgctcaccgtaccagccaaagcgatgtgcgctgggtctgaatcactcctgcaggcagagcgatggaacagcagatgaaatctcagctctctctgactcccagatccatgctctggtgaacagctttatttttccatcttgttaatctttattatccaaatattgaaggaagtgtttaaacccacacaaagctacagactagaaaattgtcctatcctcaggaaatttcccaaagaggaaacgtttgggagaaactgatgacattagtcactgtccggtgccctggctcaggctgagggcagctgagacaggaggagggaggaggtctgtgtgtgtgccccatacatggggtacgctgcatgagtgagcttgtgccaggagttgtgaccctcctaatcccatatgtgcagaaggccgagctcagagaaggtgagagacctgttagggccacagtgagcttctgtgaggtgaggccatctgagccccacccatcctgagcttggctctgtgcgtggccccacaatgtcctttaagagatcctactcatccaggagcattaagccgagaatgagacttttctcttgagaactcagtttcttcttctgtgtactctcctctcttcccagggggatatgatgacagtcaatacaataaaaagtcatgtcagtgttgaagcgctaagtctgagagggagaatgaaaaacagcttctgcacaggtaaggggtgaggatgacttcgtgggacagatttcctttggggttttgcactaaggctcctccactgactttggtgcaggacagtgggcttaagaactccgccttccttgcattcctttaatgggctcccatgctcactgaagcaaaatacacaaaaactccctgtaagtgcctggtaatgcagcccggaattgagccctgcagaattattagagccatccatcttaattacactgaaaatcacttaagtgctttacataataacactgcatttacaatctcccagcaccgagcagaggctggcagggccgtctcactttctcatggaatgtttccctaaggtcacatttcttgtttcccctaggtcacatttcttgtttcccctctctgggtgggaagatggttgggtgtttctttaactccccctttcctggtgggccatgagttcagggctggttcccttgggaactgagtcctctcctggacacagcccaggtacttcacatctggtatattatcagtccttagaatcaccctgggaggtctgtgtgcttatcacattttacagatgagaaaagagaggctcagagagactaggtaacttgcccaaagcaacacagctaagaaatggtggttccaagaagaaaagctcctccttcatagtgaaggtatgtctgcagattccccttccttccttgttttgattctgtggtttccaagaagcagtgatgcgaagaaactatctcctcatctaagggagcccatcctatatagctccagaaagcaaacacacacatacacagaccccacaacacacgtttcacaaatgcatgtacacatttccacaggcatatgcacacacctgcacacatgcatacctacacacacattcatacaaacacacacatataggcatactccacacattcaaacacacacacacacacatgcacatatccatcgcatgcatatgcacaaaccccacacatataccacacgtatgtagtccctcccagtctagcacagacctggctctctccattaaagtcttatcatgtagggtaatgctgggacccccaatccttgtgcacatgggagggaccatgaagataaaactcagttggactctaagctactcaggaagaaaggtgctttggggtcagtctcaggaggtggacctttcccatgagaaagagctgggatggtgcacacatgtaagtactcgggactggagagcagtgcacagacacccttctggcctaagggggccccgcctgcagatctggagactactgagaaccaatagaacttatatacacatatacctttttgtttgtttgtttgtttgttttttactggaaggaattggctcacgtgattatggaggctggtgagtccaaactctgtagaactgatgtcccagttcagatccaaaggctggaagacccaggaagaactgatggatgatgcagttgaaaatcttcaggcaggaagccttctatcctaactgtagggaggtcagacttttattttatttatgtcttcaactgatcagatgaggcccacccacatcagggagggcaatctgttttactcagtccgttgatttaaatgttaatctcatacaaaaatgccctgatggaaatacccagaatgatgattgattacatatccaggcactgcatggcccagccaagttaacacatcatattaaccatcacagaaagagtgtgtgtgggttgtatatcccctgccagggcctgggcatgaagcctgcctctctgagttttcattttctcatctataaaggaggtgctgtgagcagcagaggagctaatgaatcagtgacactgatgcccctgtgaggtacttagctcatgacatctccttccagactcatgctggtgtctcaaccatcctcccagaagaaacccacacaagtgctggggttaatgtttttaatcactcaccctcttctccttggccacagttactgcacacccctgtagctagtgtctgtgggaccacaaaccatgattctgtggattctgtaaggtcactataatctctagtgtcagtccccccagagaacaggaaaaccaatgtgtgtataagcagggctaaagcaccaccaca

SEQ ID NO: 42180 - DNA, 1629 bp, Bovine  19866880392662
  misc_feature (1)..(1): n is a, c, g, or t
ntttggggtccccggctctccttccactcacctgccttcccctggagccctggtccccactcttgtcacttcccttggtcctgaccacaggtcagcgagagacccctcaggaggtcagctgcatacctgactggcagctcacatagtccatccatctgagcaccccgttcctctcccggtggcagccctggatgtgggtgtgccctggcctgtggtctcggtctcctgaaggtgtccaggactcggtcctctggaggcctcagagcctagttctgctcatgccccacacctattgggctcgagggccctggggtgggcctggggtgggcctggggactgtttgcctgcctgtctctaacctccgtgctaactgtccttctcccctctctgcgctcagtcgattccatgggacctctgggaggtaagctgtgctggcgctgtgcccgccccgcaggggagccgctgtgctgtgtgtgcggccccgcccaccgcgtgccgcaccgttcacaggtgcacgggcacgcacggcggcgcctcccgctgttagggaccctgcgccttcagccaggccctttgggacagggctcctcagttcagcctctgaagagttccccagggtgcagcccagttttcaggggctgtgaatggccctagacagtgaccagctggtccccagggtggatggggtgtccctgtactgggcccaggtctggggagcagggggacctcggggtggaggggttttctgtcagcagaggccccttagggcagtgggactagcgagctggtgggacacaggagagaggggtggcgactcgaggagcaggacaagctgcctgaggctggaccgggagccgccgtcacctgggggctcagggacggagactcggggggcaggggacgccccgcagccggcgatggagctcctgcaggagcaggaggggctggcgtgaaggccggcagcccaggcctggggcttgcgaagctccaccggaggaggcccgaggaagtctggcgccggcgggcagcgccgcttccctggcaggagctgcgctgctgcggcatccacacctccctgccctctgggcactcagctggcccatgctggcggctcaccaccttcttctcttgtctcctgccccgcccgacacctccccctgccgccccggccctccctccccgttccccgcgctggcccgtcactagcccacagagagtccagctggcagcttgccttccggggagcccagcgctgccgagggcacctttgctgtggcctggcccagccagacggccgagccggggcctgcccaagtaagtgccctgtcagcgcccccaccctccctgcctcttgggggtgtagcatggaggaagaggctggaggaaggggcacaggaggggtcacggtgggactgagggtgagcctttagccaggaggcccctgcacagggcttgtctgtcactcgtgccggaggggcgcagatccgctcagccctcgtctgctggccagcaccagcctcccagctcagggcccccgcggtgggagggaggtgtgttgagatgacctcctggtttacagtgggcactttctagaattctccttgaatcttcagcctaacctagacattg

SEQ ID NO: 42181 - DNA, 2159 bp, Bovine  19866880453881
  misc_feature (1)..(1): n is a, c, g, or t
nttggacacgactgcagcgacttagcagcagcagcagctctaaattccacttttcaactgatcagaactgttaatttgttttatcaagaaaggtttgcctggtctgctactcagtaataaagggaacacatcatcagcacatgtcacaatgtggatacatcattatgtgaagtgaaggaagtgagacataagaaaatatatatgattttgttaatatatttccagaaaaggcatgtatccagaaacagaaaacaattcagtgatttcctggggctaagatgaaaagcagtgatggtgagtataagaaagatgttctaaaactggatcatggtgatggctgtatgaacgccttactaaattcaagattactaaaaatcttgaatcatatacttaaaatggatggatttatggctcataaattatatcaatatggctattaaaagccatattgtgatatggctgcctgcaatacttggacaagtacaacttctataacataataaggatcaatactttagtcttaaaaataaaacaaacattgcaagaactattttgtgctcctagtatagtttttgtgggactgtaaaaaaagcgaggggaggggttaaggataagtggataagttgaggtgcaaaaacagtatccctttctaaatgactactctgggccagtgtaagaagactgtcagtgtggacgcccacccacccactaacccccactccgcacatgctcattacttcactgaaagcttcaccaagaaagtttctcttgcaagatggatgtattacacagcagcccctctctcaacccaagaactggaaaattactctgtccatacggtgagcagcatcccagctctcagcctgcttacctggtatggtgtgtacttcatccaggatcatgaggccccattcctgagttttgagccactccatcacccgctcagcctcccaggaccttttggtggtgtggcccagcatcgagtaggtgctgatggcaatggagcagcctatgggcttgtccttggcatcggaggtaaagcggcagatctggctgtcgtcgatggtggaccacatcttgaactgggctttccactgctccacagacacggccgagttgcccagcaccagacagcgcttcctgacagtacacgcggctgtcacgcccaccagggacttcccagcacctacaagacaccaagggcaacccccccaagccgagctgaaatgagggacagggacagacaaaaaggctcgccggcacaccaatctggcccaaattattcgtacgatcctcacagcggacactgttgaggcattttttctgctccaaacctgtttccttctttacagaaaaggaggcatgcccacttcacacacagatgtgaaaactgagagacaagtgccaggccctgttagagcaccatatatgcaccttgtttaaatcttaaaaagcaacatttgtcaaaacaaactatgaataagagacacctctactattgccgttttaaagatgggaaaactaaatctaaggtgcaacttgcccaagaccctgggacagcagtgctgctagggtacagtgtacccaacacacggaccaccttcggagggactgagtaaaagatggctactaagatcacacaatcaactgggctgagcactcaggaatgtggtagtgtgaacactgctactggcaaagacacaggaaggtgaaactccaggggcttctgagtttaccaccatccaccatgagaagatcaagattaaaactcaagctgttcctttaaaaagcaattcttccttaaccagggatgtgcttcaaagtaacccatggagcttaaaaaaaaaaatgaaggtgcaggccccttcctgagacagtgcaccttctagagtctggggcagggctccagctgactctactatgactgccagcctagaacctaggctagaccagacacgactcaggacagatgcagagagagcagcccacccacctccttcactcagtcactcaccacaaggaaggacaatgaccccgggagcgtgcacgcccgttcccaaacatcttccgcaaactcttctcctgataaggtctaaggacagctgtgggcttcaggtcaatgttgatatcaagggttgacagaatcattccgaaagtca

SEQ ID NO: 42182 - DNA, 951 bp, Bovine  19866880560082
  misc_feature (1)..(1): n is a, c, g, or t
naatatagagaatttaatggctacatttaaaaatgtacattaggtcaaagggtaaatttacaaattgataatcagaatttgcaccaattaaaagtttattctcatatttatccaagtttacttttatttacaatgatatctgaataaaaagaaccatgtgaaatgtaagagatgtcagacattaaaagtatttttggtattaactcttttataatatttcagaatgcagggtagcaaattttaaaaccaacagcaatagaaaaaatgtaaaccttttacttactaagactgtattaaaaacaagtgcttgtttttaaagaagtattcttatccttagacactgcactttcacttgaatggggtatattccaagggtttggcctactttcttttgcctgtaaacctttccagcgcaaatgtttccactagttctttcttattccaggtggaaaaaaagtctttggaaaaatgagaatatgacaaatctattttgaagcctaagtgtctaacagagttagatgtaattttgttacttatctctcccctccaagcaatgctaatgctaaatcaccaacagttaattacacaaataagtgaagacaaaagtgcttttcagtacagtcacaaactttactgtcctcaactggcattaagggactcagaaatcctacttggggacaaattctgcatgtatgctggagagcagacttgtccttgtcttccaaaatgtctatggcacaaaaagtccataacctacttttctgcaaaactttcctggaatgcccctcaagtcaaacacaagttcataaatgtcaagacattaagaagaaagtacgcccccaacctgaggcatgtgtgtcgatgtgtatgtatatgcatctgtggtcaagtgacattaataagattggcacgtgtacaagctcaagtctgtaatgtctatatagttcccta

SEQ ID NO: 42183 - DNA, 1428 bp, Bovine  19866880682080
  misc_feature (1)..(1): n is a, c, g, or t
ncttgaggaactcaaattggttggaagcacgacatggaagagggaaagcttatcaggtgaggagtgacaaggacgccactggctttctctttattagagaataaggaattttgcatctcttcaatgcccactgcacaaaagaactgctgtctcagagatgacttctctctctgtactttcatgcactccctatctatactctgcttacagtgtctactctgtgatcagaatagctactgaagaccctctgttttgatcaggcatgaaaacagtagccagtttataagtgccatggaaaagacatgtgttccacaagcttcccacatggctgaccatttctatgtagcaaagtgattcagactctttaaacaaccaaccctctctctatgctgctgtctcctggccctgcaaatttcagcttgttgaactattccataatatggtaaatgccaccaagggagctgaggacagatcacaaggtggcacagccatttctctcgtcctcacaagaaccatcaccaatgatgatcagtgactccatcttcaaaggaggatatcagggtcctcactttggtttgatgccaaagccctggtttgtgccattgtaaaaggaaagagtcaattttgactcttctgtgctagatctgtttctttggccactttggttattacagtcacacataatggcttgcctcagagaatcccgcccctctgcctgactggtaagctgaagtgcctttgttcagaaccctgtctgcctgtggatggcagaaggaagaaatttacacaaccccttgcctgaggtttgccattctaggagacacttgtaagattttactttctttcctcacctccccccatctctgatccttaaaagaacctggcacacagaccccaacaagatggttatttgaaacactagtgtgccagcttcacagacaaccagctttctgaataaagttgtcttgtgcagccagcagaacaagcttggactcagtaacgccataactggctttcaccttaccctgtggaatttacttttgttctgtaaaatgaatgttgtttccagggggacaggggtatcagcattctatgtggaactgccaggcaaggtggtaagggcaccagaggaaaaccccagaagatgctgcttctcctgctcagctgtctcctgcccaccaccaatgggaagaactgcctccaatgctggcaagagctgcctgcactgatagattatgacctgcagattctttggggcactccagggccacccgcagagctctcccaaagcctccattccctattcatggacaatcagtcttctcctgaaaactcgtaccttggtgaggcacagccaggagaccccagggatcaagggctgacccctttacctggccccggcgtcttaatcctctaactttgtcccaa

SEQ ID NO: 42184 - DNA, 1280 bp, Bovine  19866880761277
  misc_feature (1)..(1): n is a, c, g, or t
ngtcgctccttctcagatgggacacagccaaggagaacgggcgccttcgcctgctcccctgagcacaagggaggccaagccagaaaggccgaacccacaggggaccgcaggaagatgccttgccccagaggacacctcccgcagccccccagcaccctcaggggactcacacacctaggctgggccttgactgtgaacgtgttgctcccgtgctgcttctccagactgatgagcacatcgttgaggttctggttgagctgcaggagggacagcaagcatgttgggtgggggccaccaaccagccccacctcccagcgaaatccctgcctctcttctaccctggtcctgccctgtgcctctgcttggaccaggaacaagctcttgtctctccatcagtgggagctgggagccagcacaccaaccccagaaagaaaaccaaagaggaggaagtgggctgcgctgcttagcatcacggtttctgcggaccatctttttcttctttctacttataggcacttcctaaaatgccacacaaagcttgtactgttttattttgcttgttctttttttttttttccaattttgcaaatgaactgttgatcctaattgctgaagtcatttgccaagatgctttcaggccacgttacaactgacagagatttcaccaaaagcaccagcaggatgagggactgaccccatgcatcttgtggttctgcttactgaaaatatttccctctccttcagccactaggaagcccagagctgaatcttcctcctgactttacaaatattttctccccaaaacacatctctgtttttttcttttaatttttcacaagttgtctcatactgaagggaagaaggaaaagaaggaaggaaaagggaaaaaaggaaaaatcaggcagaaaacaatactcagggtggtccctcaggacaggccccaaggtggccaaagcctttttcctgtcctgggcttggaatcccccatgatctatagcttcattcttctgggccctggagacagtcaggcccacccacggcacagggaaggaggaagttgccaacatgaggtttttacaactcagctttgcagtttaactgtcattttcatcaaaatgaaaataatacaacataggaatttaagctaatcagaccccatcttacatcagattccagtaggtaaggcaaatctgctttaatgtcttcaggaatattaaaaaaaatttttaattggaaaaattttactatttatcatcagcctacaaattgggaaaccacca

SEQ ID NO: 42185 - DNA, 1820 bp, Bovine  19866880789389
  misc_feature (1)..(1): n is a, c, g, or t
ncacagcagaacagccccttataatgtttttaaatcagctttcttccaacttccttcatgttactggcaaggtcagaagaggatccacttgagcaggtagctcccctcggttcctttgccttatcttattatgaaggttaaagagaaactggcttgaatagagattattactaacagaataactcacaaatcatttccctacaaagtttagggcatatacttaactgaagtatacttgacctacaacactatgttagttccacagcatacaacactgtgattcaatacttctatacattataaaatggtcaccaccttatgcagttcttggctttcaggttttgaacttgatatttgaggtctgcctaagcagggaaaattttgaggtgaacaacaggctcctaattctttcagatcatgagtcacattgccatcctctaagagtcactaggcaggtccattctgtacatgtgaccgagctccagcatgctacagcagactctactccatgaccaacactggttaggaatattctccttagtctgactatggccatatttggggtgtgacacaccacaggaaagaagtaacttcctggtagctcgtaagagcccccagaaagactgatgaaaaactttaacaacttgcttatcaaagctcagtcttaggctctcttattctcttcagtaatgaggtccatttcccacagctttaaatacaatctcaacatacatcatcattgtaactaactttgagtgctttctagataccaggcatgattttaaggatgctatacacattaactcatttaatccttataagaactctgtgatctgtacactattatcaccctccttaaaaataaggagctgaggatttccctggtggtacactggataaaaattcacctgccaactgaggggacacgggtttaatccccaatcagggaagattccacacgcctcagcaactaagcccatgtgccacaactgctgagcctgtgtacctagaacccgtgctccaaaacaagagaagccaccacaatgagaagcccatgcacctcaactaagagcagcccctgcttgccacaactagagaaagttcaagtgcagcaacgaagatccagatcagccaaattaacgtttaaaaactgaggagccgaggcatagaaagactaagtgtcttgtccaagattacacatgtgatgatggataaagcctaaatgcgaactgggtcaaatctgagccccccttttttttcttatttttaattggaggatgttttataatctgtgttgtctctgccatacaacgtaagtcagccataactatacatataccccttccccgttgaacgtgtctcccatacccctctatgtcgtcacagagctccaggctgtgaccactgtgttacactgcagctccccaccggctgtctgtttgacacctggtaatgtgtatgtttcaatgctcctttctcaatttgtcccactctctccttaccccaagaccccctattcccaaccactatgttctaagcctgtgtgctgtgtatgaaaatatgtctcattcttatgttcaattgaactttactgattctgtgaacctccacaggacagcttcccttttggaaacctgaacaacaggactagctggaattgttttcctatggcattgtagaggcagatgaattaatttaaatgttaaatttcttaaccatagcacattttcattaaaaaaaaaacaaaacaactgagtacttaaaaaacacctcactacttaccttttatatctctatgaacaatcatattactgtgcaaa

SEQ ID NO: 42186 - DNA, 2551 bp, Bovine  19866880903598
  misc_feature (1)..(1): n is a, c, g, or t
natgaatattcagggttgatttcctttaggtttgacagatttgatctccttgcagtccaagggactctcaagagtcttctccagcactatcactattttcactatcttgaaaagatagcctagaacaaaagagtcagaaagcacctcattttctagataggctgagatatgagccaaccatgtgtctctgtgttgcatcaaatggatagcagctagagtactgtcccaggatgggctgcctgggcatagctgggtctggtttcaccttctgcttctggactgcagagctgtggtgggctttacatctatggtgtgtggggtttcctagggaaggtatctgcctggctctggccctctccatctccaggactctcagagagagtacagccatgccttccttcatcctgccagggtccacatcccaacccctttttgggtggggttttacctgcctgggccagcagtcacctggtattctgtagagccctggatcctctcctctcaaccctaaaatctcccaacatgaattctgggtgctgccagaatctttttttgtcccaggtaccaaaaagcataggtacctgggacttggagaggggattttgtattctcagtgtgttatttttagatcccttagttctgtcatcattgtaaacttcagggagtatcttccctttagaaatcttcaagtgagaaatgagtcctggtttctacatccatgcatacatgtgtgcgtgcatgtatgctcagtaatgtctgactctgcgaccccatgggctgcagcctgccaggctcctctgtctgtggaattttccaagcaagaatattggagtggggtgccatttcctcctccaggggatatttcccaacccagggatcaaacccacttctcttgtgtctcttgcattggcaggcagattctttatcactggagccacctggaaagcctttccatgtccacatttagctccaaagtctggggcactcatcaagctttcccagaactgtgctagggccctgttttttaagggctagctctagaagggcccccaagcttctgcctcaccaagctcctagccaggcagtcaggtaccaggctctttctctaggggaggcctccgtctgtgaggggttctcttggaaacccctccttaactcttttgcttttctggggaggtaggcagtggctgtaggcagtgtgtccctccatgacccctgtttatcttgattactatgtggtaccctaattttccctttcctcctcacacagaatcaggggaggtggcagttagtcatgaaatgactgtcccacaacaaatgactggttggatgacctggcttctgtattcagccaagacgggcacaggcatggcttaaaggtctgggacctgagaagacagacctgtggcaggtgtgcaaataattgtttcaataaaatcactgaagaagaggaaatctccctcctgaaacatccccattttgtgggaggggttgagggagaactaggtcaagcaatggtccctgaacaccaggaagccaccttccacggaaattacctgccttggaaattgggtcatgcttgcactgttgggacctgggagctccccaagctcatctactccgtcctgcctcccaattcccttcccagcagcagtgaatgtccaaggctggactatttttagccacttcatcagctggtcatgtgcagagggttctagaactgcagaagtctggcccaggctactcccaggccttggagagttggtggactcgacctcaccatgtaaatggggtctcaaagtgagcctactgaagagctgagtgctgcgccatcccccagacttaggcacacagctaatcagcatcttcctgatggaaacctccagaagccccagatcctgaaccagcctgtgatgcactccgtgccatggatgcactcatgcatggtgtgctcacttctactagatcccacgttgtggctgcctccagttgatccagaccatccagagcttcccatatctgccaggctgtacctgagcacacaatggaatgcccttccttccatctgcctgtcacagacatttctattcacaaactctgttcagacatcctattttctgactacttcacccaagattcacacactgaaagaatatgtttaaatatgagtctcccctgttaggctggggctcctcaaggccttaagccaggcatgtcatagggaccctaaaacatatatatcagacagaccttacaaagaccatctgtagagtgagtatggtgatctctagggtgttgggaattcactagttcttggaaaatacatactttccttagcatgggagaacttcttcctgctgcagcattggtttctggtcccagcagagttcctggctgacagcttctgtaagtggaaggaggatggggcccctgtcaggcttagtgtaagtgagttgcaagaatttcagggttgagcaaagaaaaagatatgaccacaaggtggcagtaaaacacacaagtttgatttgggagatagtttggcttttttttt

SEQ ID NO: 42187 - DNA, 2792 bp, Bovine  19866881030869
  misc_feature (1)..(1): n is a, c, g, or t
ncctaactcacctgggcccggcaagggcagctggtgttttgaacacacgcagtcacacagatacatccagataagaggcgacgcacacaatgatgcacaccttcccttgcaagcacagagtctcatacagggcatacaacgccaggccttccagccccttaatacacgtcgtcagccctagagtcactccacagttacatggccccacatgcacatgctccacgaggtctctttccacagcccagagacccacaggtacagggtttccagctcagaaaggcccaggcctggggactggaaggccagcctcagagggagcagccccagaggatgaactgggaggcgaaggggaggcctgcctccagccctgggctgcctgcacgcccccgcacccctctcccactcccgccccccgacacaggctgccaggccgcagcaggatggagggccagagcaccgctcaccttgatgtcagggaactggcccaggtacgtgtccatggtcagcagcgcctggtccaccagcttctggtggtaatccatccagagcaggtcattgttctgcagaaggcgagagcacaggcgtgcacactggggcgctgggctgcagcagggccagctccccctcccggggacccaggggccagccccgtcgccccacagctgggcggcacctcagaacctcagactggtggtggtggtggtggcttagtcgctaagtcgtgtgcgacccttacaaccccatggactatagcccaccaggctcctctgtccatgggatcctccaggcaaaaatactggagtgggtagccattcccttctccagggggtcttcccgacccaggaatcgaacccgggtctcctgcatcgcaggcagattctttaccaactgagcgatgagggaagcgcaacctcatctataaaacagggtcacaagtcctgccttttcacaaggtgaccttgaggatgagatacgcccagggctggtggggtcggggagggaggcttctggagccaggcgatgcgactcagagaggagagatgcctccagacaccacaggaaacgcatctcagcgtgacgtctcagaggagaaaatgacccccagagaggggcagggccttgcccaagagcacctggcatgtgggaaccggaagggctgttcccagagggtgcagggtgcgatgggcggccagctgaggtcagaggcccctcagggcaaggaccaaggccgctgggcccacactcacctcagcgattttgcttgcttcatccctgccaggccagtcgggctcgtacacctcctgcagacactcgttcagcttcttggaggcctcatgcatggctagtgggaagacaggccacactgcaggcagggctggtggcgggggcagggggcgcaggggctaccccttcccccacccctgaaggcccaggaggtgtgtggacatacctggcagccctgctcccctcccagctttgcacccatcagctccacctggggaaggccccgctcggtgtcccaggaagcccacccgtccaggccgggcctgccccttacctttgaccgaggccaggtaggtccggaggtccttctgcaggcgggtgccctcggtctacaaagagaacgacaaggagaaggggagggcctggagcacagcccacacctgccccctgccttccgcatcctggggacacctgccacggatgggctgtctactgcaaagcatcgggtctacgggagactagataggaaaacaccctggctttggggtatggcggctactgcctctctggccacagacacacactgggctcccacctggggagccctgtgcctgaagggacattcaccttctctcccaggcactgttctcagccctggaaggaaggcagcaagacagggaccctccaccctggacgagacactggagcacagcccgtgtgtaagatgggaccagtgggtggcaagcctgccctcaggcaaccatgagccaggtgaccgacaagcacaggaagatgatgggggtacagggaccacccagcacctggtcctgaaagcttgggttctgcctgaggccagctggctcccagcgcatcccaccggagatggggggccgggggcaggcctttacagggtcaggagggttctgatggacagaggacgacctgctggggagaggagagacccagaaggggggaggcctttgaaaggagtgcagagaagggtggggtcgtgtccaggcttctcaggataccggccctgttgagagggaagatgcaggggaaaggggaaaggggggagtggcccagggaatgaaaccctcggagctgggagggcagccccaggggcttcctggagcagtagggccagcagaacggtaaaaccatgggtgcagcctcaactccctctggcgtcagcaggaggcaggagcaggaaagctgagctccaggtgtgaggacgggtgagctggctgaggccagcaaggaaagtctgagactcccgccagggagatgctgaagtttccagaagccgtgtggaatgcaggagattccacacacaggctgtggggctgtggagacccagctctgtctctactagacacatgtgttcaggcacttcagtcgtgtccaactctgtgcgaccccatggactgtagcccgccaggctcctctgtcaatggaattctccaggcaagaatactggagtgggtggccatttccttctacatactagacacgtaaccctaagaaagttactgaacctcttggagcctcagtctcctcatctgtca

SEQ ID NO: 42188 - DNA, 687 bp, Bovine  19866881064642
  misc_feature (1)..(1): n is a, c, g, or t
nagaatgatgggcgggggagtggacggatgtgcgagaaggaggctcataaccaatccctgcagtcagcctcctgggtcctgaggcacaggcacagggcatgggatggaggggaaggccatgcacgccccgaaagagcaagagaaggcagagagagagctgggccgcggtggccgcggctgacctgggaaggggtggtcacgctgatctcagggacaaacgtgtcgtcaaacaagctgaggatctgctcctgcttgacctccttggacggggtgtgtttgggaggcggagggactggtgggcctttccgaagctgggggtcggcggcaggtgagggggccgcgtggaaaggcgcagcggagcgcgggggtgggggggacagagacaaagccacggttagtcacctcccagccacggccccaccagcaaccaaggaacacagacagggaaagccatcacccccaagacaccgacacggagaccacaagggcccctgggagcggccgaggcccggcggtcaggagccctgcacagagagaggtgggtcagagggcaagggagtgagacaggagaaagggagagagcaagacagaaaagaaggcaagacgggcctgccgggctgtcagggccacgtcagagggtccggctcctgctgcccttggtggggaagctgaggagagaaacaggag

SEQ ID NO: 42189 - DNA, 1041 bp, Bovine  19866880398554
  misc_feature (1)..(1): n is a, c, g, or t
ntggcaggattaatgcttttagcagaaatgaatttagagaaatttgaggaatagttcaggctgaaatatatgtgtattccagctagaagaacaatttggcatcttttcaaagcaatatctaaaaaatatatgttcaacacttaaccagaggtaaggctaagtgcttaatggcaaaagactgtatcatttattgattgctacataacacatgactcagcaggttaaaacaacgtatattatctggaaataacggtgggtcaggaattgagaagaggcttaactaggtgttttctagctcagggtttctcatgagtttgtagttaagctgtcagttgacacagttattatatgaaggtttgactaggttggaggatctacttccaaaatggatcactcaaaagaagactcagttcttcatcatgtgggcctcttcataacattatttgagtgtcctcttgggatggcagctagcttcctccagagcaagtgatccaagagaagagcaaggagaaagtcacaccttttgtaactgagtcttagaattgtttctcatgctatagcctattcataagaggcaagttgcaaagtcccagtcaacactcaacagatgaaatagggaagatggtaagaaccacccgttcaaaggaggagcatcaaagaatttgtcgatatgtctcaaaaccacagaaaataagaaggaacaagtatactgccgctcttccattgttctgaataacttagctttaatctcaaacttgcatatactatcatcaccgtcaaagatagtttagtattcttagcatgccctatgggaaggaggctccacccaccagcctcaagtagttaacccaaatatttcttttagctcataaacatcaaacaccatctataaaactttctccatataataatattttcagtgatattttagtctcacaatgaagtctataaatgtcctaagttaatgtaccaaagaactgccttgctgaactttagctctgactaaaggcaaaatattatggaaaatactggactgagtct

SEQ ID NO: 42190 - DNA, 953 bp, Bovine  19866880414385
  misc_feature (1)..(1): n is a, c, g, or t
ncctcaccctgctatactagagaacaaggatgtgaaagaaatgtactacctctgcccaccccacccccccttcagctgggaaagaaataccactttgtttcagtaaatggagagtctgtggaaagcatggcaggcatcccagtttcagaactagatgaaagatataccttcaagtttaattcctatggaaataatgatgtggttaattctcagaaatgtaaaaactggatttgttaggccattgagtacttaaatattccaggagcaaatcttgcaattgatagagtaaatctttcaactgttcgaaaagagtaaaccaaaatttttcttcagcatttcataaagttagcattgaaaagtatgagtgtacacatgtattgcttcacagctttatttttgaaatcacaagcagttcaaaatgaccatcactgaggcctctgttaaaagattttccagcagagctgccccagttttaagattaaacaatattgcactttcagatgaattaactttcaggatcttcttccaaaaagaaaagtattgcttccatctgtgcttttcttaagactaaaagcatactgcagaaaactctactttaaaaattaacactgccgggtacagtaacagagaacagtacctgcctattttataatcttagaggaacttttcattgtaagaaactgtttagcccataatgagtataaagtgtgtacagtatttttcatttcagtggtccaagatacgcaggttcccagatacaatcttgttctctaatactgctccaggtgggatgtcaattcggtcaccgtgatttgcgatgatgataaccgttccctaagtgacagaaaaaacgagtaattggaacggcaagctgaaatgcagttgattttcatacagttatcaagtttatgtagaacttcacttacaatggagtaagcgtatttataaacggt

SEQ ID NO: 42191 - DNA, 624 bp, Bovine  19866880500088
  misc_feature (1)..(1): n is a, c, g, or t
nggaaggatatcggtaagtagccatttgctgtaatccagagatagatttttatatacatagcttgttatggcaacccactccagtactcttgcctggaaaatcccatggatggaggagcctggtaggctgcagtccatggggtcactaacagttggatatgactgagcaacttcactttcacttttcactttcatgcattggaggaggaaatggcaacccactccagtgttcttgcctggaaaatcccagggacggcggggcctggtgggctgccgtctatgggatcgcacagagtcagacacgactgaagcaacttagcagcagcagcttgttatcacttcctttttctgtatatgtctgagattcaagttaattattttaatgaaggggatattatatgtaaagaaaatgtttatctaattgagggaaatgcatttttttattagatttttatgaaaccagattttgccttggacgattccttaacttttaattcagttttaccatggtctcattttaatactgctggtggaaaaggaaatcgtgatgcagcttccttcaaagttgctgcaagaaaaggtaatttttatttttttccatgtagaaaactattttaatcaaat

SEQ ID NO: 42192 - DNA, 2714 bp, Bovine  19866880531328
  misc_feature (1)..(1): n is a, c, g, or t
ncaaggctatggtttttccagtggtcatgtatggatgtgagagttggactgtgaagaaagctgagcactgaagaattgatgcttttgaagtgtggtgttggagaagactcttgagagtcccttggactgcaaggagatccaaccagtccattctgaaggagatcagccctgggatttctttggaaggaatgatgctaacgctgaaactccagtactttggccacctcatgtaaagagttgagtcattggaaaagactctgatgctgggagggattgggggcaggaggagaaggagataacagaggatgagatggctggatggcatcactgactcgatggacgtgagtctgagtgaactccaggagttggtgatggacagggagtcccggcgtgctacgattcatggggtcgcaaagagtcggatacgactgagcaactgaactgaactgaactgaggagtagaatggctgggtcatagggtatgtgtatggtcagctttaggagatatttctggttttccaaaatggttgtacaaattcatactccctctagaagtgtaccagggttccaatttctctacattctcaccagccccttggatttcactgacactttaaaaaaaggtttgcttggatttaagacactggtatctccatttgattttcacacatattaagtctactgtacaatttctatcactttcaagaaattgagacatgaatctgtctttaataaatgaatgggtttcacaaccaatttgtaaatagataccctaaattagtgaatttgctacctaagtaaatttttttcctgccaagctgtaatctaaaggtataaccaatagtactttgcatttgttcactgggtgctgttgttcgtagtaactcttcctgcgagtgatgctcttttagaatcacaattttagtaatgcagtaagaaggcaatggcaccccactccagtactcttgcctggaaaaccccatggatggaggagcctggtaggctgcagtccctggggtcactaagagttggacacgacttcactttcactttcacttttcactttcatgcattggagaaggaaatggcaacccactccagtgttcttgcctggagaatcccagggacgggggagcctggtgggctgccgtctatggggtcgcacagagttggacacgactgaagtgacttagcagcagcagcaagaagttcaagacctcactctataacctcagtgatttctggataatgtctgcccacagggaagaatgttggtagtttctggccaaaggttgactctaatgatctgtaacaaagtttctaatatcattcagctcctctcattatgctgtaagtctccttcaaaaaccctgagataaagcacaaataaaagacattttttgtctcactatcaaggaccagtctcaggttcctgggacctttttttttttttccaaggctggttttctccccagaatctctggtagccaagtgttataatacactaaatgttttattaattgttcaactgagcaggaattagccttagcaaaatcaaggtattatgtatttcccatgcttagtgttaatttctttcctttgttcgtttatttctttcctttgacccagtgatttctgactttgatactttgcatcttaaattttgttggttcacctggtaattacaatatttacacctttcttcttttaatattttacagcttaacaatgtaacttctcattccatatttgtcacttttaaccagcagctgaataagcagaaaatcattaatttggatgattttattttttaaaagtataaaagcttcaattaaaaaaaaaagaacagaaatatatggacataacaaaagcagaagatattaagaagagatggcaagatatacagaacagaagaactatacaaaaaagatcttaatgaccaagataaccacgatggtgtaatcactcactgagagccagacatcctggagtgcagtcaagtgggccttaggaagcatcactacaaacataactagttgaggtgatagaattcaagctgagctattttgaatcctaaaagatgatgctgtgaaagtgctgcactcaatatgccagcaaatttggaaaactcagcagtggccacaggactggaacatgtcagttttcattccaatcccaaagaagggcaatgccaaagaatgttcaaactagcatacaattgcactcatttcacatgctatcaaagtaatgctcaaaattctttaagctaggcttcaacagtgcatgaaccaagaacttccaaaattttcaagctggatttagaaaaaacagatgaaccagagatcaagttgccaatatttagtggatcataaaaaaagcaagagaattctagaattctagatgggttcaaaattgggaaaggagtatgttaaggctgtatattgtcaccctgtttatttaacttatatgcagagtatatcatgagaaatggcaggcttgatgaaacacaagctggaatcaagattgctgggagaaatatcaataatctcacatatgcagatgacaccacccttatggcagaaagcaaagaggaactaaagaacctcttgatgaaggtgaaagaggagagtgaaaaagttggcttaaaactcaacattcaaaaaacgaagatcatggctaccagtccctcacttcatgttaaatagatggggaaa

SEQ ID NO: 42193 - DNA, 1758 bp, Bovine  19866880582942
  misc_feature (1)..(1): n is a, c, g, or t
ntctgaaggagagacagcagtgcttcaaggaggagactatctagcctttataacagcttaattgttagaccatacattactctccatgcataatcctatagtctgctttactgggcaggagtccattgctatcgtttgtaatcttcttgctgaatatacagtacttcccctttagccagagagttcagctttttgacagtagtctcttatcttaaagagcaagaaagacagatagctagaggggaccatttccattaagtaagggaagagtaacaagacacagtccttcctcagtatccacaggggactgggtccaggataccccgtgaatatcaaaaccccatgcatgctcaagtcctttatataaaatggcatagtaaagtcttccctctatatccatgggttctacatgctggttagtgggatacagaacctgcggatacagaggaccaattgcaatgggtaattaaggaaataaatgacaattagatcaaaggactaaaattacagtgaggttgaaaaaagttttatcctactagaaatggaaaagaattccagaaaagaaaggaatggaagctttagcttacaatggttgtactttggagttttggagaatatacaagttgagaaaaagcataaattctattcacactaattgagtgcttattaggtgccaagaaaaattaaaatggtaaatgatccccatctttgaggaattcggataataaccagggagatacatacacaaataaataactctactacactgcagaaagagccatgatagaggcacacagagttacaaggcaaggataattcattcttcctggaggggatggctatttcagaaaagactcatttagtgacaagaaacaaagaagaaaagtgacaaagaattatgatatagataatgggagctagattttgcttctaattctggctccatgtgggtaattttatattaaatacttaaacttctaagctccaattctcttaaccatagaaagggaacaataatacctgaaatgtctattttatagtgtggttggagagatcaaataagatcacatatataaaaatacctaaactattgttatgaaagtatatgaagatattatcttaagtatctattaataaaaggcatatagtcctagacaaacaacactggaatttatatttttcttagttaacttgaatttgaaatactgttattggtaaaagaataaaagacctaatgacaaatgatggtaatggaaataactaccaacaactatcaacttcttgttaggtgaactagaactgtgcaagatgttttacaggaattacctgtttcacaataattctaagtacagtactatttcccacattttgttttacaaagaaggaaactaaggcacacagagtaacttgcccaaagtcacaaagtaacagagttgttgggattcaaacctaagcagtttgactccagagctcacaacttcaataagctgcacactgcacaccaagaaaagttgcaggtaaaaaagacaggaagagcctgagacatttacagcagagagccactgtagcacccctggatgtacctcaaagttcttgtggtatgagaaaaatcaaccaaccccttttttgtttagccagtgtagtctctaatggatacagaatactacaaaataaaaaggaatccataaaatttatttaaaattctttgtaagatttacaattgttaatctaaaatttctaatttacatcaagcggtaa

SEQ ID NO: 42194 - DNA, 1892 bp, Bovine  19866880610790
  misc_feature (1)..(1): n is a, c, g, or t
ncaaggaataggtggtcagaagtatgaaaatttgcaagtcagaagttggacgagtaggaactaggggccaaggtaagactgaattctcaaccaacctgtgaggaatgtaatataagacatcagtaagagaagggcatgtgaaacagacaattcctacctcagacgtgaagtcttttatatattacacttcctcctggagcaggtgtcaaccatagagcgtatctatttgcatttggaacaggaaacacatgagtcctttaacatcagaaaatagttaataaattgttgaagagcaatatagcaatgaaagtgaaagccactcacttgtgtctgactttttgtgacccagtggactgtaacccacccaccaggctcctctgtccatggaattttccaggcaagaatactggagtggattgccatttccttctccaggggatcttcctgacccagggattgaacccaggtttcctgcattgcaggctgattcttagcaataaatagtagaatatagcaatgaaaaatatggccatatcctgacaaacataaaattattttcaaattggaccatttccctagggaagtagttatatatatagtatctaacccatcccattataatattttttttcttatgttgctctattcagtactgattcttttctctatggaggctttgtgtaacaaactagttatgtttccaggacaggattttctgttgttgctgctattgtacttttcaaatatcctacagaatctggaacaaagaactacaaagtagactttcaataaatgtttgttgaattaaaaaataaatataaattattcctccttagtaaatggcatttagtttaatgaaaaataataattcatgaaagtaatggatgaccttgaaatcatacttgattctttcatattccacatctaccatgtcaaaaaatcctattagttctatcttcaaaatatatcttgactgaacacttctcaccattcacattgcatccaccctggtccaagacatcttgcctatgggccacaaactacagctgttgtactatatactgctcattacaggaagcaccattcacagacataacaggtgaacgatgcttcttggagttatgtagtgcaatgatcctacttgcctggattactgcaaaagtctcctagtctttgtccctcaccagcttactgtcaacataataatcagtttgaccttcggttcagttcagttcagttgctcagtcgtgtctgactctttgcggccccatggactgcagcataccaggcttccctgtccatcaccaactcctggaacttactcaaactcatgtacattgagtcagtgatgctataccaaccatctcatcctctgtcgtccccttcttctcccgccttcaatctttcccagcatcaggatcttttccaatgagtcggttcttcacatcagatggccaaactattggagtttcagcttcagcatcagtccttaagatgaatattcaggactgattttccttaggatgaactggttgggtctccttgcagtccaagggactctcaagagtcttctccaacaccatagtttcaaaaccatcaattcttcagcactcagctttttttatagtccaactctcacatccatacatgactactagaaaaaccatagctttgactagacagacctttattggcaaaataatgtctctgctttttaatatgctgtctaggttggtcataacttttcttccaagtttgaccttgctaaaacttaaatcaggtcatgtcatgtcatatcattcctctgcttagacatgccagtggctgtatctcattcacagtaaaagaaaaagtcctgacaaggtcctagttgatctcataccactcttaat

SEQ ID NO: 42195 - DNA, 1173 bp, Bovine  19866880868031
  misc_feature (1)..(1): n is a, c, g, or t
nttcttgcctggagaatctcagggagggaggagcctggtgggctgccatctaccaggtcgcacagagtcagacacgaccgaagcaacttagcagaagcagcagcagcaactgatatgttatagggctcaggatatttgtaagtaactattaaattattagatgacagtcttgccttattttacaattggagtattttaagtagtaattatatggaataattttttaaatatgtaattctataatgaaaagaaagaatggctaaacatttattagaaaaaattttttcacttacaagttccctaggttaaggagaaatttctttaagacttttccaggagaaattatgggtgatttagaaaccatacatttttcagagaaacagaagccatggttggcctctcaatggccgaccaccttctacgtcaactgcgtacatgactcaataccagccatcactcagaaaaaaccccctcagcagcaggaatacaaattcttataccacaatgtaatatttttaaacagaggggaaaaaaatcaaacaggaaatattttggaagcaaaataaacagagaccaaaaaaccccacttggtatcatagaaacaggacaatctcactacataatccaaagtaaaagattactataacaatagattgcaattatataatagattttccttggataccaaaatacatttagttctcatgcaattgtctggtcattttggttcccatctaccaggaagtaaaatatctctgttttcttgccttattctctttatttgtgtgaattcctgagtgttaacaagttctcagtcagaattttattttaatctataagtcttatttccaaacatctcattttagatttaaaacagtattttccccttccatacctttatttattaacttttagggagctatataaaatgaaaaaaactaaaaactaaaaaaaaaataattgaaatcgatgactttggaaaagaagaggtttttcacttgcagatgaggaaatggaggtccaaagggctgagacaaaacatgttagtggtgggagctggtttccaatcagaaaccaggtttaagaacttccactttctgtcccatgccctttgtcccatattatattgtcacatggaatgctgcagcaacaaactactaaaagcaaataatt

SEQ ID NO: 42196 - DNA, 1198 bp, Bovine  19866880885102
  misc_feature (1)..(1): n is a, c, g, or t
nttgtattcatcatagattactactggagaaagaaaagttagcatgaatgacttcagtgatctgaggaggtggtttagtcagctgggagtcagtaagtaaaagttgaaggagtgtttttgccattggatattagagttgaaaagatcttaaaggtcatctgcttacttctacttccttcacaaatagatggcaggaaccagatgaggaaatctggagtggaagcttgaatctctagggcacatgatttaagaaccacagtgttaccatgtaaagcaagaaatggggatttgcgagttagaactgttaagatcttatgtataagtatgtacgtacacatggatgtatgtatttgacattttactagcagagtagtgagagaactggacatttccccatctttgggatggagggaggaaggggacgatacatgtgattcatattacaaaatcctataaaatgctttaagctaaaggaagatagcatatatattatttaggtatctttttgtactgttaccatcttaattttttaaaaatccacattttagaaacacaattaaaaaaaaattatacagggctggttggaggcctctttttttcaagacctaggaccctaacttttaaatcagtggtactcaaagaggggcagttttgccctccgagggatatttggaaatgtccaaagacatttttcatttcacagctgagggttggatactgttggcctctagccagggatgttgctaaatatcttataatgtgcaagacatatcccattccaccctgcctccccccaacctcctgacacacacaacaaagaattatctgaccctaaatatcagtaatgttctaatcctgtggtttgcatgattctggtaagggcctgagctaatgttcctgacttccaccagatgggaaaatattctcactgggctctgtttggtgggtaaggttaaactttaggtcctctggcaattctctctctttgcaagaggaggcagtgagggaagaatctgtgacataatgcagatacttttttagtctgcttagttgtcttcaaatctgaagtaaaagaattgattttctttctgaaaatggcagccttattttattgcagatttgagctattatgttttgaattgttcattactggtacataggtttttgaatttaaaatagataaatagtgttttcttta

SEQ ID NO: 42197 - DNA, 1538 bp, Bovine  19866880889280
  misc_feature (1)..(1): n is a, c, g, or t
naggaatttgaattgtttaagttttgttttataaacatttctgccttaaatgttattgtacacattggcttgattctgactttttgagattattttcttaaataatcttaaatttttggaagtagaaattctgggtcaaagaatggcaatattttagtatctcatttcatttttctaacatggttaaacctactccactgaaagattgtattgatttgtaatgctatcagcaacatttgagtaccagtctctgtatactgttcagttcagtctttcagtggtgtctaactctttacgaccccatgacccacagcacaccagacgtccctgtccaacaccaactcccggagcctacccaaactcatatccattgagtcggcgatgccatccaaccatctcatcctctgtcgtccccttctcctcctgccctcaatctttcccagcatcagggtctttttcagttaaaaaatatatacatagtatttatatgtgcatagctagaactcataattgttaattttatttttttattaaacaaggtcatgatttttcagttattgtttcagtatagttctttcatctggaaagtctagagtctggatgttgatctcacagttctgcattaagatcatacagcaagaaagtgactgaattaagatttgaatttagatttgtctgacctcaaatcactcctccataaggagaggggactgggctggaaggttgtgggggagctggccacaaatacaggaatgttctttgtatattttataaatcaaaaaattttaatactatattagtttcattgctaaacatagtattcatactgaatagtatatatgtaattataaactgaactcttgctaggaaatagaacattgttaatattttagaagctctgtgtgggttctgtactctcttctagaagtaacctacataacctactctcccatttctgtgatttttttttcctttgcttttctttataattttaccctttatgtatgcctccctaaattatacattggttgggttttatctgtttccagacatcacgtaaatgaaattatactgtctgtattcttcctgactcaatatcatgtttataagattaatttatattgatacatatagctataatttattgagttttatttctgtatagttgcaatagttttatatgctgtataacaaactgccacaaatttaatgacttaagacatcatttattatctcagtttccacagggtcaagagtccaggtgtgacttaacttggtcctttccttggagtcttacaggtagtaatcaaagtgtcagccaggctatattttcatctgaatgcttaactggggaaggatcaactttcaatctcattcatattgttgacagaaagcattttcttgcaccaatcatggagtgatattccctcaccttgccatacagcataatctagtcaagagaggaacatcccatgatctttgtcatgttttctcagaagcaagtcatatattctgcctgcattcaagtagagattatg

SEQ ID NO: 42198 - DNA, 1728 bp, Bovine  19866880903805
  misc_feature (1)..(1): n is a, c, g, or t
ntggagaaaaaattataaatgaaatcctagaaaatttatttaatgtgaagaacatgaatctccaggttgaaatttccaacccttgaaaaaaggcctgtaacaaggagatgatgatgaaatattagtgcactgaaaataaaaatcttaagagcttccaaagagggtaaagacgattgtatcaacagtatcactcaattttggaatgacaatggaatattatcttcaacattctgaagtgaaattttttttagctaagattttacatccaaccaatatagtgtgagggtagaataaagacattttcagagattcaaaatttcaaaaatttatgtcttatataccctttccaaagagattactatttcagagctataagagagtcaactgagaaagatgacaaggagcccaggaaatgaaagtgctagcccagaggatggtgagagaagtcctagaatggcaaccatacctcaagcctagggttcattcagtcttgattagatcaagaggagaggggatttttttcttttttgagaaaaaaaaaaaatggaactgttagattgatgattttgcgtgtggagacttgaaaaaatattttaaaaaatattgctggccatttgagactcgaaaatctttatatatataatcataattatgtaaattcttattactgaattaatcaaaatatttttgcctgtgacatttttgccaagaagtcttgccatgtgacatttaaagtgaaagtcactcagttggatacaactctttgtgaccccatggactacacagtccatagaattttccaggccagaatactggagtaggtagatggtcccttccccaggggatcctcccaagccagggatagaatccaggtttcccacaatgcagacggattctttaccagctgagccaccagggaagccctgtgacatttaaagattatcataaagatatagtgggaggaggtagggaagggaagtggaggttgaataaaagacataaattctcaaccaccataagaggatgtcaaaagacaatatcttaaattgataaatcaagaaatagctgagtgagcaaattactaaagtacaaagagataagtaatagataaaatagttagacattgaaagtggcagcctcttaagagcagtatggataagagatggagcagagatccatacgtaccaccaggtatgtcttaaaagaattcatttatttttagaaccatatgatcttccaatctttcttctttcagaccttgaccagttggccaaccctttgtcactgctcaggactctatgtctactctaacccccagccacttctctttccacacaaagtgaatgatgagtacaatgagataactatttattaaagcacctcattagtggttctccatgctgaggctatatatctcaggacaattaaataaaaatttctgggagtggaacccagacatcagtgtttctttaagggtttccaggtggttccattgttcatctgaggttaagaaagctcggtttagctttcttctaaaacttgaaagatagtggctctcaaactttgttgtgcattagaataaacttgtaagtacagattcttaagctccaaacccacagattctgattcagagaactgaattaagacccaaatctttggatgttttaagtcctcaagagggaagtagatacaagtcaaccaaacaggtaactcagacagtctctgata

SEQ ID NO: 42199 - DNA, 2231 bp, Bovine  19866880956233
  misc_feature (1)..(1): n is a, c, g, or t
ntaggttgaatgaaaaagctgtgaaggaaatagagtgctgtgatccagaataagaaggagcattaatatgataaggtggtcaagaaaagcctctctgagggcatttaagctgctgcctgtaggggctcaaatatagtccatatggtgctctccagaaaggtaccttttcctaattacaaagaatccatgtgtgggttaaagtggaggctctgaacatttaagccaaaacctgaaggataaaaaggagtcaagtcagtcatgtaaagacctaagggaaaaagtactccagattatcaaattacagaggctctgagatagaaagagcactctgtgttctaggagatggcaggaggctggggtgaggaaataagagaagagtggcacaaggtgagagatgcatctggagaagtagaaaggaatcagacattcagggcagctgaataggttttggattttatcctctccttcattttaagcaagggactgacatgatctggtttacattttttaaagacaatagagctatattttgaaggtagaaataacaggagttaacaatgaactggatgaaggtagaattggatgaggagggaggagtcatggggaatgaattaaaagggaagagtcaaaagtggcagttcatcatagcaccaggtattgagatggtcaaggctgagggggaattcagattcaaagagagaaaattctgtttggtcatattcagtttgaaatgcctaggagacataaggagatgctaagtagatgtttaaagttgtgaatctggaggtcaaaaagaagtctagcctgcctgtataaagttaggaattgtcagcagatagtttttaaagctcaaggactaatataggggagaagacatacagaatagaaaagagggtacaggaactacagcatttagaatcacattagaaaaaggtggtgttagtggtaaagaacctgcctgccaatgcaggagacccaagaggctcgggttcagtccctgggtcaggaagatcccctggagaaggacatggcagttcactccaatattcatgcctggagagtcccatagacacaaaggagccttgtggacagtccatggggtcacagagcgttagacaaagactgagcaactaacaagcaagagcaagaggagccagttatttaagaaaaccagtctagtgtgcaatatagagtccagcaaagagagtatcagaaaaggccaattatgaaagtttaattagtacagaaaagagagccaaattgagattgttacttttataggagtgatagggagattgaaatagggagattgaagtttgccatttatcttagcaatgctaattataagaaggcagtggaactttgaagttctgagagaaaattaattctgaaactagaatcctatagacagaaaaagcattgaaggatgagggcagatgagggaattttaaactattttttgatctctcatacatctttttcagaaaaaaaaaaaaaacatgggaagctggtaataggatctgctctatgaatgcaataaaaagatgtttcagtgcaaatatttagacttccaaggtgatcagtagtaataagaatgaaaagtaagaaggaactcagaagaacatctttaagaaaaaagtagattcattttatacaatagcatgtttaaaaaaccttaataattttaatgagagtgacatgtttttcctgtcatcaaccaaaaaaaaaaagacaattaaaatctttagtaaaggcaaaaaattgtgtaaatcatggtccaaatatgaaactaagatgtgacagtattatgagtaataaatggaaaagagaatctgtttgacattgacacctagaacattctccttcaataagcatacatttaataatatggtttacatttgtctttttacacatctgtttatacaattgattcagcagtaaatgagatttacaaaattgtaatattgaaaaaaagctactggaggtgatggaattccagttgagctctttcaaatcctgaaagatgatgctgtgaaagtgctgcactcaatatgccagaaaatttggaaaactcagcagtggccacaggactgaaaaaggtcagttttcattccaatcccaaagaaaggcaatgccaaagaatgctcaaactaccgcacaattgcactcatcccacacgctagtaaagtaatgctcaaaattctccaagccaggcttcagcaatatgtgaa

SEQ ID NO: 42200 - DNA, 1103 bp, Bovine  19866880964048
  misc_feature (1)..(1): n is a, c, g, or t
ncttctctctcgtctcctttttccccctttttcttatttcttttaatctcacctccagttgatttcttgctgtttgcctgtagatgtgctcgtctcccatggcctaaaaaattcttgctcaactcttaattgcttttctttcgtcaccaaaaacatgttgatattgttgcctttgttacttcattatttacttaacctcttgtggtatggcttctgccccaaactttgtcctaaaactgttctaatccatcgtcctttctgaagttaaaaacctccttgacctctctctctgcagcatgttcacactactgttcatactttccttctggacccttctcccttggcttctgtaggatgatttttctgacactttctccctcacctcttacgtgtatttgccccgctccttgctctgagctctcattagccctcttttccggcactttcttcctttgtaatgttactttcctgtgactagaattatttattattcctgtaatgtgattgaactaggaacggtgatgcaaaattcagggaagcgggattctgtttactacaagagatatttttttcctaaaacaattatagttgctttgtagtagtaatctgcttttgaagcagtcacttctccattactgacggttttcaaatggaggcagagagaacccgagtagaaagaattcatatattgataaacagttgagacagatgatcttttaaagtctagtccaactatctcatccactccacttcaatggattgaattttgaccattattaaatgtcttccaaaaatagtttttctagcttctgtgcctcatcatccctcttctttctcacaaacagttttgcttttattttatcaaaaattgctaaagtttcatctttattttccactactcttttttttctttcctttgactggcatggctttgaggaccaccgttgctttgaccacttttctgatagtaaattctatctgcccatattggtttgcttcctccacctcaaactagaggcactgaagcaaggaagaggtttggaatcctaaactttaattttaaaactttgtaggcaacggagaaggcgaaggcaccccactcc

SEQ ID NO: 42201 - DNA, 1182 bp, Bovine  19866880975958
  misc_feature (1)..(1): n is a, c, g, or t
ntgtaagtgtctgaaatatggctgtatagaagtcaaagctgccaccaacattgtcttcccaggagagaaataggaaaggtacccaagatggagtccaataaatgaatgccagtttaacatcaaccatgctcgtcttttgtgcacagagacgccccccccccaaccctgctgttccaagagctgttcaggcgttgaataaacagggttccaatgagacgaaaatggctgcctctgccggggtccatcaagctgttctcttgccaacaactcaggaaggatttctctacccttagcagaattaccacagctcacatcttctcccaatacacttccagtgctcctgtcactaagcagggaagagacagaccaaggcagaaaaggaaagcctggtggacaccattcagcttgatccacctctttaacaacggagatgaaagtagccgagaggccgagggggagtcactggccctcggacggggcatcactgatggatctttactgaagtctgcactcttgcaaagcctggaatactcagcaggaccgtcctctgaggtagataatatgaagaaggctggagatcatagtcacactgcatgtcttcatacaaacataacccaatctcaaggatggaagccttagtcacagacacatgaaataacatttctgaagaatgactagagattaatatttaaaatgtgcatgtaagactgagatcgtcaagggtgcagctcagaatgaattgctacgaccactgtagggaaggaaaatctctttccttctacccttgtaatttcaacaactggggcctgagaatcaaactgataaaagacagatcaacaagagggaaaaaatgtgtgactaagtacttacatgcagaagtttcacaaagaagtgagaccaaaggaggcagccggatgatggagactgatacaccatccttggctaaacaaaggaaaagaggatgggcttctggtggaggaggcaagtcatgggcagagggaaagaaatgtacaacaaatatgggttatctgtcttgcagataagagtctctcaggtgataagagttgtcaccaaggagtagctctctaagccatttttataaatggaaatttcctttacaaaagaggaaatttaaactttatttttaggcactaaggcactctttgggcttcccaggtggct

SEQ ID NO: 42202 - DNA, 1075 bp, Bovine  19866881017315
  misc_feature (1)..(1): n is a, c, g, or t
ncagcagcctcggcgcgacgtggaggcttggaggcggcggcgatgcactaggcctcgctctagggcggctgcccgggacccgcaggtaggtgtcgggccggccccacgcggcccccagcgcttcgcggcccaccctcgccccgacttgccgtggagggaggacagagaccccaccccctctgtctcctcccaggcccaagccggcggagtttcggtcacaactgaccagcgccgaagcttccattcctcccggccaccacctcctcctcttccttctcactctgccgccgggatccgggccggcagctgtactcttcgcccctagcccgcggctgcgacgccgctctcgcccctctcgcccctctcgcccctcttgggatttcggctgtggaacttccaccaccctccttagacgctgcccccaaactttccctttctttttctagccgggcccttaacctgctttttgatcctactggaataatttaaatttaaaaagtcattttttcttcctggagatggccagcccagaaaataactcggtgttttgcagtttggcagtttagctcgcaatcattttgttcaatagttaattttcttcagttatacatcttcccgtctctgcattgatacaaaggcaggccttacctgctctcctgttgttgacaggggaacttttgcctgcccattatgattaacacttggtctgtccatgtgctgagtttgggatggtatttttagaattttggctgacccgggttgcagtttgtttttaagagttccccattaactagatttattttgatctttatttaggctctctttactttcgaagaattcagttggaatgtttttgtgttttatttttaattggttctgtgtctgatttgtcaaaccccagggcagtcttaatagtaaatgctttaaaaaggcaagtgatgtcatgatagtgtactgagaaatgttattgtggtaacttaaattgcagattttgacggacattcaggttgactttatctgatgttctatttggaaaagtagcttgagagccttaatgacttctaagatggaatga

SEQ ID NO: 42203 - DNA, 1485 bp, Bovine  19866881294257
  misc_feature (1)..(1): n is a, c, g, or t
ntaatttatgtcttccagcaatttagtgaataatgtttcagttacattcatatttaaaagtcaatattttggaagtacaaagtgaagccatcttaccattttaccattttaaaacattcacgaataatcacagaaaaatcagagtcaatgttaagtacttcaataggctcataactgatagaattacacaaactatatgtgcatttttacacttttctgtgactcatatatcctctgtcagagctatataaaaatgattgtatgtctcagtaatgtaatgaaacaacgtagaattttaaattttttataaacttattttccatttgcaactatacaaaaattacgtttttagaaatttaaatttatatcttacggaattctttccctttaacatatataataatacttctctttctatcacttttagtatttttgttttgaatctttgatatttcgaattttgaccaaattatgtattgtattatttattcattatttatttcagaatatcttcaagcttctttatcatgtataataccaggtaggctattatcagtaattggcagagtaggttcataaggcagagtcattttctttttgtgaaacaggaggatatatatatatagactcacagacacacacacatcagagatagtttgggattactttgtaagtacaagtagttggactgtggcttattggatgatctatattgctatttaaaatttatttttggtctcctttttaacttttggaatgtaatataattaatattttatttaaacaatatagatttagtttttgagtaatgtaaaccaatgttagataaaatatcatggaaacaatttgtggaattgaaaaatcactatttttatagtagttggcagcatttatagaatgacttgctgctcttgcagatatatccattatcgcagttgtcactatttaatggcacccatgttagttaactacattagccagggggctgaatagctatgaaaatgggagtaacctttgacctcagaaatggttcttttaaaagaggattgaaacattggtgataggaaatttgaattgctcctgcagctgcactgtttgttctgtgaatacttaatttactttggagctgtactttttcttctcaatctgtcagtcagaagcatcaaattcacttcaggaaggaaaaaaaatacttccttcccaggtctgtattattgaatgcagtattcaggcttcaaacagtttcatttaggtcatacacatataatcttcagaatgggaatcctcacatttgacacgctctgttaaatatatagctcattcagaccctatccaaggtattgttattcagcccgttattttggataatccttttaatgactgtaactcaactcagctatgtagaagcctggtagactatggagatatatacatgtggggtgtgtgtgtgtgggggggggatatgtatatatattattggaatat

SEQ ID NO: 42204 - DNA, 1696 bp, Bovine  19866881345057
  misc_feature (1)..(1): n is a, c, g, or t
natttaactggcacaccagaaataaattggttgtggtttaccagctgtttgaatggctgtcagttctcagtttgtggtttttacatttttgttttagatctcagcaaggcaatgtctcaggatggtgcttctcagttccaagaagtcattcgacaagaactagaattatctgtgaagaaggaactagaaaagatactcaccacagcaccatcacatgaatttgaagtaaggaccctacactatgtttttgctttcatccatctacatgctgagttgttattgctaccactgatcatctagcctgaaataattacaaaatgtaatgatatattttaaaaattaagattgcttactaattaaggattttcagtatttgctcagtataaaaccattgcctgttttaaatattttaaattctggtaagtttctaaagttaaaagaatcagaacaaagttacaatttatttttctgtgttttgatatcattgggtggaaaaaatggatgtaagtattcagttaaaattgtgagaagttaatttatcaaccttatatcctggatgccttttccaaagagcctgttctaacagaactgggctactctgacagctatgatagaggtttcccagaaaaggcaagtgtttactttcttgtaaatcaacagattatccttttcattttcaaatttaaatttgtacttagccttttgaggttagctgttttttgttctttcttattcttttggtggagattaatttgcatttaaaggaagtagagaactatattggtgagtaaatgtagagaagcagttggaattcaagtagaccgaatggtattcagatgacatgatactggtgggagatggggagattgcttgtattcctttaagtatggttcctattagctttcttcctctttagttttaaaatggagtgtaaaaaagtctctgctgtactccatgctttaaagctgtaaggatttctctgaaaggtattttaaatgtacaatatatgtctgtttttattaaatactaagcattctgttagctataacaatgacttctgttctcatagcacactaaaaaagaccttgatggatttcggaagctatttcacagatttttgcaagaaaagggaccttctgtggattggggaaaaatccagagacctccggaagattcggtaagttttagataaaatgtagggaaatgtaaggtaatttagaacactggtgtcacttttgggggtggggtactatagggtacctgtgggaaccatcacttcagactttgaaactacagagatagccttctgccactttcctttgttagactcatccatcctgtcctgcagagaacttacgaaagtctgatctccctaaagcactgcctcataacttaacatgatttagtatgaggcagttcttttgttcagacacatgataaaagcttcattacgttctcttccttctttctccaaaccatctaatgtctcattgtccttagggtcacgtacagacatgaagtcagctactcagagctctttccgtgctttcaacccatatttctaactgtatgtcccttacctgcttttcctgaaccagcccaacattcccttcacacacataggatttccctagtcttttgggtatgttggttccttgggaacactatgggctcttcgcctgttagtcctactcat

SEQ ID NO: 42205 - DNA, 1232 bp, Bovine  19866881358745
  misc_feature (1)..(1): n is a, c, g, or t
nctagtgctggaaaaaaagggaaatgacactcttccaagatttgattgcatacctctgctgttaaagtggggaacctggaatagtttttagtttgggttcaggccctccattttctttttccctccttccttccctccacctctccccttccctctttcaacccctgcccccatacacactccatgcacattcacactaaccactcttagccaaagtgtattggttctgtcctggcttttgacagtggaggttcacaagttggagaactgatacacttaccacccagggcattgagtaatctatgaccatggcaaatcgttactaggaaaggagtaggattatctctcccaagtatattaataggatagagatctaatgactttgatagggcattagagtacctttctcttccacctgaatttccttttgtcttcttccagcctttccttaagaatgtttgattttaactacctgaaggccatgtggattatggtaattcctctgaacagacatttagcacttatgcttgattattatgtaagaacagtaattatgacttttaatcattatgacattaaataaatgtcaggttactattgtaaatttcatataattatggtattttatcactcatggatgcaatttaaagaagttattgctcaacactatagcaagagcatcaattttaaaaaatccaataatttactgcagaaactatagtagtatgttttccttatatatagctatatagtatttaaactgtgattctgggtagagaacagaaaactagccttctgttgccctcaggaagccaaaggagtagacagaagagaaagtacgttgttgcctttgcccatgaagaagccatcaccattcttatttttctctgttaattttgacattgaaacgtattctagattttaaaataatttttttcttgaagtaagacgtgtcagtttgagcacttttgaaatacgtattttcacagttgagagctaaactcagtggacattgagcataagtagatcacaattaaaatctgaaatgttaatacattaaactattaaatttttgtaagctaaacagataaagtttgtatgttgatgtagtgtggtgctatcattttggtgatggcagtggttttgctttaaatactgaaaacgatactaaatttgtatgattattgcctagtcaacactaggtggcgccattgtgtaaggaccatatgatg

SEQ ID NO: 42206 - DNA, 951 bp, Bovine  19866881661155
  misc_feature (1)..(1): n is a, c, g, or t
ntgtccttaataaatgtatacggagggagattcgaagacagagaagaaaaaaccatgtgatgatgcaaggagagggagaaaagatgatgtgattcaaagccatgagctaaagaatgaagatggccaccacaagctggaaaaggcaaagaaatgtttgtcccttagagcctccaaaagttgcgtggcccctcttacatcttgatttcagcccagagaaatccatttcaacttccagaactgtaagggaataaatacatgttgttataaaccacctggactgtggtaatttgtttcagcagccataggaaactgatgcagtcaccattcatgaggaacattgcacaaatacatggtaaaaaaaaaattaaaccttttttttgcaaccgttcaaaaatgtataatgattgatattctattcaaagaatctgacagcttttttgtctacgaacacagtgttatgataaggcaaatggatttttgaatccaactgaagttttttctagcaagtattttaaaataatgttgaggctttaatttgtaaaacacacgtgtgttgttggatcaatcaagctgaaactactttggatgacattaagagggcacatcagctgcaaacaatcagaagaatctgatgtctgtgaagtcagagtttcagaaccatcagagttgcaccatcttggagctccatgctggtgacaatgtgctgagtacagccaaggatgtattctaccatctggacgtctacttcagcagccaactgctgagcgtactgctattcaccttggataagaggcctagtggaactactagacatttcttttttttcttcttcttcttcttttattcctttttttttttttaaattttattttatttttaaactttacataattgtattagttttgccaaatatcaaaatgaatccgccacaggtatacatgtgttccccat

SEQ ID NO: 42207 - DNA, 987 bp, Bovine  19866880532199
  misc_feature (1)..(1): n is a, c, g, or t
ncaggaacagttatgaagtggcattatttctttatgggcctcgtggtaaactcttaaaaataaattttgactgaatgttaatggggtacaaaaattatggaggaggtttctctgtactatcactgggtaaaatgaatagtcacagtaacataatagttcaaagcaatcttatcttttcctttcaccaaaatacttttcttctcatcctggagcacagccaaacataaaggtcaaaccctaaatggagggtcagaggtgaagaagagaactacatatcaaaaaggcttatagaagatactttgacattttccccacattaatatagtcatgttagagtctccaaaaataaagacatgataaaatatttccccctcttcccttctgacagttatggaaagatgtttgttttttcacatagtttgcgagttggtcatagccaaaacacatagtaatcgtatgaattctgcttccattgttaactgttcatctctgggcagaggctacaactcccattctgaagccaagaaaatgtaccatacatgccattatagtttactaaacgagtcaccaaagagaagcaggcacttcagaaagtaattaaggtagtcagtgaactgagctatctagaagtgctctgagattacaggagaagccatcatgaagcaagtattcaagattgctcacagaaagttttacccctgtgggtaattcatggttttcacttctacactgcagagagcaatatgggttctccgactatacacattaccacatcattccatttatcaaggaaaaaagaaaaaaaaagacgttgtggctgaataaaagtcaagaggtaggccccaacacagaatcctcaaggcaatcccaattcaggtgaaaagctgatgacaacaccatacaatgacccaaaatcagactttcatatataatcttaccatatttaacagacacagagaaaaatgtattagttttctataacaaggc

SEQ ID NO: 42208 - DNA, 1123 bp, Bovine  19866880535750
  misc_feature (1)..(1): n is a, c, g, or t
ntccatggggtcgctgagggtcggacacgactgagcgacttcactttcacttttcactttcatgcattggagaaggaaatggcaacccactccagtgttcttgcctggagaatcccagggacgggggagcctggtgggctgccgtctatggggtcgcacagagtcggacacgactgaagcgacttagcagcagcagcagcacaattacactttcatcttctttactgcatctattcaggactagggaaataatggccccaggagcagtttaacattttaatttattattttggaaaaaaaagcattcatatgtttcaaaaataaaaaagtaaaagttataacatggggtaaaaaccttccctcccgcctgctgctctgcaggcctggctttcagtttcccgtgtgtcctttcagggtttcacttactttcagaagcaaatacaaacacaagcatcttctgaatggatgactaagagatccggggggctttcatgcaatgccaacagctgggcctcccatccctgaccagcctcagacccgaggatgcgaccatcccaggatgataatcaatcggacactttcaaatatttatgaaacactgatggattttctcagtctggagttgtagctttcatggaattgggctttattagccagaaagtcaatattttccctgggccacggcccagctgcatgtgctcctgtcgtgcccctggtcttgtgggtctcgctgcttctgccgtgtcagcttcttgctgggggctctcaacttccctgccactgaaagctggtagggaaggacacacaaaggccaagcctcagggatgagcctctgtgcagagacttactctggggcttgtgctgggcaagaaattttccctccctgagcctcagttaccctatctgaaaggcgagaagactggtcagttattgagcttcattgctgcttggtgctcaaggggaccctgcagggctccccagacaggggctccctaagtgcagagctaggtcttctcttcctcctttatctctcccagtgtccccaggcacaggacaaagctcaagctcgggctctttccttctcaaagtagacagactcaaggctccatattctgcgaagagg

SEQ ID NO: 42209 - DNA, 1775 bp, Bovine  19866880558274
  misc_feature (1)..(1): n is a, c, g, or t
ntcagtcgctcagttatgtctgactctttgtgaccccatggactacagcacaccaggcttccctcttatcaccaactcttggagcttgctcaaactcatgtccatcgagtcagtgatgccatccaaccatctcattctctgtcatccccttctcctcctgccttatatcttcaatctcatacccacctaaaaaaaaaatgacgatgacaatttttctgcccagttaaactacctacattcctagtttctcaggtatatatattttatcttagggattctgttaaaggaatgttacagctgtttgaaaatgattgaaaatcctttgcatcagatctggttctcagagtattctttagtgttcttttagtatattcttgaaacgtgcttcaggtccagagaatctattctagcacattattgaccaagacatatcaacaccacaggcattaattaatttctgcaaaaatcccccaggcaataatgtgttaaagtttttatatcatttaattgctagataaaccagtgtaattgctaatttatatgtaagttgcttggcttgtctgctatttgtatatttgaacagaaactagtgtgtttagtaggaagtgccttttaaaatggcaaaaaggtgattgtttactttgctggtattcacacacctctgaaatgattgattaaaaagcctagctctatttgctatggtctttgtccttctaagcatttactctgtggctcagcgtagcagtaatctatagatcagcagggatgtatttcatattttctctgtgtaaacactgtcatttagctaaaaataatgaaacatgaaggtggtgtctttacccaagtgaaatcctgatctgtgcatttttaatgactttatgtgtggtaataaagctgcatatattagcatgcagcagaaaagcttaagtatatgatgcttatgatcatgaagtatgcaacatgtatatagaaggctaatgaaaatcaacactcagatatgtccctcatctacttgagcttattaactagcttattaatatttcttcattaaatatttttcagtggggactaataaacattctaaccagtctcttaaatatgccttcttataccatgttataggtaaatcaccgtggcttaaataatatctgataaagctttgatgtttcaagtttagcaaaactaagtcagagattgagaacttttgcagacttgaaacatagtggttttgaaaatttttaaaattttagttttaagaaaagaaacatccatttgcagtaaaggattttctaatatgtgtgagtgcctataaatgtttaaactttcggtattcagaatctgatgtggattggtgcccaggatatggaaaacctaggtgaaggcagaaacagttcaaagagcaatgagcttttatacttactgtgatagagaaagagctagaaggatgcttggagattctccagtccctgttcccttagttttgaagaccttgaaattgaggaagagcaaggatagcatgatttaggaccatcactaaatcttgaaccttgtctccatgtgtgctctgcctctgattaccaattgaagaattaagattctcaaaagattaaattcctaaattctgttatgaaatctgacagtgaattgatactttaagctggatggaatacaaaatgtaatagcattgaaaaattgttagcatttttcttcaggttctaaagtggggaagctctaagagctattgcggtaaattgttttatttaaggtaaagaaag

SEQ ID NO: 42210 - DNA, 924 bp, Bovine  19866880666446
  misc_feature (1)..(1): n is a, c, g, or t
nttgttaatgttgacttggtgtagattattgtggacagtacagtctaagaaaattactgtggaaaggcacaaaggggaagcagtggtttctaaagtctttaagcttgtcttaatggaaattgagagctcatcaccaaattccaaaatattagggcttgtagtgtgaaaggttaattttggacaagtgaagggatgtgcaactcggatctctttgttttttacagaatggcatagctttaaatgttagtgtattagtgctagacccatgatgatttttggaagataaaagtgtttagttactaagttttgaaggcttttagaataaacagtcattaacctcttctctaaactgcacttttgctccaaggtcagacaagagccttaattcagtgggtcatttgatctgacctgggaggcctcatctaaaacaagtttaaatcagtacttgataatttcaggtttttttctgttcagttaattgagtacttaattaagtcccatgttatacaaattacctttactttttctaccctagaagaagagccaattggctagtgtttattttgctcacacatatcttaggcattatagagactgtaagggaaagctttgtccatgcttgcagaatttctagtctggcacatctgcttagggtgttgtttttcatcagtatgaaaagccatagtaacgctacaagggctgtggagtaggaaataccacaaggtaaacaccttttaaaggcttttggaaacaactttagaatgtcgcagcttcactaatcattcattcatatgaaatacaaatcctatttaaaagccttatttaagctttaaaatttgtcttgtcttaaaaaagtttcaactttcatttctctctgtgaatacataaaattaaggaaatgtgctgttaagcagatactacaca

SEQ ID NO: 42211 - DNA, 2614 bp, Bovine  19866880690943
  misc_feature (1)..(1): n is a, c, g, or t
nataatatcgaagttatatgcaaattgtaagaatgatacagataatttttcctgaatcacttgagagtaagttgctgatgttatactgcatcaccactgaatactctagagtacatttcctacaaagacattctgccacatgatcaggataaaataatcacaatcaggaattcaattggttgtttggttactaccatctaacctacaacctacaattggttgattggttactactatctaacgtacaaccctattcaactcataccagttgttctggaattcagtggtgaacatccctagaaaggagagaggcacagagtaggcaccctcaaaattagcatgtctttcctttcaaatctttggctgattacttaagttcacatgtggaggagactccatagggcctagtggaaggttatagcagacatgagaagtttttgaggggatatttcaaatttgaagtttgagttctaccaaacacatcagaataaagcattcagaaaaagactatttcaaggaatgcagggtagattataaaaggataatagatcactgcattaggaaagagtaaggcgatgtaggttctcatttcagttttgtcactaaccaacacttacccatgggaaatcacttaacttctctctcacaaagtacttttctaggttatcactatttgtatgtctgtaagttcaatttcttttcatattcaaatttcaaaataaaataggcattgattgcatttttcctctttaaaaactcatagtggaaaaaagaataactgattttgccactgtttttgtgatactgggctttgagcaaactctggtaaacagtgaaagaggaggctggcatcttgcagttcatggggttgtggagagtcggacatgactttagtgatatatgtatatttcttggtaattttttggtaatttcttggtaatatttctcctacatgacactcatcattgttatacaccacttgaagtgatagatataaacactgtaagaatattggatattgttttcatcatgaataacccagttagagttagatattgtttgatgttgcacaaaagtgtccttttttaaaatgtgcctttgttgtattaaaatctcttgaaagattcaattctacagtatgtaagctcaatctggaatcatttaaaagttttcacattatctttttctttcttaactcttctagttattttccttgtatttagtgttatagaaaaagcaaatgaggagttgggcctgtttaaacatacatgtaattagtgctcaagagtcagaaatagataggaatttattattttaatcttaagtgatattttgtatgccaaattataagtatattttatacttaaacctaaagtaaaactgcaaagtggctatagaaatttttgtaattggagataaatactttcatatttgagagaggctgtatcaaaattggatattgttacttagaattgaatttttatgaaggtgaagtagattttatgtttcatattcttttatttgtagccaaaaatagaaatatatgaagacaatcaaatgaagtcttagaaagcttcaaatgcatcagtactagtttgattcatataagttgcttcattcttgggtatgtcatggatagttcttgagtgtgtaagattctatccatgtcacttcctaagtaaggaagttacttcttaaacaaataagtccaattttaactattgagtaagggtaaaattaagaatatcctaaatgaaagaaaatgtccaatatatttaaaactagtttacttctccagtttagctctattttgtgctgttctcttgcagtaaacaccactatcttcagaaaataaggaatgagaagcaaggaagaaaggacattcattcatcttggaaggacccaaagcactttgagatataaaggaatgtaattatagctgctaaaaccacctttgtcaccgaaatggatgaagtacttcaaatttaaatggtaaccagaattctcatgtttccaccaagaactttagatcacttgaaaggatttttttttaactttaaatatttaccttaataaatagcaaagtgcagatagctgataattttataacttatttagcatagttaggattttattttctcttttaatgcttggctctgatattagccaaaagaattgttgttttttcccccaggttatcaacttcttaacatagaaacagataagcctatttgagtaagaatatggcatagtattagtatacttacaggtctgtcctttgccaaatattttttcctttcataaaagcaactcgggcaacataaatggtagtattctatcacatgtgaaagtgttttataatcttattttctgaactttatttcatattgtttttttagtttccttatgtgacatctggtctcttgatctttttcctttcatatctgacatcttattttaatttaatctttattttatcctctccccctccttctcaggaatttagggttataaaagacaccaggttttaagtattctgtcatttaaaaaaaagacacaaggatccaaaatgaaaaggagagagaagttgaaaaaattatagaattatttctta

SEQ ID NO: 42212 - DNA, 1838 bp, Bovine  19866880725626
  misc_feature (1)..(1): n is a, c, g, or t
ntcaggaagcaacagaactggacatgaaacaacaggctggttccaaataggaaaaggagtacgtcaaggctgtatattgtcaccctgcttatttaacttatatgcagagtacatcatgagaaacactgggctggatgaagcagaagctggaatcaagattgctgggagaaatatcagtaacttcagatatgcagatgacaccacccttatggcagaaagcaaagaactaaagagcctcttgatgaatgggaaagaggagagtgaaaaagttggcttaaagttcaacattcacaaaactaagatcatgtcatctggtcccatcacttcatggcaaatagatggggaaacagtggcagactttattttcttgggctccaaaaacactgcagatggtgattgcagccatgaaattaaaagacgcttgctccttggcaggaaagttatgaccagcctagatagcatattaaaaagcagagacattactttgccaaccaaaggtcggtctagtcaaggctatggtttttccactagtcatgtatggatgtgagagctggactataaagaaagctgagtgctgaagaattgatgcttttgaactgtggtgttggagaagactcttgagggtcccttggactgcaaggagatccaaacagtccatcctaaaggagatcagtcctgagtgttccttggaaggactgatgttgaagctgaaacttcaattctttggccacctgatgcaaagagctgactcatttgaaaagaccctgatgctgggaaagattgagggcaggagaagaaggggaagacagaggatgagatggttggatggcatcaccgactcaatggacatgagtttgagcaagctccaggagatggtgaaggacagagaagcctggcatgctgcagtccatgggtcgctaagaatcaggcatgactgagcaactgaacaatgatgacaaaactaagatttggggtgcttttcctttcttctatctttgtttattctccaagtttgctataatggtatttattttataattgaataaataaacttgtaaataataaaaccatttatataaacatctttctaaaatatattttaaacttctgctgttttcttccctttttaaatacaggataccaaacatagcttaacattttcttgatatcttggtataattagtatcagtgtcaatcacagtgctgttctggaaaatatggtgatgctgttaagggatataggggcttgtttgccccaccctgaaatgctgtttgagttcttaaatttggagggggcgttattattattattttgctgtcagtagtcacttgtcacttgacacttctgtctgaattcttctgtccccttataagttatcttgatctctgaaaccagataataaagcatcatttattcatctgttcaagaaatataaagttccaaaactatgtaagaaatgtctcctgtcttcaaggagactaagtgtagtgagagagagagagagagaaagttgtattcaaacagtcataaataccatagaatgggaaatttgaggaggaaacagttaatgctttaagaggatgatccacaacttcacaggggagttggcatcaaaagttttgtagaatttttgaacagttgttatatggtagacatatagaagatgatttttttaaagggtaagacagtatctgatcccagaagagcattatactctaagttcaaatagattgtatagacatctgagaaccagtcatgattttatgaagaaatcggtaaagtggtaaagatttgttttttagaggaattaggagacaacagaataccatctcagtat

SEQ ID NO: 42213 - DNA, 3149 bp, Bovine  19866880752125
  misc_feature (1)..(1): n is a, c, g, or t
ntacatatagcctatcgttaataaaggtttatggatacaagcatttttatttcagagaagggaaagatagttagaatgagatgaaaatatcctaatatcaattaccataccataactccttcaaatatatatacaatggtacaataattcagcactgggcaaatggtatatttggtaacagtttttgttttgtaacccgagtaacatttaacattaaagctactaaggatttaagatgtttaagaagctttaagcactcattatgaggcttctcaggtggtgcagtggtaaagaatctgcctgccaacctgtaggagatacaagagacccaggtttgattcatgggtcaggaaaattccttggcataggaaatgacgacccactccagtattcttgcttgaaaaatcccatggacagaggagtcgggggcacttgcagtccacggggctgcaaagagttggacatgactgagtgactgagtacacaatacacacaagcattcatcataatttttaagaatgccaatgtagaaagaatcaactttttcaaaatgagaataaagacaaaaatcagtggtggtactcttctttggcttaaaaaaaaagtaccttaaaacacagacaatgtaatcagtcatttgtgaggaacactggaagtccaacaagggcattaatgcccttgtgtgaattagaaaaagatgccttctatgggcggagaaggcaatggcaacccactccagtactcttgcctggaaaatcccatgggtggaggagcctggtaggctgcagaccatggggtcgctaggagtcggacatgactgagcgacttcacttttacttttcactttcatgcactgggagaaggaaatggcaacccacaccagtgttcttgcctggagaatcccagggatgggggagcctggtgggctgccgtgtatggggtcgcacagagtcggacacgactgaagcgacttagcagcagcagcagccttctatgggagagagaatgacctggcaagtcttgtggaccctttgggcacatatgctgcaggtgagcagtacgtggtcttgagtaagggcatgtagactcctcattaattacttatttaatttaatcattcaactcattccgtaagcatttgagcatctaatctgatgcaggtataaattttcttggcaggggataaagaagagtctacttgtctttatatcattaaaaacattaatacggttctatgtaaaaaaagaaatataaaacagaatattctgcagaatggaaggccagaggatgaacacttcaatcaactcccttgctgactgcttctttagaagcctcagagaccagtaacaagaggagatgcttcagctcacctcatcttcatgcctctgttcattgccttctgctgtatttgaagattcattctgaagcagctgaccttgggagagatcctctacaaattctggattattgggtgggatgacgtggctccactactatatggagcctctgggtgggttaacctgcagaatgatcggcagagtgggagaagtttagtatcagcagcatcgaaagctcctacttatcaaggttcaagacacatttcactgccagcaaaatcacatgccagcccttgaattaattccccacctcattctgtataaatgtaaataaaccatatctccatagcaattatagaatacttttaaaaaggtttcaatgcttgattggactagctcagttccgagaagaagtctcctactaaaaacaactataatctttctcctgcaaattacctctctcctcaatgtagactttacattttagctctgagcatgcagctgacttttatgtactacttttcatgtacctccaatgtgataaatggaaaatagtattaatggaaaagaataggaatgggagttgtagaggcagtttgcccccctatcacaaaacagcgagttcattaaaggcacaagaaatttctcttacagtacattccataggctattccttctgtaggattatagtgtttgttgacaatgagatcatctaagaacagtattatcaagttcagaaattcagctataaacattaataagttagagatacacactttctgttcttaccattctgtttcagatgagtcatcaaatctcatctttctgaaaagtggatacaaggtacagatgatggttggatctcagatagagttacaccctaactaaacatttagataaaggaatggaaataaaggtaacatcatatgctagggagtttggggtttgtggcaggtagcggggaaggtggaggaagatgtataagagagcaatattcagtcattattctggaagaatgtacactttatagagttatagaaaatactaacaagtagtgaaacagaggtctataaaatatgccacaaaggtacagtagaagggatgaggacttttacatatatggagagaatgtttaagaaaaattttacagaggaggacttaaaaggtgaataggcattcattaggtaaacaacggattgtaaacacgtaaatattgactatcacccatcaggctcctctgtccatggaatcctccaggcaagaatgctggaaggggtagccatttccttctcccaggggctcttcctgacccagggatctaatctgggtccctgcattgcaggcaaatgctttaccatctgagttgccagagaagccctaggtaaacaatattatcacaggtagaaagaacagggtataataggagaaaggagaacttttcaggaggctactgcaaaaaactgagtgagagaccggggcaagcggaagaacagggaagagaaagctaaaagggataattaagaggcaaaatgatagaatgtatataaatagtgagggaaaaagaagagtcaaaggtaattctgttatccatgttaaattactgaagttgacaactgtactattacagttattaaccgaatatccctattcttaggaaattcagaaatatgtactgaagtatgtgggatacttcatgggaataaaaaccatgatatctgcaaaaaaaaaaaaaaaaaaaagaaactccttgctcagtactgcttcagtgtgagtttcatatgtttatagattttaggatgccaggggagggag

SEQ ID NO: 42214 - DNA, 2686 bp, Bovine  19866880775626
  misc_feature (1)..(1): n is a, c, g, or t
nactattgttaacactgtatgagtattaaaaagcagtataaagccatttattaataattaatctacggacccaaatgaatttcttgttggtaggaagaaaagggaacagtgttgaggggcaggaggagaatgagggagtgggagcaaacctctcccgcctccaaacccccatccagttgtacagagaagtaccagtgcatctccactgcacagggattacctcccactcagtacacggaagagagtccagttgtctgcactgcagactgtgtcaggcattcacctggggtcaccttgcaagggcaagagagtctcctttgctccctgggggctccgggttctcccaggagatgctgggaggctggtgctccagggttggcagccttcccccaggaacctcagagcaccccttagaagggcccttggtgcctagggtcatcacaagggccccctgagaagccaaatgcaacgtcctttatggtctctgaacccctccacgtctcccatggctccactcttgactctactgtaggctgcacgtgccccagagcccatctataagctggactttttaacatgagcttcagacaaaccctataaggtgagtggagctgggacaggatccccattctgtaggtggggggacagaggctctgagaagagaaacttactttgaggactcctcctatctagaaggatgccctgatgagctctgcagtgaggggcgaggagagctgattgcattctgacagagacctcgccactttcaacagacgagcgtgagatggtggtgacatttcagtccttacccctctccctctctaccaggcggtctcctgtttctcccaggcacgccctcccctattggaggaggctgagctcttgctcccaggctacctcctcaccttactccagcctttcttgcctgcaagctttcaaggtcagattgcctggtaattcagtaattgatctaggagacttccattataaatctcccagccgtggccagcttttcccatatacccagctactacgccccacagcccattctatccagcttaccctggtgatgaccactcatgtgttcctccaggggaagacagccgatcatcctctgtttcccccctttcccccagccccctgccaacaacactgctgtgggcagggccccaggggctctgaatttagacagaagtgacatggttctgaactgacctcaaccatcaaatgctgtatggtcttaaacaaaccacttcccctctctgagcctccgtggccacacctggaaatggatctggtcagatggctttgaggatctagtgtgacaaagtgtgggagctggcagggtagccactgtgatgagggctcccttgggacccagacttgcggatcctcaggttgaaggagaccagagtagggcatgattgcccctgcttctctcagcaatcagggaagacttctcagaggaggtccatttgggctgggccctgaaggatgaccagactctcctatatttgggggtgggtacagcaatggatggtgttctggggccctccacagaggcttgaccaacctgtggcctttggatttcttacttggaaatctgaccacagtaagcccacattatatatacccttctgtggtggctcagatggtaaagaatccactttgcaacgcaagagacttgagtttgatccctgggttgggaagatcccctggagaagggaacagctaaccacgtcagtattcttgcctggagagttccatggacagaggaacctggtacagtccatggggtcacatagagttggacacgactgagcaactaacacattttttcactttttcattcccttcagtggctccctgatgctctttggctaaagtccccactccctcgggaagcttcagaggcctggcaagatctagtccctgccagcttcacatacccgagccggtgtctccagctttgatgaattttttaaacatttatttatttttggctgtgctgggtcttcgttgcagcacgcaggcgttctctaggtgggagctactcctcgttgaggtgcgcaggcttgtcattgcagtggcctctcttgttgcagagcacaggcattaggtgcacaggcttagttcccccccacccacatgtgggatcttcctagaccagggattgaacccgtgttccctgcattggtggcagattcttaaccaccagaccaccagggaaatctcctttgatgaattttttaaaaaattccgtacaggctttaacctgtgcaccaactgctccctaatttgactctatgaccacagtaaaatttgactctgtgaccaagtaaaacccctactcccttccagggcctacttactcccccacccctagagcctgccccttctttctcagagtctcagaccctcacaccgagtccccacgtttggactcagcgcatacgtgcccagcgcttcccaggtggcgctagtggtaaagaatctacctgccactgcaagagacacgagacacagatttgatctctgggtggggaagatcccctagagacggaaatgacaacccactctagtattcttgcctgggaaatcccacggacagaggagcctggtggaggagccccagtccatgggggtcacaaagagtcggacagactagcatgcacgcacgcacgca

SEQ ID NO: 42215 - DNA, 1523 bp, Bovine  19866880799170
  misc_feature (1)..(1): n is a, c, g, or t
natgcagaagttttagtgccaaaagcaggacagtccccggacacatcacgatggttgatctcactgattcccctccagccgttgccacgaagcccacctgttttcttatcctcgccacccttctgttggaagacactcattcattgaatgaatgaatgaggggatgcactcggacctgagcaagcttctcctcctctctggcctcagtttcttatatacatcatgaggggatctcccagaccttgtgcacacaaacacagcaaattggagagaaggggcagtgcccagctcagtgaggggctgtgcgtgcactggaccccagggtgggcagaggtgacagtggtctggcagtagggtgggccagcatggctggggatgagccaagtgtccgagccctcaccttcctagatgtcctgccattaccggagggccatttctgggccaggctgttggtccagacccagggttgggggtgaccagaatgctgacaccgactgccaagcttcactcccctcccacccccggggaacagatggcccaagcttgggcgggcggcagagatggggactggcatttgtgtatgtgtgtggtttttaaaaaatctgacacatttttgtcacgtcttggtgcatcagaacagtaaaggaggcgggagtgtgaagaatgttttaactcgcaactttgtaacagttccagattctctaggcctcctccccctcccccaagcccctgcggaggagcctcaaagcccatctgttcctggatccctgctcccgactccccacagcaccccccatccatctactcatctatctatccatccatccacctatatccatccatccatccatccttccctcctccctttgctccatcagccgagagggagaatcagagaaagcagcttgatactccaagagaccctgagcagggaggcaggagccctatttcagggctaacttgacctcagacttgctgtgtgaacttgtgcggtttctgatcctctctaggccccacctgtgtgcacctgagggtcaggtgcaccccctttgggtgtcctgactctgacactcatagacatgtgtatgacatagggagagagattagagatgaaaagacacaggaaggcaagttttgcgtttagagcttccaggaggatggccccacagtggcagagggaaccacgtacatgaagccagactaagcgggtcccaaccttcactcccctcaggtttggggcctgggtcccccacttgactcccactgcacctaacccacccagggtggatctttgaaggtgacctagggctgacagaggtctggaaagctgctccgagtcaggtggggatccaggcagtaccagcgacctagacatccctgtgccgccccgctgtgcttgtctagtcctgcagggccctggaaaaggaagcagcgtgggtgccaggccctggaaggtttgcttctcagccgccagccctgctgtccccaagcctgcctggcactagcttccgtttcattagcca

SEQ ID NO: 42216 - DNA, 3023 bp, Bovine  19866880822963
  misc_feature (1)..(1): n is a, c, g, or t
nttgactctggagctagagctgaagatggagatagtatttgcattctgggaagaagcaagcccatctgggaaaggaacgttgggagagaagagatcacagcttaggacagagcgctgaggtggttctattctgcagatcagctgaggaccaggagagcctgtagaggcaggaagaaaacagcagactgtgatgcccagaagccaggaggagagggtgactgaagaggggagtggcatctgtgtccagtgctactgagagcttgggaggacaagacaagaaagtgtttggggacctggtgacgtgggggtctctgatgacctcacaagagccgatcagtgaggaggtgggcgtaggagtcagagagaacggaggtgacgcaaaccattctttgggaacgttctcacctttgcaaaacagcggaaattaagcattagtcatagggaagtatgagggatggaactaaatccacacactttctgtgagtgcccactctgtcctaggcacagtgccaggcacagggatacaaaggtgggaagagacaggcccaaataaccacactccaatatgatcagcatccaaataaagcgcatacagcaagcggtattggcaagaggaatgttggacccacagattctgtgtctggggatcagaaaaagcatcgcagagtgggctctagctgacctgatccttacagatgaggaagatggaggaagaaaaggtttgccaagctgcgggaaaattttcaaagggacagagttcagaaaaaacagggagagtttggggaccaacaagtggccggatctggcctgatgggggtggtgatggtggatcacagggagtggcagggaatgccttagaaaaataagctggccatgacagaataggcctccacatcttgctaaagagactgaagtccgtaaaaaggaaaaatgggaggaaaaatacattggttcatctgctgtgtgccaggcacagagctacaaccttatacgttttcaacatggattttgcaatataagacagaccaaatcctggtttgcaaggtatagtgaccttgcatcctttaacccagcaagtctcagtttcacatgtaacaggtcaaggataatgcttatcatatggaattattgcaaggcttaaatgagataataaaataaaagccactaccaaaatgataatttacaatagagtgatattggcaagattagacttgcattttaaaaaaggttgttcttgcagtggtgggcaggacagaagaaagtctgctggggaggggacagatgggcggcaggagggactaaggccagtgaagagctactgtagaattattaataattaatcaagaagaaaaacaaaacaatgagctattgagggagctcagaagagagccgaacgctgagtaccttacagaaacttggcctggggatggtgagaaggaccacttcataggaggttccatggctgaatgaggggggttcctgtgaatgaagggatgcagggggacagtgagggagcaaggtaaagaatgaggaagagggatggagaatgacaggcttttctagcttgagtgggcggtggagttcttaactgagttggcagatgcaggagaaaatgtgggtttggggagactatttaattttggacaaattgagtttgaagattctacagaatgccagatggagaaggcctgagggagctggaaatagagatcaggaactccagcaaggaggggcctggagattcagatctgagccgttgacatgcaggggggaaagcctggctcctggagagagaggaccaaggtccagatggcatctaagcagtagcgattttggaaggtccctaagaacccagtttttagatcaggtgggaataatttaagacatagctcatacagaacgttggtttgttcaaaactacaggtgcttcagttattttgatctagacccagagactcagagctagaagggaccacctcatcttttgtttattcacaccttttagggccaggcaatgtgaatgaataaaaggagacagaagaaatctgctgcctgagagtagactgcccactaggagaggtagaaggaagaatggaatcagaaagtcagagtagcacagtgaagacccagtcctatccgcaggcttcaccatgaaccgccctgggttttagtggagagatggtctggagatgttgcaaggtgatatagaagtggcttggttgggaataacagaatgggggtctttgtggtacccctccccccaaatgttcatccactttggaattgtggtatgtcgacagctgattaaagtccccattttacagatgagaaaacggagtctccaagcgattcaagagaccaatgctaaagggtggctgcagtgggtgtgaacccaggtttcctggctccatccaggtcatgtatggccacctgagctgagggaaggtgggaaacaggaccagaggtgcctggggactgagacccacaaggtggggatggggagagaggcacaccacttcaagttcaagctgctagttttgcagagtgtaaaattactgcccaagtcccagagaataaacagagttaacaccccattaaatacaatggactttcaacgtgagcttgagacgtgcccagattgaaactagctgagcaggagctggcccgtgagtaaaatgtatcacaggcattgccttaacatttccaaaacagaaaaacccagtgtggggagaagaaagcgccagcagcagctctgcaggcttggggctgagaatccggtaatgaagtctttctggaaggtaagaaagggctgtgtgctgcatgctatttttaaacctgctggagcagcacgtgtatcctgccccgcgcactttctccagcagaggaggggccccagggaatgcagccaggaatttagatgctatttattgtatttccttttatcagtcaaatgattttcctatttcccacatagataaagatcttctgcttaccgctccagcttgttgaccttgtcaggactg

SEQ ID NO: 42217 - DNA, 1858 bp, Bovine  19866880837875
  misc_feature (1)..(1): n is a, c, g, or t
nggatgtgcttagattctacttttagtttgccccagaaaagcagttgcaaaaaaataaagcttcttcccactcacgcagctcttctgagttgacaaggagctttcagatttactaatttgcagccaccagggtgtgactctaagtttccagtcattgtcactcttcagaagccgagtgttgctggtgttgctggccggaaggcttagaagacatcacagaagtgctaagtggccagcgggtggccagcagggtcaccaggaccccccacccagccccgtagatgtgggggaagggctccttcggtgaaggctgagaaccaccatcgccagttcaccagtcagagggtggaggaatgcagaggtggaagggcccgcagagaccctctcaagggtctccaatggcaagaagggggcctatcagaagacctgtgggacttggttaaaaaacataaggccagatctcagcttagacttactgactgggtaggggcagggaatctgtcagtttctagtcaccgtctgtgagtcagacgcacacgcttagaagggaactcctctcattcccttactgctccattttacaggtggagaaactgagggccagcaggacagaaccactgagcggattctttttaataacagagaaggcagggtataatcacctcccacccgccattcctgctctggtcctttctagcctgttttggtttgtgttttccataacggcagctgtctcaaaaaagagcatcaacagtttttcaaaatcctctccccagttgggctggtcttcatttggtcagaaagtatctttgctcacagtaaggcaaagcttgattttggcccagctggtgtttaattattactgagatcctgacattcaaaggcaggggaccttgatttcagtcttgtctgggccagaaaatcactaagtcgagaaatggggaagggagcacggatgcagcaaaggagatagcatacaccaaggcgcagaagcagggggcgactgggtgtgtccagctgaggggtgggaggtggggggagccactagacttggagactgaagaacaggatttgaatcctggctccagcctcacctcaccgacaaggttcctcgtcgggaacaaggggatgatgagcctatgtatttaacagagttgctctaaactttatacaagaagtttctaacatgcctcgcccagtacttaagacatgacatcatccagctcagctcatgtgcacagaggcctgtcagcccaccgcgatgacagcatttcagacctggcagtgttgctgctataaggtgctgtgctcccaggcagtgactggagaagacgtactcccaggacttcaaacagcagaacaaagcccaggactggctggtggcctgagcagtgtggagggcatgacgatagactcttatcagacggcgagaccccatgttcttgggcagccggtgctgccgagctctcgagtttcttcccaagccctgtcctcagcagcacccctttccagatatctctgaaagacatgtgttctcatatatattatttaatttttacattttatttggatatagtttaaaaagtaaagagtacaaggaactctcattctctttccccagattcagcagattatttacatttttgccacaattcattattatatctctctctgtacttacacagatatgcagatgacaccactcttatggcagaaagtgaagaggaactaaaaggcctcttgatgaaagtgaaagaggagactgaaaaagttggcttaaaactcaacattcagaaaacgaagatcatggcatctggtcccatcacttcatgggaaatagatggggaaacagtggaaa

SEQ ID NO: 42218 - DNA, 1539 bp, Bovine  19866880881480
  misc_feature (1)..(1): n is a, c, g, or t
ntgtctcctcctcctcctcctccgagtgcaaggctctgcccctaggaacggccgcaggatgggcgcgccgctgcaggccagcactctgcgctctctcggtgtcctgcaacctggccccactttgcctagcaggctttagtaggttgcccttagctaacccacgtgcacataaccccctgcccagttatacactgaggtggcagtgcacagaccactaccctgtcagccagcacacccccctagcagcctgctctccacggtttgcacattgagacgctttctcaatgtcactctcatgctgccttgcccgtgtgaatttgaatgttgaccatttagtgcagtttcatatttaatgaagaatgtttcctggtccctttattgcttttctaggtatccttcaccaccaccaccctcctttttccctcctgtttctgttttgacttggatccagtcttcttcattttaactcgatagtattataagcacggacaccctccactaccattatcttatagcactggcaaaccgagcaccttttcacattagctgtgtttagtactgttttcatagtcggaagtgttaagggcaaaagatgaatgccagctagtcaggaagggactcgggctgctctgagatgggtggctagattaatagttctctgagtgagggccaaaggacgtaaggtggggaaggacgaaagtgttacaggtgagaatggaataggcaagataaccctatttctaggcaagaggtattgtcagatggtcctccaaatatttttccaaaatgatgaaattcagtctcatattaacacaaatattttgcatctccattttaattgtagcagaaactttgaattcattcatcaactgcaaagaaatcctgccctcagacacggacatacatatttatacatattatatatatatatatatgagttttgaattgtgactagtatagcactttaaattttctcaagtaacatcaagttattgtcttcaatacagattggattttttctcttcttttgaagtctgtactatagattcttccatgtatattgagaatttgaacaattaagccgctattggaacttttccttaagccacacgagcaagaataatctcttgtacacttttaggtaaacaggacaatggctggagtagccaagaccaagactgaatgtacagcagagtgccttgttagcgtgctaacctcgtctgggaggaaaggaattagatgttccacaggaaggcagggggctgtgaaagggctcccttgctcgcctgaggagagcccttggtgcactagcatgatgccaaggagctgattcatcaagaataacagcaagatggtggaaagagcagttgcaacccatggcatcaacaacaaaagaatggtgaaggacgcccaccgacccacaggctaagtcagaactggaagccaggaatatggcagtggggtttttaagttttgccctcagaagataaaccagctgagatagacagggggagcacagcactcacattccctaatcga

SEQ ID NO: 42219 - DNA, 1262 bp, Bovine  19866880903866
  misc_feature (1)..(1): n is a, c, g, or t
nctcctaatgtcctgctggctgatatgtactgtgtatttggcctctcatattagcccctgcccattaatgccaactgcccacattagtttggggccttacctggtatggtattacgaaagttgaagcaaccacatttcctccaaccttacctcttatcagtatatcctttccatatccacctgagttcttaaagcatagtaatattgtattactctattgctcggcaactccttcctgataaaatctgagagcatctcttgaaaataatgcaaaacacaggtccaaaataggatgctaaagtttctttgcaaatcagttgattcagaacttgggagtgcattttccttgtagaaatactacatggtaggtttacaaaatagccaaaactttcaactaaagcatccataattgaagcctcctagtttagttaacagtgtttccacctggaatgtcaagatgcagtccaaatatgtgtagaaggtatggaggaggtcatttcccttcctatcctccgttggacatagagatttaataaaggaagagatttaataaataaaggaagaaagaactaatatttattaagtgcttattatttatcagtctctgttaggcactttacatattttatcttttttgagacacagttgacatttaacattgtgtaaatttaaggtatgcagtgtgttgatttgatacatttatatattacaatatgattaccaccatagcataccatagaattagctcaccccactatcacatcatataattatcattttttgtgtgtgtggtagaacatttaagacctagtctcttagcaacttttaagtatgtaatacagtattgttgtctataatcagtatgctctgaattagacccccaaaacttactcatcttctaagtatgactacatctcccaattctcctatccttcagtccctgataaccaccatttgggtttcccagctagctcagtggtttaaaaaaaaaaaaaaaaatccacctgccactcaggagatgcaggtttgatccctgggtcaggaagatcccctggagaaggaaatggcaacccactgcagtattctcacctgggaaatcctatggacagaagagcctggcgagttatagtccatgggtcacaaaagagtcagacacgacttagtgactaaacagcagcagcaaccaccattttactctgtttctatgagattgggtttttagggtttttttagattgtacatgtaagtgatatagtacttgt

SEQ ID NO: 42220 - DNA, 1063 bp, Bovine  19866880904371
  misc_feature (1)..(1): n is a, c, g, or t
ncgggttacagagaaatgggaagaagcacaaatgcacaatgaaatgacaggcttccctactctgagctgaaaaccacgtgtctgtgtctatctttaccaggagctaggaggtctcccatctctgttcgcctccatatatcgctcttttctcttcctcattctcggtaaccaagctttcctctcactcatcagcttgctcttagctgagcttgaccacccactccgagatggtagcccttgcctggagccaacacaatctccagtctcagttccctgctgctaacctaatctctgtgccccgatttcaaattcccatgagacacactgtgattggccagattttagtcaggtgacctcaacctggcccaatcagctggggcttggggcaggttgctgtgggaacaaggacccaccctcatgcaccagatccaagatacaccatctctggaatcctgggacaggagggagatcacttttggataaccttaaatgaagctgcaccatctccctgagagcgtgctcctcagcaagtcaagaagaggatgggagtttcaaccagggagtcagctgattctgccagcagggcctagtagctggcgagaagggacaagccaggtgaccctcatcctcacccttgaggcagcagctgcaggcctgttttgcatcctgtccagatatttccagtaaataaacattgacgctttcgatatcatgttaatttcacaggcggctgctctgctgacagtttccacactccgccagcgcctcttgtcagttttatactcacaggcagacaccagtccctcttgcaggccacccaacatacagacaataaaaacaaatggctcagaaagccctgatggagtgacaggaaacagcataagtgcctaggctggggagagcagccctgtgcagggtcctaaagttgaccagggcaaggccacagggcttagaaacctacaagtgtaatcttggtcaaatctctccacatttctggaccactggtttcgagcctgtgaaaggagttaatatgcagcccctgcttctctggggatcttgactg

SEQ ID NO: 42221 - DNA, 2574 bp, Bovine  19866880927847
  misc_feature (1)..(1): n is a, c, g, or t
naaattcgtaggctgcagcttgagctttctttctcagttgctccacttaggatcaggccttttcacacagaagaaaaggctttctgggtcctctttcacttctcacagtctgtatgtggattgggtgccaagaattctgttccaaaatgaatgggcacaaatcagtcacatttcttgagtcaggttggaatttaattgtttttaatcagagacttctggaaagtgtatagaatgaagagttcaatggggtctttccactgttaggaagttcaacatagaatagttttaagtttcagaatgtgaatagagggaacacgtcaggattgatttttctaaaacaattttgaagaaagaaaagaaaaaacttttattacattttaattttagctttagttctgggctttgagacagtacatggaaaaaaaaaaaaaaagacgaatgtcctcaactcagctttgcacatattgttctccaatgagtacaaggtaaaatttggcccgctcctgatgtgattccaattacaaaatgtacgatacaagattttatggaagttcttctgaacccaaggtctccccagatggaggctttgaggcaaaagaaatctaatgatatctaaagaggagataggccaaacagcataaatgtgaacagcatcagaaggtctggattttatctttcttcatcccctaaacagatccctttccttctttggcccttattttttcatcagtaggaaaatgattaggttagctcagagaatcttaatttaagatctttgcctgttaggtggatcctaagtggtatgataatcacaaaaccccatgcaaaattttgtgcacagtagatttctggagaggagggccatagttttgctttcatcagagtctcaaaaaaatccaggtggcagcccttgtagaagtctcaaagcagctcttcatcacttaaaaaataattttatgatcttggcagttaggattgttaggaagcagattaaagacctatgtttaagagaggcaagactgatcccattttcattacttgtaattagtccgttttatttagtgaaaaataaatatctaaaataagcaggctgtcaataaaaaaggcattatgagaatccagaggtcaactttcttgccctataaaagccatagtacatagcaaacatgtttgtttttctaatttacttatttgtctgcattgggtcttagctgtggcacacgggagctttattgtgtcaggcaaaatattgtcattgcaatgtgtgggctcagtagtcttggctcgcgggcttagttgccctgctgcatgtgggattttagttccctgatcagggaacaaaccccgagtcctctgctttacaaggtggatccttaaccactggactaccagggcagtcccacaaatatgtttttatttgtatttttgaagtataatttacatacaacaaagtgcacaaatcttacatgtacagctcgatgaatctatacgtatacaaacctgcaaaacctgcccagcaccccataagcctcccttctattccccaaatatcacctctaccaaacatagttactattctgacctctgtcatcataggtaagttttgcctgttcttgaactttatgtagatggcatcatacaggatgtaaaactactagcatatacctttctgctctgttgggaagcagtatggtgccagggaaagaggacagacaattttggaatcagaaacacagtgcttgaatcagtctccatagctcacccactttgttatcttgaacaaatgacttaatctttttaaaattctgtaaaaaaaaaaaaacaaaaacaaaacactgtagtaataaaaacctgtctggcaagtcttatgctgctgctgctaagtcgctttagtcgtgtccgactctgtgagaccccatagacggcagcccactaggctccccggtccctgggattctccaggcaagaacaatggagtaggttgccatttccttctccaatgcatgaaagtgaaaagtgaaagtgaagtcactcagtcgtgtcagactctcagcgaccccacagactacagcccaccaggctcctccgtccatgggattttccaggcaagagtactggagtagggtgccattgccttctccagtaagtcttatgagagtagcttattaaatactttatgtaaggtgtctggctcactgaaggggctcaagtttgtttaattttcctttccttctccctagaaaatttctattccaccttctagatcctgggtctaggagtgcttcctaaaggaggccttttctaacttcctaccaagcaaaattgctattttcttgggtctctttatttcattaatgtgctttgtatgttcctctgctatagcatttagcacagtctactgtcagacatgactaaacaaaaacaactgtagctatttgttgctattactacaagaatttgagagtcttgtggtcaggaactatgtaatttcacctgtatttcaccagtgcccttactaataaaagaaattcaataaatttttgtggaataaatgaattctgctctactggcatt

SEQ ID NO: 42222 - DNA, 1350 bp, Bovine  19866880941658
  misc_feature (1)..(1): n is a, c, g, or t
ncctctccctctagtatgagattgggcaaggggatgatgtatctgcaaacagggatatgggtgagtgtgatgagtgggataaccttctggaacaaggagccctctgggcagagcacttaggcaagtcctttcacctgctccaaagtattgtgaggatttaatgacataacccattcagagccctggaataggacccagcgccacgatcggccttcaagagagtgcaccgctgtgatcatgagtctagttggtgcggcaatgtctgctctgtgtgtgtatccagttttttgtgctatggtcttatcatcatcattattataacagtgctgtgttgcaaatctgtttgtgtcattgttgaacgtgatgtgtcatttcggtcacgtatgtcagggttaagtgacctgaacaggacttttctgcatctccccattttcaaagccccgtcagtccacagatggaaaacccaagtccccattcaggatttccagctgtgctggagaggagcaaactgtggtctacacctagatcatgtccaccctctcaatcccctctctgcccatgttgtcctagaagcccacctcccccaactggctgacaagagcctgaagggcagatgagtgaggggcgcaccctggttccaggagttccaaaagcagacctgagtacctatctgccccttccgggcctgctacctaatatggcatttctataaccagtgaaatgagggtggcactgatagacatatgaatgacaccaggagggcaagaaagaacccagcacaggagaggggccccaaagcacggctgaggcctggttgacttctcactggtcactcctgaagctggtggacacaatgctggacggtaccctcaattccttcagcaacatgtacagagggcactactgtgcccatttcacagatggggaaactgaggctcagaaacaggaagtgacttgtcctagtcagtggagccaggaatagcagccaggtctggccctgctgacagtcacagaggtttgggaatggaaggaggacactccagttggaatcttttccaagggataaatgatgtggctcagggcagcctgaggtggagacatctagaaggccccagacaaaggggggcccccacactgaaccaaagcatgggctcatacactcagatgcagtgtgttcacaccacctgctggggtgtgaaaaccagccataaatacctgcattgtcgtggtgctcatcaggcaagtgggaagagaggcctggtgtgccctcaggaaatttcccagtgactcacagacttgtggacccccccctcttggcacacccagacactccttgcataagcacatccc

SEQ ID NO: 42223 - DNA, 1724 bp, Bovine  19866880943331
  misc_feature (1)..(1): n is a, c, g, or t
ntgggatgccagcatgagaagcattattcttctcctaaatgctgggaaagagataggggagtaaagaaaatccaaataaactcaactgggccagtataatcataagagttccatgtaaacaaaaactgttctaagtacaattatacaaaattaacatctttcattttaaaaggagccaagaatatttcacatattttagaaaaaattcagtaaatattgattttttttaaaaatcaagaaactataatcattaggattatagtcaataatctaaagtaactatatgaccaaactgagaatttgatgatttgtctgaaattactaggtctataacatcccaagattaatctgagtacaatactgaccataaaagaccctgaagataacattccaaacactataaatccagcattgggaatctatacaaactcaatttttaatttacacatttgtcatagaaatcatgttacaaaatatttaccatagaccaaatcctgtgaatgaaataacatctaaaaccatggcatcacataaactttagaaaatacagtaggaaaaagtcacttctcagtacctctttattggtatagcacccatataaacacagtcttaaatagaaggagtacgaagaaaaaatctgaagcacacttcatctgagaaatgaacaaagaagaggaaactattttagcatttcatgcaatggaattgagcaagaacttttgaaaaatcacttcccttagcatattggtctattcttattaaattacaactgaatctgccaatgatgctttacaatataatagattcttcaggaagtcaataaaaaaacaatctggattggaagtgcaattatatagctttctggaacctataataaatgatcttgaggaagagggatatcactatttttcaaatgtacaaaacaatgtaagttcaagcttttttctgctactgaactcaaactatacaccaaaggatgcaaaatgagcaacaataaccaaatcaacagtgacaggttagtgtgcacaactaacacagcagacaatgggaacagctttctctaaagactgcagtcctgtgtaacgcagatttaatttaggtcacagaaaattctacgaagatctgacagcttctgctttgactagatgaaacttgctgcatacatcagcataaataattaggttcaactgtacattcaccaaacaaaataaagtaactttcctcaagctgggggaggaagctatagctttacctctaccttgaattgtagggatcttctgatttatcctagaaacagtgttctcttttagaactgataattacagttgtgctgtttggttgctaagtcatgtccaactcttttgctgcatcatgaactatatctcaccaggcttctctgtccatgggatttcccaagcaagaaaactgaagtgggatgccattccttctccagggtatctttctgacccagggatcaaaccccacctcctgcaatggcaggtggattcttttccactgagacccgggaagcccatagtaaaggaaacacacaataaacagagtccccaaagggactttcactgagggtgtgctgattttatccgaggttagggaactaagatcttatattcttcattaaaaaacaaacaaacaaaaaaaagagtcaccagaaagaaatctacaaaaggtaggatcttcaattagcagttcactttaaataatta

SEQ ID NO: 42224 - DNA, 826 bp, Bovine  19866880979742
  misc_feature (1)..(1): n is a, c, g, or t
ncaaactgatgcttcacatatgtgttatttattatctataaattatacttcaataaagcgaaacaaaataatatatttctcataggattattttaagaataaaatatcgtacagaaaaaatttcaaataagcctgtaaaaatgttgttattctggtaccgaataaacacttgataaatattaacttctcatgtaacaattgaaagtacttgagtaactaattcaatgttcaaaacacctaagacataccttagcttcttcttcttgtgctttcttaacaattgcttgtaattgcacctctcgtttgaattcagcatgaagtaatttctcttccatcatcctacgtcgttggtctaataacccttccttccactttcggacttctttctcctatatgcaatgaattatcacatcattaatttcagcatacatagtcatttgacaagaagtgcaaacaggtaaacagcttaggaattacaaagtgaaaaaccaggaaagatctaaagatcatgactaattattaagaacacagactataaagcctgacagttcataatctaccagtcacttgctagatatgtaaactgggcaacttttttagccgacatctcagtttcctcatctataaacagaacagtagtagtatctaactcataggttttaaagactgagtcagtcaatatatgtaaaacttttaaatagtacattagaaattgctcaagagaaatagttgctgttattattatattgcactatgagcacacttaaaaatagtatttcttatccttataaatgttgtctctataactcaaagtcaagacaaatga

SEQ ID NO: 42225 - DNA, 903 bp, Bovine  19866880994637
  misc_feature (1)..(1): n is a, c, g, or t
nggcaggcattctccagagacagcttagcaccttcactgggcgcccccgcaggcctgtctgggcaagatgagaccttggccgttcccagctgctgcttggaatcaggtccttggccattggcctcaactcccccacgtgccctgagcatcttacagctcgtgtagtacttctgctcctgttgttagccttgtaaggcggtggctgtcacaagtccactttacacacaagcaaactgaggcacagggggttgggacaatttggtagagttgctaagccagtggacaggtgagaggggagttgaaattcaaatccgagggttggttcccaggcctgaacacagccctctcagtggtgggtcaggttcccagggaccccagagagagcaagggcaggggtggccccctcccaacttccttctgcccagagtctgggccgtggccagggtaccgtggggaaggagggccaggccccttccaaagaagatgtcatgggaaactcagggcttcagacatccctgggtgtccaccccactccagcaaagcccaaagggatgaggggatttcaggccccacggaaggctccctgagctgggaaccaggcaaccccgttcatgccccagctctgctctagactagggagaggccttgaacgggggaatctctgtccttggttcccccatctgtgaaatagaaggtgaggagtgtggactagaagatccctctggctcacacacagaggatctgctctctactcactctaaatggcctaggtggaggagctgagcccactgcccacagcgtaggaattcagcacagggactgggggtgggaattcagggactagggtcctggcaacaggctgtaagccatctgcagaacccaaactttcccacagatacagcc

SEQ ID NO: 42226 - DNA, 1112 bp, Bovine  19866881022129
  misc_feature (1)..(1): n is a, c, g, or t
ncgtaagaaaaatttcctggtcaaattacaataaaaaccccaaacattaagcctttcttgctgggcagctacctattatgtttaacaggcttaaaacaaaatgtgtcagagatcaagagtaagttatctgatatgtcaagtgcataaggtcaaaggtccaattttattaggtcagaggtggtataaataaaatcttatatgtcaaagaagaagggtcacagataaggtgtatataatataaagacatcacagatgacaagcaataactttaagtagaacaagtatgtttactatagttaccctcactgattaaaaatgaaatgtgtgtatgagtaagtataaaatggcctttatatatcatgtaaactcatatgcacacttggtttgaggaaaagggggctattaccaaaaataactacatgaatgaagtgaaaacttaaagaaaatgtaatacttctaaactgaaacagtacacaaaatgaatatctcaatccaacctcaaaccacaacagctaaacatcaaactatgctgtagtagctacaaaagttatacaatactatatatttttcttccaaagtaaatgtgtgaattaaatatcccttccttctctatttttctcaatgagataaaaacacataaaatttagatttcagtttacatagtagcagtgctgcacaaaattttagattttttttggtaaattaaatagaatagcctttttattaagagaacttagttacaaataatttttataagtggaagattttctttaaagagactaattaaattttaattaatggggcttccctggtggctcagtgttgaagaatccacctgccaatgcaggagatacggattccattcgtcgcccgggaagatcccacatggcaggaagcactcagcccgtgtgccacaactaatgagcctgtgctctacagtccagaagctgcaccaagagaagcccctgcaataagaagcccgcactgcaataagggtagccctcgcttactgcaactacagaaaagcccatgcagcaaagaagacccagcacagcaaaaataaataaataaataaataacgaaacaatttaggattttttaaaaagggaaca

SEQ ID NO: 42227 - DNA, 1669 bp, Bovine  19866881056954
  misc_feature (1)..(1): n is a, c, g, or t
ntgggtactcttgctattcttacaaatacgcacatttttctcccctcatccctttttttctatgatgcatatactaaatatctctgctgctgctaagtcgcttcagtcatgtccgactctgtgcgaccccatagatggcagcccaccaggctcccccgtccctgggattctccaggcaagaacactggagtgggttgccatttccttctccaaaatatctctatagatattttaaagtattttaagatagatttttaaaagttgatttgaaagtggacatttgagatttagaaacttttcctccatgttttcagatacccagttaagacaaagctattacaagacacgcataaatcataattgctacccataactttgttaaaatttcctccagatgatttgacatagttaatggtaatatactgtaacaatgtttctcaaacttcagtcacttgagtgcatttttcagaagttagatcatacttacttatctattatttccttaatatagtcttgattcaactcaatgtaaaatgtattttaaactgtatattatttttgtaaatgaagaacacttttttctaatacgtattaagtgggtagctattcaaatatttgtgcttcctgagaggtctgtgataattagcaaagtaaaagttgctcagtcgtgtccaactctttgtgatcccatggactatacagtccatggaactctctaggccagaatacttgagtgagtagccttttccctctccaagggatcttcccaacccagggatcaaactcaggtctcctgcattgcaggtggattctttaccagctgagccacaagggaagcccaagaatactggagtgggtagcctatctcttctctagtggatcttcccaacctaggaatcaaaccagggtctcctgcattgggacagattctttaccaactgagctatcaggaaagcccaattagcaaaagttatctgcaattttttggataatatgttttaaaagtcaagtgctttcttggccaattggtagtttatttaataaatacttcttgagcccggtgctttctagtcatttggagtaccttagtgaacaaaatataccaaaactctccatactcaaagggcttacgttctgggttgatcacatataacattcttagattccaaacagctctccttgtctcctactcctatttctatgaacgcagctaaaccaattctcactcaaatatttataaacactaaagttttttttttttttcttttaaagaatgtttagaaatcctcactactcttaagtatcagaattactgtcacattcattgtgttctgggaaattctcataggtgaactcagttcatggattcaaatgtcttttaaacattatgctatgcaagaagcgaaacaacagtttattgagtatgataaaaccagtgatggtagtgtgtcatgggatgaatacaacattcagatgtatgatcgggtgatcgactttgttgagaacactgctctcgatgatgcagaagaggagtcttttaggcaggtgagtatgtgtgcccaagctttttcttttgattatatcagttcagtttcctgcatgagtgagcacaagaaccctgaggtcatcgactggattgccttgttctataggcaatcacctgttccac

SEQ ID NO: 42228 - DNA, 720 bp, Bovine  19866881102137
  misc_feature (1)..(1): n is a, c, g, or t
ngtcttccctgtgcacctcagttttccaggtattgagatgttgtccatacaaaccccaagctcagggatggggaagaacagtcagggagttctccccagtgggtgagaatgaaggaggaacagggagcgctcaagtccctgcagatttagagccaaaggaatcctagcagcactgtgttcacccaccggatgggcagggtggtcccagcttgggaggtagagggagagtttgcttcatcattttaacaatgcagagccccctgataaacccctggcacctggtgtggggcttggcctggctgagtgctcagtaagagtttggtgacccgaggagtgaactcatgtatctgtgttcctccgttcccacctccttggaaagtcttccctgattgcccctgcccactgagcaagtgagggctggctgaacaaggtggctcctgggcatttgcaaggcccccaagcccctgcctgccctcaggggctgagccacgcggggccggcaagctaatttggagcggctccctctaccagcctggtgcaccaacaattgattccgcaccgctttccccgcctgggcccgggcccctggagctggttagagacgagcgatggggctggcggaataattatgcctatttcatgtgacacccaaattgattgccgccagggtgacattaccagggcattgttcctcatctccaacctcttattacatgttat

SEQ ID NO: 42229 - DNA, 1209 bp, Bovine  19866881107487
  misc_feature (1)..(1): n is a, c, g, or t
nggggtggtgttggttgcaaagcattgggtgcttcttggtctgttttcccgccaaaggcgatgacatcatccaaagctcccttaggctgccgtggatgcttgggaggtatcatggctgctctagattgtcctggattgttttagaataaagaaagaagaaaaaaagaataattaaataaaatgttcattctggttacataattgaaacttaaacagaaataaatgtagtagccataataatttaagaagttaacaccttaattcaagaacggtaaaagaaaacaaagaacaattagctaaatttaaaggtagaattcaagacctaatgggagcaacaaatgtgaacaatgtctcagtatttccttgccataggaacagggcgatgggttttgctttcaagaaggaatcctgattctccacttctggccccaagagtgctgtattcactacactagagtactaagtacactcaaataactgtattgtgacagaagagagaggataacatttgcaggttaaaaagaaatacttgggagcattactaaaaacaatcgggattagcaaatgagactgctagattggtgctcagaagatactattctattaactttgttccaaagttacattgtattatactgtatacaacacttgtcattctccatccaaaacaaacaaacacaatttcataaaccatgctatttcatttccctacagagatggcttctggcaccacttaaactggtctatgtataaagacctctgagattgtggtaagggaaaccatgtgtatgagcaggcaactgctgtttcaaacatcacccacaaactcttacatgattctgttttatttgggggggggaatataaactgagatttgagagatgctacatttgaacttctctgacaacaagcttcagttacagaaacaatcacctttgtttcctttccagaatttatgcttagaagataaaacatgtatgtatgaatcagtgataccttcaggccttataatggggatggggcattattttttttaaagacttagaaatataccatgaagttttaataaaagttattaaaattagtaatgttattaaagtgaaatagtcactcaatattttcagagttaaaacataatgctctattatggggtggaattacatccttttccccaaaaatatacttatggtacttctaaatatgacctta

SEQ ID NO: 42230 - DNA, 703 bp, Bovine  19866881155485
  misc_feature (1)..(1): n is a, c, g, or t
nagctttttttaaaccccttaaaagtttgaaatggtcctgcggtcaagtccatcactattttcctttagagtttctggcattacccaccgaaaagttttgaaaagttgtcttatgttgttttctacttctttatgatatataaggggcttctcaggtgacgctagtggtaaagaacccacctgccaatgcaggagatgtaagagatgcatgtttgatccctgggtcgggaagatcccctggaggaggagatggcaacccactcaagtattcttgcctggaggatctcatggacagagctctcatggcgggctacagtcaacagggttgcaaagagtcagttactactgaagcgactgagcatgcagcacgcataatatttaaaaatatttaaatttctggttcattcagaatgtttctatgggtgtggtttgaggatagctatctaagcagtttccctccaaatgactagccggttgtttggacactgtttactgagtgagctgtcctttctctttgctctgaagctcctttcccatcatctgaaaagtgtccccacaatctcatgtctgtccaggccttgctgtttgattccattgatcatggcctggggaaagatggtagggggttcagagaatagacttggccattgattaggggtagagtgtgaggaggtgagaggtgggaaggaagaagcaaagggaa

SEQ ID NO: 42231 - DNA, 1337 bp, Bovine  19866881201991
  misc_feature (1)..(1): n is a, c, g, or t
ncttaagaaaaatcccaagtctctcatactgtgggcagttccttactgtctgagccacttgggaagcccttaaaaaagtaaccctacctcaaacattactttcaatgaataacaatactttgttaaagaggacttaactagtcaggataggattgcacaaagcagtatgcacagatgcttctagagctatatgtcttaatcttttgcgtgaagggtgaatggtgaggtattatacacaactatgagaatctgatgaaagctacgaattgcatgcccagaaaaaggcacatacatgcatcatattttacatttaattttagttgagtcatgaaacacagtaattatcctatagagttctaaaatctgttagtagatgttaagcaacctctgtttttaaatttttcaaaataatggacttaaaggattttacaaccttaagcaatttagcagtcatctaatgcaaactgctaatactaatgaagaaatagtgccccagaaagataaaaagaattaggtaaagccgtattgcactcaggaacaaagacatgtccaactaccatactaatctacataagactgacaaggcagaatttagtataaatcagtgcctttgggtcagaataattatcacaatggaaccagaataggagactttcaaatgatcttttggcctaaacacataatagatcatcattgatggttaaaaaaatgaaatctggagttagatgacacgtgaaaaagttgacaaaggcactaaatctttcttattctcaggttcttcaaaacaaaatggaaaaataattaaacctacccttgtaggattatttgaaggataaaatccaataacatacattaaatacttaacacagtgcctaggtatatcccctggaggaggaaatgacaacctactccagtattcttacctgaaaaatcccatggatagaggagtctggcattatagttgggctacagttcacggggtcgcaaagagttggatatgactgagcacagcacagcagcagaagcaaggtacacagtaggtgctcatgaaatgatataaattttaaaatatttcttgtcaagtcatggaactggataaaagataaaataaaatctcaaagtaaatgagatgctttccagctaaataaaataactagcaaacatttacaaagtatctatattattcaaggttttaccaaggatacaaaaggataaagctgtcctgtgttctcttttcaagcaaagacagagtttttcctgctcagtttctgccttgggttcctctttctcttttccctttcttgtttagctgctcagtctttcgactctttgcgatc

SEQ ID NO: 42232 - DNA, 2657 bp, Bovine  19866881233842
  misc_feature (1)..(1): n is a, c, g, or t
ngggtgctgggggaattcaaggagagaatggatgcgaaagttcagcccaagagattgcccagccaaggcagctgctcctccttactgctgctgtctattcactctccttcattctacaaaactctccattcatgctaattaccctctgacaggcaccggggatggagcagtgaaaagtgactgaccttttggggtttacattctagaggggagactagtctagtcttagccactcagttgtgtttgactctttgtgaccccatgactacagcccaccaggctcctgtgtccgtggaattctccaggcaagaatactggagtgggtttccatttccttctccaagaggggagactcacacccaacaaaataagaaagaaaaataaattgtatttccgatgatgataggtgctatggaaaaaataatcaggaacttgggggttctggggaggggttgtggtttaaataagtggtcaaggaaggccttgttgagaaggtggcccttggatagagaggcaaaggaggtgggggagagagtcgtgtgggccctgagctaggagactatcagatccagagaatagtaagtgcaaaggccctgaggtgggagcgtgtctggcaaggggaggggcatcaaaggacccagcacagtggaggcagagtgagttgagggggagagaggaaaatgtgaggtcagagaggggatggggccgagtcagtaagcccgtgtaggtcacgtggagacgtgggctttctctctggtgtggtgggagccgtggtgagtatgtcagatgtgtgagggggtgagtggggggcttgtcatctctcttcctggacccagtgggtgggatacctgctcctcacacaagagagagatgagccagagtcactgactctcctcagaaaatgcccagaaggaagtgcagcctatgacaaggaaagatggggatgggagaggccgagggagccccagcccctctgcaggcccctctgcctcagggccgcctctccctgccctgcgctctagcttcacattcccagcgcccttcgtatcctggacacccagactgtcagttacaactgtggtttttgtttgtacgatatcaacaagaagaggaatgctgtagattcgatatatgagaatgaacatctaacacaaatggccagagtgccaggcagatgctgggcagatgccgggttgggagccccactgaggggagagcctcactgcagcagacgcagcagaaagcacccacgacagagaggaggacataacccacctatgggagccatggccagcgcagggcagaggcctggagacctggggccctctgagagggacaaggcccgctccagtttaactcagcctgcttcctctgagtgctatgctgggggcagtgccagccctgggggaggtggcctggacaaagttgagtttggggtcgcggtatttgggcggggaggaaggaggactgaagtccagcctgtgttccgctcgtcaagcccagcagctccgggtggggttgtgtccaccagaggaaggaagtctccttttagggcacaaatgcactttatgggcccacaggggccaccccaaggaccctgccttggctcaactgagtccctgccccatgcagggtggacggcaccagggctgggcggtgggggcagaggggtggtcaggatgcagaggtggtgtgagacgggtcagtaaagaagaaacctctgctcagaatgtactgacaggtatcagaccaggaatgccaggggagctcatccagtctgtacatcctcaagaaggcagacgcccggaagggtggggaagcctgggtaccagctaaggggctctcctgggtactagctaaggggctctctggagaggttctcagcaggacctaatgagggaatcagatgattattttagtgcaaatctctgcctcttgggtggaggctgaatgggaggggccaagaggactaatgaggcatcccagagagagatggggtacctgagggggtgcagtatagacccactgggtggagccaggttgagccaggtcagatcaggtgagggtgctgtaggccagggacgagatgggtagctctctggagcagagcagatctgagggggagggatccactctttcctacctgccaacatttctggagccaggtttaaaccgaggccttctcagccccaaagccctggcttcctctaaccatggctgcctgctgccttctcacccatcccttccttatctctgcctgtccccccacctacttgcccaggtccccaaatggaaatccctggagaaggggtcagccgaaagggctttgccaagcagagttatttttacttggtgcccagatattttaaaaaaataggcaaagcccatggggttccctgccttctaaggtctcactaaacccaggatggggggcacggaccaggctggctggcccaaatatttgttgcgttgccgggtaaccaccagttggccctgcaagctggcatctgtggaaccgaggacttggaaggaaagtcgcacagccgctcagggcctggaatcagaaacgtcagtgaagtcaggaagcgccccacatgtctcctgcggggagcgcttatcctcaggaaactgccccccaggagacaggaggcgtgaga

SEQ ID NO: 42233 - DNA, 1549 bp, Bovine  19866881298654
  misc_feature (1)..(1): n is a, c, g, or t
ntgtgcctagtgtttaatgctgccttcagtgctgtgtgacttctacgcccgtctatattttactattgtgcaaactccttggacctatctctacgctccctgctaatccagggtctggcttgtgtcggttttagttgagccaaactgaatttgttattaaggatgtcactataccagggccatgctgtgtggccttgggcatgctccttccctctctgggttgcagtctcagcatctctataatgaggaagctgccaggatctctgggctgttctgagtttctggaactccccaggtctgcctgcctacactaggggtgaacaaaaatttggggggtgggttggttcttagtgcctcacagaccatctgcctctcctgttagcaacttggtccccttggaaccaggtgactggtattactaggaaacaaaaggactttcgcagaagttaatatttctttcttttccccaaagaaatggataaacctcattaagccaagacaagggaactaggtcatgccctgatgatgtcaagcagaggcttgtgagtgaagcaggctattaaatttcagatataaaaaataatctgctccttgcacctgcctgattactttattagcacaaaagataaatttaaacctcagacttatgacaaaaagaagtaagtctgcactctcctcctaattaaaccaagagaagccagcctgatccaaggacacccggcccactcaattaattaacatttattacaatcagaaaacaatctaattcaattaaaatgtttccacaaaagtggtttaatgacttttcccaaaataaagtacattcgaccggagcatttattatgccaaggcccagttgtcggtcgtaaggggagctggaatgacagccctgatatggctcgtggaaaagcaaggatgggccaggcagggccaggaggatctgggctgagccccttgtcagggcagagggatgctttctgcctccgatgtgctgtgtcaccttgaacaggtaggaggtgttcagagaaaggacagttagcagggctttctgaaacttagccaggagatgtttggaaagctggagaaactgccgtttgaaagctgtgaacagttttctgactctcatgaggcagagatttgaattcatagtgcctctgttcagcaaaaatcccttgataggtcctgagtgataaaaacagaaagcaaatagttggagttctctcttttgagctaacaaaatagtacgagcacatgctattgccagacagcgggctaaacacctctgatggacttaatcctcacaatggccctgccagctggcactctccattggaaccaaggctctgagtgtgcctgaggaccgcagtgactagaggcgaagtgtagattcaaacccaggcagccagactcagggcagagaggcccctggcaagctccaaataactgtgggaccctggggagagggaggcctctgccatcagacttgggtggggccccagagtctgtcctgttgaaaagccccctctagactctgctgctctggtcttgg

SEQ ID NO: 42234 - DNA, 1150 bp, Bovine  19866881324088
  misc_feature (1)..(1): n is a, c, g, or t
nacccctcctctacctcatatacaccttgtactttccatagtaccccagtgtcccaggatattgtttgggaaagtacactaaggaagtagtgccaagttttattgggttacgttaactcttagttccagcactggtccagaagtttcttacttgggcagttatctctttgtttactaataataaaagcagtgcttgaataaactgtaatggaagggcaacttgggaccattaggcaccaggaaaaagaaaccaaatacgtggactatgacctcgaaagacaacaccctccttgtaaaataacaaatttgctttggcagaggaaaatggttttttttaattttctccatattatcaatgtgctttaacctgtgatacaaaacactgtgtctagatgtttcaggttgttttcttttcacaccatattttgtgtcctaatggtgatacatctccatcaagatttcattgaggggaaaaaaaatgcatgtacagggatcagactgtctagaaagaaatctaaaccatgctcggtttcttttgatgatctagtgcttatgttttttagaaaatatctaattcaaaactctgcaaaacttttgcttcaaaaaatcataaacaacagtagaaaatttatgtttgtttctaaccctggcctcttctttccacttatcatgttgtctgagaacagtgtctctagaccaaggagaacaacagactgtaaaattctgtaaagcgtagctacacaccacttgataccaggcacaatcttagttacacagtaaagatactcaacaaatgtttgctgttgaaatatgaattctacaagcacttaccttaaaaagagcacccccccaaaaaaattaatatattgtcagtatgtgtgctgtgctcagtcgtgtctgattctttgtgaccccatgtagcccgccaggctgccctgtccaggggattctccaggcaagaatactggggtgggttgccacttcctcctccaggggatcttcctgacccaaggatcaaacctacatctcctgtatctcctacatggcaggcagattctttactactgagccattggaaaagccaccctttatcactaaataggttataaaactacagctaaataaatgcagggcatagtagatagattct

SEQ ID NO: 42235 - DNA, 1001 bp, Bovine  19866881338270
  misc_feature (1)..(1): n is a, c, g, or t
ntaaggactgctgggaggggtcagttctttgagcgaaacggaggggtaaaaggcttggatactgttcacgtggagaactaagactctgggggcagtttctccgagatatacagcactttcttcgtccctgctgcctccaaggtttagagggcacaattgtgggccccagaagacctcatcccaggacaccaactttctcagccagtacctgcggggtggggcgggagcggtgggctctcccccatttccccgtcgagatcactgaggcggggagcaggtgagtcgggggcggatagaagccttggccgcgcggtgtctgcgtcagtcgccgcaccaggaatagcccccgcccccgcccccgccccgcagcgggtctgagcgcccgccgggtgcctggcagagcctttacgcaggagctagagcgcgtctattcctgtcgggcttgtgggaggaggcggcgcgggaggcgggagctcgcgggtaactcacaaacagccgaggtgggggagctggggagcctgggacaggggtccaggcggcacagagtcgaggggcccggggagtcgcctgctgggctgttgaagggaaggcggcgactcatgtgtcgcttcctctcttcccctcccgccttttgtaggtccctctgccgagcctgccccctgctggtttactcggagccccggaaggcgattcagattccctttccgggcttcactagctgttcgtccgcacggaaatgacagaacctctctgagcctgggtttccttctttatgtcacagggggaaccacagcgcctcctcccagggttgttggaggatgaatgcagagtgcacagcacagcgtcctcacttgctaggaggggcttcagctaggcataggatttggatggacacggaatacagcagatcgttctgcagacaggactgcagagctgtggtgtggccgtgagcctgagaaggacccaaactctgtttagctagaacaggtctgtgcaactct

SEQ ID NO: 42236 - DNA, 863 bp, Bovine  19866881351378
  misc_feature (1)..(1): n is a, c, g, or t
nttgccagtgaggaaaatgacttgcctaagaaaggagagaatgtcccagaatcacttacggaattggttagaggcagaattgtgactgaaacccagggcgtctgtagcccaggcttattaaggtctcttggcagtgcccgcacactatatggaataaacagtgttgcaagttaaaatgggcctggctgcctgtggtgtcagcaaaatttgttgccacttgagacagaaatgatttgatttgtatatatgtagtaaagaaacctattgtattccttaatggaacttagattcataagacatggttaccaaggtagatactggggagccctgttagagctcaagaaatgctgacctgaaagccattcaagccattctgcatagcagtggggcacttcagcctggtacacaatattgagagcattccttaaagtaaagggcacttgagagaagcatatcacttcatgagattctggccctgagcctagatcacagcaaaatagtttcagttcaaaaggcctctgttctcttaccctccactcaatatatagaatgaaaaccaaagtgaagagtattcttgctcctctcaaatcagaagccagcctcctagacccaggagtcagctagttttactctcaagaaagtgtctaaatctcatgtggggactaagatagaaacaataattttgtttctcctttaatttatgaaaaatgacaaaatgacactcaacgtgaacaaattagaccccttcaatgacgaggtaatgaaatccttatgattttaatcccttgagtgatccttggagcagcttaagtatatctgagcccccaagagtatcccctccaatgccgagtaacgtactcagt

SEQ ID NO: 42237 - DNA, 1245 bp, Bovine  19866881360369
  misc_feature (1)..(1): n is a, c, g, or t
ntggggaacaaggcctttacccagagcctgcccctcagaccacttcctcgggtagctccagctccaccagccagctgcacacatgcatggcccaagcagtgcccacacctgcctggacaccatgtgacccagggcctggtgccgttcatgagctttcattcagcaggtgtgcaccagtcccctcctgaatgccaggtgctattctgagggcacccaccccagcaccctcagagtgcatgtgcccacatgtgagcacacccttgggcatgctggtgtccacgcaagaaagaggggagggcagagggcctcacctgggctgtgtagtcatagagtgccctatagtcctggcctggcatggtggggggccctggcgcctcctgcacggcgatggcagcgtagacaccctcattccggtcaggggtaggagtcagggtctctgtggaggctgagtacaaagtgaggtctggcacccgccccttgcaaaaatcagtagcccccagagggccccctgactcacagcgtcctcagacttgctcagcttcttcccatcctccaacctcccagctattggagggcccatctgtgccaagtagacatcctctcctcttcctccccccaaccagggtgacagttgtcacccctaattacctgcagaggctgctgacagtgtggtcttgggacttccatgcagcagcccagaaaacctgggggcaggaaggacaggtgagtcagggcgggggaagtagatgaggcagggagcctgcaaggtcagccctagcttccaggcacagatgtgacttatggggtgcccctgggcatgagggctctccaaagggtcgtcccagtggctcttccccggcagcactctcccagtcccttaccctgtagatgtcttcccagtacctgttccccgcagggccaaattggcgtgctccagggcctgggccagacccctctccagcctcccccacaggcaaaggagctgtcccctagagctcagcccactcacgccctgctgggaccttcaccagcctggccagccccgccactccccgaccacacaaagtggtcgtccaggaggaagtgttgagctgattcaccccttcctctgtacttggttcagacctggactgagctagagtcatgcaagtatgttgaataaaagaaaaaaaaagtgcaagaggcagacactgggcacctagtacggaggcccatgtgggtgccctgaagcagaggtgctgagag

SEQ ID NO: 42238 - DNA, 889 bp, Bovine  19866881464758
  misc_feature (1)..(1): n is a, c, g, or t
ntggtagacagtaaaaataattctctattttgagtgcacataagtcaattcagtcaagagatgctgctgagttgattagcagctatcacattatcaacaggatagacaaatgaggttcaccaggaacacaatcagcttatgtcagtgctgtgtgcaatagaaacccatcaataaaactgaagccttgggtttggcattctaagttctgtgtccgtctgtattcaatcttataaaaccaagagatgaaccaagcaaacacctttagcaagcagcagatggagctgctgtctaagtcacaaagccttaactatgagggtttcatttttcaacactaattatgtttggagacaaagatgtgcacttaaagacactgtcaaaactattttaacttataacaggctcttagaaagagaagctacaccagttgtagctctatccaaagagcagtccttgggttttactgcctttgaaatgacttcaatggcaatcaataactagcagctttgtctgctcaacactgacacctccaaaatgggaaactctagccaccaaagtcatgcttgagaaataaaaaatgtgtctcctgaggcacttaagcaaggatatatgacagtctaccctggtgtcttctatttgtttgccaaaacaggtcagctatggagcatcaaatggaacgttggataaggaaaaactcattggtctccgcctcccttataatctcaaagcaaatcctgcagatgaaatgctcggtgacaaagtgtaatggctgaagttgcccctaggagctagccaggattccacgatctaaaatctgatttaatatttgacagttttcaaggccaaaacccttcaggctatagagaagctgttcacgggagctatttcacgt

SEQ ID NO: 42239 - DNA, 944 bp, Bovine  19866880761471
  misc_feature (1)..(1): n is a, c, g, or t
nctgacaagactgagcaactgaacaacaacaaccaacaaaaatgtctaaaagatgctactaagtagttcagtctccctccatgagttatttaacttcagtctacttttctgtaagtgtaggttatcagttcagataacattcattgtctaggttaccaaggcagacctgcttttggacttgcttaaaagttgattaatatcattaagtctcctattaattatgtgatactggtagactctctgtgccacagtttcctcatttaaaaatagggaaaataatagtacctattgaatgcatccaatgtgcttagagtattcattaaaatgtgagtgtggataaagcatatgcccagaaagatgattttgccctcggtaacataacttctgattaaattctaggcctagagctcagactgttaacttccattccatgtcattcccacagtatctcacacaatggcctctctggtaatttttgcctctaaaatttatcaatactacttttaaattagttttaaaaatatataataaattcatcagtaattactaatgaaaaagtgcagctaatccttatagtttttagttgattttgaagtgatttaaaaatatctgtttaaatgtccttatttagcatcagtttggaaaaaatctgggactccttgctcataaggatttattctgattctttcagaagaattgctacattttagaatctccagctttatccggtttgggaaatagagaagacttgacaaactgattctccaaatagattctctaatacctttcagtgatattcagcatgaaatgggtttatgatgctgaataagaccagaaatcaacactcttaagccgaataccaagtagaggagaaattccctgggggaatcaccatggaaaccaaagaagctcaagttagcaatatcggaggaaaggaaaataca

SEQ ID NO: 42240 - DNA, 1238 bp, Bovine  19866881247433
  misc_feature (1)..(1): n is a, c, g, or t
nctgactcactggaaaagaccctgatgctgggaaatactgatggcagaattagaaggagatgacagaggatgagacggttggatggtatcactgactcgatggacatgagtttgagcaaactccgggtgttggtgatggacagggaaacctggtgcgttgcagtccatggggttacaaagagtagagcacgactgagtgactgaactgaacagatgagaaagctaaggccgagaagtttaagccatttgcccaaagtcacagttagtatacatggtaatggcagtcctattgcagaatctatactatactgactcaaaacatggtaaatattagagcatcatctttgaagaattttagaaaaatacattacttttcatattaaaataagcaaagatatactatggaacagaatgcaaaaagtaatgtgaatttttaatatgaaaaaagaaacttcaaagaatgttcttatatctggtttgcttctagctaaggcacttgatctcaggggagttatgtattcactgtcctatgccaatacaagtttttcagtggaaaacataaaaattattacattacataaagtttatcctttctgtgtattgaatttgttaatattacaacttcttataggcatatggttagaacaaactcttcaaaacttaaaaatatattgaaggaacataagacaaacataaacacagcggcagaggaagactgcattgtggaattcggggactgcactttctttaccagaatctctgtaatttcacagccatcatgggactttaaagggaatcatagcaccaagaagatcacaagaatccagattcccatgtgtggaggtgggtagaaaggtgcaatctaggtctccatgtcatcagttctgcatttgacaggtgatacaaaagttgcttttagcactttggattgtggaatctctagcttgcagaaaacatgtgtttcctctttgaagggggaagattttgtaagttagaaacacactctactgaaactatagacttgttctaaataacagaatatgccttttcccctaaatgtcttttattgtatgtttctgagctttcttccatcatagaaggtttgttaccattaagaaaatgtgaagaaagtctggttaaaagcaggtaatcagaattcttagagatttttaaaataattttgctaaatgtaatatactaaatatttacatttccagatataaatgaatattttatgt

SEQ ID NO: 42241 - DNA, 753 bp, Bovine  19866880437439
  misc_feature (1)..(1): n is a, c, g, or t
naatccagctgtcctggggaagggtattttcaggtactttttaagaacaacataagttttcctttaaaattatttaaccactctgaaaatctgctttcaaaatgtcttcctctcattttcatactaaactcagatcttgaaaatattttacataaagctttaaaatgattgaatttttttatcatgtatatttcataaacttatgcatgaatatattttagttctgtacttataatttaatagtaattatttaacctcaaaaattaaaggactaaatcagtgtaccaaattaatgaaatcataaaccaaaaactgccatatattagttatttgctaatctttaagtgaatctctttttccctacattcatctataaaaagaatctttaaaaaaaatgagttacctaattcaaactagaatcaaactatcttagaataacaaattaattattgaatattatttattgaatcactgatataaaaaagcatatataaaagtattaaaaattatgttctaaacagtatagaatgtgctacacaatcatttataagttaaattaacacctttaaccacatgttttccctaaatatagttgtaagagtaaaatttaattttaaaattgtaattgtatagtaggtgtataaatctttgtctagaaattttccaccaagttacatttaaaagctggaacttactccacatttgttttgtttcacttcccccactcttttaagatagcctcaatatatatcc

SEQ ID NO: 42242 - DNA, 2192 bp, Bovine  19866880567231
  misc_feature (1)..(1): n is a, c, g, or t
naaacagctctatagggaatatacagaaatgttcaggatatatgtaatgttaggaggagaaaagcaagttgagcaaaaagatgtatagtactctacttatatttaaaaataatagactatccattatatgtattacatatctaagccatatatatacaccacatatgcatatatgtacatatgtgatgtgtatatgtatatacttttattaatctgcaaaaacagtagcaaagccattacttctgagagataactattatttaaatattttacaactggcttgtaattattccttaattaaaaaaaaaaaaaggagggtggtggctggaagacaggacatgacaggcaagaaaggggcttttcctgcccaagcacacatgccacagcctctccttataactatggccaaggaacagatttctcccacctctagaatatcaacttgatcatctgtcaattgatcatctgtcattctaccaccatgtctgtctttcttcagttcttaaatccttgtctttttttaaaaaattaaaatgcaaataccaagcaatatcaaactcaaaggcttcattaaaacctcagaaatatcagttaacacctcagcaagaattatttgatttgatagctctgagtgtaagaacggaagctgaacagctgtactgttatctaaaaggggaaagggctaggttacaaacaaagaaggaagaacaccaacaggaaagacaatggaggaagggagaaagaggaagcagttatcaaggaataaaagaagagtcaaaaggccctgcttcagactgtattgttccaaaagcagaccacagtgtggattgagagcatcgactgagaccacctggattcaaaaaccagttcgaagattatagctatgtgaccatgggcaagttacctaacctctccgtgctcttattcatctgtaaaatgagaacactaatagtatctacctcacagagtttacagtttggatacgtaaagcatttagaacaactctggcacacagtaggttaatacactgtgtaaacgcctgatgctggcaatcaatgccactcgtgctttgcccatatactgctgatattcacttctacaccagaagattactcattctcaacacttgtaacaccctactgtaggctgctttctgactgcagaaatgtgttcagtctgtacttagggtaggccagaaatgctgaattaaagtcaatgatgcctagaaagtcgttgggtaaacacctgcagcctccctgctcttgacttgggataactctgacgcatattttatttggtctgtgagagatccccagtggtagtgagctccagatgcccacagtagtaaccgtatcttagcattcatcacattttaactattagtttcgaagtctgttccccacaagactgctaactgctctttaaggatgtctttgctattctgtctgccctggtggttcagatggtaaagcgtctgtctacaatgcgttagaccccgggttcgatccctgggttgggaagatcccctggagaaggaaatgtcaatctacttgaggactacttgcctggaaaatcccatggacagaggagcctggtaggctacagtccatggggtcgcaaagagttggacacgactgagcgacttcactttgccctattcatctgcctatgcaatattcaaaaaagttcccggtatgcagtagtttctcaataaatacttgtttcataaatgaatgaaataagtgcatcactgtagaaagtacataattatgaactattgccaaaggtaagtacttattcaaggccaagagactcctagatgatctttttcacactcaagaaaatttggttttcatttacttgagtttaagaagaggatattcaacatcttgataacccattgcactgcctcgcttctaaggcttatttgccacctagattacaatagcctctaactgactgccttgcttccaagctcatctctctccaattatcatgcagattgttacctctctgaccatgtctcttctttttgtcatatataagttccctgaagatttctcaaattaaagagttaattttcttaatctcccttaaacttttgggattctaacactatagtttttaatttatttttgagggaacatcggtttataatattaagtttcattatatttttacttctgcataaa

SEQ ID NO: 42243 - DNA, 1196 bp, Bovine  19866880586981
  misc_feature (1)..(1): n is a, c, g, or t
naatagtaggctatattcaataatatgcccttacagtctggttattatttcttgcttattaagggcagatccacgtgcgttgatagttaatcaagaggaaatagagataattgatgtttctttgtggcaaatttaaaagcctaactggggcatgtgtctgagtagatatatggccactagccatctaaggagacaggtcccttctgtgagtagggtcaagattttcattaggaagttttagaactcctctattaggagaaaagagtgtccagtgcaaaactactatgccatagagcttggttgagataatttaagccaggagcagttttaaagttgttacttgtccagtgtaactctttacaaaagagaaaaaaaataatacatctaatttgtttaccatagaatttgttgtaaaatatttcctaagtcatgaactagtgatctgttatagatgggttgttgactaaagactatttaatgaggatttcagtcaaaagtctttattttgaggatacttaattttaagggattcttttgggaaacaaatagcaggaccagttacctcttaatatacagtgatatagtatttaaattcatactagtctgactagctagacatgcatccttcatatccagaggaattcttagattattaaggagtgaaaaggtgatggtaaagtatgtccctattattttgttgcttagaagttttagcctagtataatctagtactgttaaatatgtagcatctaaatcttgtttgttaaatacatgaaggaaataaaaatccctgaacaatttttgaaaggtcaatagacttgattctgagtcttggtagcacttagattttttactacaaataacatgtgtcccaattgcataattaaatagcgcctttttcctgatttccctttggagaataagtctcaattagctatttgttcaggagacttacactgttctacaacatttatttacttttttccttcataaattaactgcttgttaagagctttttacgtctgtacttatatctattgggcgatgcttactccttgaaaggaaagctatgacacacctagacaatgtattaaaaagcagagacatcactttgccaagaaaggtccacacagtcaaagccatgatttttccagtacccatatacagatgtgagagtggaccgtagagacgtttca

SEQ ID NO: 42244 - DNA, 768 bp, Bovine  19866880630991
  misc_feature (1)..(1): n is a, c, g, or t
naatggaatttaaattgtttcctaagggtaactaaagctttgtaattctcaaggctttgcgaaaactacaaaactgagtgtccaaaatatctgttgaggagataatacctgaaaacccattcaaatataaataccaaaggaagaagttaattatcagttcatgtcatttattttgtattctgtttacttcctacttacttcacaagccagaagaatccaattcataaccaaatacattttaaaaagtataaaagtagcaaagaaccaaaatgggcatttaatattttttatttcaggaataactaaatataagcttacctgagaagttcaaaaaagcaccttcttccaaaagaaagggaaacattgaatattgtgcaaacaaaagcatatgttcaagccagaatacatataattgccttacttaaaatattcttagacttctcacaagatcataaaagtcatattatactaagtgtgattacaagttatcatgaaatgaaaacctcaacaataatggatctgaattttaccttaagtaaagcttcatgcatgcaaaatttgattttacactgataaagtgtaattagtgaaagaggcccaagaggtactgaaatctcactcaccaacaagaatactattgatataaactggctgtataaagtgactgagcaatgctccctgtacaccaagcacttcccatcttgtcaacttgtcacttgaggacatactgcttattctattaacaacatctgcaggacagtagacagt

SEQ ID NO: 42245 - DNA, 1648 bp, Bovine  19866880658624
  misc_feature (1)..(1): n is a, c, g, or t
nctactggctcaggtaaagactctgcctgcagtgtgggagacctgggttcaatccctggtttgggaagatccactagagcagggcatagcaacccattccagtactcttgcctaggaaatcccacggagagaggagcctggcgggctacagtcaaaggggtcacaaagagtcagacatgactgggcaacttaacaccacacagcaaattattgctgctatgaggattaaatgctttgagtgtgcttggtacacatcaactacagaattgcttctatgttaccaggtatagcatgttacatagaagagctagaactgggactcaaggcacccaaatctaggcttagcagatggtatgttggctattgtctttgttttctcacttgtaaaatgagaggtctgtataggtggatgattcctagagtattttcctactatcaaatgctaccttgcttttggactacatttattttcctcttccttaaaatcccatggacggaggagcctggaaggctgcagtctatggggtcgctgagagtcggacatgactgagcgacttcactttcacttttcactttcatgcattgggagaaggaaatggcaacccactccagtgttcttgcctggagaatcccagggacggaggaactgggtgggctgctgtctatggggtcacacagagttggacatgactgaagtgacttagtagtagtagtagtactgtcctactgtgatataacttgaaattgtttttctactttacaaaaggaaaatctgaggcacagggaaagcacaatgcctttttttaagtgcatcattgattcagaattaggaaatttcagcttaataaatggctagcttcctagccactgacatttggaagatgaaacatggagctcagcctctccaatactctgtttctcagaatagcttcagacagcatttgcacattgaaaatacttctttaataacctgtcaccaagctgtcctccattcatctatctaaatctatatcctagaatgtccaaacttgggataatgagcttcatatgtttttggcaccatgctgcctgtactcttcaaggacctttgaagactgcacgatggctgagaaccttctctgaagcacctaagtgacggcagtctgagggatgagatactgggtcttacaggccactgataagatgaatactcatatgcatttgaaatggaaaaaaaatcatgtctttttttcaaggctagtactttaagttcaaagtctttacggaaagaatataatgaacaccatggaatagggcagattaagtgaccctgacttagaaagaagcttcactttctgcactttcaagggaggcagtctctgggtcagtgctgtgaaagcactattttttctgtctaaagtcctgacagatggacatgagtgtgggatgagaaggcaaagtgatgaaaagcagacagataagaaaagtaaaggataaaaaataagaaaagaataacaaggacaagtgaatatgggaatgaaaaggtacatttagtcaggagagagagacctgtagtcctttgagatcataacttacaaagacctgtctgtatcttgcttcttatatggttacactacacaaacaccttccatataatttcaggaaaaag

SEQ ID NO: 42246 - DNA, 2390 bp, Bovine  19866880665430
  misc_feature (1)..(1): n is a, c, g, or t
nacccagggattgaacccaggtctcccacattgcaggtggattcttgaccagctgagccacaaggcaagcccaagaatactggagtgggtacctatcctttctccagcggatcttcctgacccaggaattgaaccagggtctcctgcattgcaggcggactctttaccaactgagctatcagggaagctggtattgttcaccaaaagaactacagtacacttttcttcatttcatttgtcaatgataaattcctgatactctataccataacatttgaaattgatatacaatatgaatgggtatataagaagtaaataggaagtgatacataaaatccatacaacagctaggattaggttcatattctcaatggcaagataattagatctctcaaactgtgcttctattagaaaaaattagtttttctagagatgacatgaaatttttgttcatttattcccccacataatctttaatatagccattcagttttaaaagtgtgactggtattcttttaatcaggtcttcaaagtaaagaaggaaaatgattaaaaatctacctaatttttagcaaaacagaaattccttcatgagctatgaaagctaagtttttataaacagcatctgatttactactctatgtgtgtgtgtgtgtgtgtgtgtgtgtgtgtgtgtgtttatatatatgtttaactttacatgtttaacattatggcatacaaaatttgccattattcagaaaggagcttagtcactcattcgtgtttgactctgtgaccccacggactgtaggctgccaggctcctttgtccatggagattttccgggcaggaatactggagtgggttgccatgccctcctccaggggatcttcccaaccccgggatcgaacccaggtttcctgcattgcaggcgggttctttaccatctgagccaccagggaagcccagtaacatttaaaggattgactaatgttaatacagggggcttcctagatggcactagtggtaaaaaaaaacctacctggcaaacgcaggtaatgcaatattcttgtctggagaatcccatggacagaggagcctggtgggctacactccatagggtcacacagagttggacatgattgaagctacttagcatacgtgcaatgttaatatagagtgttaacaaaactctaatttcaagagaaattataagtattcatgaagatactagattaaatttcatgtgattgtatttgccagaacaatatactgccaaaatactcaaatgaaatgccagataaaattataagggccttctttaatgaattttcattagaatttacaatcaaattttcagaacttaaactaaatactttttaaagtataataatacttaaagtagttcaaaatgatatgcagcgtttaaaagtcagttttaatatcaacatattcagcactcacctgatgtttgacaatctgtcctagagccagatttaaatccacttggcatttaccaaacagtttcagatagctgctacttcctggtgaagctttggtttgaagtctgtttgaaagttccagttcaatcaacccagtttcaaatcgtacagctctcattgagggagttgtggccgttacctgaataccctagtagtttatatatgtttggaggaaaaaaataatcttaaatcaacaatatacacccattcaaatgaaatatttcaatacgtgataaataaaataccaagttctaaaatatcttggatgcctattgaactgataaaactggcaacatcctttaatttctcatgtcagtaggaacttttttagctattaaattcatttcagtattttgtattcaaaatacagactcttcatgggttaaatacattaataacaagtagctatttggtatgaataatttttatttttaagaacacatatcataaatattagaagtaataagatttacattaaggcattattttaattggacaagtgtacaaaacatttcttatagagtaatttataatagcaataatcagaaaaaaatcaatgttcattagaaggaagtacttaaattgttacgactgtataatatagcacagccatttaagaagataaagtagatctaaatgttctgaagtggagaggtattcaaagtttttataaaggcagaaatatatacatatttaaatacaaacaggaaaaatcctaaaggatattcaattgttaaggtttcttctctaagagaatagggttatatttaatacttcaattttattttctatttggaatattcatgtatcatattagttttctataagcatacattacgtggaaaaatacttcttaaggaatcattattatattattatttatgttaccttaaactgcaagttcaa

SEQ ID NO: 42247 - DNA, 949 bp, Bovine  19866880672418
  misc_feature (1)..(1): n is a, c, g, or t
ncatgaagccagtttttttaatcacataggaaccactctttccagaaagaagacatttactctaaccaagtactgtctgaccaaacacaaatttccccttgatccttgctgacaaaccttgattttgctcagagtctcaatgtgccaagctcaaaacaacagattataaatgttcgttgttcactcatttcccagcccctccttaccagttataaccaataagacccaaaggtaaatttgctggagaggattctgaaaaatctttctctttccttactaactaaaagtaatggacgaataggattagttcacccttgtcttcttgctgtgaaaacggctcgtacgtttggagcaacatcagccatctcgtgacaatgaggtacggagcatgagaaagaaccagagcagagaacagccgagcagcaagcagaaagagcctgggtctgccaaaccacccaagcaacgcccgacagagagccccaccctaaagccactctcagcagggttccctgttactcacaactgaactaccacccgctagcaggaccgatgaaaatccagagcagagctctgaggtaccacctacagctccgtgatgtgtgactatgaataacaatctagtggcctatctccctcgttaccctgacagcaaagagtgaataagggtctcgagttttgtaaaacctacaatggcagtaaaaagaatgatgagatttcccaaggtcaccaaaggaagaaaaaaacaaaccagattcattcagtaaaagcctgttatgcatcaggtattttggcatactggctctttactttcaaaattaatcaaagtacctgtatcatacacatttttctcactcacctcttctcaagtgagacacacttcgtgttccaaagatggtaataaacttttcttcatctgttccccatttcagttctccagccggaacaaagc

SEQ ID NO: 42248 - DNA, 1491 bp, Bovine  19866880695859
  misc_feature (1)..(1): n is a, c, g, or t
ntcatggaaagagttgactcattggaaaagactctgatgctgggagggattgggggctggaggagaagggacgacagaggatgagatggctggatggcatcactgactcgatggacgtgagtctgagtgaactccgggtgttggtgatggacagggaggcctggcgtgctgcgattcatggggttgcaaagaatcggacacgactgagcgactgatctgatctgatctgaagcagcactaagaagtggagggaggcagatttctaatgacagcatttgagcatttcggttcagatgaacttgaactctcaccaagactttcagttaggaggaccaacaaattctctttttggtttaaatcagtttggcttaatccagtcgtttttaatctaaagagatctgactgatatatattgctatgtatatacttggctaatgtaacttgtattttcagccatttttaaggaacagatatgttttgaaggaaatttcatttgctatctttccaactgtttaatatctacttagaaaaataagggacagtaaatgtgacctgcctttgcacacctaccctctgactggccaggtccaatcaggcccggtggattcagccaatcagcactgagcaggatttgagtttcacttttctagcgctctggcagagcaacaaggccttccacttgtcaaatccagtgaaaccctttcagaatttaatcatactggatttctctggaccttctgatattgttaacaatccttcctttctaaaacattcttctcctttggcactttccccccttaggcctctaagacacaccttttttgcttatctctctctttttttttttttttttttaccccagccattctttccttttcatactcctcttctcatttcactgatcttcaggagtcatcttatccatttccatggctttgacctacaacctacatgccagtgatgttcaaacctttttctctgtcctgaattctagtcctttgtatccaatgcctatactgaaaaattctatctaggtattcatgaatagctccaggatgtcaaagacagaactcatcccctttgctccttaatttcactccacttcctatgcagccaagctacccttcatcctgcattccctgctttagtaaaggcaccacaattcataatgagtgcaaaacaggaaactgagtctcactaaaagctatgttcgatcaactcaacccccaaataaccctccatctcctctcccacacttgtttctgtttagtcactaagttgtgtctgactctttgcaaccccatgggctgcagtccaccaggctcctctgtccatgggatttcccaggcaagaatactagagtgggttaacattttctcctccaggggatcttcctgacccagggattgaacttgtgtcccctgtattagcacgctgactctttaccactgcaccacctgggaacacaacattaggctctcacttttcttg

SEQ ID NO: 42249 - DNA, 1088 bp, Bovine  19866880716175
  misc_feature (1)..(1): n is a, c, g, or t
ntgcaagtttttctttacgatgacctgaaatatgtttcccctgatgtttggttctcttcctgaaaaaatttagaataaatcgaatacctcttccatataacactttgatgttcatctccttttttaataattctatgcccagctgacattaaaattctcatcttctgttcctccttttctttacagccttctagtataaaactctatggtttccagacccttccttatcttgtcttcttttcaacatgcttgattttcctatagctcttggtaattgaatatagacgtattgtaattataccaatgcaagtatctactgattaatcagggcacgataacattttagcctagagaccagtgtcacaaatgacacacagacatgtcttggttacctttatcaccaacccaaacttgcttctcttctcaaagtaaagcttgctgacaacaatcagatctcaaactattattttcaaaaaatgactagcaaaaatgcactgcggttcctttacacatggaaatcaatatgtagaagaacccattgtgttcctggcatggtaccaggtgctaagtgaatgctagtgaactaacagagatagtcctgtaaccaaaaagcttcaaattttccagtaagaaaaacaaattaaaagaaaacaggtaacaaataaatataaatagtataaaagaaacaaacaggagaaagaaatggattaaaaatggtgggtcccacttagatagggtgccggaggaaggtttctctgtggtactgacatgaagttgagataaagaggagaaacaggctgtcataccaagtgagaggggcagccttccaggaagaggaaaccaactgtgcaacagcgttagggaggaagaccttggttaagttttaaaaccaaatggaggccagagggcaggggcaagtgtagaacaaaacaagactggaaagcgagcaaaggcctggttactaagggtcttctaagtcatgggaggttttgagcaggatagaatattgaagtggcttttgattgaaaaaatattcaggctgctacaaatccagccaggaggcaattattggtggcccaggcaagaga

SEQ ID NO: 42250 - DNA, 1047 bp, Bovine  19866880780442
  misc_feature (1)..(1): n is a, c, g, or t
ntgtcccaccgctttgtgtgattgaccttaagcttcaaaaagcaaagtgtataatctttgcttcgccctactttctcagataagcgcgctcttgtgtcccatttagtgtggatttaagacaagagaaaaaaaaataatcaagaaaatgagttgggttctaaaaaccagactggcaaaagggaatacggacagtgtcttaaaaccttaaggaggagggaaagcgagctggccggggctttaatcccaaaggacctaccttccctccatttcctgggccatttccactccaagctaatcttcagcaacaactgaaccacgttgggatgcgtcgctcatgtaaaatcagaaacctttcacagccactgagttctccttttaattaggccggtccagccgagttaggagcggacactgaccagctcagccttgcactatcctgccgggtcgaggtcgccccagaggcttcacaccctagctgtatgcagctcgcgggcagcagggggcgctgcggaacctccatcccttcccgggagaaccccttccccggcccaagcggttagtaccgcccgcaaagactggacccaaggtctctacctatctgtgcgctcttcctaaaaagacagtaaaccctgctacacgtccaaggtacgtgacaaaagaaacagagaacatgcaccctataaaactaaccactctattcttcatcctctctgcgtctcagagaggctgtttccaagatttggaaatgaagaaaagttgttcttgctcatgcattaaagcgcggacctctaccttcctttaaaaaaggaacagctactgacccagagctgcctgggaactccaaccaagtagctctaagtcggtacccgcggcgccccgcgctcactctcccccgggagacccgccaggcttcggctccaggctagccccagctgtgaatggagggtaggggaaaacggagtccgggcagaccttccacccacctctgtaccatacaccgtccgctcccttctccccactcccgacggtcgggagcgtcggaaggga

SEQ ID NO: 42251 - DNA, 2245 bp, Bovine  19866880811591
  misc_feature (1)..(1): n is a, c, g, or t
nttgtatgttagaaaatacactttacaggtaggtttttactttcagaagggatggataaatagcaaatttaacaaattcattatagtgggataccgtttgagttaatgaaaagttgaaaacaaaatcagaattaatctcggaaaactgatgaagttaagacagttttggggcttgcttgacatttaagtcccagtcatttttccacctagctttccagatttccttttcttcagtgaagtagctgcttgcatttaggggacatgttgtaatgatgcacactagagtcgtctcattgtggtgggatgcttcctttctagaggactgcaaccctcagttaacagcagacacataaatcccatctgactccagtccatatgctcatgagctatattagggctcttgtaatttttattattctcaatctctgttgttttttgtgaaggaatctctgtggttaaatttgtataatgtaagtactcatatgatgagtttctgctgtctcaatttttagctttgtgtgtaggcaatataaagtttgaggttatgagaagcatgattattcctttttagttgcagcttttgaagagcttgcgattagattttctagggcttggctagagtgacacagttattttctctgcttgtgtaccagggaggctgtggatctacctggtttcactcttcagatcactgaatttgctaagtatcttgaaatgtatgctatgcacactgttctatatttatgggtacaagttgtaatactgaaaaaataaatcctgggttttgtgaaaattactagagagtaaaatgaaaaagtatcccactgtttctgtaagaagagttcactcttcaaaagtaagtatggaggtagtatgatgaaattgaatgctaaactttatgatttagtatacatttagaagaagactgttgaatttgtatgtgctatattatctaatgatttagatgttaattttgatatggaaggaagatatagtggtatatgaccaagataaaggttgttaaattaaagcaagtaaagtgggaaattgtttgatggcacagaaacactcattccagaatgagttcaagatgtgtgctttaaatttatttcgatttatttcaagttgatcaactaaatattcttggaaatacgtaatataaagttgtgaaaatgacaaaagatttttttatttaatgtttctgaaaggttatactttgttttacagtatataaggtgatatttctcaatcagttttatagtattattattataagttggttgaattcgaagtctaattttaaacttatcattgaaaatgtagaatatgattattctattccagtgaacattgtttttcattgtatttaattagattttgttttaaattgatttctcttattcaaaacaaaatgccaaacatttttttctttcttaaaccaatttgctgatcaaaaatttttcagtgcctactttttaaatagtctaatatagaaagcagttatggaacaatttattgtaaatgtgaaagatgttttcccttttcaagatgctacacttgattgctttttagttttcttttttcttttttgcttttacctattaccatcgttaattaaaataccaaacattttatattctggagatgtacttagtttgccttcttccttcctttgtgtagaccaccaagattaatgggagaaggttttgtggtgatgcagtcaaatgatgttgacatctactattacatggatgagccaggtattattttttaaaatatgttttatagctatagttctgtttctcctatgaaatgctggtatgtactattatttaagtatctttacttaggatataaataagcatcagtaatggtaaatgtgcatgtaagaatgcctacctaaaaaatatctgtgtcatttgtccaaagctgaatattaatacttcagtatttcatatcaaaaaagaacagtatagaaatcattccttcagattccatttttgcaagtacacttcagaaattgtgaatacaaatgaccgtgagtgaaagccattagagaatgtggtgatagttaaagtagttcatgctgacttaggggaaaaaaaatcacactaagttaaatttgaggcttaaagtttaaggattgaagtctagctatttatagtacttcacaggtggtctcagttttataaagtagctaaataatggacttctagtcatattttcctaatgctctttttcatac

SEQ ID NO: 42252 - DNA, 2893 bp, Bovine  19866880824463
  misc_feature (1)..(1): n is a, c, g, or t
ntttttaattgcagttgatttcccatgtaatgaaaaatcatgacaaatgcatcctttaatttcagaactcctctcaaaccctaaaagacatattgtggttcaatattctaggaagaataagtgaatacaactagagattctgacaatatgcttcttgacaagagttttttcacactggttcaacatagcaaaacacatctccaaagtgggctaaaagctctgttactcacaacaaaacctattaactgatagagttgtccatttttcatttgtgagccttagaattaaatcttgattagtctaaattaatcattggcttatacctgccttggcagtgattgatttaatagttgtcaagggacccagttcctgaagaaccaatgcaggagacacctagaaaatgtctccttctctaatagatatatgggaagagatggccaccttatccatcagactttgacatatctgcacatgatgcctgaggcttcatttacaaccaagaagggagttggcctccaagtaaaagctgacattctagaatagtgtaatggaaagaacttgagtttctgataagatgattcatacactgataacttctcttaactatggactccttgttatgtaagataatacatacctttaatgcttgagcagggtgagatgagctttctactaattctagctgaaagcaacctaagtgaaacagaaatttcttgcttatttaatactgtgccagctggggaacggtcgttaaatcaccaaaatgtgcaagcattaccctctaagtcttgaatcatctagagatgattataatgattataaaatagactgagtgtaatacatttctcactagtaacctaattaggaagagtcattccttcaatatcaaaagggagttttgtgtcactatcagatttgtctgttggtgaccttttttaaaaaaagatttcccacagaggaatgtgactcaattaaaataattccttttggcatatataatattcaataatgattacaggcttgtacttttatgtttattcttcattccattcagagtatcttacttgagatgccagagtagtaggtttacatttgaaaagtaatatggtgacaatgtatgttttatcaatcacccattctaaaggaaatcaaccctgaatattcattggaaggactgatgctgaagctgaagctccaatactttggccacctgatgcgaaaggtccaatcattggaaaataccatgatgctgagaaccatcgaaggcaaaagaagggagtggcagaggacaagatggttagataggatcactgactcaatggacgtgaatttgagcaagctctgggagatagtgaaggatggggaagcctggtgttctgtagtctatggggtcgtaaagagtcaggcatgacttaacagactgaacaataacaacacatgcatagcaagtcacaagttgagctttcttaaaacactagtctagaaatgccttattttagattaaggactgaattactcatcttcctcatccagttttacataattaagtcatgttggaatggacgtggtaaccttggccaagtagcttgggggttaatagaagcaggaagacttttagtttcactgagaggaatttgtgcaccaggagatggggtaagtcctggcaaaacttagagactaaaactttaaacgtttgccatagattctcttgaccccaaagacttttctgtggtagttactgcagaaaagttcacgtgactctctgcacgtgaagcatttgagctctctgtgagtttttttaaagttgtttttcatagatacactttttcctccagtgttttttatagctgctcacatgctgtgtccattgtgtacatccaaacaggaactgttgcttcaattcctcacagtttgaagcattttttatgttgttagttccctgcagtgatttgtttctaattctcacgaatatccattttcaggctcatcttttgaagcactcctgtattccacaaaagacagagtgagacatggggacaactgaggccctggacccatacatatcacccaggaacagcactgccaaccaacgtgggcagctttcaccaaggatgcaaattcatagagtcaaggaatttcagcactagaaggggactctcaggccaggtttgattctgtgcatgccacagactaagtggaacctaacatccagtgagatcacaaaaagattaatagaacatcactatgacaacctaaggcagagcacaggctaaatgctagactctgataatgtggtgggccagacttttcttttcccttctcctttagtccttattccctatcacccactcctatataaggacagtgctctgggtaaggcagaatagagagacaaaggctttactgcaaaataatgcatcagttatgttgtgaaaggatagcagtattaagaaagggaagatttgtttgtcaaacagcctaaagtgatagatgatatttactattgcagttccccacctcaccttaaataaaagtccctcagctgtgtccagctctttgcaacacagtggactggagcctgccaggctcctctagccatggaattctccaggccagaatactggagtgggtagccattcccttctccaggggatcttcccaacccagggatcgaacccaggtctcccacattgttcatttcagttcagttcagtcgctcagtcctgtctgactctttgccacctaatggactgtggcaagccaggcctccctgtccatcaccaactcccagagcttgctcaaactcatatacatcacgttggtgatgccatccaatcacctcatcccctgtcaacccttttctcctgtcttcattcttttccagcatcagggt

SEQ ID NO: 42253 - DNA, 1911 bp, Bovine  19866880905079
  misc_feature (1)..(1): n is a, c, g, or t
ntgatgattggttttgacttctggagctgaatagctcatttatggacagatgaccaaggactttttcttatagcttatagcctgtagccaggtatacccatgcagaccactgggcagttctcgatactccccacccccaacagaaattatgggtcattgtggatgctagtcacaaaattcctttgccttttattgccatatagcataatggcactcacccttgtcgaaccagtttcttgtatctttccagttaccatcatcacgcctttggtcactcctcatttggtgagagctctacactaacagcgtaaaatggaactggattctgaatcagccttccaatgatacggtagcaaccagtctcaaaacacaaagtaggaaagatacttctggtagcatttgccattttgatagcattatgatccttattttataaaattctcaaacttaggattcagctggtcaaactgttattttttaaccttaaaatatgtcctaatactgcaacctctgctttacacataggcctatttccataattagatcatgagttaaattttcattatatcagttatttataaattatataggctaaagtgtgactaatgaccctaattattaaatgaagaaatatgttggcaatcaagtcatttaacagtgcccaagtaggcaatcatttggtagaaaagtcttaactagcttaacaactatataaaataacacatcacatatttttgcaaaatgacttaagtgttaaaaatcaaggttagaactcagagtgttctcttttgtcatgaatacatttcaatttttacagcagaaacaagagactgcttttattatactatttatggtaactaattatctctttataaaaggaggtttcatatataacctatttttggaaaagcagttaagaagctattttggctttcagtgtccagagattttgctccttaattttataccatagttatatattgtaatcagagtaagttttttgtacatgggttttattcagaggagttactgtaattcagagaggcagtcaccaatatgaatatagctctagattggtcaattatttcttatactagttccaggaattgattggaatagaggcttgtggtggcagggctggctggcgcaacttggggacagtaacttcatgaatctaggggaaaattttttggtatgtgcacatttgctgttacttggttttgtagccaaacattgcttcttggatttcttatcttatcagtgaaaccaaagatattccagatttcattagtgctgtcagatctatgattatagatcattctagtaatctcaatcctggtattagcctcagctaaataaattcttcttgaatgtgttattgtcagtcttaggagaagttacattagagttagtaattaaggtattagtccctgcttaaccaatttagggaaaaggaacttggctttctgagtattaagttgattgttcatagaatcttgactcaactgaaattttgacatgtaaatataagttgaaattttaactggagaattgaaatactcttttacactactatacaaattctccctctttattaaaaaatacagtgttatataactggctttattaacagacatagtagttatataaaaatttttatgagcaatatcatgtaatcaacggcagagacagtgaaacaaaagttcctataaggcatcatcaataaaataagcaaacaaaagaaccaaaagtgtttatcaatgtttcctggtgaaggacacaatgtaatacctgtaaacagagtcaggccttctaggttatttataaagcctgtttgggattgtgataaagatacttttcaatttctggatcctaaatctctcaaggacttgtccttttaaatcatataca

SEQ ID NO: 42254 - DNA, 877 bp, Bovine  19866880919959
  misc_feature (1)..(1): n is a, c, g, or t
nctaaaatattgcagaattggtaagatcttaataaaagcatattattcctaagagaaaaagctttatgtgcataactctctggtggaactgttgtttttttttgaatgaaaatgctcacgttatccaataatgtgacatatctcttctaggctaatagagaccctgacgctagaattgatgaagcacaggttgaacaagatgctcaggtaagtgggacttaggtgatgactttactatgacagaaatgaaaagaaaaccatgctaatggaaaaccatgacatcttataatagcatctaaaagtaacctaatgggttatttacaaatcacaagacacatgtaagtcaatgtcgctcattttgatctggacaacaagatattttatcccaaagctgaaacagaaaaaaataaattgcatataaatattgaattccacctggatgtgttacttttctttagattatggaacacaccccaaatagagaattttacaggaaaaccaggtgttatgaatgctactggcaatgtggcagtcagtttcttggcaggaaaagacaaagaaaaaataaagtattttagtaatacatggtgttttattacataagaaatgacacattattgtagtatttgaagattccatctccttttccttgatagaattataaatagaattgtccttttgtcagttgctcttcagcaactccctaatgacatttttgtagctaagttgcttttaaatcccattatagtctgaatgtggtttgtaaagtagtcaaatgtaggaaataagtgttgcgaaatttgaaacatgagacctgaaaactggaaaatgttaacaaaggaattaccttgggttcccagaggcagataccctagtc

SEQ ID NO: 42255 - DNA, 1307 bp, Bovine  19866880955804
  misc_feature (1)..(1): n is a, c, g, or t
ntctcctctgacctgggattctccagcaagaatgctggagtggattggcatttcctcttccaggtgatctcccatcccagggactgaacccatgtctcccacactggcaggcaaattctttaccactgagccacccagggatcccttattacctatattaacccctgttaaacagtataaggagaacattttattctcattttatggttcaggaaactgaggctgatatgattaggcaaatttcactatgatgtgaaaatggaagggaaggataggagaaatgaaaggaatgaaggtgaggacaggcagtagaagatgagagaaggcaagaaaggggagatggggagagaattacaggaagctaagagcagcctggggaaatggagaagcacaagggaacatgggttaagttccccataactcctgagccttcttcctgctcagcacccacccacccacaatatgagacaagacctcatcttaacatctccttgatttcctgtcccctgaagccttcactaattttaccaaaatacatgctttcttaaaatgctatcgatttgtacatttgaaattatttccaaatgcagagttaaaaataatagacaactttagtcaagaagagcattgtttgtaaggaattcccaaccccctggaacttgtgagttcctgtaattataggcagagctggccttccttgccttctgtccctgcctcaggtggtcccctggttatcacagaactaactgtcattccacctggacagaacgttcctgtactgcactcagggctcctgagctttctctccacattatcaccctcccctattaaaaccagcacctgtgcatttcaaacccagaagactctcctctctcacagaagactaatgtaaaccggttctttttattctgggtttttaaagttaattttttctggactatagctgctttacaatgttgtgttagcttccactgcatagcaaaatgaatcaacgatacatatatatatatccatgtgacccagaaatcccagagaaaaccataattcaaaaagacaacatgcatcccagtgttcatagcagcactatttacaatagccagaaagaaagaaagtgcagtagctcagtcatgttcgactctttgcgaccccgtggactgtagcccactaggctcctctgtccataggattctccaggcaagaatacaggagtgggtttccatttccttttccaggggatcttcccaacccagggatcaaaccccagtctcccgcattgcaggcagatgctttatcctctgagccaccag

SEQ ID NO: 42256 - DNA, 1555 bp, Bovine  19866881017308
  misc_feature (1)..(1): n is a, c, g, or t
ntggcatactatctaggatattttttttcccttagctgacctaataacaagcattttcaaacaactattaatgattccattttagcagtaatactatttaagttgctccattttggcttcccagatggtccagtgctaaagaacccacctgccaatgcaggagaagcaggttcaactcctggatcgggaaaattccctgaaggagaaaatggcaacccactccagtattctggagaaacactggaaaaatccaatggacagaggaggactggcaggctatagttccatggggttgcaaagagtcagacatgactgaccacacatgcacaccaatcaatttagaccagtgtttaaagaaattcaagcacctgtgaataaataaacagcctttaaggtgtacacatttatgctaaaatggtcttggtactgaaatagttctttcactaaacaaaaaatgtagagcccagaaactaattacttctttttctaagtgaaaactgtatccacaaaattaaaaggttctgctgctgctgctgctaagtcacttcagtcgtgtccgactctgtgcgaccccatagacagcagcccaccaggctcccccgtcccagggattctccaggcaagaacgctgggagtgggttgccatttcccttctctgatgcatgaaagtgaaaagtgaaagcgaagtcgctcagtcatgtccgactcttagctattacccatcaaatattaactatagcagaatttacttactgtgctaacattgacctttatgacaggaataagtgatctccatgaagatgtggggtcttgagattctgtttttactttaactctgaaatgaaaaaacaaaaattgacatatatgagaaaatgagaataagtacctaagaatactgttgacttcctcacaatacacatcattaatattagctgtacctttacaaatatagctaaagactattgagtaacaaaaggactatctaatggaaaactaatatccctaaaatgtctcataaaatgtactcttaccacatatcaatttttacataagaagttgtaacagaaaagaatatttttagaatgacaaacttcaatgacaaaagtctaaattttaatttgctgtcattatatctaccattatgtccatgacacaaaaatgtaacattttacaaaagagcaaaaattataattaaaacaaaaatgatcaaggtacatgtcatttagatgttttaagtgcttcaagtacttctaacagttcagctgatccttttccttccctactcccaccacttggtgacaaaataattttcttttaataaaatgaaaaaggatagaccaagagtaaaaaaaaaaaaaggaaattcagttcagttcagttcagtcagtcatgtccaactctttgtgaccccatggaccacagcacgccaggcctccctgtccatcaccaactcctggagtttactcaaactcatgtccactgagtcagtgatgccatccaaccatctcatcctctggcatccccttctcctcctgccttcaatctttcccagaat

SEQ ID NO: 42257 - DNA, 2037 bp, Bovine  19866881100670
  misc_feature (1)..(1): n is a, c, g, or t
nttgtttccctccttgagggcaagaatcttcctttattgcttttagtacttcttaaatttaattaaatatttaagtaactataaagagtatgtactgctgttcttagttgctctattatgttcgagtctttgcgaccccatggactgtagcctatcaggctcctcttctcctggggattctccaaggcaagaatactggagtgggttgtcatgccctcctccaatggatcttcccaacccagggactgaacacagggtctcctgcattggaggcgggtttttaccttctaagccaccagagaaaaatgtttgttattactctgcagaggactctggataagctgaaagtattttctatattgtaggtacatgatatcatcattatactttgcattttttcatttatctccttttggtactttgaaaattaaaccagacacattaaatggaaattttaaactttttaaattatatatctcacatttgacatattttcctttccacaagaacactgagctactgcttatgactctctcaactgcaatattatcaaaggtaaatgggacgatttcaactacatggtaaacttaaacctttgagatatttttaaccatcctttgaaaaataggatttactaaaactttacatgcaccccttagacagttaagtaaaataacatgatagctcaatacctgttgggagactattgtgtcctgattttgtgacaggagactcctgtaccacacttcctcggttacccacagcatttgacatccagttatagaaactcacagatgatggctcagataacaaggggtgttcagataacatatcagaggccattgtgtttcctgaaaataaagttttactgagtatagcattacttatgtactaaggagcagaaaatgtgatttatgtaatcatttttaaaaactcaggttaaattatcttccttttgcatatgtctttaaaactcactacatactctttgcatttggatattaaggcattaataaataatttacttagactataatgagaatattcactcttggctggtctagacagcattacacaccatgcctaggttgagagtaacagcaaatgctacaatttaaaaatgcaaactaagagacacccaacaaattaaacagaagagcttcccaaaaaacattctcagagataagttgtcatacaaaagactaggtatgcatccaaaatatatatctgaataaacataagtcccatttttttttgttttgtttaaatctcccacagaagtaaactgataattgtcagaactaaggatatacctgttctcgtcagggagctacttttcactgctgcactacttctctgaggggtcccttccagaaggttgtgcaagcttggaaaacttccagtcaggtagctgagtaggctttccttccttggactctccttaactggtactcctgcacgtcccacatgcactggagaatctgtggcagtgtcaccactggtatagctcagagaatggtacggatgaatgccctacagagagaacaacatggggctctttcttatgcacataaaaaagactatggataaccacaatgactcactgtttttattactatattattcacattaatacaacagtgtctaaacagtttgtgtctactagaattgcagtgaatctcaaatgtatgtaataatgttttaaaactctacagtacaatgcaaaggacaatatttagtatcattcacttaattttaacaatgattaacctccctttgcgggagaaggcaatggcaccccactccagtactcttgcctggaaaatcccacggatggaggagcctggtgggctgcagtccatggggtcgctaagagttggacacgactgagcgacttcactttcacttttcactttcctgctgggaaaaaaggaaaatggcaacccactccagtgttcttgcctggagaatcccagggacgggggagcctggtgggctgctgtctatggggtcacacagagtcggacacgactgaag

SEQ ID NO: 42258 - DNA, 1527 bp, Bovine  19866881118922
  misc_feature (1)..(1): n is a, c, g, or t
ntagctgcttattgataggggaaatagggaatgtgacacgtggcagttagcagcctactactgattctattactgctatagtcagagaaaccagctgatgtgtcagacatgttaaaaagtgaaagtttgccacagtgtacatttgctgtagctttctccccaagcttctataatgatgcttgttacacaataataaggacaaggcaggggcttaggaattcaattttctacagggtcctgtcaattcagccatacactgacctattctctaatggaaatagccggagaaatacaaatatcaagactctgagaacatcaaaaggccttgctggaaaagcccccacacagaaaaaaagtgtgggtgtgaatccttccactctggaagggtaaaagcctgagctgatgatgctggaagacacactcaaagtctttaaagaagtgaaacaagtataacagagttgacacacagattactaaatagcctttcccttagaactaatgctaaatttgtggttttgatatgaaaggtacagagagacattacgcagtttttagtaaaaaagaataaaataaaataaggaaaagagcatgatcatttgtctctaatcttttctaaaagaaaaagttatttgcctataatctggttttttctttactttttttcctccttaggaactgtaatgcttgtttttacattttaggaagatgtttcatattcttcagaatattgtctaatgcatatctaaaaagtactgaaccatttttctctgttctttttaagtacaactgtgttccttagaatgtataacctggacttccctggttgtccagtggttaagactctgtacttccagtaagggaggcactggtttattccattatcagggaactaagatgccacatgccctgtggtgtgaccaacaaaaaaaagtaaaaattatgctcacagaatgtataacctttcctgcctacctaccctcaacttaatcttaaatttaaatatctacattttaaccatgttgtcaaaactcagtttaaagtcatgtttcttcttcaaaattgtttatatccacctttctcaaggcagtaatcatcttttacctggcattatacttgtctacctatgaattttctactgcacgtttcctttgagaaagaatataaatgataagagtgtggagtttggagtaagaatattctgatttcaaatccttgttctgtctcaaactggaagtaagggctaaataacttagaacaaattatttaacttctctgacgttcaattttctacctacaaaatggtaccatcacttcacaggtaaggcttaaacgaaatcatgtgtctatgcatactttttttctttctatatacctgacagtatcataggagttagagaagtgtctacagaatagacaaaaataaataaggtagtaaaaatggggaagttgtaagacatggcttggaaaagtatttcctcaaattttcccagtttaaattagaagtatatatctataccatcattcagg

SEQ ID NO: 42259 - DNA, 2303 bp, Bovine  19866881143794
  misc_feature (1)..(1): n is a, c, g, or t
nctatatgtaaaaaatacccatccaatttctttatataaaaagagaacttaatccatgacatacgggtgaagaaaactcccttgatttccaattcagaatctgttttgatgttgcaaaaaagtgaaatatctggttatttcattttatcttatggaaacactaagagaattttttttaagaaatcactttgaagtggcattaaaaatattactatttcattgtgaacttgaagtatgggcattgttatctcaagaggtaaacatttttcttgtaaatgttatttctgatacccatggagttttttctttagaataccattgtcacagttttgaagcacactgagaagttgggatctgatttagaaaaagtatctttgctataatggaaaatgtgatagtggttattaacctgagtaagtagtttagaattttattttagctaaatattttcaataacgtggaaaattggaggcccaagtttgtgcattttgctgtagtattattacatactctccagatccagggaaaatctagtttgtaagttttctgtagtaccagtttttatatgggtttggagtgaacctctgtctgctgtttgttccaagtatatggtcttgagctgaagtttttgtgctgtctgtcttctgaaaaataagctcaatgtgtgcacgaaccagcagtaacagtagcctttcatttcaatctgtagttaatgaattttagtagaagtcttttagatggtccattcaaaatagaatgcacagaaaagttatgacagttttagttaccagtagctgtttttcttaagtattggaaaagagaaaatacagcctccaatcagcgatttgttatttttgtgtattaagtgttcctgttctttttttggccataccatgcagcttatgggatcttaggttccccaaccagggactgaaccccaagcctttggcagtgagagcacagggtcttaaccactggaccactggggaattccctgtttttgaatattaaggaactttatgtgatagtttctgaagctagtggacttgcgttctgaggagtcctaacataacagtagatgtgtacacgttcagggaaggtgctcttctgtttgtctgggtgtttctaccaaaatgggcaagtctcacacggctctgtgtgaatcatggatgttatagaatacagagggaatacctagattaagattacaggcagatagtctgaggttggcagattacatagggtcatggtgtacattgtttgcttgaatatattgaaatgaaaactcctaggagatctgtataattcgtggggatgaagaaggttgtggcttaacggcgcaggctgccaaaacttcggcagaaaggtggtcatagcagaaagggggtgacagccgtgcagcagcccctgtgccgcgtgcctttctgtgtagacttcagaactctgaggagaactcaggccaccgtctgtggagatgctctgtgaaatcagagcagcttgtgaatgagcagctctttgacctgcgttactttcatacttgtgtttaagaagagccataggcatggggcacctttgattttaattacttaatccttttcacatgagaatagcatgtgaccattatatttattttcttagtgaaatccattcgcagtatacctgcctaccttgcagaaaccctctactatgctatgaaggtaagtgcatgccttgaatcttctatctaaattatctctgtaatatgttctagagaacagaccttgaggtttgttttcccctccttaaaacaggtggttgaattctactacttgctttactttattgactcacccaactcaggagagtttgatgctataattgatatttttaaacaatgtgtgtctctctttttctttttcaaagggagctggaacagatgatcataccctcatcagagttgtggtttccagaagtgagattgatctgtataacatcaggaaggagtttaggaagaattttggcacctctctttattccatgattaaggtagtaaaacctttctttaaattatgtttggaaatcctcagcaggacaataaataacgtggaagatatggatgggagaacccgattcttctgtcaactttaaaattctagtgttgtgattagagctctgaggtacagaatttggcatagtgtctcctgaagtgcagatgctggctcccgggtgaagggttggctcctggtgaggctgaggctccaggtgagcttaggagcgttatttagtagtggtgacagatgactcactaaatccagtcttgtcca

SEQ ID NO: 42260 - DNA, 1175 bp, Bovine  19866881189975
  misc_feature (1)..(1): n is a, c, g, or t
natattcttcctgtttaatcaacaaatctaaaaatttattcttttcaactatttactcttgttcttgtccacccacaacatggtgctccacatgttccgcacagttttatgacaaagagaaatttttcatgagccatttttgtatccccacccccttaaagaaagagggaggaaaaactgtttcatacagaaggcgttagttgtatgaattagaactgccacctaagtgtgggctaatgtaaccaagagggatttcacctaaatccattcagtcagtttatgggggtttaaagaaattccaaagagtcatcagaagaggaaaaataaaggtaatgctttttgccacacaggtagaatctttgaaagtatgtgtaatatgtaaaacattttgacacccccatcatatttttccagaattaaaagtataaattgcttctcttgttctagaacttcctatctgcttctctaatcactactcacagtaacctcaactcctgccacaatgtacaagatacaactcttgtcttgcattgcactaactcttgcactcgttgcaaacggtgcacctacttcaagctctacggggaacacaatgaaagaagtgaagtcattgctgctggatttacagttgcttttggagaaagttaaagtaagtttattttctttcttactcaaattattacagttaatttttctaactagagtctgctttttaaataacaacctgttatgctttctcagaatcctgagaacctcaagctctccaggatgcatacatttgacttttacgtgcccaaggttaacgtaagtacaactttctatgttcaattttaagaaaactgaaagtaatgtgaaaatttacacactaactggattaatagcacttcatctgaggagaagaaatagtaacttcagtatctttttaaaaagaatctcaagtttgataatgggtttctgaaaaatggctttgcagttttttaaaaatatatacttatgtatattttggggtagaggaaatgggaaaaaaggaataatattcgcactttattgctgcatatttaatttaaatatttaatttaatatttaaaaagattgtgttgacttacttttttatttaaaaatataaaactctggagatacttgagcatatcactttaccattcaaattagcaaaa

SEQ ID NO: 42261 - DNA, 1662 bp, Bovine  19866881270808
  misc_feature (1)..(1): n is a, c, g, or t
ntgtccttaaatatttattgagtacctcctttttgccagtcctgtactagtgagaagagacagaaaataaacctttaagagaagaaataatattaactactaaaaatatgaagaaagtgaaataggctaatgtgatagtgagtgactaacaagagagggaagagtttgagttggcagagaaggatcagtcacttcaacaaggtaagccttgagcagaaagctaattggtgagaaggaagcagatatgtcaagatctaggagaagactgtttgtagaacacagatcagcaaaaacaaaagcctatttctgcctatttttaaacatgaggagtggaaaggaggctcagatatatcaggggtgttggaattaccagaccaggaatttaaaacaactatgactgatttgctttgggatctaatgggaaaagtagacaacatgcaagaacagatgggtaatgtatgcaaagagagagaaattcttaaaaaaaaaaaaaaaaaaagaatcaaaaagaaatgccagagatcaaaaacagtgtgacagaaatgaaagcctttgatgcgctcattagtggactggacatggctgaagaaatcctttctgagcttaaggctatatcaatagaaacttccaaaactgaaaaggaaagaggaaaaaaaattgaaaacaagcagaacagaatatccaagaactgtgggacaactgcaaagtgtacctacccatagtgtaattggaataccaaaagcagaagagaaacaggaacagaagaaatatctgaagcaatcatgactgagaatttccccaaattaatgtcagacatcaaaccacagatccagggagttaacaagatggatggccaaaaaaaaaaaaaaaagaagaaggaatgatagaattctttaaaagaatggtaaacaaaaagtccatatctgatatatttgttttaaaaagttttatatcctgaagcaaaatccacttatttcaaaagtgatagtctctttttctgtcaaaatgtaaaattgcacaaacaagggaaaaaagcatcttacttcttttcggctcaatcagggaaagacatacaaagtccagtcttaatcaaagtaacagtcttactatatttatattttgtggtcaatacaagaaacataatggggactctgaaccagaaccaggggtgtgagtgattcacttgttcctaccaagaatgcagtgcattgatcagactgatggtgactatgggtggcaggcagcaagtgtgcctgaggcagggcacagaggaggcagaggtcccccaggcactgagaaaaccagattcaatcagattgaagcttcagcaggaggtgagcccactctctgggaaatgccttctgccctaggggcatcaaaggagaggatgaaagtggagaacctgagttacacctgagcgggctaaagagctggctaaactaacgcaaccccatcaaagactaagtacatgcctcagtgattcctaattgcaggtgactggtaaatttttaacagtttaacaactttaaattggatttgaacattaaaaaaattaatttttaggtaagaatataaataaagcaatattattcggttataactatatattccatcacagttaggaaagcttatggtatgcaagtaataatgacaggaaattct

SEQ ID NO: 42262 - DNA, 1442 bp, Bovine  19866881353178
  misc_feature (1)..(1): n is a, c, g, or t
ntttggccaatgagatgtgagcaaaagttgttggacttctgagaaagctctttaagaagaggtagcctcactctggcatgccctgttttcctcttgggcttcctccgtcttcttgctgggaaccgaaacaaccaccttggaacctagggggaaagccatgggaacctcagggccactctgaccctgatgtctgtgagctgctgaagcaggcagtaccagcagtagctgagcccccaacctccatgctacatgagaacaaaaagaaacccctatcaaaaagaaaattttcatctgaaagtaaaaaatatcttgcctgaagaatatgtgcatattcagtaagtttaagtaacttcacagaatcatattaggagagggcaatggcaactcgctccagtactcttgcctggagaatcccatggacaggggagcctggtgggctgcagtccatggggtcgtgaagagttggacacgactgggtgacttcactttcaattttcactttcatgcattggagaaggaaatggcaacccactccagtgttcttgcctggagaatcccagggacaggggagcctggtgggctgccgtctatggggtcacacagagtcggacacgactgaagcgacttagcagcagcagagtcatattaatagaacaaaagtttatttgaacccaccaaatcctcaacagaccagaggtggaggaaatgagcaggtttattgtgtaaaatagctgctattaaggaaaataagaggatttttagattgatccatcaggaagtgtttttttgagtgcattatgttgtgattactcttctgaacacaggtctacccttctgcttatcctaattcttatatggtaagatgctaactactcaatacttaaccagatcattatttcatatataactttattttgtatagacaaagtaaaaaatgaagaatttatcattgatttccttaattcaaacccccccaaaagaaatatcaatatcaacaacctacaactcaatttttaattctcccttgtatgtaacatagacatctgacagcaatttcctaatggtttcagagttttaattaattgtggatttagcttaaataagcacaggtaccttagaggagttacaaacattaaaaacagagtacagtattctggaagtactttcttcatattacatcagtatacccttagtattctgcaagtccctatattagtaggtatggattagggaaaaaaaaaagcatttaccactatcctaaatggttttaccattgacaatgttcagaattttggccattaaaaatgtttgactctattgcacttattttgaaactataggcaaaattggaaacatgaaatgtcaagctaaaaatgggatattgcattttttttttttactcacctagttaccaagtttccacccctgcaaggaaccaaaaa

SEQ ID NO: 42263 - DNA, 1887 bp, Bovine  19866881430943
  misc_feature (1)..(1): n is a, c, g, or t
ntatatacacacatacacgcacatatacacatacacatacatacacatactcagttacacacacaaatacatttgcacgtctggtcacaatttgacgtgtattatattttatcctgagcatctgatagcaggagatctgcttagtgtccagattctatctagaatgaatttaaactaggaagattgtttcttcatggaataatgggaatacacagctgatagaggttaagaaggattactaaagcttaatatataaatacattataattaagtggtagttttgggtacaagtctagatgaatttgtctaatattgatgactgatatttcctgattgttgagaataaatatctttggttagatttaagactaattatgtccctcttattttgagccagagtttagtaattgaacttggatctctattcatacttagattggtgaatcaggactttaaaaatatgatacattgtcttatattttatgtagaaatgtggacatctttgttattactgtttgttatagttttacattcctctctttgaagaaagcagaatatgatttagtaaactttcacatttattaaattcacctttcttccccttacataggttaaattctaaatttaacttttgaactcttttaggccttttagatgctattctggaaaaattttagtaatggatcaaagaaagaatgagagtattgttcctagtatcactcaactagaagattttcttacagaacacaattccaacgttgtttggctccttgttggtaagtagaatatattttcttgtactttattttgtgtatgaattaacagctgccagattttaagctgtagttcactgaggttagagtgcttacaataccatttgtttgtgtttttggagacaagtattttaatctgtgtttctatgaatatttgctctggaaactgctcttgagggctgttttccttaggctgcttccttgtctgtgttaggggaagtgggatgataagagacctagcttttctttactgtttcagatcagctcttccatttcccatcccaacatacacgcaaacacttttgttttattataaagtgataaatcctcatggtaaatgtttttgcctaattaaatgttatctctttcctcactccttatgtacctgacagtggaattttccagtaatgatttttttgtcttatattccagaacttttctaggtatacacaaataatacaaagcagtgtataattaaattgcagagagagggaagacgtatgagtgagtgaatgaatatgaacagataaggagaaatacatcaagtactgagaaagggagcaattactgtaggttgttactgtccaggatgtttcatagaagaacgctatttgatttgaattttagcataggaattagaaaagtgcagagaggaaaatagaaagggtaagatggagtgagagaggaaagggaggtgatggaaatatttattaaacatctgtgtaccatgtgccacaggcattttgcgtatgttgtctcagtaatgttcacagcagacttatgaaggtagctgatattttcctattaacctattggggaattgagacccataaaaagtaaataacttacacaggttacacaactgttctttttcttgagtgtaggcttgtgcttctttcatgatgctgtgtgatagggttacagtagaggagaactgtatataaagggaattataataatttatggtttgtaggtaggattggcttaccatttaaactttgttttttctcccctaattgatgaacatgaactattctaaattatcataatgaaaacttaaaagtaaaatgaagtgcaaaacaatactatgaaatataatttcataaaaacagca

SEQ ID NO: 42264 - DNA, 993 bp, Bovine  19866881463763
  misc_feature (1)..(1): n is a, c, g, or t
ntttttatctgacttggtaaatttggatggctctttataagtacagcatgaaatctgatttatgagaaaatatgttaacaatgcaaaacatttaagggaaaaaaatgtctgggaagaggaaaaaataaaggcagagaacttgaggcagaggtaaattctattcgtttgaggagcagaaggaagaccagtgtggctaaatatggcatgaaatgaagtcagaggtaggctatggccaagtcatgtaggtccttgggagccttggtaaagggtttgaattttagtctaggtgcagtggggagtcattggaaaactgtaagtggtaatatgatgtgatctaatttaccaaaactaaaacaaaaacactccgtagagagtggatttgccaggaaacaggttgaaattaaggacagggaattgaattaggaagttattgccatagttgtaatttactgttttttttttttttctctactctgatatatagattttttttcattcatagtatatttgactgcaatatcagtattattgctaatttatcacttacctttttttaaaggtattttgtgtgttgacagctttgacattgtgggtgatggggttaaagatttacttgttggaagagatgatggaatggtggaagtatatagttttgataatgccaatgaacctgttctacgatttgatcatgtaagttcatttttaagaagactatatatgtttatcattcatcaaacaattatagaaatggctgacagtctgtgttttattaaatgattatgttaaaatcttgtgtttggcttaaaatattgctgctttgatattatcaaaatcttgtctagactgctcttatatttgaatgatagatattgccctcaagctgaacaatgaattactttttcatttgatttctaaatattctatatctaaattattaaatattttaccttagtttctataatgcataatatattataggagtaacatttatat

SEQ ID NO: 42265 - DNA, 1600 bp, Bovine  19866881471318
  misc_feature (1)..(1): n is a, c, g, or t
nttggagaggaagacttctgaatatacaccttttatattgctgttggagtgaaaaaaaggtttcattttaaaatatcattaaatgagtatgcttctcctgtatcataagattttggtgataagcagagccaagttgctgaatacttctcattcatatttttagtatacactatacatttttactaacaccaaaaactaatttttatgccacacaatggtttttgcaaatttaaatgaaatatatgctagcaggcaattgtaataatttgtaccttcacacattgtggttagataaaagaatataaccagtagttcattcttctttccctcagaatttcattttatgattttatatatgaagttctttaactctttttgatgtgactttacctgtttttgctaagaaagcattgacaatattaacaaagaaaaattcaagtttgacaaatataaataaaaacttgtaaatggcctgagattagctgtattaactaagactaataatgttaaaatttttatcatttgtttgcctttttaatatattaagcaggtaagaaaagaatttctatgaaagtatatttatatgtttcatatatgtgcaatgcatgagagcaaaattgtgtcattacttttttcctctgaagatatcatggactgcaaaccatttgataagactacttagcagccatcatggaacatcaggaactttcagtggcttagtaaacaagtaaactttgagaaatactctaaagtgattctgcaacctctcattctctagaataatgattcttccctagggatacacaagcatatatatatatatatacacacaaagcaataggtggccaaggtcctatctcagaacctcaaaactttcatattttttaaaaagtccatgggtaagttttgatatatattcttggttataattctgtagtaatcctaattactttaagctacctttatctcctttcaaagtctgggttttttcttttttttttttgtaggaacatggaacaatatcaagagtttaagtgtttagtgctatttagtggttctcagtggggcaaatactaaggagtatattttgattatcacagtgattagggaagactattggttttcactgagatcgtgcttgtcagacaatgtgggacagtcccttataacagagaattgtcttgtgtcctgtataacgtttcaatattttatcaaatacaaatcagtaatcttataatttgtaatacttgcgcttctttttttaaacaaaaatctatccaacagctcaataacttgtatgcttttagaatggaatgctttaaaatctcaagtcatgacataaattataaatttgcttacatacctctgaaaattaactcattcagttgaaaggttattctggcctctggaataaagcacagtgttcttcaaattcatgttgcatttgatttttttttctagaagggagacatattcagtttgcaaagatttcacagattgttaaagaaacatttagtcaactaatttctagtcaatcagactatctgaaatgtagcaactcattagctgcttttataatgaaagaggtaagtggagtatt

SEQ ID NO: 42266 - DNA, 1211 bp, Bovine  19866881540080
  misc_feature (1)..(1): n is a, c, g, or t
ntagagacttttttgaaaagcagagagttgggattgggaaaagatggaagaataattgtaaatgtatataattatagaattataattatgcgattatagaattcatttttatttgtcaattttagtttagactataagaatatctctgtagaaaggcaataatggcatacagaactaagcctgaattattttttctaaagcttattttaataaatttcaggctatgtcagttttctcagcatcgatggagtagagacttaggacatgcccttagaagagaacatgatatacagcagatgctcagttattatcagttgaattaatgattaaatgaataaacatgaatctattgagcaggtacaaaggttaagattcacctattgagaaggaggtcattcctaagagatcacgtgatacaaattgtaggaaagttgtgagacatcatcattctattttattgatctgaaaagtggcagaaaagatcaaggggagaaaataagtagaaaatgatttccagcctgatctcataaaatgcaaaacagtgagatgaaatctttcccctttgctgtatcataaagcaatgatgacctgcttaggtaatctaccaaggaaatgtttatgtatatatcccttagctatgcttttaatgcttagaatagcaaagaaaaaataccattcattattggaaaaaaatctcacgaataagtaatcaggcatatccaggagaagtcgggagtggtgcaagactgttcttgctttctttccttcaatcccacagccacttccaacacgccaactatgagcaggagttgccctcttttttctgcctttgacaccagccctgcttgttttcagccactggtcccatgcctgcctctgtcccttcatacacaggcgctcatggagatctgcttcttcatctctcaggctttgatttgagctgtcagtttttcagttcatttcagtttttccctggaagcaactggaatgagggcgcttcagatgtggcaggtagaagaaaagaataaataaaaaagacagcttcctggtccaacttcagggacatatacaagggaacaagctgcccctgctaagacagactgtctctcagtgtacatcctggtgttcactggggttgatgggagtctttgtgttcctttgattaatcaagtcctgctaatactgctcaatttttaacatactgtatcata

SEQ ID NO: 42267 - DNA, 1284 bp, Bovine  19866881796065
  misc_feature (1)..(1): n is a, c, g, or t
nccttcaacaaaaatctgagttctcttcataaggaagaaggtaacagtgtatcttgggtgaacaacttgtagtctgtgccccaaatacaaaatacagtggtaaagaagcataacgctcgagacagttcagaacggcagctccttcacaacagcagcacgccaagcagactgctgtgatccgagagtgactagagtgaagacaggccaggttttctcatgaaacacttaccaggactgactgctgtctcagccgatacacctgtccccatcaggcttctctagacgaggaccctgggaacgcttggactttctcggaagatgtgcttgcttcttggaggcttgaaacgagatgaggaatgttttaccttgctgcttccacatctgcgttatcttttctctcattttcctaaaaaaaatttggtgtagtctagttgtgtatttgatccccataaaaggatcgttcttttcttgtacaggggagggaaatctatgtaaagaaaggctactttactcccttctgtgtctccaccacctcatctaggaatatcatggaagaattgcctctcggagctgcctccataaacagcctacatcctggctaagcaaagagagaagaaacacttcccacatccagggctgtccaaaagaactttctgtgatgacagaaatgttccatatttgcagtgtctgatacagtagccactagccacatggctagtgaacaattgaaatgttgctactgtgattgaggaagtaaattttaatgttatttaattttaaatactttaaatgtaaatagccacatgtggctagtgactagtgttgtggacaaacctttctctttcttgtgttttacaccttgctgggtgtgtatgtgggtggggggtgttgaataagttgtatgcttgacattccatggtctttactattccaccttgccatcgaacttgtctcccagaggaaagggaaaaatggtattttggaactaaattcagatgttaacttgacatttacacattgaacatatgtatttgtatgtgtttctgtgtgaatagaatggttttctgggaataggtcctgtggtgatttcagtgataactgatgatgggaaagtggtggtgctggtcacttgactttcctagtgaacattatgtgttccttgtcatagtagagattctgttgtgcagttcattctgttactttatttttgtactcttgtggctgctaaatgattattccgtgtctgtttttcaaaatactttgtggtttatattttttaaaagg

SEQ ID NO: 42268 - DNA, 666 bp, Bovine  19866881905154
  misc_feature (1)..(1): n is a, c, g, or t
naatactggagtgggaagccctgtgtttcccagagatcttccccactccagcatctcttaagtctcccgaatcagcaggcgggtgctttaccgtctgagttaccagggaagccccccagcttcaactcctccctcatcccctacgcacaggaaattcattctgcagtgttgttatttcatgcttttcaaccaaaagtcaacttttaataacttttgacaattcagttgtcaactgataacactgtcaactgattagcctgaaaaaaatatattcttgttcaatacgtaaatcaagtaagttttctagacatacacccatgagaaattcaggaagacagatatgtttattattcattaatcttttgattacaaccattataatttttttggtttaacttggtagcaaacttgattaataacacttctaggagttcacaatttcaaggctaaggttccgattaaggtaatatggttatcaatttaatataaatgaagctttttaaaaagggtgaaagcagtctgcctcttacaggaaaatataaatgatccagactttagtcctaataacataagtacactttagtgctacaacagttaaagagaaagatcttaactaaagatcagaaaggagcaccgctacattcttctacacattttatgttttgg

SEQ ID NO: 42269 - DNA, 1536 bp, Bovine  19866882011174
  misc_feature (1)..(1): n is a, c, g, or t
natctgaaaaaacactgcaaaaaaagatatcatggtggaaaattaatactatagagattagtacattttgttaacaagaagtgtgtgttaactattgctgcatatactattgttttagaggcttaaaacaccaaccactttttactgctcccaagtccttaggtcagctgagctggatttggtcaagctctcccatgtgtgtggggtcagctgtaggtcaactgtaaggcagcttggctgatcttagagggacagctgggctctcatcttctagtggatcaatctcagcaggttcatatggtagaggaaggagtgccaaggcatagaaacacaaactgcttgcagcccaggcttgcaacaggcacagagtattttattgaccaaaacaagttacaagaccagtccaaattcaaggggaggaagaataagctgtagttgttgatggaagaatctgaaaaattacattgtaaagagcatacaaacaagaataaaggattttggcagtttttgcagtctatcacaaaaacaactaatgagaatatataatgaagggaaagagttacagaagcaagaacgctataatatgtgaacctatttttattagaaacacagaaaaatatatatatttacgtgtgtacacatatgcacgtatatatatatgaagggtgatggagtacatatattttacttttttagggagtcaaattgtacattaaaatgtataatttcatgagtttacatacacatatatatatttgtgtatgtatatatacacacctgtgtaaccattaccccagtcaaaattcaggatgctttcttcatctcaaaaaagatttctattccctcatctagtcaatccctggtagaatcactatcttaatttggatcattatagattaattttgcctcaaacagtagaaattttccaaatatccatatttttctttaattcttaatgtaatactctgataacatacactaattttataaaagaaattagcttcagaaaacagttaatactcagaataattttatatagaaaatttcactatctgtgcataattgagataaatatacattttgtattgattttaatccctgtaagtgctaacataaatcattaaataatgattagtgattgtttcattcttttctactttagttccccatttaaaagtggtgtgtcaatggcaagtcggctttgtaaggctgcaatgttaagtcgatttaacctgcttgccaaagaagctaaaaaagaagatatacttgaagctagtacatatcatgcagctaaggtaagtctttaaaagaatgaaattgaacattgaaataaaaattttaagaaaatagtactgtggtaatttgatgatgatacataccaaaataatggttaaataattctgatattgccatgtagtggtaaaattagattttaaatggatatgttggaaattggatatgtgaaataagttttaccacttttagtagctgcctcagtatggtatgtactaaccttgcaatattgctaaaaacctg

SEQ ID NO: 42270 - DNA, 1683 bp, Bovine  19866880140116
  misc_feature (1)..(1): n is a, c, g, or t
nagacattactttgccaacaaaaggtccatttagtcaaggctatggtttttcctgtggtcatgtatggatgtgagagttggactgtgaagaaagctgagcaccgaagaattgatgcttttgaagtgtggtgttagagaagactcttgagagtcccttggactgcaaggagatccaagcagtccattctaaaggagatcagccctgggtgttccttggaaggaatgatgctaaagctgaaactccagtactttggccacttcatgcaaagagttgactcattggaaaagactcttattctgggagggattgggggcaggaggagaaggggacgacagaggatgagatggctggatggcatcaccgactcgatggacgtgagtttgagtgaactccgggagatggtgatggacagggaggcctggtgtgctgcaattcatggggtcacaaagagtcagacacgactgagtgactgaactgaactgaactgaactgaagaaagaaagcttgagaaattatcttccaaagggctgagacatatcactgaattggaaatacaaccttactcactgtgtgtaatatataagctacacacaaaatatggaagacctgtccctccctcccttctttttctttctctgtaaaagaactgccacataaaagaaaatacagtcactgggtgggcggggaggtgggtgggggagtgctcaacatggtaatgatgcctttgagacgtttttgttttgtcctttcctatgccccttgtcgtgttcaagtaggggtagtccttaatgaactggtaaggtttcttggttaacttatgtaataaaggtagaaaaagagtttgaagtgaaaaagctttgcagctctggtacctaccaagttataggtgctcaaaaaaatactgtgaatgaagaaattgaacaaaactgtcttctgattaaaaaaaaaaattaggcaaaaatatcaaatactgccagcttaaatcagtccaataaaaaattgtctacattttccattaactcttaacaatgttcatgatttgaatgagaaagtaaatgtgaaaatgctcggtaatatttaaaatatatcgtaagcactgttattgttgtttctacactttgaagaaaactagtatttaacaactgaatcattctgaatggtccagtgttaactgagaactggacctaagagcctttttattaagtatatatttgcccgccctaaaaaattttggatgcaaaggaaattgaataatgcaggcattagacacagatgtgtttttaagccgatcattcacatcatttacaaagcatttttgtgatcaatatttcatttacagggggcttcaagagatttccttagaaacagaataggaccagcacttattaaggtctgtgttggtagcttaataaagaataaactctcaccctgtcccatttcattccaaataacctgacccatttaagtacccacacatatttgcattaatccttcaggagcctcattcttccgccacttgacaacttgctttaaatatggctttcccatattttccacttaaaaaaaaatgtgtttaaaaataaatttattgtcaagggaaagaactccatgggtctattccaaaaccccaaattcagagacatcccataaataagtccaaacctaatgagttgactttctga

SEQ ID NO: 42271 - DNA, 2973 bp, Bovine  19866880167442
  misc_feature (1)..(1): n is a, c, g, or t
naatttgctgtatggctcaggaaactcaaacaggggctctgtatcaacctagaggggtgggatggggagggagatgggagggggttcaaaagggaggggatatatgtatacctatggctgattcatgttgaggtttgacagaaaatgacaaaattctataaagcagttatccgtcaataaaaaaataaaaagaaaaaaatgaaaaactgaaaaaaaaaaaagataaagtgattaaaatacaacaataactcccatgttcctctcttttccagcaagggactgctatggctttgtttaactcccctctggacacacggcccagttgcttaagaaccgactccagctacttctctagatcagggtttgtccatgtgtctatatgaagattgaaaagtaacttgttcaaacaccacaagttatttagaacatacactagtcatcattgattatcttaccaattcacaaagaccatttttaaaatctatgattactatgacacttatttttattattctgatcacttctaaatgcaacatgtaagaaaatataaattcaaatataagctataacaaaacatattcttgacatattggcaatcctgtcaagaacagcaagctacttatgtcaattacctcaaaataattgcaaaagacctcatcacaggtaacgaaagtgatgactttgaaggatatttctacttatgattccagttcaaaattatgtattgcccaatggctcagcacacaaagaatgcaggagacactggagatgagggtttaatccctgggttgggaagataccctagagaaggaaatggcaacccactccagtattcttgcctggagaatcccaaggacagaggagcctggcagcctacagcccaaagggtcagaaagaactggacacgactgagcaactaaacatatatatatatacacacacacaaatatttacataccactataatttctcagatgtgatgaaaaagacatttggacattaggtgaggttttatgttgttctgagtaattgaatctccaatctcagactcttcttcatgggaatctattccttgatagttagccagacggctgtgatattggcatgcaaaacccaagtttggatctcttcgtttattggtctcagaaatttaccgtgtttgagcaaagtccaagatttggagatctgcaccaacagagttgttaaaatcaaagagcaggatatagtgtgatttccattgcttcagttagagtctgtgaaatgccaattctgcatatcttcaaagagcagaatctgtctccaaaaaccgtacaaaatagcccactacaaaggaaactccttcaagatctttgctattgaactaggaccagaagtcagaggaaaacctctgagaacagtatataaatgacagatatcagaggagaccgcgcacgccatgaaatgagagacattctgctgacagatgagcacctttgaactctaacccaataaaagaattagcactcccaatgtataatcagtacagcaagcaaaatatgtcaacacacgataggcaggataatcaatcgacttagagcgtaggaaacagccagactaaatagcagcccggtcccagtgagccagacagccctttcctgctccttaaatttctcataccacggggatgaggaattaatatgcagtaaaggaaaacccctaacaagtaaaacaacagagcaaggctgccgagtcctcactaagaagagacccaggattccccaaactatttttctttttcttagacatgttctaaggatcttttgcttgtcaggtaacagacaattttaaattagaaaccacagccctattctttactctctctcccctgtgaagatttcagaaataataaatgtagcagtagctacagacataaacagggtgagcttttaatcctggttgactggatgctaacatggacttcaggcaagtaatttaaccaggttgggcctcagggctgtaaaaacagaagagttagacttttaaggggcttcccagatggttcagcaggtaaagaatcagcctgcaatgcaggagacacaggtttgatctctgggtcaggaagttcccccagaggaacacttttaaaggggattttgtaacagttaaaagaaatagatagaatggtttcagtgatacataaagtggataaaaggtcatattcaacaaaggcagggctggcaatcccaatctctttgtaattaactcttgatccttgcaagaatctaagaaatgcagttatggcctcatatatatgtgtgtgtgtatatatatatatatataataaaaatctcacaagccaaaatagaacattatagttacagatgtgtataagagggggcagataacccaggtctgaattccctttctaccatgttagttgtatcgtcgtggaccaccaagttttctggctcacagtccactcatttgtaaaattggagaaatagtattgcaccaacctgtagggccaaggctgagaagaaggacccatgttcctttcagctttttctcgataattgcaaattgtctgttgctggttctctttatctcaggtacccacttgacaaaaccaacaagaaatcgcctcaattctggatatctacgttccttcaggaattcagaaatgattcttttgttttattttgctgtgttttccatttttccaaagaagaatcacttgtgctctctgcttaaaatcacacagcaagtctgcaggatttttaaaaactcagccccaaactttctagctccaaaccacaggtgggtatattttataatgccttccactcatgctgcttttaattcaagatcccacctgttttaaactgaaaggctctgtgtgatgcaatattttattttcacttatctcattttaaatatgtttgctttctaaacagatgcattgcaagaatagcgtttcaacaacacatttttaac

SEQ ID NO: 42272 - DNA, 1635 bp, Bovine  19866880344835
  misc_feature (1)..(1): n is a, c, g, or t
nttggtagtttgaatactgctttcacagtcgaactctaaaccaatcactaggcagaatctctttctgttccaaagccattgggcggcttgtacttatgggaagcagcatggcacagtgacagtgactggtgaccaaccgcttataagatggggactttcagcaaggtgagactcctctttaagcctgtgaggcaataatggaactatgtcatagaagtgatgtgagctttgatgagtaagcatgtgagctatgcttactatgtaccagccaagagcagctcctggtacgtggtaagcataaaaacagtaacagaaaaggaactgactacaggtacaagtcatgagtatcaacaccaaatctgtttccttggaacaataacgcaattatgacatggatgcttcttcaaacaagagaggctttccaggtgactgctaatggtaaagaacccacctaccaatgcaggagacatatgagggttggggagatctcctggaggagggcacagcaacccactccagtattcttgtttggagaattccatggacagaggagcctgggggctgtccagtgggtttcaaagagttggacacgactgaagtgacttagcatgcattcacgctccaaacaagataatacacagttgtcatggggaaagcagagaacaaagaaaacactgtcatggccaatggcctaatatctcactgctgaaaacacactagggatctacggagtctaacaggactcaactggaattcagcagataagcagttgcctccgtgagccttaaatgttcccttgaagagagacaccacacccatctttggaaatatattcccatgttaaaaccagacatgcgtatggaaattattattatcccttggctgagggcttcagttataaaacatttgtgatgtttgtaacctaaaaaagggattttctcaaatttgttgaaactgcctcgttttttgtagggtcaccatcgccatacctcatttgagatcaagtgaattgtcagattaacgtgtttttgcaggaagccgattctgttacttccttaaaaaagcgtgtatctcttctgagggttatcggcaggctgccactccagcttctcacaccaggtgcccttcctgactggtcatttcccctcaggctggcgataaccctgcagtgactccaaattctttcattcagtatctgattccatctctatcagatggaacctcctccagaacatgactggacctaagtatttccatgtcttggttcattcctaaaatcccaatctgacttttgcttgaactgcaggggaaaatccaaatcatgtgataatcagaaagaaaatgatggctttttcctgattccattttctaaacatgcagtaatgaacaataaatatttacaggcaatggtgatgataactgaattttttgtggggggggcccacataaaatagactctgctccataaaatatggccaatcttgcataaattttaatgaagattttggccctccacccattaaaattcttacttcaataaaaataaataataaacattcatcagttgatggacatttggggaaaaaaaaaaaaactattacgtatttctctccctttcactgtcaccgatcatct

SEQ ID NO: 42273 - DNA, 1814 bp, Bovine  19866880365717
  misc_feature (1)..(1): n is a, c, g, or t
nttaaatcatgattagatatacaaattgtgtaaattgtatgtgtgtatatgtatatatggggcttccccctgtggctcagcaggtaaagaatccacctgaaatacaggagcctcagaagatatgggtttgatccctggattgggaagatcccctggaggagggcttggcaacccactccagtattcttgcctggagaatccctatggacagaggagcctggcgggctacagtacatagggttgcaaagagtcagacatgactgaagagacatagcacacatgcacatatgtatatatgtataatagggaatcctaaaatttctttgtaatgagcttcaggtgccttgaagatgagtaatttgttcatgttcttaagatttgtttttctcttatttgaatatctatttctgttcactgtccttgtttttataaatttgacttagcaaattagtgagatgtgaccttttgatataatccatctcttaaaactttatcatttatcgtccagattctgatgccagacactaggctagaacattactcctttctgattggggctcagtgagtttgtgaatattttgtattatccatttttataatgtgtgcttgaagtacattcaagtacttcaacacagtgaaataatacctttttaaatgactgttaggaaaatgcacacagcatctatgcttgggccaactgtgattaaaaaatagatacatatttaaaaaattaaatatgtaaaatgtttatataatatataaattatataatacataaatatgaaggcaagaattggacaatatttctaaatctacttaatggcaagctgtgccataacaaagcctactctctttttaaagtccaagtaaaactgtagataccaaaggttttacgtaacaagaaagagtaccaaagaactagaataactaactttaggtgtcagagaagtctaaacaaattgagaacctactcaagatgtacttgaacaccagaggcaaatgataccttcattttcctggcattaagtgacgttagattaggaattcctattacagagagcgtgactagggcttttactgagcaagatgtcaaaaaattaggaaacctttttctaatttggcaagatattacctggaattcagttgtgttttcttccaggttaacctgtgaaacacgatgatagttttcatttttcagtcacaactgtgaacatgttttgagttcattatagctaagtttggtgcattcgaactagagcattttgctcacacattattctgaatttgttagcaaggtgatttttttaaataagtgacttttctatcacaatgaacccattagctgatatttttctttttttcaagctggatacaaggacacaggatagagaaataagaaatctttttcaaagagttagaagcttggccccatgattccaaccctcatttaatcattaacttaacatgctgctttgggtagatatggcattcaacaaacactccatgcctaagagtaataatctcagacaccaagggcagccacataaccactgaggaacagcattagaatatgcaagaaaacatgtgagaaatgggctttgtgtgtactgagagtacacacgaatactcacagtattatggtatggtaattttatatattatagtaatttatatagtaatcatggagaaggcaatggcacccctctccagtactcttgcctgcaaaatcccatggtcggaggagcctggtaggctgaagaccatggggtcgcaaagagtcggacacgactgagcgacttcactttcacttttcc

SEQ ID NO: 42274 - DNA, 1334 bp, Bovine  19866880469917
  misc_feature (1)..(1): n is a, c, g, or t
nctgggaagctcaaagatagaataagtactttattttagctcttttcagaactggttattaaatatgctgtcttccccttcttcttgtactcctcagtatttatcttatgatagcagtctttgggaggttttttgtgtatacctgtatttctgttgcaagttgccttgagtactttatggaaataaagatataatatatttttttaaaccaaaaaattttagaatagtaaagtgtcaggtacaaacatgattgtatttctggactagctactccaaatggaactgcaaaatgctggaagggaaggtgtcttagaaccaagctaatccaaaacccttgtcaagcaaatagggaagcagagccagagaagttaagtaacttacctaaaagtgaaagtgttgttggtcgttcagtcatgtctgactttctgtgaccccatggaccgtagcctgccaggctcctctgtccatggaattctccaggaaagaatactggagtgagtaactgttctcttctccaggggatcttcccaactcagggattgaacccaggtctcctacattgcaggtggattctttaccataagaggcagcaggaaagccctaacctatctaagacaacagataattaggagccatttctcctgtagcatctcattccctttcgctatgtgatgtatctctgcttcaagtacaatgtccaaatctccacatactatattgacttaatttatttattttgctcaagtttttgaagctttctacataaagaactagtatttaaactgaatgtgctaaacagagacccactctcatcctgccaatggacagtggtcctttccacagactgttgctcaggcatctgtcaagggaaggagattatacccgtggactcctgccagaagcctggctggggaatgtgctcagggctaactgttgctctgagcagttacagtagtcaggagctagtctcatcaggatctctaccaattaggatctgcttaagcagcagcaaaatagaaaaagcttagagaaagctcagttgccagtattcttgatatataagttaacctcagtttggagaaaggtttctcaaccttatcctaggctatgatatttggtaaataatggcaccttcaagctgttcatgtaaatcacggcaccatcagttgggtaattggtaggcttgatcctgggcacataggtcatgttgtggctaatatataggatcctcttcatagggctgtgcactgataagatatggcagctggcatgatggaatccagacaggcagccaggagtgcagggtgtgcagacagagatgggctccaaagaca

SEQ ID NO: 42275 - DNA, 1752 bp, Bovine  19866880498305
  misc_feature (1)..(1): n is a, c, g, or t
nctaggcaggggtttcttcatgttgaaatgaaacagtcctctttatttagtctcagagctctagctttcggccaccagctcaattagccaaaatggaaacaattttcattcattgcaataactcactgttcttgagatcgctttcaaaatatacactttattattatacgctgacctccgtggcgtggagtggcaataaaagaaagaggcagtgagatctatctagcccccttcggctataattattagaaattaattgggttcaggaccctaggtagtctagctaaattaatagcttgtctagtggttaaaatccgaatttttagtccacgggagagaaagagagagagccacagacatgaaatgcagacccaagggacgcctgagtttacttgcaagacgctcatctattaaatagtgtccagaatacatttggagttggggagaggggcccggaattggagggggcgggagccagaagaaagaaaggagcgagatggggagggtggctacgactgagcaaaaggtctccagttgattttattcgatttttcttgtgtgcattgttttcgggaggggttgcatttaggggttaaaataaaaaataaagatccagtgtactcgggagctgtcgtgcccggagtaaaagtgaaaagggagccttaggcaaaaggaaattactgcgagcccgcgtgacctttcagggaggtaatcaatcaagtgatcaacagggatatttatcatcgctatataggactacttcgccttgcacgggcgggggtggggtggcgagaggagggtggagacgcgcgcgcacacacacacacacacacacacacataatcacaaaagtttggacaaacccgattaagtctcaagacagagaacgtaggctttaatagatgttaagattgtccctttagtctgggagaaacacagcctcatacatccacgcaaggggaaacgcgcacatccccgctgcagtggctgtgtgaaggtgttaagttgaaagcgtccactgagctttgcccagaaaggaaagctctcggtgattagagcggtggaagggcaggcgaggcgcggggctagcttggtttcattgacctgcgggagaaggggcgccacgggccgcagggggcgcgggaggcgggtacccctctccgcggcgcacggactccaggtcaaagcacccaggcagcctcctcttcctgcgaaatcctcgcgctgccccagggagagaggcgggtggcgcgctcggggccagccggctccggcgagcacgcgctgcgggacttcggcggccgcgcgttttctgcccagttgttaccttctctaccttgtaaaactcgccgttttgtaaattgagttttcggtcctggatttcttagcaaatcgttagattttacaatcctgctcctacactctggtcgttcaacacccccctccccaatgtcagaagtatacgtaagggaagagggggcgcgaggtggctgacttttctataatgataatgatattaaatagtatacttcaaatctaggctcccgaggcccttgcccagctcggggattgtaatcagcagttcttgcgagagaaggtcgggctgattactggccctcgaggctgagaactatttcccgacgggtttatgaaacacaggttggggtgatgcgcgccacctcccaggtagcttgccgccgctcccgcggtgtgggaatgtggggccgcgccagggccccgcggtggcaccag

SEQ ID NO: 42276 - DNA, 1616 bp, Bovine  19866880552961
  misc_feature (1)..(1): n is a, c, g, or t
nacagacagacggacagacagacacatgacatgagtcagcaaagtcttagtacagaagagagagggatcacatagaacaatgaggttgtgactcagagctctgtcttcttcccttgccttctctttctcactcatttttccccagtgccaacagtaatacagattgcaagtgaatagagaggagaaagcagagtatgagcttgtgtgagtctctgtgtgtgtcttcctcaatgatggggctctcaggcctttattcagtctctggcacaatgctgcctctgtagaaaagatattaggaacaaaaagcaaacttgaagattcaggagcaggctgccagaattattaagaaaaacattcagatgatgccattaaaaacatatggggattctataaagccctgaaaagaaaatgtttaattatgcgccgtatgcaaaagccatcacgttgagattaatactaaggactgaactgtgtggggcgtaagtagtccacagtgatacatcaatctttttactcttttaaaaataatgtttttctttcgctgatgacaaatacctttcaaactgttgagatcatgctgctagagtgatacatggagtttaatgaagtccaaagtcactaacaaaagtttccaaattaacttttcaaggtctttgagttagatttctttcctttccttttctcccctaggttcccactgacttccagctcccataggggagcccccctttcccctccaatacacaaaggttgcctacgccggtggaaataccgttttgaggtttcccatttgaaggccctgtaatgattcattgcccaacattgaagtgttaatagttacagtgattttgatttccattctcaatagctcacattaggaaacctgaagaagtctagaactcttggccatttttgaggaacacagaaactgttttctttcacctgaatctgatgtgtttgaggattcctatcatttcctttggttcttggtaatgcgtgcaatcattattctatttagctctgtatgtgtgagaggagagccacaatgagaagaagaaaatcaaactttgtagctaatagggcttccaaacaagagtactggatatgaactacatacgtagaagtaagtcacaattgcaaaaagtctctgggctttaatgacctgagtactgctatctttttttttttttaatatttcattcatttatctacttctttttggttgcgcttggtctttgttgctatgtgggcttttctctggttgtgacgagaggcggctcgtctctagttgaggggcacgggcttcttactgtggtggcttctcttgtggagcagaagctctaggcatgtgggcttcagtagttgtggcctctgggctccagggcacagactgaatagttgtggcacatgggcttagtggctcagtgacatgtgggatcttcccggatcagggatcttcctggaccaggcttggagcccgtatctcttgttttggcaggcagattctttaccacttggttgccaggtagcccctgcctttatttttatattcatagaagtttaaatattgcaaaggcaaatacatagcttctcaaaattaaaaaaaaatgatagtg

SEQ ID NO: 42277 - DNA, 1543 bp, Bovine  19866880583908
  misc_feature (1)..(1): n is a, c, g, or t
nttctgactgtttgctacacatcacccatttcctctctgtccatcaagaattcagttgatggtcaattcggtggttttcttcaccccctttaatggtttcccttgcgtttatttttttaaaataattttatttatttatttttggctgtgttgggtcttcgttgctgcacaggcttttctctcattgcggtgagtgggactgctgtccaattgtggtgccctagtgggcttctcactgcggtggctctcttgttgcagagcacagactctagagtgtatgggcttcagtagttgtggaacatgggttcagtagttgtggctgtgggctctagagcacaggctcagcagctgtgggttggtaaatgcaggtctgtgcctctttaaacaggatacctgtggatttggggatgaacctggtgatagttctgcatttagaggaaatgtaaaaataattagttgcttagttgctttatggcatgtgagatctttcccgaccagggctggaatccatgtctcctgcattggcaggcagattcttacccgctaagccatcagggaagccctgtccttgcttttgagagtgtggattgtctgttctagatgtatcgtgaaccaagcaagagcaagggctttagaaaattttttttgggtgtaattttggcaaagttgttatccacagaggaacagttgagttcttgactttagtattttctttgttttttttttttttaatcttaccctgcttaatacaaaatctaatcacgatcaacaaaggcacttgcacaaagcttctgacctactcgcatgtgctcttttaaatcagtcttatgtcatatttgtcctcaactgtagctgatttccctcctgtttggttggacagatagttgtgattaaccagtgtggcttctttttctgatactgtttcatttttaaaaatgatgaattgaaggagaaaataacctcttaggccaaaaagaataaacgtgaatggaggaaatccagattcatccagcagttattcagtgctactgtccatcagattctgtactaaatgttcccttgagagaatcccagcctatcaaaactgaacaagccattcctatctctagtactacccttgctcttttctccctataaaattcccctccctatgcatttcctgtttaataaattggactactgtctgtccacctgctcaagccaaaaaatggatcgtctttgactctactgtctcccacaccaaccttatctgatttatagttcctctgttctttcaaagcctccattctttgcacacactggtctccatacctgggaatctccttttccttcctgttcctagcaagtttatatccattcctcaagttctcttcttccatgtcatcatccctgatcctcctattaaaaatttagtactgcttaagtttttcctcaccatagtattgagttaatccatactaaaaaacataaagcattgtgcagcatccaaattgtttgcctagtttccctaatatgggctttcctagggctcagacggtaaagt

SEQ ID NO: 42278 - DNA, 2107 bp, Bovine  19866880616717
  misc_feature (1)..(1): n is a, c, g, or t
natttcccaggcaagaacactgaagtgggttgccatttcctgctccaggggatcttccctacccagcgatagaaactgtgtttcctgcatctcctgcattggcaggtgagttctttaccgttagtgccacctgggaagctgatatggagtagcacccaccgaatgttttcatgtaggaagacaggataaggcaggcctcagtcctggaggaacttgggtaagtgggcaagtacaaaagcagggatcttgttagttacttgccctggagcatgagactgaggctttgctcaagctacttctcagcaactaaaactgaagaagttactgcagatcagactctgctatctaccaacttgaaagtaaaagtaaaagtcgctcagttgtgtccaactactttgcgaccccttggactatacagttcatggaattctccaggccagaatactggagtgggtagcctgttccttctccaggggatcttcccaaccccgggatagaacccaggtctcctgcattgcaggcagattctttgccagctgagccacaagggaagcccaagaatactggagtgggtagcctatcccttttccaggggatcttcctgacccagtagttgaaccagggtctcctgcattgcaggcagattctttaccaactgagctatcagggaagcccacctaataacttaggacccttataattcctcatcatttggatacaggattgttctcagacctacaagtggggatcatctgtaccaactggctctcgcttcatcctctgtggattgagtttgtgatgagaaatgctctgaggtctgaatgtgggaagcttggcatggctatcaagtcaggagaaggttgtctcaaacatggagataacaccaaactatttttatatttgctgttttctctagaaggataaggaaggtcctgcaatcaaattttagatcaaagttcagaagtggccattgtcctaccaatgatgttcatgactcaaaaccttttaagaaaaatgtcttctgggttttaaccaaggttgcatagctgtgtgggtgcctgatgtgacaatttctactgggtcatgagtttgttagaccctgtggctttggttctctagcagcttcttcttttgaccaggactcagagatcagctactgaaacagtgtctggacaaggaggaaagtcaactgagtgttttttttaaaccttactttaaatttttacccaatcacttcatttccggaaactttttaaaaattatatttactttgttataaattcacttacagcaatttatggggtataaaaaggaagatttgggcattttttgaaaaaaaaaataatttttgtttactggaaaccattcaaaagagtggttttatttacttccaataaatgttagaagtgtcactgaaaaccatagcagtctcattcctggataatctgtttctgtccttattttcctgtgtatgttttaagactttccagagtggttgtttctatttaaggcacgtcatctgtaggattctgaaatacataccagtgctttgaaatttttgataaagcccagttcttaataacaggaaagtttcaaatgcccttagtcacttggccatctgtaaataaatgaagttcaatgggaaaaatagcataaggaagccgttttggttactgtttccattttgttcattcacatcatcagatttcaagatgacaaatatagaaagagtgtgagaacacgtttaaaaaatactatgttttgaaacttggatctgagttcaaacactcaatctaaagaacacttatgattcaaatgtgagttatttattgtctttgtcaatttccagaatttaaatttatgtagggataaagcaaatgcaaagctacatttgaacaacaatggggcacattcttctttttgatttacttatttcttccagcagaggcccttgcattctctgaaaccatgggccctagtcctgagtagacattgatattagaatctcacattattatcgtatccctgatgtccccttctgggatgttggccttgatcactgggtcaccctgaaatgggaggtgattcctgatttatagctccaaat

SEQ ID NO: 42279 - DNA, 1731 bp, Bovine  19866880648826
  misc_feature (1)..(1): n is a, c, g, or t
ntcaagggtctaaggcacaaagtggacagaaatttgggagcactgcttaaccaatgctgctgaaggcgtatttctctgtgggttttatgctccctgttacccatccctccatatttataagacagtgaatagcaagtggccccatttggctgagtccaaagcccacacactttctacaacatcacactattatgacacagagccattagcccgtgctaattgcctatttcacttgaatgaaccaatacaacaacatgtggatttgagaagatgatctcatactaaaaacaaataaaataaaggaggaacctgttatatgtagggttccttattacaaagattaaaacccatgggtcaaataacatgttctccagcaacactgtgataacaattctttcctaaaaggaaaattccattgaaaacaagcactttctacgtcctagcagatgacccataataacagcatagagaacaattttccataacaaatcctcttgtaaaaccaatgctgttgcttttcgtggtccctgcccatttccaccttcctttcctagaaaccaagcaactgaagtgatgtggctgtttacacttccaagaggagaacagaaagctgagtgactttaactcagaccctttgttctaccgtcagtggcagttacctttcaaccacactcttctcatccctcacaatacaaacttcagagtcacccagccagaaaggaacccaaataaccccaaacacaccaaaagaaacctaaacaaaacacaaggtaaaaaattccagggtgctagctgctcatggaaacttgctatttcaccagcaaagatctgggtgtcagcactgtgctgtccacactcctcaagtcaggtgtggctggcccaattccacaaggcctcttcctctctggtttttgcattatccatctaccagctgcagcctacttgggccaatgatatcttccctgcatgttcccagaagccctccaactcctcccgcccacctcaatcatcgtctcctcactcctctgggctccgtctccctcttctgtccggctccctcagatcctttcccagtgcccaacctaggtcccatctttaccaggtaacttcatccaagcacactagcttctttccacccccaaattctagagtcctcaccacttagccccgcagaattaagaagctcaatttctttggttgtttcattcgtgacagccctaccttttactgtggagtaaaagtccatgtctcagaattccttggcacacccgccatcccaaccagggtacttaaaaaccaaacagctgccaatgttttccacaattacatgcacactaattctagaaatctgctatgtggaaattccactgtaatttttaaatgcaagtatcccataatgttctgaagcatgaaatttgttgggtttaccagtctctacaccttcactttgcctccctcatttaaccctttccctccttgctcccacagctttctgagctactcccttagaacaccatcataccttcttactatgtcaaagtcagagttacctataaccagtaaaaatgaaaaatgaagctactgtctggaggcagagatgaagttttattcatccttttactcagctggtctctctctattatatatagataggattcagttcagttcagtcgctcagtcgtgtccaactctttgctaccccatgaatcgcagcacgccaggccttcctgc

SEQ ID NO: 42280 - DNA, 1183 bp, Bovine  19866880714440
  misc_feature (1)..(1): n is a, c, g, or t
nttcactttgtttccgctcctatgcagatggaggctcatctatctgaaaggagaatgaaccactgttcattttatcctttaagtaggatgacactcagctgcttaaagatctcttaacacttttagcaaaaccagatgccaagccccattttgcgcacttttttagttgaaataactaacttaacccattacaaattaatctttaaaacaaaccacctgaacgacaaagtatgcctagggaacagatggagtttttatgttttcacatgagcaccaagcaagatgaatgatgccgcacaggaatctgtgcttaatccttccacttccccagtgggatggcttcctttttaatgcctcatgccagggaatgggaatccatttcattacacttaaattgcattgtaaaattacatgtgtgtgttattttgtatgctcataggcatatacatgtgtgctcacactttccatgaaatacttgaattgagcatttgtccaagtgccccattgacttaaatgatgaacatgagttttatgcctaccagcaggaaaattttctgtcctgttgaaatgggctttgaaaactagttccttatatctcagtttctatttattaaataagtcagtgtacatgttttacatatgagcatgttgttaaaaagtgcattttggggggctgagggtgcataaaaataatttagtgctggaaaaatttgtttctaagacaccttcaaaatatttttgtgttaaattctagaatgtaaaactatttgcatttggtatatgcacttacgaataaagaatacctttacaacatctttatcgcagcaagattatttgttgaatttgaaaggaaaaaaaatctcctttagcttgtttccaaggctattatcagttgtccataaggatgtcttcccagtataatatggataaatagaattaacagagcctaaagtttcaatagtcttcagtttttcttcctcagcaaactaaataggaaaattcactgacttgagtgccattatatgaatttaagaaacaccgagcatctattatgtcccaggcactgtagtagatgctaaagaagtaatgatgtaaaattgacaccctcctgctccctgctcccaagaaactcctagtctagaagaatgccattgccttcttttccctctcctacctgctggca

SEQ ID NO: 42281 - DNA, 1753 bp, Bovine  19866880761954
  misc_feature (1)..(1): n is a, c, g, or t
ngtcctttagggcttatacaatagaccctttccttctcttcaaatcagcctaaaacactctgaactccaaagtttgttaataatttattagatgaaaactctatgctgctaagtcacttcagtcatgtctgactctgtgcgaccccatagatggcagcccaccaggctcccccgtccctgggattctccaggcaagaacactggagtgtgttgccatttccttctccaatgcatgaaagtgaaaagtcaaagtgaagtccctcagtcgtatccgactgttagcaaccccatggactgcagcctaccaggctcctccatccatgggattttccaggcaagagtactggagtggggtgccattgccttctactgctattttcaaaacagcacagtagaaaagaccgtaagtccaagttgatggcagctgtttcttataaggacatccctaaaataacgaaagcccaatgtgagcccgaagctttccatccatggattcaggccggctgtatgctaagtactaaggattcaataggcaaaatacagaaataatccttgccctcaaggagtttccattccaacagagaagtaagaccctgaacatcaaatcatacatgactatctaactaaaaataaaaggagacagccgacaaatatagccctggcaccccctgaaagcagcccagatccctgaaagtgtagttgagtgaggggagggaagcaagaagatgtcattattcaaaagcattcctaagagaatattttttaaaataaagcttagaaacatttttcctggcaaccgtactcattgttgattctggttatcaagctgcaatgcaaccagcccccattagttaaaatgcctggatatattgatacatatgtactatatattttattctctactcattttttttctttgccagcttcacattttatagacattatcatagggactccaggaatggctccatcttaaacttgacagccagagttacaaagtcttgactttttttgtttcctttctacagctaattttttcaattaaataaacaggaacatttctctcagtgtagaatcaaggcacatcttagtctacttttagaaacaattactatgatctagcctaaaccttaaaatcatagaatcatattaggttggactttgaataaatcttagaatgtgcctcatccaacctttcattttacaaatgcaggaaatgataaggtctatggatttatgagggcctcagtaatttaattcttgagacattaaagatagtacatatcagagtcacacgaactttgccatcattatgcttcctgtagcaaactttttcaaggatatttgtgaaatacatactatgcaaagatgaataagcttggcattgctgacattaagaagttctagtttctttccttacagctccaaagggtcacctacaggttgagacaccacctgttacaagtcaggtaggaccctagactgccctccagatgtacgggaatttcataagaattttattctatgttaagcccattatgatattacaataggattgagcacccatccaccatgcagccaaacatactgcgtcaaagcactgcagtcaacgtctgataaattcacccagaaaagtaaatcaaatctttctcaatctccaggcatctttgtcttggacatgcagagattacatgtgaccatttagatgtaaatgtaggagcaaaaagaatggtatcagaaataaagtatgcat

SEQ ID NO: 42282 - DNA, 1441 bp, Bovine  19866880811602
  misc_feature (1)..(1): n is a, c, g, or t
nactgttaggaacctagttaaaaggttaatgcaaaatcactgggacaggatgtcagtaagatgggccaaggaggctctaaagtttaagtgggtagatacagtaagtaaggaatggggaaagcattaattcaatatacagttgactcgacaacatgggtttgaactgctgggtccaggtaaatgcagactttttacaatagtaaatactacaattgctacaggagtcaaggttctttgaatccatggataccaaggtatacaattgacccctgaccctttagggtcaactgtgtattttctgcacgtaatagtcacaatcctagactctaaggatacaggagtgcatcagatatagtctctgcctttataaaggttatattttagttgagaaaatatcagtaaattagagcaaagtgctacaaagatggcaaagtactctgataatggaagggaggtcatctgagtgataggatggttatccctaagacctgaggaagtaattctaggatgaagaaagctgcctcatctgtgaaggatgagaaagagctgccttcaggagagatatggcagaatattccaggccagggatccaaaacatgcagaccctaagaaagtgcttccccaagtgtggtgtggtgctaagagagtgcttccccaagtgtagcatgactgacagagactgaagtaattttaatactcatgtatttatttttacaaatgctttctatttatttcaagggtttatggtttcccatttacagaagtgaaacagttttaggaagtttctgcactagttcaggtgggtgatgagaacctgggtgaggtggtagctacagagatggactaattagagacgtcttttggaagcagaatctgtaagatctgcttctaagatctggcaatcaactgataggaagctaagaggactggtggagtgggaagaggttttctggtgtaacaactaggtatgtatccatcacagagatgcgagaggatcaggcccttccaaaagcagagggggccaaatggagttgtgaaaaatgtgattagtaacggtttgctgccataatcacacatttaaagtgtgttagtatgaatataaaacgaggtttgcattaaggatatgtaagtagcatagagccctagctgggatccacttgtgtgtccacatgtctgacgcctgcatcatatggaatcttgaagatttaggagcaaatctagaggtaaacatccgaggaaaccttaagaaactccccgtgcatgttaaagatggatttttttctgaattttatcaacctacattcaaggactaggaaattaaacctttaagagcacagttttgatttatcagagcccagttttactgatcctaaaatattaaggaggttactttatatactttgtcagcttccttaatgaatttatctgtttttagggaatg

SEQ ID NO: 42283 - DNA, 1257 bp, Bovine  19866880830877
  misc_feature (1)..(1): n is a, c, g, or t
nataaaaatgaaagcttaattaatacttatagtggcaaagagatagggatcatgtgattcaatccatatgatagtttttgaatttattatccctgctacatgagtcagttgagttggtaaatgattcacttgaacagatgtgtctcagtgttgatctaatgaaaatgttctgatatgccatcctggaatgtactatcaccaaaaaaagcactgtgcttaattttagaaccatgcataaaaaaagaaacatgtaaaagaggctctccccagctctcaacactcttctttggaagaaaaggagactgaaattgcttgtccatactaagattgtttctttccggattcatgactctagggtaccttttaagaaaagacccacgttagtgataaaaattattttgaagggtgaaaattttactcatattatcatgtagaagtagtttttaacttttctgcaaatgcaactttagtcttgagtatgctctgtaccttttgtgagaataaaacaaagaacagcaaaaacagcaacaaaattctctctcgtgtttgaaaaccaatcacaataaaaatgcgtttgctaaataggatcttctgacttacaaaacattctgtttagacaggtgcaatacatatccatacaatggagtactgtgcaacggctcctctctggatgtattacacccattaaaaagcagtgatagaatttaagtatcaccgttttgcacacctaaaaactaaaggatctaaacgatggtcataaatgaccttttttttagagtgctactttattcttttacttatctgactgagctgatcttcattgctgtgagagggctttctttagttccagtgagcagaggccactcttcactttctgccacaagggtggtgtcatctgcatatctgaggttattgatatttctcccggcaatcttgattccagcttgtgcttcatccagcctcgaatttctcatgaggtactctgctgctgctactgctgctgctgctaagttgcttcagtcgtgtctgactctgtgcgaccgaatagatggcagcccaccaggctccaccatccctgggattctccaggcaagaacactggagtgggttgccatttccttctccaatgcatgaaagtgaaaagtgaaagtgaagtcactcagtcatgtccaactcttagcgaccccatggactacagcccatcaggctcctcggcccatgggattttccaggcaagagtactggagtggggtgcca

SEQ ID NO: 42284 - DNA, 1256 bp, Bovine  19866880858734
  misc_feature (1)..(1): n is a, c, g, or t
naatttgcctcagctagctagaaatctttgaatttcacagaagatagggatcttatgcccactccttcatcaaataagcaaggaaactaaaagccaggttgactgagtcactcaaagacactgaatcctggcttttgtttttttttttatctcccttaaactacgtacccacagcacttgattctgaaatgattagttactagattttaaagatagttagaatataaaatagattgatttattgtaattaaaactgtaatgaaatttaatatattttaattacagttataaggataactatagtatccttataagcatttaattagaaagttatcaagagagatacactttttgtataatatctgacacaaaaatgcattttatgctcaagtttattagcccacgagaccaacaagtgcaattcagatcaatctaaatgtagaaaataagtacctgataaacatttactgttttagaacttggtttccataaaataatttaagaaattccttagttttctacacaaaatgaatactaactggaatatttctaacccttttcatactaaatcatatattgtttcaggttaaaacagagagaatttttgagcaatgacagatctctccactcaacccagaatatggtatttcagccctcatactttattgtccagaatttgggaaagtacttttaaaaatgaagaaagaagcagtagcagagagggtgagggtgaggagtggggtaaagagtcatattccaagatgattaaatttaattgtttcatagctttctgtaatatagcttgcatagacttttccaccgattttatcagagaagcataagttttggtttgaatatattggaacagaacaaatcagttaactctgttgtcaaacagtttcataaaagtattgcttattgcctataaggagcttgtacccttaataatcagtaaattaaaaatatatatatcattaagaaatcagattcgagatgtttatatattccttctttcaatataattctccacactttaattgatatgtaaactagtttttttttaatgaccaaaaatgtggggacataaagatgaaccaattaaatggcactgctctatattttctttgcagtgagaaattatacatattttgataaatggacacaactccatccagcaaatagctctgtgtattgtggtgaattcttctgcaattacagaactttgctggaatgcccagtggtctctagataaattc

SEQ ID NO: 42285 - DNA, 1157 bp, Bovine  19866880879026
  misc_feature (1)..(1): n is a, c, g, or t
ntctgttttgtagcaacagggaaggttctgcatcaagttagctgtgagaatgaatttgaacttacatttccactgtttattcaattctcctgtacacctatctttgtttattgtatggtagaaagtggagggcaatctcatttactttttgatcttcatctttgcaggggttgttttgaatattttcagccagtttatattagaatttggtctccttgcttcaaaatacattcccctcttcttcctttaacttgtagctcctgagttttggtctctccttcggaggcaagaaggatctctgccaaaagccaccaagccacacttaggtaattataataaacaagttggggctctcatttcacatgcagagctgaatgaagcagagctgtggtcaaagagatcccagttgctcctctgttagcaatggcacattaatgcactctcatgctcccctcccccactccaacactttttttctttttttaaaggaagtaaatcaggtcactctttagcatgtgaagggctgtagctttcttctgaaaccaccatcaacaacataaacaaattagaggtagtaaaccacacattctgcccacacataaaccacagtcctcaccagagggcagtctacttaatgtgagaataacagcccagttttataagcctctactgggaataaattccagtttcactggttagaacaaagttgggcagccagagtataggctctcctaggttacatgttgggagacaccgaagtggagagaccaggaaatatattttataagcttctggtacaccaaacttggaccattctttggttttcattatgtagaactgggactgcttgagtggaatggacctggggctgaacttgtccaatgtgcttattttatggaaggggagtcagagacccctcaaaagctacgactctcaagctcttaaggttgctctgggcagggaagacatattgctgaatccagacctccacatctgggcatgcaccactcctgcttttcctgagtgcaaatggcatagtttacaactgccaacttgacccatacaggagttataaaatattccctataccttcctgatgctgatatgcttcctttcctgacaatggtgagtcctcaactaatgtgtccagccctaaa

SEQ ID NO: 42286 - DNA, 1190 bp, Bovine  19866880886696
  misc_feature (1)..(1): n is a, c, g, or t
ntgttgtgcccaggaggtctcatggtggttgaaggctggcagagttaatactataaatatgtttccttttcctcctccctctgctgcttatggaaccggctagatatttcatcaaagtattaatttctcaaatgcagacaacttccaagggcataattagattagggagaagaaagctggcaaaagtggcatcatgccacaaattcactttagccatatttagtgcaaacatctctgtgctcccatttcattttatctttatctgattttatactgtagcaataaaaaaaatactcaaagtgaccaaaaattatctctgagccagagacatccatgccaattcttagctagatcttaactgacttttcaaaaatacctttgtagtttttgtcactggtagttaaaaaccacttgagggttttaaatttttttttaattggcaagccaagcactttgcaaagactgtagaaagaattacaaaatcagctggcaatgctggctttggcctggggaattttaaatatgtaattgcagaccattcaaggaactattgcatctttcttttctccctgatttaagatagctactaggttagggaaagtacttcaactttttagttgacatttttagtgtgatgaaaaatcattgtttcatccatgtgtcaattaaaaggaaggacaactcttatttctgaccaaggaaatgttcagtttggcttgtcactgtaatcaaattcatcccaggatgcatgtgaggaaggtcacacaactttttgtgcttagttttttcagaggtaaaataaaaataccttaaagaacatttcaaaccttgattaagatattttgatcccaaaataaattagtccttggaatattggttgtacataatacaatctgttttgattttgtgaaatctataactgggccacaagacaaaatttgctattagccaaggttagaattaaaatgattttattaggataatcatgaaaaagttttatttcagtatcaactcatgttttcagaaatcaagtgaaattattggcaacaagtaagaacacaattgtcttttatcataacttttgtccccctattaaataatatgctatgtgatttttaaaagaagtttctaatgcttcctacttggtttgttaccaatacatggactctgttctaaatgcttcagtactg

SEQ ID NO: 42287 - DNA, 1130 bp, Bovine  19866880905381
  misc_feature (1)..(1): n is a, c, g, or t
ncttatatcaatcaaaattgccattttaacagatgtgcatctcaaactcaatatggcactctttacaatgactacatatcccaactgtgaaggcaaaatggttgttacgtggaatatgtctttaaaaccttcccgcggttaagcaaaaaagagagacacaccctagccttattttttccatctggatccaaaacttcagttcatgggcaaagtctatggtatttgtgttggcaagaagaagtgtgtgatttccaaacaccatctagtagtgctgtaacgcagcccacagtgctaatgaggcatggtggtgaatatcgttcttgtaatagtatcaattgtttcaatatgtaaaagtctctttaaagctatatattgaacctatacttatgtctagccatcctaaaattgaatcctacaagttactaacagacttaagcttacaaccatctctgaaaatagatcaaaaggcacaccctgctcaagatggctcaataatgtccttttctgggaaaaagtgagagcagttctcaaaagaacacttttttaattgaatgattgcacaacctaatagagggattgcccagatttggtatttggtgaggggagattcaaccttgctagattaccctcacttcctctggagctctgtccccaggaggatgttaaaatcaaacaaccaagaattatatcagtacagtgcttaatgaagatgtcctatagtggaatttaaacaaatgtgaatgtacttatttttcctatttgattaattgctatattcctcctaaagaaaacacttttcagatacattgaaagattagatcatggctaatctatacatagtatctgtacatacatcactaagaagagctcacaagccagatttcacactcacaaacacatattgtttttgtatttcattatttttttcaatccatacccaacaaaatgatccccatcaccaaccagcctggctgcctaaacaagatttgtaagatcctatcaatgatggtgatggcaagtgaaccatgaggcaagtttgtcaattctgcctcttaaggttggggatgtgaccttgtgtatccacaatataattttactatttatattgtctaaaggaatgccaccatata

SEQ ID NO: 42288 - DNA, 1323 bp, Bovine  19866880920287
  misc_feature (1)..(1): n is a, c, g, or t
nattcctatcatgcaaagaccatgatactctggtttaaaagctgaaaatagcatcttttcagtggcacagctaaaccctccattagatgttatggtagtaaaacttcaggatggttttcaaagtctttctaatctgaccagcagtccatttctctaagtctaccacaacttccggaacaagctggcggtcaatctccagttagtctaaaaaagtcacggctcatgacccctctgatctgagatcttgaagtcacgattgtacaagcctccatcttcaccatgacgtgaaagaagacggttgttcttctgaaggatacacaatgtgaaacatgactggcaagttttctccataaacagaacaaatctatccctcacagagctgcctttatttgagcaagacatttgcaaagcttagcgtctccttgaatctattagaaacccttccctgagtgaggaaacagacattgtaaatgaaccatgactcagaaacccccttgtaccagaaaatatcctacagattccagaggcattttatgttctgtctattttcctgacatactagttctaactatctgattcatttattttttgtttaatgttttaaccagtttcaatagattattacagtcaaacaagtgatttctttcagggttaggatttttttctccttctgactttggaagagtttcagattctgttgaaggaaaggctcttttatatactacagaaacaccccataccatatattcagctcagctacaataagaaaagccagacccagatgtcccaagctaaacagaggaaaagggggaaagtaaaaacttaatgttcatttgcagaacgtccctacttacatacaccccagataaccagttggaatcaatgaaaatttataagcttagagaataaaaatctaattctctcatctcagaggaccttccagcactttctattttttatgttctacacagatgacttcaatggcacacagaataactcaacaattaagagagaaagaatgttcatttccatgctttttccagtagaaaacagaactgtgagtcacaaacttgagttacccatgcacataacctatctttagcatatagttatcccctcagattctgtccaaatctggcccagagttattcatttggatcaaaagataaaaaattattatgacctttgatccagagatttcatttctagaaataagaccatgtgtgaaaatgtatctaataaagaacaatcatatacaacatttgttgagcatgtattacaaagcaggcattgtcctaagactttatatccagcatataagca

SEQ ID NO: 42289 - DNA, 2932 bp, Bovine  19866880961540
  misc_feature (1)..(1): n is a, c, g, or t
nactgttaatcgcttgaaggccgaggtcatttctcctcagacaatttattgcatggagggcggattatcaaaatgattttctgaaaagaacaattagaaggaataaatgcaaataaaatagtatcataaaatatttctggattgatttttaataaataaaatccaaagtaatatgaaaatgctaatgctctggctagaggggaataatgaccatattctttagggacagagtttccgccaacctctctgagcagcatcatcattccatatctctgccctgtgatcagtgtgtgtcagaatccttcatagtgacaaatgtgctgtccacttgcatctgtggagaatgttttagcagctgagtgattatgaatcaaacctctgagcttacagcccctaccgcctcccaatgcgttcacatttgtcgtctgacaagtaaatgtatcttgactttcctctgagatttttttgcaccgtgtttgatgaaagacatttggcaaattggcagtggtgccctgtacgttgcaatttgtagctagcattaggagtccgggcatgaaatgagagggcaggctccaggataaaggaaaaagaaagaaagctaactacatatgaatagtcgtttgaaaaatcaagcatacaatattccctttgtaagaagagaatcatgtttaggccattcacttaagattttgctctagttttagaagtcagtagtattctgtccagccatgtgtccacacaagataaattttattaattatccttttgagtacaaattgttgccttttatttttaacctgagctcaaaataaattaggcctccaactctgtcttgctgtcttatcagcagaagtatcgttttcttgagttgatcagttgcttgaatgtacagtttttaccagttttaatccttgcatgaagtcttcttagtctactgccctagccttcggagaaacatacagagtgcatacaaaatacaaacacctttttaacagctttctgtgttctccagtggcaaagtgccctgagaaccaaataaacaatggatgagttgattttacaagatggcctgagagtttgctttttctacttacaaattcagcagtaagcagcttccaaataaaatgtgagcatggaagaaacattttaggaaggttgaaaggagagagtctgtcttaactatagataggaagaatcaagctaactttgaaagtaaataccaccctctgattatgactctgtcaaatatgtgtgcagatagacaaaaacttgaagattataagcatagtaaattaggttatttgaggagaagaactaggcaggatactttttctatgggaatactgccctagagtgtggtcatgccaatgtaatatgaagttatgataatatatcatgaagtatcatttcaattcaatcctttttcaggacaaactaatattttaccaacattcttcatgtatgatcccacttaaaaatctagtatatcgatattaatttaacataaagtacatcttacacacttaattttttccttctgcattacatacatttggctctagcagtaactttggaacactggatgtttttcatgctttgagtttttttcgtgggacttcctagttcctatggtttttattacttaggcaaggcatacagaatattttcctataatttccagtttactattttttactgtatattttatttggtcagcttgcaggccaagaagatggtggactcatgtcccaaagaaccctcttgccagagttagaattcagacttcttttgttctaaaaggggaggggtagagaaccaaacatctcttggttctggtcagcctctggagaggatgtattaatttcttccttcctgcagtcactcacaggtgggcctagtgaatagcatgatactaatgctgtctcttaatttaataaaatctgtaacttggttttgttgtctcgtgtatttcattgctctattgtgtatcaaattataaagtgatctgactaaggtcttatggaaaagttcatatgacattgtgtatgcttggttctacctttattgtctttaaagtcaatgaattctctcatctgtttaatattgggacactataatctctttctacagcctctgcattcagtggatttgatgcttcccttttattaataatgatttcttagtttgctagagatgaatgcggcaggaaggatctctgccctgtccttcatggtcttgtgcttttgcctttcagatgtcggctattgaaaacatggcagagaagctggagagcttcagtgccctgaaaccagaggccagtgaacttctacagtctgttccctccatgttcaacttcagagctcctcccaacgccctgccagagaacctcctacggaaaggaaaggagcgctatacctgcaggtaactgcaaagttgatcatgactggcttcccgaaaatctcccctctgatttcaaaaggccatgctgtttgttttggaaattattcttgattggatgattaatagcaaccatgatagatttcaagcacttcaaagtactctttatttagtgagatataaaaatagtggtttaaaagattattattacatgaaaattttaacacaggccgtttggttgtgataaatgaggttggaaatggtccaaatgctatctatttgtttcactttgatgtttatgaattttctttcacagttaattattttcatccaaaggtataatactactgtcctcaagcatatatttatttattaattgtcatggtatttaagaataaggctcttaatgaaggacaaataaggtcaataagtgagaaaactagttaataagtgccttgttactcatcagtagtatagcaaagcttttatttgtttctgttttcttttttaaaaataaatcatgcttatcatttct

SEQ ID NO: 42290 - DNA, 3270 bp, Bovine  19866881001238
  misc_feature (1)..(1): n is a, c, g, or t
nccgttgcaacaggacaggaccttttcttttggaaaaaaataaaacacttttctaaaatctgtctatcaaaatcagtctatgaaacgaaacataaaacataccagcaaaaaatcctttatatataatctatggtttcttttttaaaagcctaaaatctaacaatacagaaggaattatctaatacaaatacaaaacaaaattaatttagaaaataatttcttagtaagatcttcagcattctaaaaagactttcaaaaaatgtagtaatacttacataatttagaatagacctttcccaaaacactgcactgtaacaaatatatttaaagatgaacttaactgataattttgagtgttacaatgatagcagatacaactaaaatacacgcatatgatagtaatacagcattagaagatgacaggagaaaaactcagtcttcaaactttctttacaagtcattctggaagagtgtcatgccatggcaatttaaaataaaattattttagctaagaagcagataatgtgatgaagaaaaacacaataaatcaaccttagccacttcaatcctttaatgtgacaaataataaatgtaaaggctaatttatgtaaagacaaaatactaattaccatcatgttagaggaaatctggtaactactacccttacacaattatgacatcactggtagcagtttttaaaaagaaattttgttcattagatgcttggattaatgaagatgtgaattaaatatagcctctccatttcagcagagttcttaaaaaggctgtcttaattttctttaatttcttcacattccaataaattcctattgaatttaagccagaatagattagttgaacatttttataactttataaattgtatttaaatcctgtatattatattaatacatatgaatgattagacttcttagataaattaaatactaagtttgatgtacattgtacaaaggcagtatttcaaactctaagtcaaccccactggtggcagtttattgtgaaaatgctgagtgtgctgtgaaatggtgatgatctgtacagtttacaagagtttagtttctagttggttcctatgactaggaccccagagaaaacacaattaaagaaatcaataccaatagaaaatatattaattttattacaggtgtagtttaaaagcagaaaacaaatgagccataactaatgcatggcagaaataggaaataatgtcaccatggtgtttaatcagtagtataggaacagactttgtggaactaaaaatttaatgtccaaagactaggcagtgagactaaatcaatacgtggggaaaatggaaggggcaagtggtagtatcagaataaatttgaattttctaagttcattaagaagggaaaggactaatgtgaaactacagccaccaccaactgttatggtttaatctataaaaattttaaacttgaaacttataaaaaaaactcaaatataaaatgtttaataaactggctttctgataactcaaatgatctacttataattgaagttaattttttaacaatttatgaatataatgtaccaaattcagaagtcaagtgttttatactatgcactaagtttctatttagaaaattctttagggttttattttttaaaaagtgcataagaggtataagagaagcttatcaaaacacaactcagtatatttccctcatctccaataatctagaaacttattaaacagtctgcatcaaatttgaaactgcttttaataagataaaaacaccaaatatctatctaaaattcattttgaaaatgtagtctcagacaacttaaatcaaaaaagtattgaccactgattttctccagaattctgagttctacacaacaaaatttatatctagttttctagtttttaagagaagcactttttgtttcattagaaaagttaccttcagtgcactatattaatagagaaatagcacaattcttattcagtacctcaatttttatagtagaaatatgaatttcccccctcacagtttgaatgtgaaagtcttcccttgtggctcagctggtaaagaatccgcctgcaatgtgggagacctggcttcaatccctgggttgggaaaatcccctggagaagggaaaggctacccatcccagttctggcctggagaattcgccagagtcagacacgactgagcaactttcatagtttatatactggtgtatggagcttgctaacagcactgtcatgggctgatactattatggattttgtttaaattttgagaagaaaataaatatattttacaggtcaaaactcaatcataaactgatagatttcacttcagtaaatgaaaggcaatctgaaatgaaaaacagaaatggaattaaggcagctctaaaacaaagttatacttattcaccccaaatagtgctactgcagtataattcattcctttaaaagttgtgtgtataacctagacataaaagccaaacatcaaaacaagcattgcagctatgatgcagcatcaggtgcttttactttggtgaatgagaataatggtcacaactcaaatgaatggtcaatttaatatgaatatatgcaccttaccagcaatgtttatgtttactaccagagacgtcttagcaattccatattcctcacaaagtcaatatagctgttgtaaaaaaatcaactgtggctctgaatacccatttgcggctggcctcagcaacgcgtctggagcaggaggctggctgtctgcgacaggcagcagcaggtggtggtcctcagcccccagtgggagagtcagtggcaaagtcacatcagaaggtttcacgtccagagtttctgacagaggacttttttgtatggagtcttgttcattcaagggatgatcctctatactggaatctagaattttatctgcacctgaagaagggaaaaaactcattatctttaaaaacaaaacaaaaaccccaaggaagactcatctacttaccattcccattctaaccccacctttagtcacaccatttctcttttgctgatctgcccttctccttacctgcacaaacccattctggacctcaagactaggctcacgcatcaactccattacaaaaatggacttaattgctctagaccagggtaagctgtttcttaatcactcatttgtcaatacttcatataccatctccggacacctagctatctatcttactgctatgtaacatcctacttaggtatgccttgaatgctcaaca

SEQ ID NO: 42291 - DNA, 1023 bp, Bovine  19866881026460
  misc_feature (1)..(1): n is a, c, g, or t
ngaaaaacagagctgtctgcagctccaggagcaggagagagagtctccagtttaagtcaactaatcctttgcaagaaacagagaactgctcttggccaaagattaatcttgcagttccatcctcacatagaaatcctgcagactgtaataatcttgactttgggactcaggaaaaaatttttttttaatcatgcaaggatttggatcactgatggtcttcactgtggggcttgttgtatttactccagggttattgttcatccttagccagtgggagagtgacagggcatggggagataaagctggcttaggtctcagcagtgctttaaagttgtgggtgccagtcacctttaggaaccttctctgggcaaggcagatgccttaatttggaatgatatttagccagaaattacctaaacctccatggtacgaagacttccaatttccatgggaatgatatgtgtatctcttttttgcttacctagacttccaggtacttactatatgctgtgacacataaaagtttctactacagattattatactaagtgaagtaagagaaagacaaatatgtgatatcatttaaatgtggaatctaaaaaactgatacagatgaacttatttacaaaacagaaatgggctcacagacattgaaaacaaaagggaagtaggggagggataaattaggagtttgggattaacaggtaccctctgctatatataaaatagataaccagcaaggacatattatatggcacagggaactatattcagtgtcttgtaataacttatcataaaaaagaatctggataaaagaatatctatgtatgaataactgaatcactttgttgcacccctgagactaacataacattgcaaatcagctatacttaaaattaaaaaagaagagtttagcaacatgggtatttctaaaaagaaagctattttttttgcaccttagcagcaggtaaaatgttagttggttcacacaatccattgtctcttttctttcatctaaccctg

SEQ ID NO: 42292 - DNA, 3237 bp, Bovine  19866881089262
  misc_feature (1)..(1): n is a, c, g, or t
nccatgggattttccaggcaagagtactggagtagggtgccattgccttctcccccttatggcctaggtgatccccaaataggaggaagaaagaagccatgtctggtctataactctgatgttgggccagtgttttcatggctaccagctccctcagaaagtggggtgaggagcaagtagccttaggtcctgtcaaggttggcagctatgttgggagagcagacccctggtggatagatggctggagctggggagagataatggtgagaagaggacagcatggaggagaaggggcaaacggagctctagaagacctgactgatgaaattactcagttcaccctagatcagtctgaccctttgtccttgccaccccccagactgcatattgaccttctgatgccagtctccacatgctcctacgtgggcaagcctcatggtcagattcagttcaacaaatatttaccaaatgcctaccctgctcctggtgttgtgataggtgttcagaagtgaagggtggtcctatccatcaagagtcctgggcctcactgtgtaacctctgggtccccttagccctgcggagttccacttcttcctctgttcaataaggacaatggtatgtgcctcctggggtcattgtaaggactctgtgacatgaaacttaaaaagagagacacataaaagattccaatacttgtttcctttactccacccattctcttgttccaacctgtttcaaagttctctttaatattcctttctagcagagtccacctgcctgcacagagaagactttaagtgacatttctcctgaggggtgggttgtgtgtgtatgtgtgtgtgcccatggttggtttggacatgtgaggtgctaaggttgttcaatgaagtgaaattcaggtgtagtgaagagagttctttacactaaacctaattatttcaaaccttttagtcttcagaggaaaaaatgaaatatttggcaattaatctcataattcaaatagaaaacttgctttgtttgacttacttgggcaatactctttttaatgtaagtagttcttactaaagtatttttttgaggcaactgagtcattgttatctccatttggcttgtgctatgctgtgtgtagttgcttggtcatgtctgatgctttgtgaccccatggactgtagcccagcaggctcttctgtccatggggattcttcaaataagaacactggagtgttggcttacctaagatatactgggtagcttccagtggctcagacagtaaagaatcttcctgcaatgcaggagactcaggttcgatccctgggttgggaagatcccctagagaagggaatggctacccacttcactgttcttgcatggaaaattccagggacagaggaacatggtgggctacagtccatgtggtcgcaaacagtcagacacaactgagacaccttctgtggaaacttgaattatggaatttatatctataaacagagttttggaatatatttctcaaatatatacatttttagttttctatcccaatgtgaatatgcttattgggataactttatatcccagtaaatgtatgtgcattgttttcctttaatagaattttatgttttctcctatattctgattcttaactatattaattttaggcaagcatagactaggaaattaagctcaagaattttgttctcttaatgtttagctctcaaatattggtgagtccttgctgttttatgtatgtaacactctgtttcatgcccacaagtagatttcttgacatttgggccacattagtaatttaaataagctttttctttcttaaaaatattaagtatctcatggccagcatcactgtcctttacttcacaacttttcttcaatttttctagtgctgttactttcttttattagaagaactgcatttctttttctttgaaataattaaacagctcagtccagataagacactttaatgcattatggtaaccaattttaagtgaacaactttgattttggggcccctggccaggctgttgtttttctgggccattctaaagagagagggagattgaatgtccagaagagtgtctgcgcttgacatttctaagaataactatgataacttcgagtgattctggttaatcttatgacaggaggacagatttgagaactgattaagcctccctttctatcattctgtcctaaaaacacctgggactctcagcagaggaatctatgaatcactgtctgttgtccactcatcctgtccggtcctctccacgctggaactaatcaactgccttgaatgaagcatgacttgcaagctgaattctgaaacctcctggaatattcaggaaggagcaggcacaatctttcagggtgatttggcccacactccaaatgagcctccagatgtagacaagatggtcaagaggtcagacaacacacattttgaatgaattccccttgaccatttttgggttacttgttctcgaaagatattttcaagggagtagtagatcaaaaacatgggatatgtcaatatgtcaatacctcagtcttctatttttcagattgttggtttgaacagatcacctgctgctttgatgtttgtagacagagcggctggttgatggtgtacacgtcgggtagcgttgtcctgagcgggcggggttggcactgtgaacctgctcaccggccagacctgctcacctgactgccagagccgtctggcaggtcagagctggtgtgcagggatgacgcctgcgctggttaccttcaaatactggtttatcttcttgggtgccccctctgctggaacaaaagaataatcattgtctctaagaacaggcaggggcttagaatttggcccccaaagcaatcacctcttctttcctaactgcaggccagcgggataaacacagttcccagggtggagaaggaggactttctgggacaggaaagcatttggtccttccaagtgaggcttctttctggagaactttgggcaagcctctttgagttggactagccagtgtcttccgggaagcggagagattaaagcaccagattagtgatgctacacagctgaatagcaacacatgtggccaaaacacttacagcatcattgtttttgaaaatgaactcccagcacagttcagtacaattttttctagtgtgtcatttcccactctacttccccagccacatacaaagacagaagcagcattt

SEQ ID NO: 42293 - DNA, 838 bp, Bovine  19866881138018
  misc_feature (1)..(1): n is a, c, g, or t
nttgaattgaaatgttttagggctattttaagtgttataatgaaaaggggtaagtttttttcatcattaagcatgtgtaaattatgtaatgtcttttcttcttgaaatccacataatttaagtgctactatagtttatatggggaagagggatggtggctcagacggtaaagcatctgtctgcaatgcaggagacccggcttagatccctgggttgggaagatcccctggagaaggaaatggcagcccactccagtattcttgcctggaaaatcccatgggcggtggagcctggtaggctaccgtccatggggtcgcaaagagtgagacacgactgagcgacttcactttctatagtttatatacatcatgttcgttttcttcaaaagattgtgaagcaaaccccactatatgtaaatttgtacatacagtgaaattctagcagttctcatataattgaactgaattttagatattttagttagatcttttaaaagagttaagaaatattaacataagagatgttttttaatgattatcactgattgttcctcaattattttttcccccaaattttcaactctgtcatttcagtggtccatacatcatgacagttttttgtagtatagttatctgcagtaatgggaggtcattaaagtaagaatggggagtaagcatatagcagtaacacacagaagcaggtacttaatctactaaagatgataaaacacttaacaataaatttacatgcaactttgaagtaactttatttcagataatcttccttttacttttacttaaacaaaaacaaactaaaccagagcaatatctatttattt

SEQ ID NO: 42294 - DNA, 1248 bp, Bovine  19866881148232
  misc_feature (1)..(1): n is a, c, g, or t
ncagagggtaaacaactctttgcatgaagatgaaatgtagttgtcacccacttcagtgacatgacacagcaattgaaagctgctggcagtctgactattagacctcctactgaagggacagcaccaggctgccccaagacaagaagttcaggatgggtcctggtaaatttctgcattctacctgggaaagtgtcatctgcttgtccttaagaaatatacatttcagtaggcaataactgaacaaaatgcttgggagcttgcttcttaaaccagagatctgtggatacaatcattcatctacttcgccacagctcacaaaattttacgactacatagaccccaaaccaaaacaaggaggtaattctgtgaaaatgaaagtttctaccagattcttgacatgaaaaacaaatgtagtctctataaacgagagagctttttttttcttttttaaattatgtctatgatggggtagaaggccactgtccatcatggaaatagttgacaattggttacactcaaatcatctactgactggggattttcttggtcttgtacatcttggcttcctacccgatgtctatttcatcatggtccctactgccctctggtcttgatacatataactgccctataagactcttccctaaaatcttcatggtagtgaacaaatgagaagaaaaataacaatctatactttttttaaaaggtggggggtgggtcaactttgaaatgccacaaatcagaaattatgactcatctgtcttggtttatgcagtgttcatcacagtagctgagacacaagctctcaaaaggtttaaataatggtaagtctttactgtgaatattgagtacaaatgattcctctttcacttttaacttataaaaatcaagttaatcatcaaatactgtatcttaagtatctggggacggttcagcccctttgaaaagagtttggcagtttttctaaacgttaaacctagagttctatgtgacccaacaattcctctcctaggtacatagccaagagaattgaaaccagatacgcacacaaaactaattcacaaacattcataacgtcattatttataatagccccccaaaatggaaacaacctaaatgtccatcaactgatcaatggataaacaaaatgcagtgtatccatgcaatggaaaattactcagccataaaatgaatgaagttttgatacatgccacaatatgaatgaaccttgagagcaccatgatatgt

SEQ ID NO: 42295 - DNA, 1254 bp, Bovine  19866881190432
  misc_feature (1)..(1): n is a, c, g, or t
nacttgaagactcagatctcttctagtctctccatatttttagagaatctttagtcacaattccagattcctctctcgagaattctatccactaagaaaggcatttccccactcccaccatgattcagagcaaatatgggccatctctgaacagagcaaatagtctttggtgaccagacttaacctaacattccagattgtgatctgttcatttctgaatagactttggtaactagtctcccaaaacacttcccgcatgaaccatgaagccatatattcatgcccttgtatagcccctccccttaaatctagggtagtcacatgacttgtattggccaataggaaaatagcagaaatgacatcgcttgacttcagtgctaggtcataaaagtcctacatcttgggatgcttatccagcaatccagtcactgtgctgtgagaagatcaagccatatggagaaggcatatgcaaacattccagtcaagagccacagccataagttaaagatgtcaggcagagaaagacaaatactatatgatattatctacatgtggaatttaaaaactagtgaatataacaaaaaagaagcagattcatagatacatagagaacaaactagtggttaccagtggagagagggaaaggggaagaggcaatacaggggcaggaggggaagaaaggattattatgggattatatgaaatcatctacatgaaacttttgaaaattgtaaagcattatagaatttaaagaatctttcattcagaagaccaaaaaaaagagacactgttgagttctgacagccagaagcagcagccgtttgattgagccatactgaatgtcaagttcaacagtctcttaatgactacggccccagccaacatctgactgcaaccacgtgagaccccaaataagaaccacctagccaaactctatcactactcagaaccgaaagaaataataataaaaaattgttttaagccaccaaatttgtgactggtttgttacacaaataaaatcagatacaacattgagtctagataccagaatctactttattcaaggcctggaaatgccaaagatgaccctggggtctcaaggacttacaagcaacatgcctccagcctcagatactaaagggctttgactgactccaaactctgaaataaagatcaaccagaggaactgaactctctggtactgggcctagagactgttggagaatatcgcacaacagaaaagtcttatttaac

SEQ ID NO: 42296 - DNA, 703 bp, Bovine  19866881207196
  misc_feature (1)..(1): n is a, c, g, or t
ngtcttcatttcttagttatccagctttaagatatgcaacttgtcggtaaactttctttctccttaatgaataatcattttctctgaaagcaatgccaaaccagagaaaattcattttgggcccagtcagacctagaaagaaataggtgagaaatattgctattcagatacctggtacatatatctaaaatcccaaattaccccattcttctttattaccaaacatacattatttgattgtcagctcctgactctaaactcagtcgttaggtatcttgaaagtttgatgctgttgttgctttaatggatattcatgtttcagttaacatatagatttcatgtttcaatgggtaaggcttcgctgcaggactcaaaaccaaacttacaaacgtgagaactatttcttttaaaatgatctagagaggcacacattcattgtaatatcacatttcaggactgcatggctagaatataatgtactgtcaaagcactgcatcaaaattatttaatgaatttctgactccagtaaaatctctttccactattccttcccatctatttaacggaacataagaaaaatttactatccactcacatcattatttttctatgactgcataggtatatgtttgaggggagcaaacaaaaagccaagttcatacactgcattttaaccaatcaaagtaatctacagcaattctgg

SEQ ID NO: 42297 - DNA, 853 bp, Bovine  19866881210809
  misc_feature (1)..(1): n is a, c, g, or t
nctcactgtggttatcaatcgctgacagttgacagtttaattttacaccacaagtacctcattacttgtgtaggcacttgaagaacatgtgggcactggatcggatcagtgatcaatgacaaaggtgcagagggtataagcggtagcagtaaaagtgaaggtctccgtgcatgagttggcagtggtggggatacatgacagggggagtttaactgacaaacagtctgtcaggttgaaaagaatggagatttgccagggagctagctgtagattataacatatatctcttgacttgagggaaaggaagaggggaaagcccctacccgaagcagagccttcctttcttgaaaatgcttaggcaaatttaatgaatgttcaagactataaatttttattctacaagcgtttatctcacgacatagatccattcaggtgtctaggaatttaagatcaagaggatgcagtgatgctattttataaagatatatgtgtgtgtgtgtatatgtgtgtgtgtgtgtgtgtgtgtgtgtgtgtatgtgggtacatataccaaccccaccaaagcagaccattgctgttttagattgtcctgcagcagctgatggtagctattcaataataagaaagttattccatatgagcccttttattcttaccaatacaattcacgatcaacacctctaaaatagattgccttagagtggtagggaaaaaaatccattctttcaagtgtcttttatagtggtattttaataaattccttgtaatgtgcctctctcctcaaccttttattttcaagaaaaaagtttttgatagtcttttccttataaaaagttttttgttagtgttgtta

SEQ ID NO: 42298 - DNA, 1415 bp, Bovine  19866881222741
  misc_feature (1)..(1): n is a, c, g, or t
nactcagacctgggatacatgcccatccctgaaccaaatcagaacccattccctggatcttggaaggatgttatgttaacataggaaagccagctgctagagcatataaattccaaattctctctggcttcataaaacaaacatttatttctcagtcatgttatagaccagtgtaaatgttcctaatcctaatgattggttcacctccaagaggttattcagagctcttagtgtcttagaattcgtgcatcttccacactgaactcccaaagttactgcttcttaactatgttagcccgaagtgacacgcatcacttctgctcacatcccattggtgagtgctagtcacatggcctctcctaggtcacgagagatgtgaaatgtggtccttggctgggcatctgctccctagcatgcactccacactgtggaagggagcatgagcctttgatggtcagctagctgactctgccacagatgttaatcctacccatgtggtacagaaggagaggaaaggagtgagtgttgggaggcaaccaaccatgtcagccacgccaggggacctggtctttgtgtcagtgaggcattgatttgtgcagaagcagatgtgtcagccctccattgcctactgaatctaatttacgtgatcagaatccttctatcacttaaaaataattgccaagaatattttaaactagtaaataaatgaattcttgtaagatgtcaggttcctctttcttgaggaacagataagatttgagactcaggtgggctttgaggcagggtgctccttctcgggatcatggtgcatgcctgcggggatgggacactgtctgttacatgcaggagggctgctggggatgaagtgaggagaatgtgtgcatgagggctttgtgcagcatgatagctaaactattaagtccacactggaggagtcgagaaataagacaaagcataagagtgagagatgacacgtacttaggtgggagaaggctttgacatttcagaaatgagtccagatgccaatagaagacttctaaatgctctgagatcataggctgtcatggaaagaaacacagttcactataattatctattacatgagagttttaactatccctcggcatagttcttttctgatccttcaggtgtcagattaaatatttcttctctggagagaacttccttgatcagagtttcctctaccctgccattgcttctttattactgaactctatgtggaaattgtaatcatttggtacttgtttaaaatctgtctttcatgtgccgtgggttatgcatgtgccagtggctatgtgtcctttgactccagttgcatacaattaccttgcactctgtaggaataatttcaaagaatcggcattgaagtattttatagaccaaaattataaaca

SEQ ID NO: 42299 - DNA, 737 bp, Bovine  19866881258624
  misc_feature (1)..(1): n is a, c, g, or t
naccactacttttggtcgacattcatcatctttcccctgtattactgccgtggcctcctctctggacctgtgcctccaagctccccctactctgatcattcatttattgtggtcatgtcactgccatgtgtaaaagtctccagtgcctttaagatatagtccacattgattagcttcataatcagatcctgcctccctctcctgtcttattcttttttcattcattcatcccacaaataagcattgagcatctagtatgtatcaggcactattttagacactagaggtaaggcagaaaacactgctatgtcttcatcaagccccacacccacgtgctacaatacacagcacacacatctcacacacactctcacaaatacacacactgacacacataaacacacctgatttccagcaacttgaaatctcaacattttctacatgacccatattctttcaagctttcatataatacctccactggctgaaagaatcttttccttcctctcagacatatttgcactccctatagactcaacactcagatttaacctccaaggcctgtaggaattccccacgcagacttagacatactcccttctctccaagacacaccactttgaacacatatctttcacatggacatcttttgtacatgtgtgtctccatcattaaacactgagtcctttgagagtagggtcccatctccttcagtatatatcttcaacaattttttt

SEQ ID NO: 42300 - DNA, 804 bp, Bovine  19866881271392
  misc_feature (1)..(1): n is a, c, g, or t
nacctgtaacttgcctttgggtttctttgtgtgttaactgttctgagtattgccagaatactggcaatggttttggtttttgagatgatgatactcatctgtgggatgctcaggaatcatgagagtcctcatagagatagatactcacagctttaggacagttcagggttcatgacagctcatcagtcacagagcagtgattttacctttaacttctaagatccctttaataggaaccactgttttagttgtccaagttttttctgacgacccaagatccatccattaccagtcctgattagagatcatcagacttttcccaggaggtggctcactatgaatgaggagattctccaggcaagaacactggagtgggttgccatttccttctccaatgcatgaaagtgaaaagtgaaagtgaagtcgcttagtcacgtccaactcttagcgaccccatggactgcagcctacaggctcctccatccatgggattttccaggcaagagttctggagtggggtgccattgccttctccgaacatggatctaaacatccctaaattgtgggggtagtgctgtttttgtataactttatttggttgcagaagggaatccaagattacacagagagtatttttaagagctgcctctgataattgtcgacaatgctagtcattattttctgacttgagttctctggagctaaccttgtaatgacacttagcccatttaaaattctttattttttcccgcgcctcttcagttgtgtaattgttccattcacattatggagatatgtcatgtc

SEQ ID NO: 42301 - DNA, 1227 bp, Bovine  19866881296791
  misc_feature (1)..(1): n is a, c, g, or t
nctcatgcttatcatagtcaaagttaaacctgcttaaaataaaatccatcaggatgctcgttttgtttaccctgtgctacactacaaagaggaagcaacccaggacattgttctttgctgctgagaacaattccatttccttcctgttggctgattttatttttcttgataacagcatgtaatcatggaaatttttttcaagcagatttgtactataaaactgagtctctcctgcagcaacataagatccttctgcagagcaaggcagccaagaacagtacatttagagaagggcatttgctttaatgtgtgtgacaaacttcctgttgccttttaatgttctgttgctagaacagcttaactggataattaattaaatgagcacactcacaggaaatatttttaaataaaattttggaataaagtgtgacataccgaaagaaaaatatacaaatcatgagtgtgtggcttggtgaattatcacaaagtgaacacacccgtgtgacatcaaccagacctagaagtagaacagcagcacccagaagcctccagtgcccacctagccacctgactcttccctttcccaccatgctcacctctgcctgttttcaatgtcctataaaatgaaacttacgtactcttttatgctgaacttttcaatattgagggaatccgtattctgtgtagcaacagttccttcactgtctttgcacagatgattaatcacatcctggatgggagagagaaccacgcagactagtggaggtttccctcagactaggactccaagtgctgcaccattgccttggctccctgacctaacactggatgaacagacgcaccagtatccaccatggtggatagaataattccctgagactctctgaccattaaacctcagtccctgttaagaagccttctgttgcctttcttgtgaattcaacaagtatttactgagcacatccaatgtgtgaatcactgtgctgtgtgaggactgcaggaatcacattcccaagaaggagcaatgagatgagtacaaaacaaaccatcgttcaagggctcaatctgattagaagtgataagagaatacaaagtatgttggagttttgcagtcagaggaaatcacattcagggaatagaaaaagactgcataagtctttggggtccagtgggattattaggttacatgttggagtaaaaacaagtagaaaacaaagacagataaga

SEQ ID NO: 42302 - DNA, 1361 bp, Bovine  19866881302501
  misc_feature (1)..(1): n is a, c, g, or t
nataaatactatttgctattgtcatgatcatcctcatcattttcatcatcagtattttattctcttcctctcttcttcaaccatgattttcagagccgctgatggaggaaaaaatatatttggcagccccaacagattgaattcctttatttactcaatcatccattcccatatatgaactgagagcctgccaaattcagggcttgaacgtggggaataagaaattagttagcagcaattagctcagctctcttaatcagaagtgattaagagagtgtagagaatatgttctgagggttcagaatggcacgtgatttcttcatgtgggaggagatgaaactgggatccccttttgggaaatgcagtcatcaatgcattctgggaaaatatagtagggaccaaataaatgaactgagttgaattgaataattctctatgccccctccaggcagtgccataaaggtagagaggaagtaccaaatttcagaaacagttaggctgaataggtcttcctgggttagcctgggcccctaacagataccgagaatgaaatttctatggggaaacgtactcttgaattctgaacaccacacacaagtggtcttttgacttgctgcttgtttgtgagagggggctggttggaattcatttttgatttgaaaggaaaatgagtagagcctgaaaccgcatatttacatggtttctcgtgtgtcatcttactattgccatatctcaaatatacccagacattttacagaagcttaaacaatactgtccagctctggttttgctcctttcccaccaattcgcttttagcttatctggactttggtatgtcatttggaaattggactacgttttccttgcttgcattgaaaaaagaaatgattaactgaaataacactgcacattactcagatttaattatgtttgtaatacatcacccagtgatatggggcaacttcttgccgttcgttttccatcatgcatttctcataacatatggtcctcatgaaatagttttgattcagagtccccagtagcatatggcaaaaaaaaaaaaaaaaaaaaagcccctcaagtcaaatgcaaagtaaaggccagcctcgttgccccagaggaacctccatcgactgctagccagaaagctgggaatctgaattggtgtcagggtttcactcatcatgaagattttacattttggtttgggactttggagcatgaggttctggatggtaaaagtcagaagagatatggcttttgtaatgtctgccgagattcctgtgtcgataaggtcagggagaaagttaatagatttttatcttctcatcacatgaacttaatataggggcaactgtttg

SEQ ID NO: 42303 - DNA, 1666 bp, Bovine  19866881337428
  misc_feature (1)..(1): n is a, c, g, or t
ntgtgttccgtaagaaagaaaggaaagttcaagaatagcctcacagagaaaacattttaataaaattttgaaacataaaataggtgattacccagcaaataataggggagtggacatttgatcctggcagagggcatagaacatcctgagttaggaaagtatgagtagtctgtgaaaatgtcagtttatgtagttgatttgttctatacggtgtgtttaaagctaaataaattgaggcactgattttattacaatagtaagtgtcatctcattttttgaggcatatggtgaattgaagtagacattctctatcaaggaataagtcaatgattctacttattaatgaatggaatgagggtgtaatgtaatgatttataaaccaaatgtgttttctctattaaatgaaattaatgatttcactgcagcactggtaatggctaacattgagaacgtgcattccaggcaccatggtaaacaatctgtatgcttctcatttagttctagaaacccctatgaaatagataccccattttagaaatatactaaaattaagtaacttacccaatactgtgtagctaattaagtggtagaggtgatatttgaacccatctacctgaatgtgaatttctcattaccaatttgattggttaataatcttaacttttgtctcatgggctggagcagctgtgcagaagtaacagagccagatgttcctgctgattctatcctcttctgtaactgcttgtcaagggaagaattgttttttctcctaaagttctgtggtttattttttaaattatttatttctttattaagaacatttttttcactaaagcaaagaaaactttgagaacgcaaagaaacgagaagactttgaaaatgatgcagaagaaaatgcaaattactaatgatgttgcctcaggaataattacattaccatttgagactatatatttaagtatctatatgtgtacatatgtactcttaatatatggagagctataatatgaactgtagtatgaaatgctgctcttcaattaacatacagtgagtaagatgtattttcattttcatactaaattgtaatgaatgatcctgatagaaaatctggaaattatataagtgaaaaataaagaaattagaatattttcattataaatttttgtaagaaagtctgaagtagaatgaaaatgaaagattccccccctcattcagatactcaacactactcttaaatcgcactttctgctcataagtagttaattattaagggtctcatttcagatttttacttgtttacatatatgtgtgtatgtaaacagatattcatatatgtatgtgtagtagatattaatgctagattctttggggacatttcagacagttgcacaattgtatgctatatagctcttctgaacaagaaaaagctttttggcaatgttcatgggatggtcctaattgggcatcagaaagaagcccagccaagcaggtcaaaacacaggtaggcaaaacataatgatcagaaataagtggtatttggccaggaaggaagtgtctagttagcaagtgtgtgatgcgttggagcaggcaccagtggaggtagaaaggtggataggtaccagtaacaggcccagctggtggcagtagacctagcgtctaggttgtg

SEQ ID NO: 42304 - DNA, 1209 bp, Bovine  19866881347228
  misc_feature (1)..(1): n is a, c, g, or t
nctttataggcagtgaggaatttctggcaactttagaggagaaataatgatcagttgtttggaataaggggggaaattgctaggcatgaggttttggagagttaatacatccttgggcagtctagggagatgacaaatctttctgggattactggcagtgtgagtgtcaaaaacacgttgtgaatatgatcttatttactaggcttgatatttttgatatttagattttaaatgctataacatcttttatttttttccctaacattattcattaaaaaaaaacaaaactctcagtacattgggattcattccactctcaatggaaaatcttcaggatttcattactcaggtcattatataataacattaagtaggtttacacagtagaaaggaaagaagtgataaaagattttggctatgtgaaatctaccagttagctgtagaagaatggagcaaatattctctcatttgcttaagacacttaaaacttgtccagtatattagaaaaaatgtatgctggttattattagaagaatagggtgaaatgctgtatcatttgaatattttgagaaaaaattttatagtcttattgtaataaattccaactggctttaccaatatgtccatttatagaatttatattgataatatgaagttctgtgtcaggatagtaattgttttgtagaaatacaagttcttaagattcataggtaagatggaaataaggttctccttcacatgtttagaagatgttatttgattttaattttttaattcttctttccctttccagctaatatttcagctatataacatatctggtttgaatgatcttgtaatactgctgcttgctgaagaagattctgaattttacctattttcatttatttatttagaattaatttggagtagcatcaggagatggaaaaaatgaaaatatggcaatgtgtaaaactgattccttcttttttttcccccatttataaatgttattaatagggctccaagatagaattcagattccttagtcttcactagcataaattttctatttaatttattgttaattattaatgattattctgatttagcaattgtattttcaggcaaagatagtttaatattattttttctgaaattcacgaggtagtttattaatttgtcttttaaaagggtttgttcttactttctacttattttcgtagaatt

SEQ ID NO: 42305 - DNA, 1197 bp, Bovine  19866881363929
  misc_feature (1)..(1): n is a, c, g, or t
ntagatacaaactttacttttataatacagaaaatagctacacaccatcttaagtagtattcaatacagaatataaaaaaagtcaaaattcaactgagctaagtaggtattatacaaaacatcagaaagcagataatgaataccaaaaacctctaattactggaagcccttttaaaaagtttaaaaacacctcataatgcagcctcaaaaatcacaccattacctttctgacttaatctgagaagtcctacaggtttgtagttcctaataatccatggctccatggccaactggttcagtagtcactacactacttaacagactcattcaatactgagaacaacaaagctcagtggatttatcaaaaaggggagaattcgagaattcacattttctcaaccaattaaaaaaatgccattaatatcaacatctgggaaacaaatctgataaggttacatgtgtggcgtatttacacttaattgattataggctgttcaaaatcagacaatactgacatggagccatttgtggtggagtcattagtttcaagccattcatgtaccttgaaacgaactcaattatttaggcgttttcaaccttgttagttcaggctggctatgaattgcccagaactgcttaattgcaaccccatatttcatggcatttgtagggctccatacctgtaggtgtttatgtcgttctggatagtaccacggtactccactcctatcttttagcatcctataccaacataaaatgccactggatttttcttttttgggacagttagtcaaagcttaattatagtcagatcttttacacatttgacaaaaataacttgttctaatttatgaaaaaaatgtaataggcaataaaatattaatttttataaaataagacaaatatgtgcaaattattttaagattttgttgactactggtacaagagtaaaactcaaaccagatgagtagcttgcaatcttctctataagttagtgtcctgtaattatgctttttaaataattctgctttttaaagccatgtcagacttctgcaagatatacatgtccatccaccacaaatggttccacatctatattgtctgattttgaacaacctattgaattaggtctgaatattccacacatgtagcctcatccagtatgtttcccaaatgtagatattaagggattgtctt

SEQ ID NO: 42306 - DNA, 1818 bp, Bovine  19866881366296
  misc_feature (1)..(1): n is a, c, g, or t
ngttatttcaataataattatggaggctgccaaactctctttacgctgctaaaaaacaaacaaaaaataaacctgccatcataacacagtaaaaatcacaacaataagaggttttcatgatatcttaaaactcagtttggtgtttcttgaaggattggtggacgacttgttcagaacttacagccaaagaaactcaattaatggtcactactatcaattatttttacacatttcaacagtgtttattaagaacccacgagcttttcataaaagaatgttgtcaacttggattttaatatttcattaaaagaggccaccagttcacctttgtaagtgttgattcaataggggggctaattaaataattatgattgatgaattttatgtgtattttttaaaccaaggttataaggcagctggcagagacttttgtgagtcttttaaatgtttcccattatccaaatctcttctctatatatctatctttataattttctcatccccaaatcaatttcaggaaagatccaaaaacgagcacgtcttttttttttctttctttttttctttatttaaagggggctgaagtaaaaagcaaaaaaaaaaaaaaaaaagtgaaatcaccaagaaaaccctaaacaaataaagtgcaaacacagagtgacaagcacactcagacccagattggttatggatgagacgacaagtatatgatgaaattaatgaccctctgtcaactttttagatctcacttttaaagagaatggaccaaaaatcaatagcccccaaaccaccagtactccagtgaaccagtctttcatttatcttgctgttggcactcagatagaaatgcagccaagcacagcacagagccttcacggggagtcatcatcacaggccgtgtttgagcaccccagttaagggtcaaaggtgtgcgtcaaggcttctgtgagaaggacccacttctaaatacccatattggtattcactttattcagctggaagcccatttgggatatacatatcaagtagtttggcttttgaaatttacctcttaggctgatgggttgctagccaccagtaacaatgatggccagggatttttttctattcctgttatataccttgatttttcatggttatctctctagtgctcagatggcagcaaaatgcaacttgagattgaagtggagtagacaaacattttaaaaaatacaagtttgtacagatacatggctttatatcacatttgtatattcttaagagatgtagtttttgaagtgttagtcactcagtcatgtccgactctttgcaactccatgaactgtaacctgccaggctcctctgtccataggattttccaggcaagaatactggagtggttgccattacctagaatggaatcagataaagtgtaaagattatattcagaatactataagctcaaatcaaggtagattcaataattaagcaaaagaagaaaacaatgaaattgccagatgagttgtaatagagcttgtgattcttaatgaggattcttagcagtcatcacttacctccaagactgaattttctagaaataaaattggttagtacatcacgaggattttcctacactgagaaagccatatgaaaatgtgaaagataaattaatcccaaccaagtgttcaatagcactgttaacagctgaggccaaagtgaaatgaaatgatgtcattatgttaaaatggatgtcaatgcacacagaaaaaatcagtgtaaaaccagagagatcacattttgatgataatctaagacaagcaaagtgctagccatttatct

SEQ ID NO: 42307 - DNA, 884 bp, Bovine  19866881370179
  misc_feature (1)..(1): n is a, c, g, or t
naaatcattttcccatctgaagagcttaccccaggacatatttttttaagagtaggttacactgttcaaagcagagtgcaatcagtgttcatcatcagagtctgagggagccacaaaagtgaaggaggcagttttgtggttttgttgctggtgggagctcctagtgctgcctgaaaagggagaagcacacgccatccaggttttgtgagagattgaaacttcaattatttatttcaaagatgaggaaaataaaatgacatagtgttgcacagatatttagaatcaagtcttatgaggcatggtacttgatcaaataaatcataacttttaactgtgagctctatttttgagccccaatgctcggtaaccaggaagtgctcaaatactgtctttttaaaagaatgaatgaattgcgtggtatggttgagggcaaaggaacaatcatagaatctagtgccttaaacagatattcataaaagttttaatgcttgaactgcagaattacatgttctgactatagctctctattctatttaaataagaaaaaagagatatgtatgcttatgtttctgaatatggattaatttctgtgattactctatttactcttacttctccagcaatattattgtaggtaggtaatattatataataagagtaataaatgtatatgtcttaaataactatatttaacttgatattttatgtcattttgtgactgtgcttatcgtaagtagttattttttatttcctccttaaactgaaaatacgttaaagcagagatttttataacttattcctgggtagaaattccagactaaacttgtgtggatgacaagtcctgagactggctaagccaataggattggaattgggcacaggag

SEQ ID NO: 42308 - DNA, 1061 bp, Bovine  19866881383865
  misc_feature (1)..(1): n is a, c, g, or t
ntttatgtttatcagttaagaaaatgtactcaaaatttgccttctgtttgaggaagttaactctcaaaaataaaaataaaaaagagagagagattcctgttttaaaaaaatctgtgtcttaatcactcaggcttgatgtaaattaatatagaacccctgctatcttgtttttattttactttgtgttcacttttgatgaccatcaaatcataaacacatgccttccctaaaagagatgtttgctgctattctcttttggatggtgcaaataagtctgtaaaacaaatagatgtcttctagctccttcttccttcttttatacttattaaaatgaaaatccaaagcagaatgcctagaagtatattgcaatttgacaggatttcctttgtgtgcctatgagaaaatatgactagtgaaaaaggaagtagatatagtatgtgcatgtgatgctattttattggtatctgttgcacccattgcaatgagactcttgggatgttgaacctaaattaaaataatcataaataatgtcaaacaataataaataaaactcaacttccaccctctccctgttttcccttttctcttttctttcactgggaaaatacacaagtaaataatatcaagcagattggccacttttgggaaaggaagcacctgggctcagctgggcatgcaccccctgcctgcccccacccctccttcccacgccatatgcttggagttttggtgtcctgggtagagggcaagcagaaaagggtactggatagagaatgtagacttgcaaaatttcctgtatattcacttactgggcttaaaaaattatcttagtaaattagatttattgaaattaactattttttcttaaatgtctcaaatgtggagatgcaaaattacatctaggctaaattttgtctgataaatttgtcaaaaccactgagataaggagttgtttggagcctttcctgtggaattccatctccagcaacattgaaccattgttcaaagggactgtgtaataccttatgaagccaagtatctgagttaagattaccaggata

SEQ ID NO: 42309 - DNA, 1761 bp, Bovine  19866881427945
  misc_feature (1)..(1): n is a, c, g, or t
ngaaaaatccattaagagaacagggaaacttgcctggaagacgtactagagaaaactattaagatatagatgcagaggtggggcaaggaagaactattggccttagatttctcaagggaagccagaaactgattccagcaaaatagaaagttcccaagagaaaaaacattaatgttaaaggaacaccaggtcacttcagaatgagcaataggaaattaaaccaacattcaatgggctccatccagagtagagtgtaagacaggaaactcatatgaaatctaacaagcaacactgacaaagaaagaattgaggaatgagaaaccagaggaattctccttttgtccaccatgttataaacttttactaagagaaatatatacaaataaaaacgtctttaatgtctgcccatgatttgacctgacacacacatgttacttatgtttaagaactaggatggcacataccttgtgccaagtaatgtaaatgtaaatgtaaatatcaaggtaatcatgccactcccaaagacatggatttaattttctgagttttcttacatagactactatctattttattgggtatcatgtttcccaatattctgcaaactcctgacacatatcaatttcttttctttctttccattgtattatggggttttactttattcacttctacagatacccagatataattaaaggcctaagcatctagatactattgcccaaacaaacttaatattaaaagaaataaattgtgactataatttttttttctaatggatatggaaaatggaacagaaacgagattacattaaaaaaaaaggtgcaattttataatgctgaagattttgaatgttcatgattaggaggaaagtaataaacctgaaaaatggatttgaagattttgtgttcatgggctaaaggaatataaactattctttgccatgttttgattcctaccatggtatcatgaaggcccaatgggacaggaggctgaggatatcactctgtagtgtccaaactctacagctcactggcagctagctgtgacaagtcctttaacctcaccatgcatcagcttctattattggaaaaaggagagatagctgaggtctcaatgcctgtcttctttggattcatgtgaaaataaaatgcaagagagttccagaaaaatatctacttttgctttattgactacaccaaagcctttaactgtatggatcacaacaaactgtggaaaattcttaaagagatgggaataccaggccatttgacttgcccccttagaaatctgtatacagaactggacatggaacaacagactggttcccaattggtaaaggagtacatcaagcctgtatattttcaccctattatttagcttatatgcagagtacatcatgtgaaatgccgagctggatgaagcacaagctggaatcaagattgccaggagaaatatcaataacctcagatatgcagatgacaccacccttatggcagaaagtgaagaactgaagagcctcaatgaaatggaaagaggagagtgaaaaagttggcttaaaactcaacattcagaaaacttagatcatggcatccgagcccatcacttcatggcaaatagatggagaaacagtggaaacagtgacagactttatttttttgggctccaaaatcactgcagatggtgattgcagccatgaaattaaaagacgcttgctccttaagaaaagttagaccaacctagacagcatattaaaaagca

SEQ ID NO: 42310 - DNA, 1182 bp, Bovine  19866881447979
  misc_feature (1)..(1): n is a, c, g, or t
ntaatttgcctctagaatttggattctaatcttgtcctccagggtttattttgccccagccttttgatttttctccactcaatccccatactacctttagctagtagctatttttgaaaacttacattctgaaacaggaaaatatgcttagtccatgaagttataactttacagaatgggtttcttacattttgtagttcatatgatcagatttacttggatttaaacaaataatgtttcttgaacatttatctttcttgaaaaatcaaattttaaaattagcatgaatcctcactcatctttaaggaactttggagaggtgtgactcattccttcctgcctgtccagatttggaatgctctggcttagaagcctccacacagccatgacttaacacaggcttaatcagggacaaagcacatcttcctcccggggtttccaagaaataaattgccaatgagtaggaatttcctggagaaggaaatggcaacccactccggtgttcttgcctggagaatcccaaggacggggagcctggtgggctgccatctatggggtcgcacagagttggacacgactgaagcgacttagcagcagcagcagcagcagcagcagcaggaatttcctgctgcccttgtggggcttaggatgagcaataattctctagaagtgggtagaatgttgaagcagtaaacatgcagattgcatgctgtccccaccctgttcttcatacacgccgcctgagataatagtcctatagagaaaccgcagtgttcccaagtacttctcacaagctccgctttgcttagagaccaaccaggatgcacaaaagacatcactgatactgcctagataattattgactagttttagtattaatggtgaggattgtattcattttctcttcctggtggtgtttcactgatagaggttgcttatttctatgtagaagcatgatggttttcactctttgcgatgaaaacttcagcgacccagacaaaggtaatatagggctttaacattttgaaacattccctttaaaattcatctctgtaatttggaatgttcaggtgggggcagatggacaaaattgtatagtatagtttgtatacctctgctttttgacagatgttgtgaattgtaaaggtgccttatttgcggcaaaggggtactagggagatg

SEQ ID NO: 42311 - DNA, 1551 bp, Bovine  19866881475793
  misc_feature (1)..(1): n is a, c, g, or t
naaggcctcaagtatttctcttttaaagccttcagtgggtcagttagttttcttttctctactctgaaaggttaaaattagattttggagaagaatcagtctcacagatcaatccctgcataatcgctgacatttaaaacagctaacaataaagcaaatggtaggttgccaggaagcacactaataaaaaaataaagacatctgtttcagttcttgaagaatactcgtggcacttctaggtgctcaaagaaagaaggtcctttttaaaatggaaaaatcctattgaatgagtagtaacactaataataatgagaaggaaatgttaaaaacgaagtcatgaaatcagaggcatcgctcacaagtttgtatctttccattgctaatgtagacagaaatgctggctgatttttcaaaagcaggtgaagaaggttcactttgaaaattaaagtcattttctatcaataaggtgctcccacaaatcatcattctattttttcacatttatgaatcccagcaggagactttctaagcctactacacaccctgctagccgctgctgctgataaatagggtaggtgaaagaggggtggtcagaagaggataatgaactttttgaagataatttagaagtgtttgccattctattttttattaagcatataggaaatgacatcgtggattgaattaacttctttcaccaactgttggtgatttcattttaaaaaatattcagtaagtatacttttaaaatagtttcaaactgaaaagaagcagcttctgtgctaagtcgcttcagttgtgtccaactctttgcaaccctacggactgcggcctgccaggctcatctgtccctgggattctccagacaggaataatggagtgggttgctgtgccctccttcaggggaatcctcctgactcagggatgaaagccgggtcacctgcacctcctgcattggcagccgggctctttacctctagcgccacctgggaagcccagaagcagcttcgacttcttgaagctgcgtatatgtcaggctttacatatactctttcacttattgaaatcagtgccgttatacccattttatggatgaataaaactttcagacatgagaaagctgagatttcaacccgggtcttacactaaaactgggtttaggtcttttatgagtttggtgaaatgagatgcctaaagccacaagtgaaactgttgtaccagagagaagactgagattagagtaagcaggtggaaggctgggagatgatggagaagagtggaaggggtatgcggatgaactggaagttcattgccattgggagggtctaagttagatatgcagatgacaccacccttatggcagaaagtgaagaggaactaaaaagcctcttgatgagagtgaaagaggagagtgaaaaagttggcttaaagctcaacactcagaaaacaaagatcatggcatccggtcccatcacttcatgggaaatagatgaggaaacagtggaaacagtgtcagactttatttttgggggctccaaaatcactgcagat

SEQ ID NO: 42312 - DNA, 813 bp, Bovine  19866881621162
  misc_feature (1)..(1): n is a, c, g, or t
ngctcctctcccactgggttacacaggatatgagctggatcctggcggcttctgaaacaagaatgagagaagctcttgtgaagtgaatttaaagagagagaaaaagcctttctctggcattgaagtcactgcaagtttggcttgtctaactgggagtagaccttggctcacagaactgagagatagctaaacaaagatttgttcaatttgataaactccctggctgagacagtcctgccaactttctttctaaagcaactttcacagctgaattataaaaccttgaaaatcaaggatttgtaatggaaatgctgacagatgcaactaacgtgaagttgtaccaactaagcgttgctatcatattttataactgtctgagaagcttatagaaaggaatggtacatttgcttcatgggatccatttcctttgctaaaaactaccaaatggcctcatggtatatactctgtcacacttagaattgtcttgatactgttttttcataaaaagagaaatgttgaaactaccaacttccggcaaggcttgaaagcaactgttgcctcatcctatattctggattgaagtttgttaaagaaaactcagaccctgccattggtgcctcaatattcattatttatgtgtccttggaaaactgctctagattttagcaattttacgaaaaaaagactttcataaagatgaactttctttgtaacttttgagcaaatggaaaattttattctaatatcaatgtgtccactgggtgcaagaaagttaaagaaaatttcggtgcaaagtgtcaccatcatcttaaa

SEQ ID NO: 42313 - DNA, 1444 bp, Bovine  19866881639074
  misc_feature (1)..(1): n is a, c, g, or t
nataaggaaccccagttaaaatagagactgtgtcaaagataacaagcaaattttaactagtatacataacctgattttttttcattcattatttttgtaatgcttttatgttaaagtcaagtggcagatttttttcttagattcattttacatgctagacttgtaggtgtcacatgagactttcattcaaagcaatcaaatttagttacctatgaattttaataggttatagcagtaattaatagtatagcctatctttttttcttttaaattttggccttcagtggtcatctgccaatctctatattttacaaataggaagacagtgggttgaatcatttaacaaaactagatcttacaggacactggtggcaaggccaggctggaaccaaaatctctcatacctagtctggggttctttggaagtaaacacttaatttttttaagaattcttaaggagtctggcatctaggtactagacttatttaacaactttctcattttgccttctcagccttctttcctaaagatctaaagaatttagattcttttcatcttataggtcctaacatataaatgttttcaatgttcttctttcaaatgcatttccttaagtcttgtaattcccatagtgcccacaaaagcactcagtagataatttatataactgcttgagcacaccttggttcttccccattatcaagacttctgctgtgctagctccatgtcattttcttaccgagtccagtgagctgcagtctgttcaacaggcttgcttcctatatgtacatcttgtagaagtgagttcaggtgtatctctaacaactttgacataattgggggtttttttagtcttttttcttttttttgatgtgggccacttttaaagtctttattgaatttgttacaatagttcttctgttatatgttttggttttttggctgtgaggcatatgggatcttagtccatatgcctcaaccagggatcaagattgaacctgtcttttggaagacaaaaatttaaccactggacatccaaggaagtccctatcatgtaggtttttcaggtcatcgtttcatagaaatggctctttgggtgtctagttcttccctcatcagcaacactgactgccacacctcatgctcaacacacaaagactcaccttcaggcctacagtttagctctccctcccaagaagatcccagaactctagccctacagtttcaatttcttgccaccagagggtaattctgaattttttaggcttaatcctaactcttcacttcttttcttcctcatccctgtgagagatctctatacaataagcctaagaacagatcatttccagggtccctatcccaatcctcctgtcttgaaaaaagaaacatcattctcctgatccctaatttttaaactttgagagtcctttcttatccctaccta

SEQ ID NO: 42314 - DNA, 757 bp, Bovine  19866881733567
  misc_feature (1)..(1): n is a, c, g, or t
nagcatatctttccttttggttttatgacctctttttcttaatgcttaggaagaaaagagctttgccaaacatttttttttccctctggcattagtgtcttctggaaaatgaaaatggaaatggcccagtttctcttactaaagtcttcagatatttatatatgtagtttaatagtttcatcctgaaaaaataaagcacctttccacatttttttaaaggatagaaatgaaaagttaccagtttactatcaatggaaagtagaacttctttggtgacatacacatgtgtatgtgcatatattcaaatagacacagacaaaattgctaaaatgaagagaggacagcaggcaggaactatgcgtgcaattcatgtctatgatcgattcaaactaaaggagactaagcatgtcatgtttttgtttgtggcagttaagtccttttagtttttgctaataatgggaccactctgcagaaggtaaaataataaaaatgttttcactgtctatttctgtcctgagattactattctgtgagtttatggaaaacatttaaagaagcctgaaataacccaaatataatcaaaggagagcagagactgtgttttgtgagtgtgcaaagcatagcgctcgttcaatctagtctatgatgagatatttgttcagtcctaggcacaatcccacgactcaacttcctagagtgtcaaatgatgtttcttatttgtctgacacttctcttctctgacaacaaatattgctca

SEQ ID NO: 42315 - DNA, 840 bp, Bovine  19866881743193
  misc_feature (1)..(1): n is a, c, g, or t
nctcttatgaaaatatggctttattctcttttttaaactgaactactttatccctttacacttggtttgaagaaagtcctaaaaattagaaaatgcaagtgatcactttgaaagaaaaaacaaaggggcaattagatttatcatcattgaaatagtggcagaatccaaatgaaattccttggagtatttgggtgtcatggttaataattttgaaacatacaacttcaactaaaactgaaggagggaccctcaactgtccacagatccacacaagaacacgttttataaatacacactcatgccttgttgctggctcaattctgtctttcagtaaagccattctccttcaccacaagtgcacacaaatgtcttgtgtttcttcatgtagcctgttttggtgtttatcccactgagctcaacgaaacctccagaaccaccaggcaccttgagctagtgtgcactcaggtgcaactgaacatacctggaccatccaacaacatccaacatgtttatttaatacatcttcctgtataaggaagtgagtgactgatagcattgattaaaaccagccaagcataatggtcactggcattcaacatccaaactttctaaaacacagcgcaatccccgtctgaaaacctactctgcattttttacatttctggttgagacatctattttttaacaattcattttctgttttccctccatgctttctctggaatttccagcagtccctttgcatgaaaaggttggtacaagcattcatgttgagggttccagaaaaccaaaagatgaaagaaactagcaatattaaagggctctctctccaggcagctg

SEQ ID NO: 42316 - DNA, 2623 bp, Bovine  19866881994756
  misc_feature (1)..(1): n is a, c, g, or t
ntttttatttttaatttttgttgaaatagagttaatttgcaatattgtattcatttcggtgtacagtaaagtgattccattttataaatatatatattcttttttttacattttttttttttttgcattataggttactacaagacattcagtatagttccctatgctatatagtaggttcttgttggttatatattttgtatatagtaatgtgtatatttcaaccccaaactcttaatttatccccctcttcctctcgcgtttggtagccataagtttgttttctgtgtctgtgagtctatttctattttttataaaagttcatttgtatccttttcttagatccatatataagtgatcccatatgatatttgtctttttctctctggtttactacacttagaatgataatctctaggttcatgcatgttgctgtagcattagttcattttttatggctgagtaatattccattgattacatgtaccacatctgctttatccacttctgtgtcaatggacatttaggttgctttcgtgccatgcttgagaccacagagcaggcagaagcagcactacagagcctgccaatggctttccttagctggatcatcctctgaatataggtcagttccaagccctgcttactttcttcagaactaaaagtttggagccttgtgaggcagtcctcagtctttcaaatcaagagtcaaatttaggggcttgttgcttctttaaactgttttatgttaaatattaagcaaaaaaaaaaaaaaagagagagccagtaatggatgcctcagatatgctgatatgcatccagttgtctctaataatgctttgctagtcttgcatcaagtgcttattttttcttaaattattgtgggttagaaggaggtcttttggagtactgaccccccaatcccattcttttctttttctttccacggctgtcattgtcctgaatttggtgtttagctatcccacgcatgttttcatactgttaccacccgccctgtatgtggccataatataccatggttttgcatgttttaaagtttatttaagtggaaccaactatttatactatcctgaactcctttccttacccactattatgcttttgtgatttatctatgatgttccagataggtcaaatccattcatttttattgctttgtaatatcctggtataggaaaatagcataatttatttactcactgatggaaatataagttctttttaatttttcactattatgaacaatgccagagtgaacattattacaatttttatatgcctgcatgtagtttaagtacataccacattttcagttttattagatgttttcaagttgctttttaaagtcattttgccaattttttacttttaccagttgtgtatgaaaattctagcattcatacatcctcacaacaaaatgtataaaacttatattttgttattcttatgacatagaattatgtttggttattttaattttatgtgattactagagaagattgaatatttttttcattttatgctatttggctttctttttctgaattatctgtacatattattttccttttcaaaaattaaagtcatttgtatttttaaaatttatttgtgtggattctttataaattatttgatgttttttctaaaaccccctttttattaaaaaaaaaaataatatacccacaccagggaatatagaaaataaagaagtcaccaataatttcactgccctaaccaaaatattgattaattttgtcctatttattgctagtctgtttttttctcttatgatatttttgtgtagttataattacaaggtatatgtaactcatattctgaattttgcagttaattatcataagcttttttggacacagctgtatggcttttatagccagcgttctaagtagatgcatgatatattaatatcattgagtaggtctttcatttcctttttgttggacattcaggttgctttttatttttccattttataaataacattatgatgaatacttatacctaaaaagcttttgatattttaaattattttcttagaacagagccacaggagtcaggttactgggtcaaagaggatatacatttttaaaaagtaaaatgcattgcaaaaatagtttaatcagtgatgacaatctaaagaaaacagggtttaagaagactcaagggagcccggcagaggtctaagtgtctgactcaccttccttggcagtgagaaaactcacaagactatggtttctccagccactttcctgacccaaagcactactcattacagacattttctatcctgcttttgcaaccatttgactctggggtaaaaaaagagaattttccagggctaaagcttaatgcttacaaggttaaaacttataaatgatttttactgatttttaaacactggtaaaggaaagcagtctgtttattttaggacctgaaattggatatgcaagaagagggagtatctaaaggcagaaatgatgctccgactagctgacaatcttatagaacatgggcatctcttcactgcttgaaagggcttttatgttcatatgatttactctttggcattgggcagaataga

SEQ ID NO: 42317 - DNA, 812 bp, Bovine  19866880427968
  misc_feature (1)..(1): n is a, c, g, or t
ngtcctatattgaatagttctaatttcatgcttagtctgaaattctaatttatgtatacattttttaaaatgtgtttgggtctgcttctgaatttccgagtctatttaattaatctgtctcttttggagtcagttttcattatcagaattttcatacactgtggtaaatgctcttccatcagtctttttcattttctgtctttctttttctggttctcacacaccacagtcttcaagtaatctttgttttgacttgaattatattaaattcagcatgatttgtcagtatcaatattttaaaatattaaatctttccatcatgaaagtcagtatgttttctacaatcattcagatatccttttgtattcctgagtagaggtttatgcttattatacaggttgcaatcattttttgataagctccttttaggcattacatttttatgactgttattaagtgtggctcttctaagtagttatagacatgttattgttttccgtaaaccaagtttataactaccaacctcattgaagcctcttattggttctttttttttttttctgttttccatttttaaaaaaatttatttattttaattagaggctaattactttacaatattgtattggttttgccatacatcaacatgaatctgccacgggtgtacacatgttcccaattctgaaccccactcccacctccctccccataccatccctctgcgtcatcccagtgcaccagccccaagcatcctgtatcctgcatcaaacctggactggcaattcgtttcttatatgacattaaacatgttt

SEQ ID NO: 42318 - DNA, 827 bp, Bovine  19866880564229
  misc_feature (1)..(1): n is a, c, g, or t
ntcgatccctgggtcaggaagatcccctggagaagggaatggctacccactctagtattcttgcctggaaaattccatggacagaggagcctggcaagctacagttcatgggatcacaaaagaatcagacaggacttggagaccaaccaataacaacgtgtgtattttaccttatatgttccctctctcttatctggtacagacttcttttcaccgaggaaaagaaagttgcaggagtgaggaagggcaagcatccatgggaagtgaaggggtggtttgggaagagcctgtcaacacagcatcctgcctcctcgctgtgtgcctgacgcctcctgctaaccggtgacagtgatggatggctgtggaaattgtccaagtcaaactgctaaccagcgctatcttggatctttttgtagtttaggaaacaaagctgataagatcaaggggcaacacaatcctgggtaatgtagtgtgatctgtcctgtgtagcgtaattgggcatcacagcttaaacaggccatgatatttgtaggagtggaaaggaaaacttgctgcagtttggaagttgtttcatgttgctgttgttgtccttaagtaacaatgtgacgtgccttccttccattattatgatccaccatcgtgtgatccagaggagaaatgtctactctcagtgggctgagagtaactcagaaattaagcctagcaactagagattatcatactaagtgaagtaagccagacaaagacaaatagcaaatgccattgcttatatgcaaaatctaaaagaaaaaaagatacatataactatttacaaaacagaaatagac

SEQ ID NO: 42319 - DNA, 1690 bp, Bovine  19866880567024
  misc_feature (1)..(1): n is a, c, g, or t
naatcctggcttctgtcccatcccctgtgacactccccacttctcccccccagttgaagttgttcccaactggggatcttaaaggtgattctgatgctattggaaaaaaagaggaatgtcactgtgatggctgaaccatggttctctccttgacagactcacaggctttggggtcttatcccagctacattagaaaagaccctgaggctgggaaagattgagggcaggaaaagagggtgacagaagatgagattgtcagcatcatcaactccatggacttgagtttgagcaaattccaggagatggtgaaggaccgggaagcctggtgtgctgcagtctatggagtccccaagagtcaggcaggacatagccactgaacaacaacaactcagcttcaggaggcctgctgcctcggagacctggggtcctgtcttcactgaacacacagtgacttccagacatttccttactagagaaagatcagaagggccaggagttgaagagaaatatacataacattcttcagaccttcattactccgtaatagttttgttgaaagccttaggagacagcgcagcaagatcaggagaggggagttcatctgctatttatctaatgtgttccacatgccaggaattctgctgtacctgcaggagttaaaagcacaggttctggagtcaaaatgcctgggttcaaatcttggttcagaatcactagctgtggtagcagtgagagacttacccgctctgagcttcagttttcttatctataaaatggagctaagagcactcacttcaagacctttgaagattaaacaaggtaaaacttgaaagcaaccacttgcatagaccccagcatacattaaacacttgcatgtgagcgtgctcagtcgcttcagtcgtgtccaactcttcttgaccctatggaccatagcccgccaggctcctttgtccaggagattctccaggcaagaatactggaatggattgctgtgtcttcctcctggggaatcttccccccacagggatcaaacccatgtctctcatgtctcctgcattgtcaagcaggttcttaccactagcgccacccaggaagcccagagtaaacaattactacatgcattattcttagtatattcaatatttccaaccctacgaatcatttgttcatttttcttcacttatgcagagaatatctgagtgtttattaccagatccagaagggctatgttcttttcattacccttcctcaccctcccaggccatgagccttaaactcctgggcacaggaaagtcatttattatgttgaatgaaagattcaactttttgaagtgtcaaaagctttggatttaagctagcgtaaatcagctttcagatagcgtgggactccggagaacacacacaaccaggacgccagtgcagagctgagccctgtggctgaaggccccagcatcagagcggcacactgggtttcaccgtgatggtcaagcgaaagcttggcagtgccttctgaacatgttgcaccagggctggggagacaggagtgaccttgtctttcgttcagcaaatattgatcggtttatgttgtatatgcaaacccgtgctggtgcctgggacccaaagatgaccagcaacccatggtctctgttctccgtggctttgtgttctaacaggaacacaaatatgcaaa

SEQ ID NO: 42320 - DNA, 1006 bp, Bovine  19866880600062
  misc_feature (1)..(1): n is a, c, g, or t
natcgttgctataagtagtgcaggcagaaacaggggcaggggacacaaatagttaactttgtttttttaagaagtcagattacatagtgaaaacactaaaatagttttaataatacagtggaagggcccacagaggctagaagaaaacaagaagaatctataccatttaaaacgagaggttctggagacatgggttagagtagcaggagagaaaagggagtaaattcaaaaaaacatttcaaaggaaggaaaagcaggattggtaatggattggataaagaagatgaaagagagagaagagtcaaagacaacttcaaggtttcgagcctgtgatgttaaatggctcgtccatggtgatttttatttggtttacttttatcatctgaatgcacaaatgggattttcctacatcgagctattgtagctcccaacatgcagacttaccattgaaattacctgctatctcttcacaccctgttagtgaacaggtagtattttgatggatgttacacgatcagagaaatcctaggtcttggtggcatgcggaacatagctctctctaaatccttgttttaattaattattccttaatattcgaaatcttttgagctcttaggttaacattcttcaacctaagagaatgttaggtggttatttttaccaccttgtttgttcggaaatcattagctcttggagacgtttgtattattcgtgacgttgaaatttgttttttctttttgccatctcttgactttcttttgaagtcacactattaaacctccttaaaaatatttatgtgtgtttagttaacaaaagctcctgtaagttgaatccatgctgggaaaaggttcaggtaagctctctatataagcttacagacaattgtgtaaatctttagccattaaagagaaaggagaaaaaaagccaccctcattacactgctgtcatttactcttcatctcctgtcctctttagcagcattaagatgggatgtaaatttgccagt

SEQ ID NO: 42321 - DNA, 1258 bp, Bovine  19866880631705
  misc_feature (1)..(1): n is a, c, g, or t
nctggaatattggtattccttttctaatattcaaggaaatgggttgccatttccttctctaagggaatcttcctgacccaggtattgagctcccatctcctgcactggcaggctttggtaggcagattcattaccactgagccaccagggaagccctttctacctctccttcatatgccacgatccttccattcctcttccctccactagagtctcagtttctttcttttagttcctagatgatgtcaaacaacttctgcctggaaagttgtctccttaacttgttgactggctcacttctacccatccttttgtcttggcagaaataccctttttcaggtcgagtctctttggtcaccccaagtaaaataactttctctgtgatgccctcttacagtgtctgatgttttcctttatcctgcttgtcaggctttggtttctgtggttcattgtttaaatcttgacacttcagaggaaactccatgagggacagaaacccttcctgtctgtttacacctgtagccccagcacagcgcctgagcacagagatatttgtgaatgagggagtaaaagaaataggctgacaacagggagctggtagggtaagcttttttcctatagtctccttcagcctggaatcctttccttcagccccttaattcatcagctttacagaaagaatctgcatcattatttttgttcccctgctaggatggaatccagctgaatgcagatgctaaaatgtaaaaggaacaaaatccaacatggaaagaaatatcgaatagagaatactcccccgagtggctacacatttccactgtaagcagtaatctcattgcacagctattgaggcttgagttatttacatgcctttaatcctcttaccttctaatcaagatcattccaatagctttgcctttagacttccaattgcattatgcattcacaagtcacttctttgtcaaacgctgtattggtaccattataatctcctagggagattacaagaaaagtattcattcttctttatcctaatatagtttatctctatcaaagttgtgttttcaatttttccatgctaatgccttcatgaaattaatagtgaatttaaaatgaaatagaaattaaaaacaatcatctataggtccatgtgttatctatcacaagcctatctaattcaattggttctgacttgactacttagaagcatgtacagtttgggagtttttttcatataaattttcatctcttcttttct

SEQ ID NO: 42322 - DNA, 1300 bp, Bovine  19866880645667
  misc_feature (1)..(1): n is a, c, g, or t
nggtctgtagcccgccggctcctctgtccatggggattctccaggcaagagtactggagtgggttgccatgccctcctccaggggatcttcccaactctaggatcgaaccctggtctcctgcactgcaggtggattctttactgtctgggccaccagggaagccctagtagctgagggactttaaataagttactggttatctctgaacaccacttaccccatctgtaaaatggggctgaaaatgctcatagctccctcctgaagagtcttggggattaaatgccagtgtatataacatttttcacccacggcctgacaatgctcaagttcaataattgaaagctactgattctgcccaaggccttccttccctcacccgcagccttggacgccgaggcacaaagctaataagatggagacgtctcagactaccatggaggttgtctaatctaatctgtagaggctgctctgtggctgtttattgagttaaaagaaaataggaatctaattttagcccaaagaagagaaagctatatgacaactagagtaatgggctctggctagacagcttgatagtaactgatgatgtttccagcatttactacatggtaactgctttcccttaaaggaaaaaagtcatttaaattgactacaattgtagctgctatccattttcccaataggattactagccccacttctaatacaagcccagtgtacctgtagatggggaaccgacagtcacatctctaaggggctgagttgaactgtctgcctccctggaaccaggctccttcctaacatcagcaggatgttctgagcatcagcaggaaaactcagtggcagctgacacagcaccagttcttgcagctctgtgggaaaagggacagatgatgtggccccaagcagccccccaatgtcacctgcccagggagcggacgccacagtactgccatgccaggtgccggctgagtccagctgtgggggtgtgcagtgtcaggaggggatggccctgggctaaagacgagggaacctgggtttatcaccagctggttcccctgggccgctgcctaacagaagcagctctggagccagacagccctggtccggatgatgtctgggcctcaggctgacggcaggggtacagtagcagggtgaggacacgtggcacaaagtgtgcaagtgcctgacacagtgcttggctcaaagcaaggctcactaaggaaggcttattcttaaatggcctcatttcgaaaacagacactgaggtcttcaattcaccgtccgtcctgctcagga

SEQ ID NO: 42323 - DNA, 1327 bp, Bovine  19866880739131
  misc_feature (1)..(1): n is a, c, g, or t
nttgtctaactgtgtagagaaaaactgcagatggctctaatccaaagcctttataataaagttttattaaaagccaatgtttattataactttaaaagactaaataattcttctaagacccaaaaaggtttttcatcttgcataaataagattttgtataaaatcttcatataatgtttatgcaatggcaaggcaactctctacctcagtttcctcattggcaaaataaaaagcttaaaacattgaactatttgattataaactacttctagcaggcaagaaaagtggtacaaagaaagtttgtgtgtgtgcacttttcagtgagctttgggtctcagaactgaaatcttctcttccttgtaagattattttgtataagaccatgatgtacaaaacactaatcagcatttacttattcataattcattcaaggaagctcattattatggcctttcacagtctctgcccaacatactttattttcatcttgcatttaagacagagaggcctgctcctcacatcccttgtggatacagccaggaatgagggtatgatatccatgtgctcaactataaaatctgaaacacattcagtgggctgacctcaacagatgttttggtgagagcttctaagtggagccaaagaagggtggaaaattaggtcacactgctaggaaagaagtaaagacaaaactcttgccaaagaatcattgtagagagcaagaaaaagaccctgggtttattgcttgggtgtggagtctagttctttctctgggcagtagggaacaaggttccctctggctgtatcctggagaaaacagctgatccttggcatactatgcaggggaactgtttgatctatctggaactataagatgtttcagggtcattttttagaattaatcatttctctcaggaatgcttgttcttttcataagagaataaaaccaatatccgggcactaggttaatggattgctactggggagtcattgcttctagcttctagcacctctcagctgccagttaaaatatatatgtgtgtgtgcatacatcagtgaaagtcactcagtcatgtcagattctttgtgaccccatggactgtacagtccatggaattctccaggccagaatcctggagtgggtagccattcccttctcgaggggatcttcccaatccagggatcaaacccaggtctcctgctttgcaggtggattctttaccagctgagccaccagggaagcccatattatgtgtatatacatatacctataaatatttctgtatgtacatactgcatcgtctttatccagtcatctgttgatgga

SEQ ID NO: 42324 - DNA, 1041 bp, Bovine  19866880774007
  misc_feature (1)..(1): n is a, c, g, or t
ntggaaaaggtgttttagcctgaagtactcaacagtaaatatagttacattaatggcatacccatggcctgaaacatattaatctcagttaacaataactgacatttacattactaatctaattcaggcattctgatggtagtaaatgcacatgttaaagcttcaggaactgaaattattactgatccaaagagaatccttatttcactgtcaccaaacggagaggacaaatgactatacttctggggcaatctgggttttctaagaataatgtccccattttaatgctttaatgaggaaaattcaaattaaagcagattaaaaataaagtggtcccaaatgatatgccagcagggctaacccaagaaaaccagtgccttcctcttcttcaaatcctcttcccctcccactcctcttctgctggatgagcttggactcttttacaagccaggactcaaagagatcttggaccctttcacaagccaggactcgaagggaaagggacttctgcaacatggctcctcttatccagtgaatcccctgagacctgattccaccataatgccatccactcagggacaatgtcctcatccgtgggactcctgagtggaaggaatgagcaactgctggccccagggcaggtggaagaagggtttagacagctggactttgggtcaggggctcccaaaccagaccctaaaggtgaccactctggccaggcctcaccatgagaagagaggggaactatgcccagagggggtcaggaaacgtgctaaggaagtaggtcagtgggaaaaggcgagcagacaatgcagggggacgactgtcttggagccccgtacgtgagaatgttacactacctgcttgcttttcaaagagaatggtttttcatgtttcagacaaaaccaatgaatatttcccccatgatgagtctttttttgagaggaaaatctcctatattctaagtttgcattcacctaccaagagcctaaagtaagatgttacaggtaaaggctgtatgattatatctataaaactcaa

SEQ ID NO: 42325 - DNA, 1721 bp, Bovine  19866880778424
  misc_feature (1)..(1): n is a, c, g, or t
nttgcgccggcgcatctcgttgcgcttcagcgcctacgcggtcctggccatctgggcgctgtccgcggtgctagcactgccggccgccttgcacacctaccacgtggaactcaagccgcaccgcgtgcgcctctgcgaggagttctgggggtcccaggagcgccagcgccagctctacgcttgggggctgctgctcgtcacctacctgctccccctgctggtcatcctcctgtcttacgtccgggtgtcggtgaatctccggaaccgcgtggttccgggctgcgtgacccagagccaggccgactgggaccgcgcgcgacgccgccgcaccttctgcctgctggtggtggttgtggtggtgttcgccgtctgctggctgccgctgcacgtcttcaacctgctgcgggacctcgacccgcacgccatagacccctatgccttcggcttagtgcagctgctctgccactggctggccatgagctccgcctgctacaaccccttcatctacgcctggttgcacgacagcttccgcgaggagctccgcaaactgttgctggcctggccccgcaagattgctccgcacggccagagcatgacagtcagcgtggtgatctgatgccactgtgccaggccttggggaactccagtccagtggtctccggaaggtgtccacccggaggccggactggggagattattccagagctaggctaatactaaactaatgggctccaaactgccagcccacccctctcgtccctctgtctcaccttgtatttgtgtcactgtaaaatgttacgtaggctttgatgagactcatgctttgcttggaggaggccagggagaacaaaagaggttttactgttttctccttttaccactgaaggccaaacaaagctctttcccctggttcagataatatttcagaaacgtgactgttttccttgctttcccttctgcttgttccatagggagtgaaggagcaataagcatggggtttaaaatggctggttggggttggtaaagcttttcaggttgctttttaaaaaggactcacctgagatataatacagaatagtgcttagtccattcaaacccattaccttctaggattccagggaaacatgtattacaaatctgtaactagaatttcaggcatctcctgaacaagagctttatatgccaaagggattttcactttaaatccacttgcatttatagaacaaaatacttacaaatcaccttcaagaggttttgctattgttttctctcttccttatcccccaattgctgtttgaaaatgatgagataaattagttgatgaagagataggtaacacaggagtaaagtggaaaaggttcacacaaggggaaatacaactgcacaggacagactatctgtgtgtatgtttgtgtatatacacaactagtgtttgccacaaggcacacactcaaatatttggttttctgaatgctcaatgtaaactgtgagctgtaacacactcttgtattctctaattgatcttgcaacaaatcaacagctgtgaactgactgctcaacacctgctccgtggtgacacacttggagcgtgatcaactcagaatacaaggactaggagaagcttgctgaaagccagaacagaaaataacctgctgcccacaggatgtacagatcaaacatgtgattccttccagggttaagggaataggggaagactgttg

SEQ ID NO: 42326 - DNA, 657 bp, Bovine  19866880801515
  misc_feature (1)..(1): n is a, c, g, or t
ncaggcatgagggaatagcctgcagagcacagtgagtgggcacactgccatttttgctgctctaacttcataccttccttctttctttctttctttttggctcaggagatgacttaacatgtggctcacagctgactcttgtggggatctcggataaatgatgagaagaaaaataacacctgggtacctttatactgttccttctgtgcagattgaggatggagccagatggcctctctgctccactccctttatttatgaaaggcttcacttgcttttcaacaggacaagagagggagggggggacactggagtttcgtgttcagggacaggaaagagtgtgtatgagcaagcagccctggtaagccattgaatagggacatggtcactggggcccatgtcagtggggccctttctcttccaaaagccctcagcttgtggtccaatcaaggactgctggaggtcataagaagaagagcataataataagcccttgtatagtgcttcccttgtagctcagctggtaaagaatctgcctgcaatgtgggagacctgggttcgattcctgggttgggaagatgccctggagaaggtaaaggctacccactccagtattctggcctggagaattccatggactgtgtagtcctttggggt

SEQ ID NO: 42327 - DNA, 1715 bp, Bovine  19866880821885
  misc_feature (1)..(1): n is a, c, g, or t
nttgggggataatgatgcatcagtgtaggatcatcaattggatcaaatgtaacactgtgatctagggatgcccactacagggtgggttgtgcttgtgtggggacaggggttatctgggaactgtctgccctttctgctgaattttgctctgaatctaaaactccgaacaatgaagtctattaattttttaaaaagtattttaaaaaagaaggtttcccttaaaattattcaaaaataaaaaaatctccttgacacatccccctccaattttcccccaagatggtatttttgaagaatcaggaaaagagacagaggacaaaaagaaaataatggaacaaacctccaaacctgaggattgagctctctgtgtctttggtaccagcttttcaatcttcttcatgagtacaaagagaatagaattcattttcttttgtcctaagactcaggatcgtgaataaccattgacagatgcttgccaagacatgaaaatcatgggactgcatctgactcaaggagcaaaatatacaaaactgagaatagaacaaagatggcaagacctaaaatagaaattggagccaattccatcaccctgcacccccaccccccaccctgcctttcctgagctggctcctcacagcacttggaataaaggtcccagtcctttccaggagctgcctccacactcctgtccaatctcacttcctaccagtccctccttgcacctgatttcttattgtttctgcctcaggacctttgcacttgttctttttgcctggacgattctcctccacctgcatgacttcctgccacccattctagtctctgatcaaatgtcatttctacagagaggccacccttgactacaagactttaaatattaactcccttcaacctatttctcttccctgcttgacgtcttttcacatcataatacatattgctctgtccttctgttccacatctgtcttctccatctaaatgtgagctctggaggacagagttctgtcattgggctctcttatcttcacctcagcatccctgacagtgcccaatgcacagtagcaagtccatataaccatatttattgattgaatttgttgcaaccaatttctatatgtcaacttggcaattgcagtaaatccattgtttgattttctaacaatcaaaagaaacctcagtgactatgaacctccctgggacagctcatgtatctcctctgacggaggcgtaggtggctgacagtgctaccggtctcatttattccagatcaaactcaaacactcataatgtaaagaatatcacatgcttcctcatggaactgagacatacttttcaagaggattagcttataagagtcagataatccccctgggttgaaataaatagatcttatagaaattcctggggcacgttctacataaggcctttcgctaaaattaaattagcaacaaaatgagcttttcttgggggtaaattcaagtgggttttcctttacaagctgttttaaactatcataatctgatagacagggtcctctcccagacacacagtatttcaaatgcctcattttagaaacacatgccaccaaggccagaaagatgggaaccccccaaatttgcaaagagaggcagactggggacttgttaaaaagaacctaagaatttcagtaatttaggaaaacaataggattcccaggtcactcagtagtaaagagt

SEQ ID NO: 42328 - DNA, 1583 bp, Bovine  19866880901954
  misc_feature (1)..(1): n is a, c, g, or t
ngagatcaaaatcagtccatcctaatggaaatcagtcctgaatattcattggaaggacttatgctgaagctgaaattccaatactttggccacctgatgtaaagaacttactcattggaaaagatcctgatgctgggaaggatttgaaggcaggaggagaaggggatgacagagatgagatggttggatggcatcaccgactcaatggacatgagtttgagtaaactccaggaattggtgatggaagagaggcctgctgtgctgcagtcctttggggtcacaaagagtcggacacgactgagtgactgaactgactgaactgaaattgctttagtcatgtctgactctttgctaccacgtggactgtagcctgccagtctcctctatccatgggattctccaggcaagaatactagaatgggttgccatttcctcctcctggggatcttcccaacccagcggttgaacccctgtcctttatgtctcctatattgcaagtgggtggttttaccactactgccacctgggaagacctctgaatcttctagtaagttgtttattcaagagaaaactaagctaatggtagaaatcaacaagaaagctttgtttcttttttttagatatattgctggaacacacttattttatgatgaactcatggttgttattgaaatattttacaatactcttcaaaaaaaactagaaaggatgtatgccttgaatattaagaatggccagattcctatgattctattggaaaattaaaagacttcaagtatatgaatttaatgtgaccacaatccacgtttacaactgaacacttagaaatgagaccaaattttcacctcctgtgtttcctctggctataatcttcccaactataccaagaagctcctgggaagtatgcctatcatgaaaattgctcaattttcaaaaatgatctatgaatcataatgggagtcttggtagttaagtgtctacaataacataaaaatgcctcctagcccctcaacaggtggtagaaagaagtcagatgactctaacaatggtctttttttacttcatttaaatcctagcatatcagacaatattagaagaaaaacaaaacaaaacaaaaacctagagcatgggtataacaatatatataagcttataggaaaataacatgatacaagagataggcctagtgcagtggttccaaactgcctgggttagagtcctggatccgtcacttagcctctgtgcaatcttgggcaagttatttaacctctctctgtgttagtgcctgctataaaaactcatgcaccaatgtcgtctactacccaggattattataaatgttctgagtatctttacctccccaaagtctcctccaagctgtctccattctgcttctggaccctggaggctggcccagaaaagtggcaacaatgagctcttcaccctgcagctctctatcctgtttggctgatgggagggacagtcaagagagctcgaggcagggggaattccctggtggtccagtggttaagagtctgagcttccagtgcaagggggtgcggattcgatcccggttcagggaa

SEQ ID NO: 42329 - DNA, 1514 bp, Bovine  19866880905625
  misc_feature (1)..(1): n is a, c, g, or t
ncccttggagacccagcagagctatctagagacacaaagactactgatacttaggctgtagtactccgttctcacattctccctcaagagacctaagtgatagagttttagagaacctgccagatatttatattctaacaagccaaagaggaaaaaaaaaaacagaaaacaaaactcaaagcagatctattaattcaagaattttacatatttatgtgctcgattgccatctcttaggactctccaggcttttcacaggaaggagtatattgaagctgaaagaaactattcctaaaaatacagcacagaagaggtttctgatcaattcattgtgtttttatgcagcaaaatgcaacaacagacatgcaaatagatagactattggtctatcacatagagtgtgggttacaaaaatgaatcagggtttaaatgttaacaacacttaggaaagcagttagaaatgtgatgattgtatttgatctcacagacttgaagcaccttgagaacagtgactgcatcaactacattcactgctggggcccatgtgagcacagagtagggctcaatattcactgaatagagagatggtggtaccactagttaatttgagtgatgtcatatagtctttctaattgtattgtgggtaaaagatgctctccatggtgacatcagagtaatacagaaggattttagcacattggcttccctggtagctcagctggtaaagaatccgcctgtaaagcagaagaccctggttcaattcctgactcaggaagggataggctggagaaaggataggctacccactccagtattcttgcctggagaattcccatggacagaggagctttgtaaccccatggtcgcaaagagtcggacacgactgagcgactaagcaattaacacattgatgaagaaaaatgctgctttggtgcagaggtattgcatctatgaatttaaatctaaggtgaacttgaagacactttgagattgcttcttaagtttgaggttgaggtcagttagctactcatttaactgggagtggaaagaaatcggaacttacaactctcagctgtttcccaaggtggccacctctgccacctcctcctccttcacttttggggggaatctgttttcttgtacctactcaatctaacctgcaggagaatgccaatactcttaggtgtcttggcctagatgtggctagatctcttctattcttggtttgcgtgaaggaatagttcaaagctaccctcacatactccatttcagaacatgtatcctgtattcatcccctaactgtgatcacagatagctcaggtaacactgttacccaaagaggtgcatctcaaaccatcatgtgtataggcgtctctggggaacatattaaaaaatgcagattctctggagtggagcctccaggtgaagctgatgctgctggtccatggaccacatgtagagtaacagacttgattgtatgtaactcattgcttgtctctctacaagatgtgtgt

SEQ ID NO: 42330 - DNA, 3563 bp, Bovine  19866880927266
  misc_feature (1)..(1): n is a, c, g, or t
ngagattccgccccctgcttttcattgtacctcatggttagttgcttagccttgaagtacctgttacctcatttgtaaaatgagcataatagtaattttgaggggaatttcctggctgtccagtggttaggactctgtgctttcactgtggagggcatgggtttgatccctggttggggaattaagattccacaagctctgtggtgcagcccaaagaaacccaatagttttgagggggtcaaatgagataaggcatgtgaagtacttagcacagtgcgtggcatgtaaaatgccctcaagaaatggtggctatttttagccattcaatcaaaaaggatatttatttggtatctgctgcgttcagacatatcgtaggtaccaaaatgcttcaagacattggcccctgcctgtaaagagtttacatcaggggtcgtggaggcaggggaggaaacacttccacaatttcaaaggtagaatgtaatagaggacagaaagatcatgaaagggagaagaccttgaagacaaggtaacctttgaattgggcattgtagcatgtgaagaatgtgagttgtgtggggatgaagcaatcggtattctacagaaagggaataaaccccaagagagatgatgaacaggaatggtgaggtcgtgtctgtgtccaacaggctagtgtggtctgaatatagggagtgagacaggtgggaagcagaccaaaaaaaaaaaaaaaagagggaagatcagaataaaagggcatgctgattggaaatgccatgctaaagctctagtctttgtttgatgggccattaaaggcttttggggaataggaggcctcccaggtggcacagtggtaaagaacccatctgccaatgcaggagactctaggagacatgggtttgatccctgggtggggaggatcccctagagaaggaaatggcaacccaccccagtattcttgcctggagaatcccatggatagaggagcctgatgggctacagtccatagggtcgcaaagagttggacatgactgaagcgacttagaatgtccaaaaaaaaaatgcacctcaaatcgtttttcaactctgttaccacaatttcctctgctaaagatattttgaagcaaaaaagtgcctcgccttttgggtacataaaaccctgttgatgaacatgatgagaaagatcgaaaggcatgttgcagttcatgaggttgccaagagttggacacgacttagtgactgaataaaaagggattagtcaggcacagattgtattttattttgaagtttgtttttcttttactatcatactttctctttagctataactagataaagtgattataactcagagcatgtgggtttagaataaattcaggtgcataaaattggattgcctttgttcccatgttgacttttctccctgtatgagtgatcacttgaatttggagagtgaaataattttacttctttccagcctcatgggaatatctgcagtcagaagacagagtacagggcttgtgaaagagggaataataaagttccatcctctggggaaaggaaagaaaaggtgaagggaggagatgtcttcaaaggagggaggctacaaagcctccttcctgcttcccccaacttcgtccagattaatttgtatttcagtgaggatgtaatactgctaaagattttatgtaacttttaagcctcctagatgtttgttacttttgttatcctcatggaaaccgtgcaattactaaaatgtggtgacgaggccttaggtgtttatttaaggatggagaggggtggggtcccagaacttatattccatactggtattgtcagggagatgaagaatagagcctggtagtcaagaaagagtgaagagtaggggagggggtggtagcggagtagtgaggagcaggtattgaagtgtgcctgctgcacaaaggctgcgttttctgacttaaggagataaaacccagtgctgtcaatggcactgtgagcagttacctatagcaggagccaagtcactccgggccatcggcctccactccaccctactgctcttggagtctgcagcccggcccaggatgtaggcagcgaggcagctctttgaactaggctagggaccaggtccctcctccaaatgcgacggacacagaagaggggctgaactccctgtttatccgctcccaggcacgcccgagccgcgcagccacggccgcgggagctgtccgcggtgctgaaccattttcttgggcttgatcggacccgtgactcggcatcgcgtcgccagcttaggcaaagggctcagtgcgtcccggggagcgcgagccccctaaggtctgcggctagttccaagcgctgcaatttaaatctctgacagaactacctatgcgactctcttaacccgagccaagactcaaggcaggatccggcttttaaggacgagtccctcatctctcccctacatcccgtagatatctcaatcccccaccccatttcctgccctgcgacttccttacggaaacggcaccaggtcgtcctgagagccagacagttcacgcctctcatctccctagtttactgcactcccctccagagcgggactctcccaggacgcagcaagctcccacaatatagattctcccctgaccctccggcccaggtttctggccccttcttccttttctgtttctactatccttctcctatttctcaaagcaccgagttgggaggtgcgagctccgcccctattttccctacaagggcacgctgttgtgggggcggggcgaaggggaggtgcttccagcccctctcaaaagccgcgagtccactgggaactcgaatcttttcagctcctcggagtagcctgcaccaccgtctgggtggaggacctccagggacagccaggattctacctctctttctccggagagctttcccatccgtcaagccccagtcaccaggtaggactgcgcttgggtctggcttgtggggactgtaggggctccaaatagagtggaaggcatttaaataacctatgcacatctaaccacccctagatttcattttacagaggtgggggtgacagcactttaaattttgttgattatttattgtggcctgtcattctaaagggaatatttgagtaattaaggtgtgtgtgtgtgttgaggggggagacggttggcgtaggaggggacggaaagagaatgggaggtgacagactctgattatctttggacaggtggctatggcctcattgcccactcagggtccagcggcccctgacttatttaatgggctgctgcctgcgtcttcaagtccggtcaaccagagctcagagacggtggtgggcaatgggtcggcggctggtccaggctcccaggccatcacgccgttccagagcctgcagctggtgcatcagctgaaggggctgattgtgctgctctacagcatcgtggtggtcgtggggcttgtgggcaactgcctgctggtgctggtgatcgcacgggtgcgtcggctgcacaacgtgaccaactttctcatcggtaaccggccctgtccga

SEQ ID NO: 42331 - DNA, 1118 bp, Bovine  19866880928921
  misc_feature (1)..(1): n is a, c, g, or t
ntggtgttgccttctcctctgcaaccacaattgcctcctgctcatctgctaacatttgcacatttgcacccgtgaccttggtgatataccttgagaatgcatgtctctctccctgaaactcttgaccataaggaggccttaccttgttccctttgtaaactcctattacgctactcctgggtttcccagcgtctcagtggtaaagagtctgccagcaatgcaggggcaggagacatgggtttgagcgctgggtcaggaagatcctctggagaaggaaatggtaacccactcctattttcttgcctgggaaatcccatggacagaggagcctggtgggctactgtccatggggtctcaaatagtcagacgcgacagcacgcacacacacacacacagaatcaatcaccatcctaatcactcccagagtcccacctcctaacaccatcgccttcaagattaggtttctaatacacgattttggggacggggcacattcagatcaaagcacgcctcagtctacaggcacaaactaccagactggtgaagggactaatggaaggtcacaagttcccttcaagttgctatttaaacttttgactttgttaaacaagcctctatggagaaggaaatggcaacccactccagtgttcttgcctggtgaatcccagggacgggggagcctggtgggctgccgtctctggggtcgcacagaatcagacacaactgaagcgacttagtagcagcagcagcggtagcaagtcagtttcacacatggcaaaggagaagcttagcagagcgggaaaatgtcttgaaatattaattatgaattactgagtttcataaattttttaatttttctgaaaggcactaataacaagagcccgtaatgactccagggaaatgacacatttgcattttattagttaaagtaagtgcagtaatactctagttatctgattgttactgaaaaactggtcatttaatgtgtgtgcattttccagacaacaacatcttgttccttcaattgtaaaaactgatcattttaacttttttaaaaaaatgatgggaataatcactcaccttctaccattcagatcgtgtaggaaaatacacaaaat

SEQ ID NO: 42332 - DNA, 2744 bp, Bovine  19866880955765
  misc_feature (1)..(1): n is a, c, g, or t
ncaaggatgttgtttggatcatcaagagaggaattctgcagcaatacaaaaaagagaaatttctggagactggtggatgatcacaagaccagggtggaaaaaggacagtcgagcagcatggcctgggctcagagcctctgagaggctactgaatgacactctgaagctccagtccagagcgagggaaaaaccacatcgtcccccaggcctgggtggggtgaaggattgtgagaaggaacagtcttcacttaacacagatgtcatcagtgatagcctcctgggtctttgcttctgtaatctttttaggcacattgtgcgtgggcattcttaaagtcttgtttcaacaaaggctccatgggagtgaagtttctcttaaaatcaagcagtactctgatggaagagacattgcttggacttcttttattaggttaagtagggagaagtctattaaccaaaaatgaggaagatacactagataagccattgggataaacttttcttctaagaaacatatattagactatctctttaaaaaatttgtattttctttggtaattatttctacaaactaaaactcagttatttaagtctaacaagtatcttttcataggataggatatatcctacctagtctgttggtaatcccatgaacattttaattataacttcatgaagtagcttcagctaataaatagcatttccataggaaagtaaaatataactttcctcctgtgtttaatatccaacttagtacccatagagactaggcggggctggtgaatgaaagtatgggcagtagagaaaggcagaggaaaagggtggtttagaatatgggctctgggcaaatctgttaatagattcatgtgatggcttaacacttaacagactttgacttggataaattgatgagtccaagcttctgtttctttgtgttcaaaacaggataacagttttatttcatcaaattgttacatggattaaatgagctttcttatagtgagaaaggatgtgctatataataagtatgccataatttctaacttactattattaacattgttatcaagggaaagtatagtcgttagaatcacagaaatgtggatttgcatctcctccttcttaattcaattaatctgaccctggctaagtcatttaatattgctgattcactttcttatcagtaaataggagtggtggtcgttgtgagaacgcagtagtctaagtacataatgtgtttggtgtggtcctgtgacatagtctttgctagcaagggtttgcctttctttcctgcctctgagtttgagatttcttttctttctagtcgggacttgaaaagaggatagaccaagctgtggaagagtggaacattgagaaggccgaggaactcagcaaccagctagctactcgtgaggtaagtcggccccaccatgatgctctgctgcgctttcagatcttctgaaatgagtgtacgttctttgcatgatcacgagtaagtgcagtgttcaaatatttgatctaagattcttttctgtccattttcttccctcttactctcccacttattttgaaatactgggttttatttttgtctttaatgataataaattattcttatataaatcttaatgctggaaataacccacggttgatcttcagcctctagatttgatctagttcagagctctgtctgccagttgtgctgaaaaggctagctttctttttccattttcatctttaactcagtttaactctccctgagggcggctgcgtgttctggggtcacatctctctgcgtgttcctaaccctttctccccagaatgctttcttactgcatattctaaatagttccctcagctctaaagaagtctcagccttttttttaacctaaagtctgtagtataaagctaataggtatattgaatattcttttcccaagtaccaaggcatccagaagattctcacttgcaccctctgggagaaagttgcaaaatttgtaaaacagtttctgtttgcccttcactcagatacctgaaatgttaacagtcaacatttgcttgatcattcttttctgatttatgtgtgccttatttagatttgccaaatatgtcagtgatcgcctttataataaaagaaaatttttcttttttccggtcttggacgctgagttttgttgttgtctttttagtcttctttaatctggaatgtttcctccgtctgtctgtgttcctcaggaccgcagtagttttgaagagtagctgatggttttgtaggatgtctgtcaagtttgctttggcgcttcctcatgattagattcatgtcgtgcatgtattggtgggaaaatcacagaagtatcctcagtgcaggatatcagaatgcatgtggcatctatttgtctactttattgatgatgttcctttgattatttgcttaaggtggtgtctccaggtttattctaacatcattcttccctgtgtaaattaataagtatctcgcagagaggtgagagatgatttgagactctgtgaatattctttttctcactattctttacctactaattttagcagtcattgctgattgttttccagcttgagacaattactattataattaagatcttgaaaacatttgagtgtacttctcatctttacctggcaactcatatctaaaatttgtcttcagtgagatactggattctagaatctcttatgtatctatgttaagtctcccagtaaccggacag

SEQ ID NO: 42333 - DNA, 948 bp, Bovine  19866880976712
  misc_feature (1)..(1): n is a, c, g, or t
ntgactgactattttgcaaccccatggactgtagcccaccaggctcctctatctgtgagatttcccaggcaagaatactggagttggttgccattccctctctaggggatcttccccacccagggattgaatcttgtgtctcctgcattggcaggtggattctttaccactgagccatcagggaagccctgtgtaacagaaatgactgctaacttgtgtgagcgcttgatctgcaccagatatgacctggggtccttacaaggcagggtttttttgtgtgtgtatgtggtaaatcacttcaatcgtatcagactctttgtgacctgatgtgagcctgccaggctcctctgtccatgggattctccaggcaagaatactggagtgggttaccatgccctcttctgggagatctgcctgaccaagggatcaaacctatgtcttctgcggctcctgcattgcaggcagattcttttcacctgagccaccagggaagccccagggatttacaatcatcctgatccttatttgcacagaagcagctttggagcctgacagaaggtgaatgcattgtctgagggagcaactggtggggtctgggtttgaacttggctctgaaagagtgagttgaaggcctcaaccactatgctaaaccatcttctgtccggaaagtctgggacatctcattctccgtggagagtctccagtaaaggctggagggaaagcgacaataccagatcagagctttggaggagaagaagccactcatctaccacgggcatccttaagaatgggggaagaaagggagccatggttttagaatgaaagtttctatttaggaggctggggcattccagataagcggcccttttttctttcccacaggctagatgccttacttcaggcacttttcagtgattgcactttgtctgcggaatgcagcactgtgag

SEQ ID NO: 42334 - DNA, 2761 bp, Bovine  19866880999044
  misc_feature (1)..(1): n is a, c, g, or t
natcccggggactggggcgattggattaccaaataatgggtcgctttagttctgccatcgtcacttatcaggtacattagtttaaaacctgcaattttgaacttagcattactgagctttccaaagattaaattacccaacttttgttggtgagtgtctctgtgaaatttcctgaaaaggatagtcctccttctttgtgcaaaagtgaagccaaatcacgtactttattgatatttagagacatacaaatgatggtgctaatgtactttaatgtctgtctgcttgactggaaaggctgtgggtttgtgctttggggcttttctttttcttaagataatgtggaacactgtagtctctttgtgagcttaatcggagtaggtagatttttttttttcttcctcttgtttttcccaaagcattatttcagatgaagttttacaccaaaagtctttttcaaaggaggctccgtgtttgtccctgctatgggtacagcctctaccttggtccagcacacaaaaaaaaaccaaaaaccatatcccatgcctgtttgtcctcttaatagctttggtggaaaatgtgagaacactgatgctttaacaaaactgagtcgatttaacactctgtactcaaaaatgcctccacataaggggaagagtcttaatctctaagccatgaagatttaatgttttcagagtaattttacagacattctgcctgccagtgcccagtagggtttagagttcttgagtcaccacgggcttaacaagcatccaggcatgaaccaactttgtagttttgagcgagaggaataagcgttgatccgtggtgactgagcagaattaagaggtaatttacctgctctctttttagggagtttgtatataccttctgcctattggagatgaattataagccaactctggcaaagataggaatggaaccagaatatcccagcaaaaatggttgatgacatcttgaatttctctcagaaagagatgaatatgcaaggatagtagtaagtgatctgctaaggtactgaagaaagaggtagggtttgcttaaatcacaagcataaaaaaaatccaggggacatcaaagtccatgtctgctctggtcatttaaacaaagctcagatttctggtagctattggtaaatggatttttggtcattcaggagtctgtgatagataggcatggttaaaatatatttttcacctatataacctctagggttcgatactgctgttactactgctgtttactcgcttcagttgtgtccgactctgtgagaccctatggactgtagcccgccaggttcctctgtccatggaattctccaggcaagaatactgggagtggggttgccatgccctctctagggaatcttccccacctaggaatcgaacccaggtctcctgcattgcaggcagagtctttaccatctgaacccaagtgcagccctaaatcccgacagggtttggcacttagataaccaacagcctcactaagggcaatccatactgagtggtgggggcccccaacagacagcagtgagcagaaagggctataaggttagtactaaaaagtggattcattctgggtgcatattagagaaggagtggttcagagccgcttagccagtatatcctcttctgatccctgtcttaagcataatgaaagtgaaatatcccttctaaatctttgaggggaggcaggatgagataaacactggtggcattacaactcaaattttctcattgtcactgagcagcttttataccctcaacacacggcagttgctctttagacgaagtgggtgtgtatgtgtgtgtgtgttttgtttaacatgcccatctcagatttccgaagcctcctcaaataggtttgtctctgctcttagcacagtggcattatccagaagcactgccaggaaagggctaagaggaaatacggattcctgtttgcaaaagcagatctttagctgccagacaaggcatttatttcaactggtacccaccctgcgtggtgcactgcggttcccagatggtaactcacgtgatgagatagcagcgacagtgctaattaaatgtcagtgagctcaggagctgcagcaaggccttcaggctcagattgctgagacagaagtaggaaggagaagtgcatcagccttcctgaggctcattagagttggggagggctcaaattcagacagttgctggattcagatcctaaatggacactgcaagagggcccacaaatgaactccaaaaggaataaacaaacattagtctacattgttttaacagaaaacacatcctttggcaggttttccttgacatcatccatcacccccatttgattgacttgtaaattgaatttagcttgttcttttttaaaaaaaacatttttttttaattgtgaaaggctatgcttcatttaataggtctttgttggttatccattttaaatatagcagtgtatacatgatcttcctaaagtccctatcccaaccccccaacaaccataagtttgttttctgtgagtctctttctattttataagtaagttcatctatatcatttctttttagattccacataaaaaggatgtcatatgatatttctccttctgtctgacttacttcactcagtatgacactgtttaggtccatccatgtggctgcaaatggcattatttcattctttttaatggctgagtaatattccattgtatatatgtgctacatgttctttattcctct

SEQ ID NO: 42335 - DNA, 1154 bp, Bovine  19866881035477
  misc_feature (1)..(1): n is a, c, g, or t
nctgggtcacctagttacatgaagagaccagcttctgttgatataagtcagatcttcaagtagaatcatgggacctcatcaccaaatcagtactgagatgagctctgagtagtttataatagaaacccaacaagtgccgtgaacgtccgaaagccgaccagatgtgtgacgtcaccagcaaacgggtgctctctgggatggtttctggggtgccccagcccatgtctgaatggtccttacgagctctgaatgggcaccactttgcttctctaagcctccatgtcctcacctgtgaaatggcagctttagttccccaagtcaaaggattgatgcatttattaaattacaaggtaaaggaaacactctgtcatgtgacaaatagcctcagaaatcggggagtttgtagtgattgtatccactgtctcatcctggtctccagccccgtcattggaacactgagcccatgccacaccatcattcaacaaacatgaatctgagcaaactctgggagatagtgaaggatagggaagactgacgtgctgcagttcaagggatcacaaagagtcggacacgacttagtgaccgaaaaacaacaacagtatgttaatttaactcattagggtctcttagcatttgaaagcgtgtttaaaaacacaaatcaacaattcatctttggggaccaaagaacaaattcaagcataatgtattacgtttcctggctccacaaacaccattttgatatgctaatggcccctagtgagggcagtaattttcagttaaataaaggaagccatgggtccaattgcaaagtctccgtagacaaaatctgccttccttgtgagtcagccaggaataaacactaatacaatatcatttgtaagtgattaacataaaattaaagtgcaatatgtatcatataaaatatattacgtgtaatataaaatgtattatcgagaaatgtgacattgacccaggaccaatgatttgagtccaacaaggatttgagtccaacctctgacagccattagctctcctgtgaattcagaacataatgtcaacactgtaaaacagcacacagaacaaccacagcggattctactctcactgatcctctagtttctcatctgtagaatgggggcaatgttacttgccac

SEQ ID NO: 42336 - DNA, 1738 bp, Bovine  19866881065695
  misc_feature (1)..(1): n is a, c, g, or t
ncatcacagcgctgcgggctcccacacctgttacctgctgcagccaggatgcggtgctcggtcggagctctgccctccacccagcgcctcattagtcgtagacacaccgggctatgagaaaacatcagaacttctcctgcacctctaacaatgcacagaaccagatttcccgtttcctttgttatgctatgaatattctgcagcatctccagttttattaagaagactttcccttggtttctctttgttcttctcatctaatctcttaatggaagttgctaattaaattcctatagccattttttttaacagtgttttgaatagcaaagtctgtcaactgcagaaagtgtatattcttatcaacacgcctgttgcctggaggagcgaaggcctcgctgacagatggctgctgaggagggcccagcagggcttacagctgcagcacctgtcagcgggagcgcacgcaggcggcaccgggcgccagaggagggcctggtttgggttcaataaatagaatccaggttgctagagtatttctgtgaatctcaagtggaacttggaaaatgtaagccaagtatcctgggcaggtactcgctttcaagtatcctttgacattctcctactaatggtcatgcatccctttacatttcagtgttattacatcgttaaaggaaatttaaaaatcagctgagtgcctgacatgtatgccaacatatcctttaatcagacacaagtcatccaattgagcttcattaaattgatttgctgctggctggtgagaatcttcacgaccgtcgtgaacaacccggaatcatcatcttgtacggtaaatttacgtgaaattaaataaacaaatttttcccacaaaccaaccccacctcttctcccatgtaggaaggtagtcagctgcacaataacttatagagttgtgtgtgattaattgaagggtaatcccccagcacagccaaatcaacccctggaaggaggcatgtgtccttggtcaaatgttagtacctgcctaaagcaaaaactcatttattctctcaacacagactctgccttggcaatgtcaaggcagacacctaggtcaagcacagacaacacagcctctatgtcaagtaccaggtaggggacatagggtagttttcaacctggctcgagacagcagcctaagctctgggactgtcacctctgtaagtcatcagaaaaggagtgatgtgtgtgtatgtgtggttttgtaacaatgccaaaaagagagagacatcttaaggaattactgaaaggtagaaagaagagatcaaacctatacagaaataaacctagaatctagcaaaaactaaaactcaaaaaagggaaaaactgccccagagataggatcaatctgggaaagctccaagtgcacaggcaaaggataaagggaggaagaggccttatagaaatcaccagagtgtttaaaaagggaactcagcaattgtatctatttaaaagaactacttgcacttgtgtaatggtacacatgaatgagaatgatatgaatgaggctgggccttgctgcctggctcacaacagagagaggaagttgattgtctagctgtgggtgagcgggttactatgaaattctgttgatggctatgtacagacatgaagagatctctaaaacatggccttaaaggaaaaaagcaagttacaggaaaatagagtaaaatgaaagattaaatgatagatgatagataggcta

SEQ ID NO: 42337 - DNA, 965 bp, Bovine  19866881096156
  misc_feature (1)..(1): n is a, c, g, or t
nctcttgggagaggtctggaccctcacttgggttggcttgctgagactaggcttacatcttctagtccttggttggagagtacagagcaaagaagagggaagccagtgtcctggtaccctttgtaaggaccgaaaacttccgtcctgatggccaaatccaaattggaaatgaaagccgattatcaagtagaagcagtataaggcccacaagttaggaagattcaggctcagaagaaattcctgaggcattggcccatgatcgcgaggatggagggcttcagttaaaatgtgaaggttgttcctggctaaaacgggcacaatttttataaaaaggatcttaaagttcttataatccaactccttcactgttcacctgagtttcctcacctcacagctatgtcaccatccaacctctatgaacttctgacaacattcattcattcgctcagccatttaatatttgagtgccttccacattcatctcagttcagttaagttcagtcactcagtcatgcccgactctttgcgaccccatggactgcaggatgccaggcttccctgtccatcaccatctcatgtcagaccacaatcatgcacaagactagtaggtggtagttgtttgtaatgagatgtagtaagaggaggtgagcattgccgtggagagggacacaatgcagtgtggcagcgagactggagtaaatggcctctggccggaggacacagggctggcatcctaagaggtgattttggagctgagtctcagatgtgagtaatgcactcccctgaggcagctcatttcctcttcaaaaagtccttccttacactgaagcgaaatatgtgcttcattaatttttacctaaactctgaatagtcattataacccaagccaatgactctttgaggactttgatctcaatggggtggaaagacaccagggaatgtatgaagtttgtttttcagtaagt

SEQ ID NO: 42338 - DNA, 1365 bp, Bovine  19866881129712
  misc_feature (1)..(1): n is a, c, g, or t
nctctttagttcccttagtgctctttagtcctataaaagactctgaagcttaccctattgattttgaaaggcaaaggaaaatagatgcaacaagggaaaaatgattttctgctcagttttgcttaaatctaaatcgagcatatgcttgactctttttggctttgttggctatgtcagactaatttgtctcttcagaggactagaggcaaaaaaagaagacataccagggatactgactatcacacttgcgatttccaggtggttcatagaattgcctctgccggttcacttggtgcttttgcagagagcaggctcggggtgagttcgaagtggagtgttaggagcaagtcaagtcattgcatagaaatcctcttatttgtaaaattagtattcagagaagcaaaagttaaaggttgtcagatttatttttttaagtacttatcaaccagagttggtagattttgaggaggactttcacgtgtgctcctttaatgccgtgagcatcttggattgtattgataaacactgaattactgttaagactattaacaggcccttattgtgccctgtacgatttgatttgccacatcataacattctaatgtcaaggaagaattctcttttatcatgaagttcaaattttattttactcagtggaatgcttgctgcaggcttataacacctgcaaccaaattctctcaagtagttttaataataatatttctgaaaaggaatgaagttggaatgtttcattaaatgtggatgaactcttcattatcctagtaatgtacccaaatgctttttctgggaaggaagtattcttcggccaacaatggaaccttccctataaaagcatcacattaggatatgaattggcattaaaatctttggatgctttttgcattgtttagttaatgggggaatattttgtattgtcttctttttattattatgtgtgtgttaacaaagtgggcagagtaaagtttgcagaatttagtctctctgtaaatttttgcacagtggctgcagctcgctatgggtgagggctttagtggtgcaaagctttgattggaaggcactggaggaacacctcccagtacattcagcctggttcttactcatcttagccttgtgaggtatactgcagtatgaagaatttatttctttaactcaatagtgaccttgtttatttaattgggattcttaacaaaattcttagtctgcagtgaagaagtaagaaatgcctccattttgtgttgactaacactgtctgcctaaaagtatttccttcacgtgttcacttgtgttcttgccagtacagtatgtagtttacacaccatagttaaacactggctttttatgggg

SEQ ID NO: 42339 - DNA, 1489 bp, Bovine  19866881150789
  misc_feature (1)..(1): n is a, c, g, or t
ntccctggcgtggcgcttgtgaaacccaggacgttcacactgggcttgtttcggttttagtctttgcttttcttggcaaagccccttccaacagcttcagatgagaacagtcaagatgaaagtgtttcggaagcacttacacaataatcctgtcactcgtggacttaggaaaccgatccgcttttcctgaggatgtgacaagccagagtgtgacccattaaatgttgtcaaacccttcgccagagcctggagggtcctccaactcgagccaaacccctttaaaaccacccctcaaaacccttgtctcagaagtggccactactgccaccaccccacacacaaacccgcatgacaatctcttattcaccacctgcttttcagaagacagtgccaaccagcatcctttaatggatctcacttgtgagtcagtgaacacaatttcaatcagtttctgcagatgaaattgttaataactttgcactttctccctacgtggaaacacacacatatacacaccctcacctcccaccaacctagtgaacattagataatgaaaacaaacagaaaattcctaccaatatatttttgatacgttctacatcttcagtgaaactgtcattgcaagctggtacttgcctgcatacatctaaccattttcttttcgaattgcacaaggaaccctcagcaaatgatcattttttacatataggagaaagtcaaaatagattctcttttcaggctttaatcagaagcttgaagttggtctgagctaaaagcagctagcacatttttctggatgagtgtctgtagcaccctgcttcccctggcgtcatcaacattaaaaagttaggatggagaaggcaggcagaatgttcagaggtagggaagatgtgttctggggtcaaggtgtttgtttagagcgacatcatcctcccatgagagtagaacttgtgatccattcagaactagcatcccgggttattataaaaccctcagtcttcggagccaattaaacttggttatgaacacactttgagttcataatgtccagagtcagccctccacacagacattactagtatttgcctttacctcctctaaactgggcttccctgatggctcagtggtaaagaatctgcctgcaatgcaggagatacaggagacgcagtttcgatccctgggttgggaaggtcctctggaggaaggcacagcaacacactccagtattcttgcctggagaatcccacgggcagaggagcctggtaggctgtggtccatagggtcgcaagttggacatgactgaagtgacttagaatgcacgcaaattatcaccacacgttgccatttcttcctcttgcttctctctgagctgatggtggatgtattatgaaggctctcagaaataatagcgtttattttgatctgacctgtaaaatttttcctctgaccttatttgatctggacatgcctctgggataaatgtgcattt

SEQ ID NO: 42340 - DNA, 2188 bp, Bovine  19866881168894
  misc_feature (1)..(1): n is a, c, g, or t
ntgtattgctggaatacaacttagcaattacaacaaggcaaaggaaaaatctgctgatatatacaataacatggatgagtttctaaaacatcacagtgagtgaaagaagccttactctgaagagtgcttagtatatgcttctacttataaatgaactcctacaacaggcaacactagcccatgattaaaaacaagaacagtgattgcctctagggaatggggcagggtgacaggagcctggattacacaggtttatgtagtttatgcacattatactctgtgatttttttaaaccgtaaacaaatattaaaatctagttaatgataagcacactgaagtgtttagggctgaaatattattgaagcctgtgagttaatctaaaacacattttttttttttggctgtgctgtgcaatgtgtgggatcttagttacccgaccagggatgaaacctgtgtgccctgagttggaagcgtacagtcttaacaactagaccatgactttttaggaaagtccctaaaatatatgtgtttttttaaaagctagattgatgaatgactgtagtgcaaggagacccaagcagtccattctgaaggagatcaaccctgggatttctttggaaggaatgatgctaaagctgaaactccagtactttggccacctcatgcgaagagttgactcagtggaaaaagactctgatgttgggagggattgggggcaggagaagcaggggatgacagaggatgagatggctggatggcatcactgactcgatggatgtgaatctgggtgaactccgcgagttgatgatggacagggaggcctggcgtgctgtgattcatggggtcgcaaggagtcggacacgactgagcgactgaactgaactgaatagatgtcataaagcaaatacagcaaaacattaactactgtagaatttacttggtggatatatggtgtgcttagtcacttcagtcatgtccgactctgtacgactccatggaccatggcccgccaggctcctctgtccatgggattctccaggcaagaatactggaggggttgccatttcctcctccaagggatcttcccccacccagggattgaacctgtgtttcttatgtctcctgcattggaaggcaggctctttaccacttgcaccacctggaaagccctataccccaacacaaaataaaaagtttaaaatttgaaaaaattatatatatatatgtgtgtgtgtatacatataccatgttaagtatttatatattactgtgtataaatgttatatatgtgacattatatataatatgtgatggtatatgtaatataatgttgttaataatgataatatcaatactgaccaaaataattgggttcctgagagtctgtaagtgctttatacctggtaaaactataatgaaattcatttagagcatttcatttaaaagatcacatctgtgcccttaatgaatagtaattaaaactcacagcagcactcccattaggtgacaaagggttattatacatactttctaagacagatagattttggaccatggagtccggccttttatgtggatgtcagcattcaggaggaaattgagacttaattctaaattttccatttctagaagactaggtactcttttagaaacaaccgttaagcctgagaatcagcattctgacttgaccccttgccactgtagcatggagtggcgggcaagtgccgtggcagtctctagtcctgactctttaactgagggtggtgggactgcccttgcttaagacatccatcctcagtttctcatctgcagaacgagaggctgcactgtatcttggtcaaactcatgtttaactatagtgagcactgaatttctctctgccccaatattcctggcaacagccactgtagccagcgacattccctatagaacccaagccatctctttttgagaatggactctatctattaaggaatgtacaaacagtccctgagcaccctacgcctccccctcagggcttcagctgcttcttgttagtgggctcatgcctcttcctccccgcttaacttgcctggtctgcggcccttgactgcttggatgatgagtcttcagctgcctcctgttgtcttctggatccaatctgctgtccctgagcacatgcacctactatttctggtgcatttcttag

SEQ ID NO: 42341 - DNA, 2293 bp, Bovine  19866881200506
  misc_feature (1)..(1): n is a, c, g, or t
ntgcttggttccgccccgggttcctccttgcagactggggaatggaacaacttagctgcttttactggaaatccccatgcctccatgctatggtaatatggagccagccaaaccttgttttccactcggggctgatttctggcaaaattcccattgctggactccagtactgacagaggttaatgggtaccatttagccactctcggcagcattggtttgatcttcttggctccgatactcttccttctcttggcacgagaaaattcagcttttgccctttatcttgttatccaagagcctgaatgcccatgacagccgtggatgcagatgctgccccttctaagtccttggcagagcgggagaattcagaccaacgcaggcaacatgcactgagctcttgatttttttcctaaacagccagctggcctattgctgaaaccaagaccaatcagaaaagacacgcacgcatatgtggctgggactgctttgtttcctcctccaccaagaaagacaggagaaacagttcctcacactcagtaaggaaagatgattcagtgtgccctgaatccaaagaactcttgactaccctcaagttcttcagttcctagaggtgcctcagccctcaaaactgcacatgaacttgactttggaagaaaaatgtcaaggtcaacttgactgcctcttggcaaacaagtacaatcagtggccatcacatactatgggtcgttccatcctagagtgcccagtgctttctcagatccactcggaagggtcctgactcagaacccacagcagagaagtaggaaggagagggccactcagaggttaggacctatggtcaacatggaccatggaaataatgtaaaatcctaaaattcttgaagatacgtgaagtcccccatcagcacagcgctgtatcacacctccactgaaggcactggggctcatcagcccatttagtagaggcatttctcccccagccctggaagaaattgccttcacttcagttgagcatcagatgaagtagttggcttgccttgcatgctaagtcgcttcagtcgtgtccgaccctttgcgacccaatggaccgtagcccgccaggcccctctgtccatgagattccccaggcaagaatactggagtgggttgccatgccctcctccaggggatcttcccaacccagggatcgaacctgagtctcttacatctcctgcattggcaggtgggttctttaccacttgtgccacgaaacgcataatgcaaatcttttaacccaagacttagcctcagagaagcaagagactggaaggtgggactaggactccttgaggacacagtctccccctggcagatgcttgcaagaagagaggggtctcgaactgcagagacaggaggacacatacatgactcgatttccccaggaacaccctcctgcccgccctcctcttttctgccttttctctccaaccccagagctgaatttgctcatgtttgagaatgcatcttcatttcaaatacagatgggaagggggcttaatgatctatttagaattcctgcccctttcttcatcgtgaagattctagaattattccagaacaattctcatttctacctacacgtaagctccaaaggttcaaaaaagtatggaggaggatattctgaaatcaaaattctgttcccttattgcacagggaagaattgagagcgctaagggtgcagcctggcctcagtttaataactctgaaatgggtgtgcaacacccttcctttgtgggaagcgtgaaatcaggttaattaattggcttcctcagaggagaaaatgtgtcatcctcttcaaaaccctaggatgagaggtgtgaaatggtgtcattgtttcataaatcactacatcaaacatgggacgcctataaaccagcaacatgtaattatcataaaaatagcacacttaaaacttccagaagagtatgtggtgtattcttttggaagaacacacatggtcctgagcaaaaaacccacctccaagccacctgccaggaccagcttcctctccttgaatttcagcaatgccttccccagacatcccgattccaccctgccttcggtgttataaaaagaaataaatatttggtctttgtccccatttctgcatagagctcttaaaaacctttggaattttctgaggagatccgcaaaagtgtcttttattatgctgatgaggtaaatttgggtagtatctaaggaccaggcggtggttgcctggggaagcaaccaaggtattagaggatctagaac

SEQ ID NO: 42342 - DNA, 1851 bp, Bovine  19866881225117
  misc_feature (1)..(1): n is a, c, g, or t
nataagtagtatgccttgccttgaactgtttttatattaaacactttattttgtcttccattaaattaatttacttcacatgcattattgaatacctatcgtgtgctagtttagacttgggaatctagcactgaatgaattccttctccaaagggcttgtgtctggtttgaggaagattgataattaacacataatatgtcaagttacttggataacaaagtatgaaagttgaacataattattcttgcctggtatgaattacatatccccagtagtttctcgtttattggcaaactgactgacagtactttctgaacctccgattccagctattccatgtgtttcagattgtatttcactttattttagtaaagatcagttgtagtactttctcagtaggcaatgtgagcttgttaaccttatgaggttcaaagtttaagccttgtggcatgatgttttgaggctgtagggtttttaaattgtttgaacatgaatgtctcttagagggcatttgcgttctccacttcattgaaatgctcacaggtcttttattcttgtgccaggtctgtgttactcatctatgttactggcctgggccttgtaggcatttgagtttagagtatcttctttaggcactttgaaaaatagtgcatttttttcaagctggggaatctaacctagataaaattcagttaggttttgtttaggttccgtattttatatttcttttgattagtctgaacttttttgtgggcagagttgaaagggattgcttacctttctctaacaagaggatctgtttttagaattcaaggctgtgtgggttcaggcacacacagtgtttgaggctgtgtgtatcaagtattagataaaccaaacacatggctaatattatttggtttgttttaaatcagagattgggttgagattagcaaggaattaagtattttaaaagttgtcgggattgttgttttaagtgttgaccgcagagtgatatgaaaacccttcttgatctttggctgaaggtatgaacaccagccggtgctcacccttcaaactccctgtagctggcagatgctgatctgtgttctgccttcctttctactgtggtgaagattgggtggctcctgagaaaccacatgctagctagtgttcctgctgctgggccagactgttgtagacagggtggcttatttattgctcccatttctggagatgagaagtccaggatcaaggccctggcagactgggagtctggtgagggagcctgcttcctggttcatagaaggccaccttcttcctgggtcctcatattgtggagagggtgagggggctctctagagtcactcagttcattcatgaggatccacccccatgatctgaaaacctcccaaaggctccacctcctaataccatcaccctgggggttaggatttcaacacatgagtcttgaggggatgtgaacattcattccataataggtagcaagtaagtgaattggttttctgtggtttttcaagcaaaatatatgtggaaatagctataacttctttttagatgtggaaatagtagttaaaattttctgctgtgacttgtgcctttttcattttggtttgaaagtctgttctcaaagatatttaaaagcagagcttttttttttttttttctttagtgccacatgaaagatatccgagaggcatcagaaatctttgcttctgtactgggacttcatcctgtccttacacctgcgggacttcacatcttaggttctttttcctccatcaaatctttgccttggaggtttggtaaaagtgtgggacccgtgcttggaaagcaggcagctccagtgt

SEQ ID NO: 42343 - DNA, 2344 bp, Bovine  19866881323774
  misc_feature (1)..(1): n is a, c, g, or t
ngcagaatttagaaatctgtcatactgtacttggatgtcttccaaaataaaagaaaaaaatcattcataatctagcactaaaagaaaaattcatgagttactttcaccacacttagcaaaacgaaatttaaaattctaagaaactagaaattcatcagtttattggacacaggcaatacttttaattttatataaataattattctgtaggaatatgtctaaaaattatgaagattagagcaagaacttattccaatctaagtcacattacatttgaatattctagaaatcattaattgtttaaagtagcctgagaaagaaggtgcttctggtagatcacagtctaaccctaatatcacagtttttacttggtttccaatttggtaagctaaattctgctatatcttttaaattaagtaagtaaaatattcagatatcagtccattaaaataaccactggacccaaatgaaaacagtaacaacagctaatattagcatgcttattacattatcaggtactgtgctaagttccttagatcctgttttatttcattcaatcctcaagtgacagaatttcacaaaaagataattactgtccaaaaggcatcctttaagtttctagactggcaagtatttttcttttctctttcttaagtagcagagagaaagtacactcccaagaaaatatgagaggagactctgaaaaccacaagcagtcagaaaacaattttctaccctgaatttcggcaatctctgtcctatggacattttttaattggctagaccactgggataaatttgaggtgctgggttataaacagaaatctatgtataaaagcatctggagaatcctttaaattcagtgtttttattataagacatatattaagataacttacaaaccatgccttgaacacagtgatctttgatttttggttctgctattctatctccctcctcaaaatacccttgtataattttatcagaacttctagattccttgcaagatacataacaggccttacaagatggagctgtgaatatgtatgcctgggcatatttgcagtatgaggtagaagtaaaggagaacctaacaaaaaaagagattcatgccagacacaagattcaactgtatctaaagtgtctcctacaaactatttcttgtattccctaaactatctgcttttcactagtatagaaagattttcaagtgagatcctgagtttacatttcacaataatgagtatctactcaactttcttctgtaacaaaccccaaaaaccattaagcctcagaaaacatggagaaacactatcctctcatgaatcaggctggaattgccataaacaaacaaatctaacccctaaacaaatggtgaatgtttacctggtctgagagtatacaggcctttcacaatatttgccatagttgaaggtgtgacctgaaatggtgttgactgggcttctaaaagtaaagctgaaataaagagaaaacgggttacaaaaatgatgcaactcttattgattgtcaaggtttcgttttctatcaccatttcgcccaaagactgaaggataaacaaggataagaaaagaacagcttaagagggtaaaacaagtatttatacactaaatttcttctttttaaaaattaatccaccacagtcgagttccatctaccaagtaaatatgtgcttgtctgttgaaacactgatggaaatgattcgattgatggaggttctgaaaataagcaaagctttattaaagcaacagtactcacggtacttaagtgctgctgctgctgctaagtcgcttcagtcgtgtccgactctgtgcgaccccatagacagcagcccactaggttcctctctgtccctgggattctccaggcaagaatactggagtgggttgccatttccttctccaatgcatgaaagtgaaaagtgaaagtgaagtcgctcagtcgtgtctgactcttagtgaccccatggactgcaacctaccaggctcctccatccatggcgttttccaggcaagaatactggagtgggttgccattgccttctccaggtacttaactgagtgagctttaaatacttcacattaagttcatgatttaaaacacttacatttggggaatgaaagttctctaactcccttcatctctaactccttcaatcatttccctttcccccaaatcaccatatattaactaacaaatactcatgaaacttggggtaattttagtctaagccaggcttgtcaaattattgttttttctattcacacctttttaaaaaggaaatgccatctcacttgttcaacatttctgtagtttcaaacatgca

SEQ ID NO: 42344 - DNA, 899 bp, Bovine  19866881373701
  misc_feature (1)..(1): n is a, c, g, or t
nttacccatcagcctctgcatgcccagaggcccagttccatctcctacgtcatgggcagcctgtccatgaagcaggccaacttttgtcttgttttcagtttcctggtcttatccttgggatagtgtccactcacctggaccgggcaggtgaggcttagaagaggaccgaccctgaggttgtagctgggaggtccggtactggtggagtcaggtactaggaatgcgtggacagtggtcagactaaggctcaggtgcgctgggtttgcctcaagttggggtctggcatgtggtatgtgggcagactcttggtcaggcaggccacacagggccctggactatcacgctgctctcctcttagggtacgaggaaagacccccatgggtatgctgttccagtgaccccttggtcaagtccctaccacctggttcttcttcaggcgcatctcatcaggctgttatttccatcctggtgctgctcaactttgatctgggaaaatgaaaggccaggctgccgggtccccagctgccatcttttgcagcaagagtgagacttcacgatcccgctggctcgcgtacacttcatttcccagtaattaaacaagtggagatcaaagctgacaaatctcccccatctctcagcgcggtagatgaaaggtaaatatttctagcaacagtttttttttccccctcattaaaagtgagatgtgaaatgtcttctccctactttgaagaatactgctaagttcaaggtcactccagataagatatctggtttgagtacctttattattccataccaatcatcagtcttatagaaactgggctagcttgagggggattggaagaggctaaatcatgtcaaataagtcaaagacaaagaaaagtaaagaagaaccccaa

SEQ ID NO: 42345 - DNA, 975 bp, Bovine  19866881377404
  misc_feature (1)..(1): n is a, c, g, or t
ntgcaaggagattcaaccagtccattctgaaggagatcagccctgggatttctttggaaggaatgatgctaaagctgaaactccagtactttggccacctcatgcgaagagttgactcattggaaaagactctgatgctgggaggaactggggcaagaggagaaggggatgacagaggatgagatggctggatggcatcactgactagatggacgtgagtctgagtgaactctgggaattggtgatggacagggaggcctggcgtgctgtgattcatggggtcgcaaagagtcggacacgactgagcaattgatctgatctgatctaaatgtcctcatcacaaaaaagaaagggtaattatgtgacatggatggaggtgttaactaacactatagtggtaatcgttttgcaacatacaagtgtatcaaatcaactagatgtacaccttgaacttataagactatatgtcagttacatctcaatgaagctggaaaaaagattccatattaacagttatatttgggttgagaataaagcatattttcagtaatgatgttttctagtggactaacatatactgctctatatttattagttattttataaaagctcaagattcaaattcagagaaattaaagtagaataaacatgttcccatatgccttcttggagaagtttctttgaggggccattcagcaaagggaaatttataagtctcaagatatgacccaattcagactcaccagcactgaatgggactctcttctgcttcatgaattgtaacagctcgttaactacagcatgagttcttacaacggccagatgagcatggaaaggaaatgtagcatttttcatggatattaggaaaaattccttaaaaaattcttaaatcctccaacttggttttccctgcatgttcccccttcctacagccccttgacaaccagggcctcatggtggctgctggaaggacag

SEQ ID NO: 42346 - DNA, 1159 bp, Bovine  19866881421826
  misc_feature (1)..(1): n is a, c, g, or t
nctatcctgcaggtttcctgattaaggacagacctcccttcagcatggagaaggcaatggcaccccactccagtactcttgcctggaaaatcccatggcggaggagcctggtaggctgaagtccatggggtcgctaagagtcggacacgactgagcgacttcactttcacttccttgcagcaactcttcaacctcatggagacctctcgtccataaacaactctcctggctctctagccacctgccccatctgtctttattttcttatgcagcttgaagtttatgactgattcatctttttcatcactgatccaactctccttccattgcatgcatctgacaaaaccccagctttagaagaatatgatcatttacatcaatcagtggcatcattcttgaaacctttctttccctcaccttcaagctttaacccaagtcctgtccattcaagtaccaaaagagtcctgcagtctactacatttttcttcagccattaccatccccaaagtctaagtcatcgttacctctttaaaaaaaatatttattatttggctgcattgggtcttagttttggcacttgggatcttacagactctctagttctggcccaaggctctgggctctggagtgtgagggcttagtactcacagctcagaggcttagtttctctgtggcatgtggcatcttagttcccagatcagggatgaaacccatgttccctggattgcaaggcggattcttaactgctggaccaccagggaagtcccccaccatcttctcttgcctgaagtattgccataactccctaattggtctcttttcccactctttccttccctataagccatttccctcaaggtagtgagatggccctatacaatgtaaattacatcttacagcacttccttatgtcttttccattcacacagaaatatagactcctcaacaggaggtagagagcacacatgtggccatttccttttgttggtgttgttttgtcgctaagtcatatctgactcttttgcgaccccagggactgtagcctgccatgctcctctgtccatgggattttccaggcaagaatactggcatattttcttgcctggaaatttccaggcaagagaatataccaatagtatattggtattccaattcatat

SEQ ID NO: 42347 - DNA, 1671 bp, Bovine  19866881649121
  misc_feature (1)..(1): n is a, c, g, or t
nctgtaagttctggcatttgatcaagaagttaatatatcacttcattttcaggctgaatatgcctcagctataaacgttatattttttgatggatagtatacaattacaactgcccagaataaaaagtgttttcatttgtaatgtgagtgatactagaagttattatggatgtcacaaggagtagtgaaacaatgaagccttgcgttgcttcaagttcctccccacttaatatctgagagacactcactgaacacctaccctgttagacactaagctaactcatgccgatgcaaaagtgaatgcgcacagtctgctgggaaatgtttaggaagcatgttttggacaacttgattttcaggtaggctgttaatacaaagggacttcccaggtggttcaagtggtagagtccgcctgccactgcaggacacataggcgtaaaccgtggggttcaatccctgggtggggaagatcccctggaggaggaaatggctacccactccagtattcttgcctggaaaacccaagaaataacctggaagaaaagtgaaagtgaaagtcactcggttgtgtctgaccctttgcggccccatggactatacagtctatggaattctccagaccacaataccggagtgggtagtctttcccttctccggggaatcttcccaaccaagggactgaacccaggtctcccacattgcgggcagattctttactggattctttaccagctgagccacaagggaagcccaaaaatactggagtgggtagcctatcccttctccagcagatcttcctgcctcaggaatcgaactggagtctcctgcattgcaggcggattctttaactaactgagctatgagggacgttctgcttggcaggtaacaggtcctcaattaacagtaactattcatagtccaaaagcctacactattttcccccaaactgctaacatttacaaactctgtgtttaccagtcgcattttagaaattgtaatgcataaaatatggactttattttttatttttaattacattttgataattatgtataaaataacatgaagagatcttaaaactcaaatttggtcatctttcttctctgcctaatctttcaacagctccctattacagctaatataaaatccaaaattcattaccaaggcattcaaaaagtctacaggatctgcttcctgcctctctgcaacctaatcttatatcacactctaactcagtaaactctggccacataatttagtttcctgaacaagccattttctttcccgtactaaagtctttgcacttgctcttccctctgcctgaacacttgctccacaaccactcatatcacaggtctagctccttctcattcttcatgtttcaacccaactgtcacttctacagaggccttccctgacgactctctctgaaaaagtcttttaccccgccctgtatgtgctcttctcagcaattaactttgtttttaaggcctatccaaggcatcgaccaaatatttcctaacccaatctacagcttcaatattactaataatagccgttatcattaatttaatgttctcaggccaatggaccgtaataaaattattcaacccaacagcatctatacttataacaatagctctcaccataaaactaggaatagccccattc

SEQ ID NO: 42348 - DNA, 740 bp, Bovine  19866881797744
  misc_feature (1)..(1): n is a, c, g, or t
ngcgagccagcgcgaccggttacctggcgaccccagaccgaacggccccagcccattggtcgagatgtcggagccaatgagaaggcgcgatgttggcaggccttaagatggctgccgggcggcaccgtccggactggtgagtacggctgattgctaggctggttcttgtgctccagggagacggacccagggaagacagggtgcctggaacaagggagcaagcgcgggaggcctcacagcctctcggccgagccgtaaaacctttggtcaggcccgcaaagcctttgaccgggcccgtgggagcgtcggctgaaccggcctccgccttgctctgacgcggcgtcgcggcggagtccccgtcctgttggtgggagaggagttctccgtcccaccccggccggagtgagacgggattaggctttcgacccgggaaatgggctcttgtttacagttgccgtacccggaaacgagctgcagttgatgggagagtcagcaaggtaaacatcctacatcagaatctgtggcgcttagttctgtgccgggatgggattcttcccatttgggcatcggagtgtggcccagctgcaggagagcctgcagagttccgggtggttcagccctgcagcgaaaggtgtacgtttctagagccacccctcttgcattcttgcaccctgtaaatattcttacggagacatccaattttaaaatgggcctcgaaatattattggctacctgtaaat

SEQ ID NO: 42349 - DNA, 843 bp, Bovine  19866881827577
  misc_feature (1)..(1): n is a, c, g, or t
nactctggtttcctgcttgctctgtctcttcaaactgttttaacttttagtatgccttgtaaattgttgctgaaagccagataagatgcactgggtaaaaggaattgctataaacaaggcttcagtgatgttgccttgaagtctgtgggtaggggaagagaagcattctacagcctatgagtaggtctcactattttagtgagccaatgccctgggcgacaaacttcacaggtgtttctccagtttgggggatgggattgttagagagcgctgctgctgctaagtcgattcagtcatgtctgactctgtacaaccccatagacgacagcccaccaggctcccccgtccctgggattctccaggcaagaacactggagtgggttgccatttccttctccaatgcatgaaagtgaaaagtgaaagtgaagtccctcagtcatgtctgactcttagcgaccccatggactacagcccaccaggccctccatccatgggattttccaggcaagagtactggagtggggtgccattgccttctacagttagagagcgctaggattgggtatttcctttctcccaggtgggttaggctctggtaaaatagcttctcttgagggcagatctcattaagaagaacagaatattctgagggtgtctcaaaatggctgcttttcctctcctcctgacagaagcagatttttctctgatcttcactttaagaatctggtggagttcctggaggtaaaactcacaaagaaagggccactccatctaagcctgggccccctggagttttaaaccctggtttgtccacactgagcctccagtattcaaggccggggg

SEQ ID NO: 42350 - DNA, 761 bp, Bovine  19866881857717
  misc_feature (1)..(1): n is a, c, g, or t
ncttggaagcatctctctaaagaagtgaatacatgttatatattttttatagaggaggaaactgagatgctgggagatttaggagagaactctaaagcaagcagaccctctctatagcatacaagagccagggttagggccctggccaggcctttgctctttctccctcttccagtgattcttaaagtatgatccatgaactaccagcaagcagaggaatcacttgttagaaatgtaaacttccccgtgtaggaagctgggatggaagagacgaaacaagccaatgaaacttgcacatcttatcacaagatggagcttcccttgtgactcagctggtaaaggattttcctgcaatgcgggagacctgagttccatccctggcttgggaacatcctctggagaaggaaaaggctacctactccagtattctggcctggagaattccatggactacagtccatgggtttgcaaagagttgaacacaactgagtgacttttactttcacttttctttcacttatcacaaaccatagggagagagggatacctcagtataaaaatactgagtctaattccattaatataaatgctcatatccccaaacaggctggctgtactcataagccactttcattaaaggaaaaaagaaaaaaaaaaaaggccagaaaaagaaaggttccgtgtcaaagaactcaattggaatcctcgcttggtcctcgcttccttgccagcagtgctcaaaaagaaaagagaagaaaatc

SEQ ID NO: 42351 - DNA, 2252 bp, Bovine  19866880425179
  misc_feature (1)..(1): n is a, c, g, or t
ngaaaatcccatggatggagaagcctggtaggctgcagtccatggggttgctagagttggacaccactgagcgacttcactttcacttttcactttcatgcactggagaaggaaatggcaacccactccagtgttcttgccgggagaatcccagggacgggggagcctagtgggctgccgtccatggggtcgcacagagtcggacacgactgaagtgacttagcagcagcagcagacagtatgatacatcatcatcatcatcactccagtcatttttgcaaccccttcaggctcagagatcacttcctgccaagacaggaagtacaaaagaaaactcagagacagatggcttctgccgcagggtcatttagaggtatgctctgcaggcctccgctgatggcctaacccatctagcttccagccttgcacaagctgacaccctctctgctttctccacgtccaacttctgcctcatcaacaggccacagtccacagcccagaaaggcagaaccaaaccccaaactttatacacctacctttcaaggagtcttttttggtctgtacatgaacaaagaagagcattggtttgctcaatatagtttccctgtagtctttataatcgcagtagttggtcagttccacatatctgtgaaaaaagcagagatgattacaaatgctatgtagccttccactgaagtcaggacaggcatgtactggacacgcgtctgctatatccacagaccctccaagggaagtcctctaaaatgtattcttggggaggcagtcatatcttatatcaaataagtaattccccctcccctggttgacagacagatcaacatgccacccaaaggtggcctggggctgggggagcctggcaccagcattcagctctcaggggcagcctttaccaaatgatgaccactaccatctttttgggctgtaagacagcagtgtgtgtgtgtgtgtgtgtgtgtgtgtgtgcacgcgtgcccactcagtcgtgtctgaatctctgtgaccccatggattgtagcccactaggctcctctacctgtgggatttttctaggcaaaaataccagagtgggttgccatgcccttctccagtgtatcttcccgatccaaggatcaaaccctcatctcttgtgttggcaactggattctttaccactagccacctgggaagcccctaagatagtgctaccagagcactatgtatccctgaattgagaatgaattatccttcataagtggacttctcaaggtcttctccagtgcagtcatcctaactgatggatctgaaattttcctttccttctctttttctcttcctttttctaatcctgagataaacccagccccctccagagatgcaatattcacatgaactacttcacgtctcccccgattgtgagcttgtacagttttaaaaaactaatgtaggatttctgcccagggccctattcaatttagcctccttggtcttagttcattatttcaacccaggaagatctttttgctttttgactgtgtcttccagcatgtcagtttcctctccctactctacacattttccaagccgcctttctgtgtctctacctgcattgttgatttaaaagaagacagatgtaaattggcttctttcaagaagatggctaattttctagccaaacccaagttcagaagcggcgtggacacgggtgggctgagaggtacccagcgggctgggggatgcatctgccctgagccctcttcaagacagggtggcctccccactgatgggcatcgctatgaggtctgcgtggggtgaatggggggcttttgctatagggctgtgtgttggcttctagtcccaggcagagaccgctcctgcatttctggtttgtggtccttccagaacctgacctgaaaaatcaccgccttgggaccacctgcagctggggggctctggccacacagtccgaagcctccttccccatcaacctgcttagaggggctggagctggagacccagaccaaagcctgggtcaagagcagtgggagaatttatctacccccgagtcaggaaaacacagcttccgctcgtctgcctccagctctgtctcttagaaatctgtgtcatcatctttttttctgggattgtcagatctgatattgagagcttttaaaacctgacccccgatggagcacctggaatgcttcctgccttctatttcaccaggcttttaatgaagcctccacctcccaacc

SEQ ID NO: 42352 - DNA, 1499 bp, Bovine  19866880488097
  misc_feature (1)..(1): n is a, c, g, or t
ntggcttcttgaggttgttttagcagtttcttttacttagtcacagcatggctgtgatctgctcccactgaacagatgttcttcatccatgtacatcacctgtgttgaggaaagaaaatgctctcattactgcagtcctcaaagctacacgctactaatattaatgtccaaacatcattacatattctcttccagaaaacctttatcgttttggctgtttaaaaggaggaaagggaaaaagaaagagaaagtggatagcaaagcaaagcagaaggaaaaaagaaatattcttgcccagagatgaagaggagaaacgaagctgggcacgttttccctacccaaagtactagaccaagcactctagacagcagtggagtcccaatctcaccgaagagatgaatcacggagacaaacatgattttgtgtagatcataagacaggaatgcctctgtagtttaaaaaaaggtttctgcttgtattacactagagctctccaaacaactgcgaacgagctacagtgaacagactgcttttgatacgacaacacaatttagatttctttagacaccagaaagtctacatttttctaattgccaagatgttataagaaacacaaactaagttttatagcagtatataccatccgagttaattcttcaaggatgatttaaacatagacccatagtttaagaaaaaccagataaaaaataaaagaccaccttgtccaattagagaaaccgagttaaatacttactaagaattaagtacttttctctgtagatgaactgaacagtttcttagtaaggaatctaatgttgttcaattaaattacctttattccaactccaccatttttcattggaaccagatcgtaacttaagttttccttctccttttgaatgaaggggtcattgaatgctcgggccatgaaacctcttaaaattagacactgtattgtttgcatgagtgatttgctggaaaagaaaaaaaaaattaaattctaatttcaacatctatcactagccatagcaattaaaaagcaagtcacttgttcaactcaaatcaccaggatataagtaacttgcccaagagccctgaatttctccaccaatgaatacactttattttctctccttttcctacagaaatgccaggagggaagcagtgagaggaatacacacacaggcttccaaatctgcaagatgaactcaaaggtaatgaaactatcaactaaaactctgaacaagccccaagaactttatgtatcactttatttcattccttttctcccactgaagcttgttttatacctaacgaataactgaaaaagggtaattagaaagccctagagtccaatcacgtttttctaaaaaggagttaactgttatagtctattaagtcgctaagtggccaggataagttattctgagccacaaaatgtatggattgctacttttcctatcaatagcaggaatattaataatctataccaaaaagca

SEQ ID NO: 42353 - DNA, 1333 bp, Bovine  19866880535414
  misc_feature (1)..(1): n is a, c, g, or t
nttaacgttctccagttcgtgggtcgcccacctggtgggtatggggtttgattttatcgtgctcgcattcttccaccatcttgctgtggcttctcctttgtccttggacatggggtgtctttttttggtgggttccagtgtcctcctgctgacggctgttcagcaactagctgtgattttggttctcttgcaggaggaaggaagcgcacagccttctactccaccatcttgaacctagtccagtttagttcttaaattcctgctgttctttttctttccaaatggggtgttttctttttaaaaaaatatttattctcatttatctggtcttagctgcagcatgtcttgttgcagcactcaggatctttagttatggcatgtgaagtcttagttgcggcatgtgggatctatttccctgaccaaccatagaacacacgtgcgtgctaactcacttcagtcgtgtccgactctttgcaaccccatggactatagcccaacaggctcctcctctgtccgtgggattctccaggcaacaatactggagtgggctgccatgacctccgccaggggatcttcccaacccagggatggagcccaagtctcttatgtccctgcattggcaggcgggttgtttaccactagcaccatctgggaagcccagttgaacttcaggcccccacattgggagggcagagtcctagccactggaccagcagggaagtctgtcctgccgttctttgtatcagcaccaagaaatacttcctgatatacatcctaagctctgcagactgcgttcatcgcatgttgaccaagtccagaccccagggctcacctcgggagccgtcttctctattcacgtggctcagccccccaactcttaagctcccacagcctggtcactggaatcaaataagacgattccatccctttgctgatacttcctgaaacccactgtgatctgccttttgcaaacactgtcacaactcaagacagactgtcattgtctctcctctaggaatgagcaataaatgggcagcacaccaaatgcctgacaataatgatgagtgtgacgggtgagaaggggcgataaagacatccatcacgggtgcggagaggacccaggcagtgttgaagcggacagaggctgcggagagcttccaagaaacagaaccggagagggctacacaggaggattaactcttctgtgcaggtaaagcaacccaaggttcttggagtctcatttctgagtatacaccataccaaacatcacattacgtgctaatctgtaatctgtctcggtcagaaagtaactagaaacatggacttccacacg

SEQ ID NO: 42354 - DNA, 2164 bp, Bovine  19866880625500
  misc_feature (1)..(1): n is a, c, g, or t
ntgtcttgttggcctagcgtactaagtaatttagaaatattttcccatataaactgttcagtaagtcagctggatcgtagcagaaatcacagttcagagctgagagcgattgtgcagatagatcatcaagcctaattggttcctacagttgaagttttaactgtggtttcaatgatccaacatttataaaacccatttactttcttctgtgacctcatgctctgcttcattatgcatttgaaagtttccatatccagcagctgtcttcctctcttctcatactcctaggagggaaaaagaataattagctatgaacaagttgcattttgtttagtctgggagcaagagtccaaagaatggaacgtctaattggacctgccttgaactttgtcaatttcgaacatgctatccctttttttcacttctctgatgcattcacaatttgtttctaattccattaagaagtgacaattacagagaatttattcttcgatgctattttataggaattaaaaggattgtacttttcaccgaaaaataaaccatcaaaaagagaatcagaaagctcacctactcagttcctacctgaaacagtgcatttaagtgctgtagctcttcaggagtcacttgatgttctatctcaccaaaacaaaaagaaaataagttgaaaacatataatgcgaataggaatgcccataaaatgcaatttctggaaacccacgattcctcgctctgtgggaggccaatgggtagctgagcctgtgagtaacacataggctattccaactttcattgttccagtccctactccaattcagctgattccccagcccctagctatggggcaggcttggcccaaatgggctggaaggaagaggtggcaaggtggtggaaggaaagaagaggacaggcattgacttgggagagaaaagatcaggaactggagtaataccagaaaagaaagactgaaaatattttgccagatcatattccaaagatgctcttttccttctcaggagtccagcgcatcagaactgccttgtgtcacatcctctgctccccggcccatctcatctaggctgaaccaggaggagaccctgggggaactgacccctttttctgggggtaaattctctgaagctattgccagagactcttggtactcttggtattagagaatttcattaaccttaagtaggccatcctcagttcaataaacagactcccagagaatgcctctatctcaccctccagtcttataactattatctcaacagtttgcctggggttttcctggtggctcagacagtaaagaagctgcctgcaatgcaggagacctgggtttgatccctgggttgggaagatcctctggagaagggaatggaaacccactccaatattttgcctggagaattccatggagagaggaggctggtgggctacagtccataggttcacaaagagtttggcctttataaataaaaatggttaaacttctggcttataaagaatgaataaattgtcatagtggatagagccaaactaagctctgatgttcttgcactgtctcacgaggccagaggaagatagcaaagcagaaaatcagcatttccttgataggatcatcttctgaaatttctgtgatcacctcaagtttccagggtggtggcctttaccctaaaactcaggctgacaccaaagctacagggagacccaccatcttgtaaaattgaaacacctgccaaattctgtcttaaatgactcaataattacttttgaacttgctttcactgaggaacaaaattggaaaccctagcgctagaatgggaaaacactccagctgtagtttccacttaaaatttccctgtaaggctcttctggcaaggccggaacctggggaggtaatgtttaaaaaaactgaccaagagaaagaccctaacagtattcaaatacatgtaaaggatgattccatcaaactgaggggctatttctcctccccaataaaagatactaccctgaattaattcatcgcttgcttagactaagccttctccagcatccacaaaagcagtggagtgtaccaggctcatacacaagaccaaacaagaagatagtgccctctaagagcatgtgacttctaatcttccaccccagatgggactcc

SEQ ID NO: 42355 - DNA, 850 bp, Bovine  19866880639906
  misc_feature (1)..(1): n is a, c, g, or t
nctgacttgtttataataaaaacatttggtttgacttccacagaatccagcctatgatgcaaatgcttaagcgtgttagcccacattccttgtcgtccccagagaagttctgttcagaaagcgagaggggtggaaacaaacagttcctgggagtgtctccagtcagcgcccttgcatttagtctgagccatgcaaataatttggatgctaaaactcaagccctacgtggaccttttaaatgacaaagcaattatgtgtgtctgaggagacagacagtgtctctttaaacgttctttctgttcctcgggtgtgttgtaatcagcagatggccggccctaccttccccagggccccccttgcagcagactcttctaatagctaatatcctgcagcgaccaaggccattagaaggattaagccattaccctcctgtccagcaaacacacaacgctcacaagggccgccttttcctcttcggttgttgttttcatggatgaatcagggcctgatgattggttgaaaaatcataacagggagggcagagggttatggtcattcttttcgaggacacctccctaatagccttgggatttgaaggtcctttgttagaagaagggcaggagtcagttttgtggctcgagcaagctctgaaaatacaaacagcagtcagacctgtgccctcaactccggaatatctcatcctcaatttctcgagcatcagggtaagcctctttgctctgcctgttcacacagccagactggctgggtttgttctgctcaagacaaaccaccagcccagcccagagccacgtcgccggctcaggaatactctgaaaatattgccacccag

SEQ ID NO: 42356 - DNA, 1806 bp, Bovine  19866880658739
  misc_feature (1)..(1): n is a, c, g, or t
ncattgaattcgccctttggtattatagattcctgggctgatggcttttgttttagctcatgcaatagctatgggtcttattatggaggtgaagctatgcagaccatccaaggagagcttgtcagttggcatatgatttgctgaaatgcaatcacccaaacgtcaggagtggattgctctttattcccactagcactaggggaatttgctttgacatttcaaaaatctacatcactggtggagtgaggggtagggttgtaaaatgtgccagcacctctctctgaagctgtgagtgtgttggcagctcattttattgctggtcgtctcctatttggctttggatgcaggacacaccgtgtggctttcatcacttccggaagccacagccacactggcaagatgacttggagagccctggtccactgtctaactctaaacccaaacagtggcacttgatggggatgtcattccctccagaggctcaccctgagtcctctgggcctgcccagggtggtcacagcatctcaagagcctccggtgtggtgggactcgtgattgggtccaggtagagccaggagccctgagctccaagcagctgcttctgctccacaggagggatggcctttgctgtttggggcatgaggcccaggagcaagtctgcacagctctacttgaattcagcctggagtcctattgtgcaagagtggcaggccaggacctgctggggatgactttcttcaaggaagcatccacttcctgcttctgctccagtgcaaaaccacaagcattcaccatgccatccttgggtggccagggaacctaagcaatgacgttcctgctgccccatggcttgttaggggcccagaaccagggaacgtcttataattcttattagcacttaaactgcccccaaccttctgcagcttcccagagccaaatgatctccctcaaaactgtctggattcacattgttgtagtacagcaaagatggatacaacattgtaaaacagttatcctccaatcaaaaataaatttaacaaaatgtctggatgtcaagccactaagacaagtattaagaaaggaaggtcactgtgcacaagcacttcccatcagccaaccccaccttatgccctgcaaatattccaaaagccacaagtcactagaatacaaagtcatgaagacagacctcatctgctttctccattgtattcccagggtgtagctcagtgcctagcttatattaataggctttcattcaaccaacatgtgtcaaacatgcgcccagcctgtgctggtcactgagattgcaatgatgagcaaagtggtcgtcacatggtccctgcctttatgaagtttgcaggtgaatgattattaagtgaaagaacagagtttgcataaaatgtccctaggaaagccacagccactgtaagggcagaaatcatgcaggagtcagggaagtattagttcatccaaatatttattcattcagttatcaattctttcaacccctacttatcaagcacggatatagtgccgtcctttgtgggtaggcacacaggatacaaacatgaattaagtgtgattcccagcccagggtctcacagactggaaaggagataaactaaggaagtaatcattatacgatgtgacagatgatgtaataatgtatgaaatactagagaaacccagagatgggaactaccaattttgctttaacatcatggaggatattaaaagattactaggatttttctgggaggccaagtaggaaaaggcagtacggaatgggggagaatgaggagaggc

SEQ ID NO: 42357 - DNA, 1679 bp, Bovine  19866880704585
  misc_feature (1)..(1): n is a, c, g, or t
nctttacagaattttgctgttttatgtcaaacctcacccatgaatcaaccataggtatacatatatcccctcccttttgaaccttcctcccatttcccagcccctctaggttgatacagagcccctgtttgagtttcctgagacatacagcaaattcctgttggctgtctattttacatatggtaatgtaagtttccatgttactcttcccatatatctcaccctctcctcccctctccgcatgtccataagtctattttctatatctgaaactgacacgttcttgagaaagaattgacggcctagtcatcagctggggaaactgaggatgtccgaaccccaggcagttatcagggcctctccagcctgtggcacggagcggccggctccccctcctccgaggggccagccccatcgttcgccaggtgtgcgctgcgcctctaatgggacaggatgtcacctgcaacctgaactcgatgtcttcaggttgcagttttgtttttttccatagatttgcccaccatgagcattcagaacagttgcttagtgaggaaggaatcaccggtaagttttatcatgtgaatgtttatctgatagcccaaaatatctcttcctcccacaccaccagaggtctagagctgcagtttatttattcattactcctgttgggttgcacttgactacgaaatctgccaaaaattaagatgcaaaaatgtaatggttgctgcagtcgtgcatctgcttttagctgttctcttttgctttggcaagtcgtcctctgcctgttttgcctcaagatgctaaaatgcagtcttactgaaaacacaagacgtttttcattcttctcatgtgactggaggaaccaggaacctaagcgaactttctgtctgaaacttaatactgtacttggagttgttactgcagtgggtgaagctgttcttattttctgaaacaatctgggtcattgtgggttgtcactcccatcgctaggtttgaagcttacagtgcagttcataatggttttgaagtctatagtgagacatttcttctaaagaggaaggcagcagactttaccaagtgcatcctatgtgcagagaaccactctggattgttgtggagcagtttgagaggaattaacagatactccagttccttgaattacttatagatggtggtggtggtttttcagtcgctcagtcatgtcctactctttgtgatcccgtggaataagatagacggtaacaatctcataatagaaaatgcaggagacgcaggtttgatccctgggtaaggaagatccccctggagaaggaaatggcaacaacccacttcagtattcttcaggtgcctggagaatcccatggacagaggagccttggtggactatagtccacggggtcgcaaagagttggatatgactgagccagcacacacataagtagaaattaaaaatcaagttaagtctattaacctatctatttgacaaatattaactgcacaattctagctatattaggtactttcaaacatctctagacagtccatgggacccttgaaaagacaatagtcacgaaagctgtttaggaagcagagtgatgtgtaaaaagcatgagtgaatatagtgccgacagcgcatgtgaagcttgaggagataaagagggaagacttgtgtcaggtcg

SEQ ID NO: 42358 - DNA, 1855 bp, Bovine  19866880705630
  misc_feature (1)..(1): n is a, c, g, or t
ntttgactatatggaccttgttcggcaaagggatgtctctgctttaatacactgtctaggtttgtcatagcttttcctttgctctgagaactagcaaattcctcgagggtaaagaagatgaatatgaggttcccatgggtgggctcccctgctctctgggatgttaaccctcacatcctgtttgcctgttgctttctgatgccctcagtcatttgctctaagaatttctccagctgttgtacttgttcttggtgggagagcaggtctgacccaggctgttctcttgtgacacatgaaccctggtctctcttcggcttctctttcgtaccttgtttcccatatccagtatcttccagccacactggactaaatattttcatcaaatatatatcaagtttttttgttttttttttcccacctcagggactttatatcaactgccctacctgttcgtccccagatgtgtgctcagcttagtgatcttaaagctgagttcagcagttatctcctaagagggtccctctttttccaggggtggtccccgtcactctgttttattttcattgtagcacatgcagtcactatctgaactcattttattttcctgcttgctttctgtctccccactgttgtataagctctgttcccactggtatgggataaatgttaaatgtcaaagtgaagtgaagtcggtcagtcgtgtccaactctttgcgaccccatggactgtagcctatcaggctcctccatccatgggattttccaggcaagagtgctggagtggggtgccattgtcttctccaggggatcctcccaacccaggaatgaacccgggtctccctcattgcaggcagacgctttaccgtctgagccaccagccatcaatttgttaattgataacaaataataaatgttaattgaatgaatgaataaaataagcactgattctggcaggaattttctgttgtctccttcctctcatctttcaagcaccagagggtggggaccgctctgcagccatgggctccatgctggctcctgccatgtcactcatggctctttcctgacccctcatacctgggagagttatggtccctttggcaaataaacctcttgaattatcctaatttgagtgtgtcatctttcagcctactgactctgctttggtcaataaaaataattgaacccaggtctcccacattgcaggcacagcctttaccagctgagccactagggaagcccaagaatactggagtgggtagcctatcccttccctagtggatcttcccaacccaggaatcaaaccaggggctcttgcattgcaggtggactctttaccaactgagctatcagggaagccagtaaaaataaattagtatgtaaatttctacatttgattgtttttatattcaagttgtattcatagactatcactttgttcctaaattcattaaataaatgttgaactaaacaaaaaaaaaggaacagttttctttaatagtattttgataagaaatattctataaaataacatttttgtgtttataatgtaatgactaacattttgttcatcctgatggtgtgatcttaaattgctttcttcatagacaaagattctgctgtattcattatcatatgagtatcatatttttgttaaaattctttaaaaatatataatctgtgcttatgctttatcactcagaatatttaactaaaactaatggtacttacttgttttgggtcttgcctgaatggctttttaaatttttttttctatctttatttaacaggaatgggtttttaggaaaagcattacatgacgaagaatctacaataattcaccattatgcctttt

SEQ ID NO: 42359 - DNA, 757 bp, Bovine  19866880809637
  misc_feature (1)..(1): n is a, c, g, or t
nttatcatccgactgtggtgtgctggcccctgctagacactgagggaaacaggaatgaagctgatggtttccatcttccagaagcttatggtctgttacggtccaggatgcatttcatttgtatttctgagaggcacttaaccacatcctacatgggacatatgtagtataagctcatatacgtatatataatatataagtaaattgttgaagtacacttgtttttctcttcagattgtaggctaattcaaaacattttttatttcaaaaaattggaagtataaatttggccacctcaccttcagatgctttattcatcttaatttttatccattgttcctgccacatttttctttagttttctggttccccccaaacctttttatgaaaaaaagagtagtaagttgatgatcttgttctatagagtaatttatcttgattattttatgatactgtcactcataatgctgtgattgataaagtagaatcaatactccatcctgtagtattgattattctgacaagattagtatatatatcactaagtctgtctgttgctgtctgttttggaaaaatgatttcagatggaattttccttttttttttgtttatcttgctttttagactctaatactcacaaattgatgcattcttgatttgttttattttcagtctgaccttattattgcttatatttatgttctaccttatccaaaaggaatttgagatggctttcaaaaatatataccataatgta

SEQ ID NO: 42360 - DNA, 1745 bp, Bovine  19866880906367
  misc_feature (1)..(1): n is a, c, g, or t
naattcaaacaggatgggtaggttcaaattcaaaactgctcccagtgtatttatatatgtcttattcataaagtatcatccaaccactagatctaaagataaataacaggggcattcactagataaaagagaaataacacaccaaatcatccaacactggaagatccttgtgtccccacagccttattgatttattgaaaagtaactccctggtggtgtctaactgggcacaggactctgccaggatgagatcaagcagaagtggtttgaggaatgactcccagagaagatgcgaagatggtacctgcagcgcacaccctctggccactgcttcatctgcattgagcgttgtgctgacatcttttccaaagaatttggcgattttttctttcacggctggaattcgtgtagtgcctccaactatctcgacagcactcacatcctctactttgagctgagtttgttccatcaacaaataaaggggaacttctatcttctgcagtaagtcagcacagagctcttcaaattgtgcccttagcagttaagaggaaaacgttaagaaaactgatcttaaggccaatatcccgtcctactttttaaataattcttatcaacccaacaaacttttttcttctcagacaccctgaattccacatgggccaggtttagccataccataattaataacttttttccctaaaaatacacaaaatccagatgcaggagggagaaatgaaaagaaaatgagtaactacagaagaaatcacttttaagatttccatttttagtccttaatgttttatgtgatcccattttcattacaagacatttttggcccagaaataatactaaaaagacttcactatgagaacacttagcacagatcttcttaaaaaccctctttgcagaagcaattctagttctaatgatgctgacagtctttccggtagtacaatcttgaaatgtgggccaaggctcagaagacctcagttagaactgacacccggactagagtttcagcaagaagttccttctatttaatttgtcagaatttgagacacacctgttcatctttccagaaacgtctttgtcattcatgaagcactcgatgttcagtggtaggtctgtgctgttagagctcatcagctttttcaatttttcacactcctgatacagacgaaggagtgctcgaattttggattttgcatccaacttgtacttagttttaaattctgcacaaaaatgttccactaactttgcatcgaagttttttcctcctaagaaaggatcaaaagctgttcccagtacctaatttagttaaaacaacaaataatctggttattttcaatcatatttgtaaccaaaaatttaaatgttgctaactcaatcaaagactaataggctcaaaatttctatttaaactacaacatgaaacccaagtcaattaggatgtatgtcattataaaatccaaatgaaatgctacatctctatgatatttttaattctaatgattacatagaagataatcttagaaagtttttctttcctaagcaagaaaaattaagagcgtgctaagacaactgcattgtctttatggagatcaaccttaggaacaattctctgttaatagctttatcccaaactcttcattacccaagaagctcagtagcttaaagtaacaacaattgtcacacattactatctgggtcactagttccaatttagaccttaccttcaattttcc

SEQ ID NO: 42361 - DNA, 1022 bp, Bovine  19866880928500
  misc_feature (1)..(1): n is a, c, g, or t
ncaatactagcattttacttgggaaaagagatacaagaagatgcctgtaggtctctcacagattttcagtgtcactttgggccaaaatagatggacagtgtcaaacttctcaaagaaaaatgtacccaaaaaatgtattaaaaaaaaagattacaatacaaaggtagctttcggagatagtttcaacggtttccaagccaggttttaaactgaagtaatgttctgcaagtaacatttcactcagaggaaaggttaatactaaaagtaggtgataatcttcaagtacagattgtatcagaaaaggaaaaatactcaagtgtccacacacacacacgtcatttcatctctttaggccagtttagtcatgaataaaagaagagacttccccatcttcattattccaaattgaaaccgtcctcacattttcagttatgttccacttcacgttttcactgcattccactcaacactgctgagagcagagtgtttaagttggtacactaaatcttcaaaagcataaatacaattaattgcttacctatttttgcttctggatatggaactccttgaggatcagaatagaaagcttccagctcaaaaggcccacttcttaagaacgtgagaactttggagaaaggagcagcgtggtttctactgaacacttcatggacactaggagcaaagcaaaggtactcaggacttccagggttccagctcaccgtgctacaccaacagaacacaacctaaaagctgtatcaaccccatctcaccaggcataacccaaagtgagagaagtagtttggtaagtttgattgctaaaagacctcagttaatcaaacactctaccgtcaatgtcatacgttcatttttttaatatatattaaaaccaagtatctgaatattattttctcctacttacccttcagcatcttctgaatcgtggctccagaccagagatattgggaaaggaactgcatcagtgacagaaaattctctaactttaaatgctggggaaaggattg

SEQ ID NO: 42362 - DNA, 767 bp, Bovine  19866881080336
  misc_feature (1)..(1): n is a, c, g, or t
ngaattccctgtggttgccccctctcttcctcaccttctgcttccaacactggcccttcttgtctctttctgctctcatttctataatccttgtcccagtgtgggtgggaacaattgcttacatgttcttgttgcttggctcacagcctccagtctctcctctttgtagcttggtccacaaactctgggaagatttgtttatgctctgcttacaattttgaacaaatctcaatggcattttgccaggatcccagtggatcaaggcctctttgaacattgatgcttgtcatatgatctgcattccctcccagcttctttgaaggacaaagtgatcagcatcaccattgttttctggtttacatccaagttgatgttaagacattggttggctctctcaagagatggttcatccccaaatggcatccccatggaccccagaagagacttctcacataaatgacagaatcccagccatgcctcagtgctttagtacaatcaatttgattcaggtcaagcatacactgagtaaaaacagcctgccttctttccttagccgagttacgaattgggagcattgatgatccattctcttttttcctggaaggctgatatatagagagaaagaatctagcatcaataactacagacacattcagtgatctcttatctgactgttcttcctgtcttttgctgcctgaaaaagagcactggatgggtcccttgtgaatagctgtcattggcctcagtctccccatcacctttcataa

SEQ ID NO: 42363 - DNA, 1579 bp, Bovine  19866881194555
  misc_feature (1)..(1): n is a, c, g, or t
ntttctctgaggactgattttctcatctgtaaagtgcagacataccctctccaggcggctttgaggattaaatgatgtccatgaagagatcagcgctctgtaaccgacagcagctgtgttgttattcttttcctactattgttgagatggctcacagctctgaagtgactgctctaaggccatgcttggaaaggagagacccactggccctccgatgttattccctcttctccgagagtcactgctgttgatagtcaggggcctgggctctgatttccttgtatcatttacttgactgtgaaccactggcaaatcactttgcttcctggagcctcagtgtccctgttggaataatgggacaataacagcatccgttcctgacggtgctattaggagtgagcgagatgatccatctaagatcttaaccaaggtttgcctggcacaaagcaggctttcaaagctgttatttacttttcaacacctcccttctctctcctgctgtcctcggcccagccgtgggcagctgctgttgtgatattcagggttctaggggagctgtttcaggacccatttgtcctggacaatcttcactccatggaataatggcttctgaggaaggaagaccttgaatctgatttgtttgctcaagtccaagctctaattgctttgggaaaaggcccgtgttggctgaaatcatttcttgttttgttctttttaggcccctgtcgggcaaagcttaatctcagtcagacttcttgattaaccggggaagaagaatttgccaaggaaagaaaacagcaggctggtttcttcagaactcaaatgaggaaactgctatgtgatcagtacgctttctgggcagcttcacttccttctttttcttgtgtaagaaaatctaagttaaacgtatctgcgccaaggatggacaaatccagcttctctgggagcactgataggcaggggacctggtggcaccggaggctctggtagatgctgggggtccccggcgcaggtgtgccccggggaggcttgctctgctccaagggtggcctggaggaaaggaagcaggtgagtgcagattcctcaggcacctgggggctcactgctgccccctgcttccacgtaagccctgggtcgagcactgtgggccccatcatcaaagcatgttgtccacttgcaaagacatgtaaacactgattctttctacttgaccgcccatcaccaggtctttcctcctgttgatctctgaacacattgaaaagccatctacttccacttctcaaacaccttcctttcatgtccaggtctctaccaccgtcacctttgcccagttctgtgccaacccagctcagagctcccagaagctcccctttctgccttgcctggggccatgctctgcctttatttctctctctctctttaatttttaattggggtaaaatatgcttccctggtggttcagatagtaaaaaattctacctccaatgcaggagacctggatccgatccctggggtgggaagataccctgaagaagggaatggcaacccactccagtattcttgcctggagaatccatgg

SEQ ID NO: 42364 - DNA, 1541 bp, Bovine  19866881247265
  misc_feature (1)..(1): n is a, c, g, or t
ntatttttattgaatgaatgaataagtgaatgaaaggcagcgtcatgtcattatacataaagttctcagaatggtacctgacctctgaatacgtgctattgagtgtttgctcaataaatggacaaaaaattgctgagcatgctttgaatcactttttcttctattgtatctgttgaagtcttatgagagctaaactaagaacatatgggaaaataaaagcccagatttgcaaagagatttactcatgcaaagcagttcaaactcgtagttattgcactgattcttgacaactttagtcatggctgagccagaatggaaaattttacctccttcactgtgtgctgacctcactgggctctgactgtgttcatctctgagctcactgtctgcccaaataaacactccctttccacggcagagttcacaggcaagcctacccaggccagttggttcatcccgttacgttctttggagctttggttaaaacctctttaattgctggtggggcactcagtgatgtgggcaatgaggcaaatgtgggttaggatgtggcagccggaagcatctagcacaggagagaggctggaggaagggagatgactggagaagagcactgtgttgatgagaaccaagtgtgagaacagagggccaattcagttctacagacgctgattgaaggcttgcctgggttaggtgcttgggaggcaaagacgcctaagacctgttccctgcttccagggatctggaaccaagccaattctgagtattcaaagcctaaaatatttacatcccgaagtgggaatataatgctgtacatatgcagcttacgtaatgttgtaaaccagaattacctcaattaaaaagaaatatttattttttagaacataataaaatatttactgcctggccctttacagagaacacatgccagtctctgcttggggtccagactggggtctggagtgagtttccctcaccagggcacctccctctcctggaggcaactctctgccccccacctctcccacaatctctccagagctacccaccacccctcagccatggaaaagactccagaccactagagaataaaagctagcccccaaacccaaaccctcaaccccccaaacacttctctcaaattaaaaaaagtgacctgacttcatggccactttcgccttctttggtagtttggtccacgcattcattcacccagtcattcattcatcccataaacacggcttgagccccttggccctggtgctttctagggttgggggagagagtgagaagtagaccttcaccctccacagagtcaatagttacctccagtcttagactctgatctgaatggtcaaggcacagacttggcacttgggtagacctgggttaagaccctgattcggacccttgtgaactctgcctgcgtgaaagtaactaaatgagccagccctgagatagtgaaagagtggagtcactttaacccattctcatttctgtgcaagcccttgcacagggcggcaggagtgggaggtggggga

SEQ ID NO: 42365 - DNA, 1287 bp, Bovine  19866881388198
  misc_feature (1)..(1): n is a, c, g, or t
nacaagtccagtaagcagttagcagggggatctggagttttggagagaagacattgttaatgattgaaatctgaaagccattagctcaaggacagggataaaagccggaacagtggttaggaacatctaccaataagtgagaaggtaggaatttgaacccaagcctttagctcacttccacaaatgtgtgttgagcacctgctatgttccagggccagcggtttgctgacgattccaaggtgaataaatagaggagggccgtttcctccagtcatagagaaacgtagggatcggcacagctcattttctgccgccatgtccagacttgttgctgaagcccagttatttattttgcttgtagcaggtctctgatgcagcaacagcaataacaactccaaaagttgctttcccaattatcaggtcaatgagagcatgtctagggcagagctccatccagccccacatggaccaagttcagtactactgatcacccttcaacttttactctctacgaatggtttggctttgttgagaggcaaagtgttatgtgtcagggttgtatgcatttggttaagatgaacatagcagctctcccagcttcccaagtggctcagtggtaaagaatctgcctgcaattcaggacacctgggttcaatccctaggtcaggaacatcccctggagaaggaaatagcacccacttccagtattcttgcctgggaaatcctatggacagagaaagcctgggcaggttacagcccagggagtccatcaaaatgtgttgcagtaaaatatcaacaacttattacctgaaaagaagaattcaatgagatttttctttgtttttccatagttctctgattttccaattttttgtattttccaaatgagtatatattgttttgcacagaataatgatgtgggacacaataaaaatattttaaagagactttcctgatgtgttatctagaggcttcatttcatgcattttcaaacacctgcatttcttaatggataatttacgcactatcagaatgccagagaaagacatcaaaaagtgaacagaaaagaatagcattcattgtaataccaaacattgctaactagtggagagttagatcttttcatgtgttgtttccttttcattaaaaagtattaaccaggcaaacataatcaagtctagcaaagatatcttcagtcttttttatattgttggcttgtttacacagttgtgttcatacagtagagttttcattctgcttttcttgtttaagaccatttatatgtat

SEQ ID NO: 42366 - DNA, 851 bp, Bovine  19866881749085
  misc_feature (1)..(1): n is a, c, g, or t
nagctaagaggaagcatttagagtctgctttctccattagcgttcccaagagaaaacaatgctgtggcgcaggaaggtaggaagggatggccagacaattccagggaacaacagagcagtgcaaggcgcgtgggggtgggcaggacaggattctaggtaacggagaagaccctgctcagaagcaggagacaggaccacccatcctgatgcttggaatcctcccaccccagtcccagacacccactgcctcaaatctaaaacatattcacactcggaagcaaatgactaacgtggtttaatcacttccacttccaggatgacatttcagaaggcaggtaaaatccagatgaacctctctgtgggcactgagatcccaggtagcactgtacgaggctctggagagtgcagtgtcccccgaccccggacaccccttccccacccttcactctgctttattcttctccagagcgcttaccaccactgacaccgtctatagctatttgtttattgcttgtcttctatgttagtttaatgtaagcttcatgaaggcaagaatgtggttttatgcactatttgccccctacgacaggggcagcacacggaagaaagtcaataaatatttatcgaatgaaagtcttcccgaaccatcattcaagggctgtctccttacactgacattgccaaccccggagaacaaaggactttagtgcccccactgaattcatggtcactaagatcgatgcctaattcactttttacacacacacaccccccaagacaaatgcaaagcccaaatcattcacaaagttctaagaagggaggagagatttaacatcaaacaccatttacat

SEQ ID NO: 42367 - DNA, 1027 bp, Bovine  19866881922802
  misc_feature (1)..(1): n is a, c, g, or t
nctctcaactctatctcctcatttagattaccggtcgcaaggacctaactgccttctctgtctgctctggcttcccccagaatggttttcagcaaagaggccatcaggagacttctcgccagcaagtgtcgctgctacagcaacgatgctccagatgacatggtcctagggatgtgcttcagtgggttaggaatccccgtgactcacagccctctcttccatcaggtgagaaaaagggttttattcccacctcagagcgggagatggggattttcttctcacttgaagatcctacttttttctcttcacgtattcttctggaaacagtcttaagaactgtgtagacaggctccaggcagggacatctttaactagacctgtttgtccagagggttgatgctgtacctgtacagcatgaagacggaacacagaaacatgtgcaaaatgaaacggtgtttgacctgcatccttgcatgcgggaccaggtagaagctgttccttccccccaccgccttttgtattaaaaaaaaattgatggcgtttagaaactatcagatgctatttcgaaatatcaggactgacccaatattgtcctgcttaccaccgagtgtttgcagttctccactggcctcagtctttatagcattggctgcctttttattgggctttctcctctttgggtgctattaaactaattaaatttcagtgtagtatctcaataagcatatattctgggggttatagaagagatgaggttatgttcataaggggtggttggtgctaataaggtcaccatcctgcaatgtggggtaagaaggaaatcctattacagtatttttacattttatgtaaaattctacaaaataaccgtagctcacacccattgttgagaaactcaaagctttttgaaattagaaatatctaaatgcacatgtattttaagtgtcctcccttacattgaaaatatagtcgtcatgcttattcaataaccagtagccatacagagactgggcagacagaaatagcc

SEQ ID NO: 42368 - DNA, 1373 bp, Bovine  19866880450943
  misc_feature (1)..(1): n is a, c, g, or t
naaataaactgtgtaatatttatggtgggaatgaatggctttcctgtagcattcagctgccttagctgaatatgaaataagtcatctgtatctatgtttgtgtaactttaccatctgtagcaaagtatattatctagtgtcacattatgaaagtctcagtggaacaggcttttttcttcccaataagtatagaagaattactttaatctttttcttctatgagaaaagataaatgttatctgctgtatatacctgatgaaacacttatctattctcataattaatgaatccattttaagcacatgttatattatccatcttttgtggttcaaaaatggatgacagtgtgattatgtctttgtgagataagtaaatgtgtgtattcttagatcatctggcttttaaaataccagcaaagtaaaactgtggcaaattagttgtttttcttaatctgcacttcaaatatgtggttctgtctatgttattggatgaggatatattatatcatagttgataatttcagaaagatcaaattgcactgaagttgaatatatactgatgatctactattttttaatgtttacatattttgtgaaatgtgtaacataaaacatttctctgggcaaggttgatatagatatgagcaaaagatatagtttaactatttactcatttgggagtaagtgttgagaacagaagacacatggacctcctcggagtgtcactatgctggtggttctaatgagcagtgaattagaacaatcaacgtttctaacaacctgaccttccactctaagtgtagctgaaactctaccttttgtcagcacagccacaacctcagttctgaggaggcctgaggaacatttaaaatgtgtttaaaagagaaaaatttttattcttcaacttagaaaaaagttgttaccattttatgccttacctcacttagaagggtctaggaaacctggtttttttttttatatatttaagataataaagccttcaaaagcatttttctagcctgctatctccccagtccattcattgaagcattgtcctgtctaaaatcttgaaagctcttccctaaatccatggagaaacttggcttccgcatcatgttgccctgtgcttgaagttgaaaaaatactaacttctggaaagtatcataaaaatgttgcaaaatataatgagttgatagtataagaggtgaaagcatgtcaaactaaaaagtgtaccaagaacttgagatcaaggtttgaatagattaggattaaatacattttaaaaaaatacttttcccctttctctcacattacttagtgtgcaatctggagatttctagttacctagtcacacccaggatataatacttatat

SEQ ID NO: 42369 - DNA, 1684 bp, Bovine  19866880476947
  misc_feature (1)..(1): n is a, c, g, or t
naaatatttcttatacgattacaacaaagttcttttgcaacttaaaaagtgaggtgtccattttatcacagggagctgtacagtacttaggctcctttgttgccttttttctttattgctctgtgttatacatgtcagcttctaggatgattaattatccagcctattagagtcaggatggatttggacgtgtgagatgggatgagtgataagaagacaaacacatggagaggaaaaacaatttcctggcataatcaaattaaaaataacccacccgcaaagccagacaggtgtctctggggttctgactaatggcacttttctaataagacattagacatgaaatgacttcttatattaatggtgaaagattaatattcactaaaaataaacactaaatggtattgagtgctatatgtgtgtatgtaacatatacacaagaggttatataataggatgctctctctctctctctctctctccctctctctctctctatctctctctatatatatatctccaactatatgttggagttggtgatggataaggaagcctggcatgctgcagtccatggtgtcacaaagagtcagacatgactgagcaactgaactgactaatatgtgtgtgtgtgtgtgtgtgtgtgtatcatatatatatgatagaatgctatatgttatcatacatattactctcttagctactcttttttttatttttaaagtaattcccttttttatttcgagattttactaaaagaatatttatatagtattcctgacacaaacattttagcattttgacagccaggtagctttataaaatcatcagtcaactgactgagtttatcaatttaatctttccacaacaaaacaaccagctttgaaagtagacggcaggattgaatagcaattgtatcatggtgttgactcaggatgcatatccagcttttcctgactatccaaagtagatattttaagaaatactttgattatttatttatggctgtgccagatctttgatgctgcgtgggctcctctctcactgcggtgtgcaggcttctcactgtggtgtgtaggcttctcatcgctgtggcctgtctgtttgcagagcacaggctccgagcacttgggcttcagtagttgtggcacatggactcagtagtttgagttcccaggctctacagcacaggctcaatagttgtagcacacaggcttggttgccccatggcatgtggaatcttctcagatcaggggtcaaacccatgcctcctgcattggcaggtggattcttgcaggtggattctttaccactgagccaccagggaaaccctgtatgtgtgtgctcagttgctcagtcatgtccgattctttatgactccatggactgtagcccatcagactcctctgtccatgggatttcccaggcaagaatactgaagtgggttgccatttcctcctccagggatcttagctactcttgtcctgacctgataatatgctttaatcaccacaggaaaaaaaaaatcttgaagctcttttctaatatataaaataaatgtgaagatgcaactaaattggaaaataaatttgttttaatgtgcagtagaaccacagtgagtaaacataagcaaatcattgagtggggacatagataattaaagcccttagaaattaagaattca

SEQ ID NO: 42370 - DNA, 1068 bp, Bovine  19866880484101
  misc_feature (1)..(1): n is a, c, g, or t
nccgaagagtaattaagctgccaataattatagaagacttatgcaataaactgcccttgagctctatttattttgtcaagaaacttcttacaggattttatttttatctatggctggtactgcaagttaatcttttgtttcattctataataaagtcagggcaaaaaatgatatgctgagaaaagaacaatgactggtatctataatgtacatctagtttaaaaatgcaaatctacaattaaaaaaatctagaaatatcagtgtctgtttgttatatgaacactacaccatgaaaccaattcagatcaccttcagtggacactgctgctgctgctgctgctgctgctaagtcgcttcagtcgtgtccaactctgtgcgatcccctagacggcacccaccaggctcccccatccctgggattctccaggcaagaacactgcagtgggttgccatttccttctccaatgcatgaaagtgagaagtgaaagtgaagtcgctcagtcgtgtccgactcttagtgaccccatggactaggcttcaccatccatgggattttccaggcaagagttctggagtggggtgccattgccttcttcatcagtggacactggacaatgctaaccattcacagacttgtctacttgtgttagctacagttttaaaaggcctgttttatcccccttagagttattgggagctcttagtcaaatttaaatgtttattattattattacaaagctgtttaaaatacatatttaaaatagtaattctgaattgcaggtaggtttagaggtgagtgcctgtcagggaagaatataagaatgaaaattgagaggcatttgggaatgggaggtatatatagtttggaatagcataattgacataataattttacttgattaaattaaatttattttaaaatgtcaaatagcattctagttaggtattaaggcagatatgtttgatttttcaaagtgaacatgagttaaactccttattgccaaattcagacttaaatgaagaaagtagggaaaaccactagaccattcaggtatcagatcagatcag

SEQ ID NO: 42371 - DNA, 838 bp, Bovine  19866880486165
  misc_feature (1)..(1): n is a, c, g, or t
ntttccctttgccacaaaatattgatgaagtgctttattgaggtggagatctcattaattatttgatttacagaaaaagaaggcagagggaaatgagtgccctggctaataccatgatgtaccatcttgagacttaagatcttttttaatgtattcatcaggggtacatctgaaagaggaaagagtgagctgaatgggtccattaatttaattgaagcaagctcaaacaagagataaaacatcccagccggcttcttttcatacagcatgagtgctgtagtaaacaggcagagatccaaacacaccaaaaagaaataaaggtacgtggagactctagagacttcaaggccacataatatcaacagatgcagaggtgaatacacccggaagaggctctcttttcatataccaccatgtcagtgttccgcgggcactgtctaggctttattgtgaaactctgaacgactctgaggttacatgtaagtaatttagacttcctaaggcaaagttgaatttgttctttttttttttctcaaacttctgagaagtagactccgtcttctgctcttgatggaagcggggaaatggatttccactgatctcagaagcagctttaaatgatgttgctctctttcagctatatgttttggaaatgtagcagtcagaaaattcttttagtcctgaagaggttggggcctctcagcgcactcagcatttgtctttcagtggtcagcgtgattgtacacagcacgttaattcattccctggctcactcgagaacacaaaacagttgaggagagtctcccagtaacaaacacaaagcctgtctatcgtaaat

SEQ ID NO: 42372 - DNA, 1292 bp, Bovine  19866880500480
  misc_feature (1)..(1): n is a, c, g, or t
nttcacgtactgttgaagcctggcttggagaattttgaacattattttgctagcatgtgagatgagtgaaattgtgtggtagtttgaacattccttggcattgcctttctttgggattggaatgaaaactgaccttttccagtcctgtggccactgctgagttttccaaatttgctggcatattgagtgcagcactttcacagcatcatctttcaggatttggaatagctcaactggaattccatcacctcaactagcttaacatagtattagcatacctgcagtaaatttgagagaaatgaatagatttaagagacacttaggagacaaagccaagaggacttagagatggattagttttaaggagatgtttaaaaaagactcaggtttctgacttgagcagttatatttgagttctatctcctgagactgaaaacattggaaaggaaattaagtttcaggagaaacaccatgagttaggagctatcaagtgtgagttttagggcttctgagagtactagtagccctaaaataatggcttttgtgaagattaattaagcttagatttgcacaatgaattgggtaaggtaataatgaaagcaaatggaagactactataataatctatgtgccaaatagcaaacagaaagagtaaactaaataagtaaaaataatgaaaacaattattataaaccaaaatgtgaatgcatttagtagatgatttgcaaagaagagagaacagactatttagacaaagatcaattggaaattaattcttccttttcctttggaataggattatcttggagaaatgaaattctaaagtgctttattggataatagccaatttaaattttagcaaattaaatgtaaggaatattttaagcatagggtgtggtttgaaggttaagacagagaaaagttacaccaaggcagtaaagtgagttcctgttgcctctacttcctaggttatccccttgctcatctttcctgttctcttctcctaccccccttccctcattagttgcttccagaagactacttatggtttatagccaaatgcaagctcatgggaatagaaacaaacaaaatgtgtctacataatatttgctattatagaaattagcagtatgtttttaaactaaattgctttttgatttttaagaactttgtaggaaaggtattcctgtctgattaaaaaaacaaacaaacaaacaaacaaaaacacaacaccaagataaaggatctgaaaatgaagaggttatcctcatgggatcaatgttgtcaagcaa

SEQ ID NO: 42373 - DNA, 1325 bp, Bovine  19866880516391
  misc_feature (1)..(1): n is a, c, g, or t
naactacatatgtcatgttgctattgtctagactaaaaatcatgagaagagtgggtagatttggggtgttggataacccttaagttccaggtttagaacacttaggtagttctgtgcatatggtggttgaagctatgatgaaacaacacatctgaaagcttaacatgtaacagaatagataccaggatgggttatcaatttttctttcacctaaattttcactgttgagcttcattgtggtttgcaaaaagatattcctggcatcttgaaaaatgagtcaaaggaagtttaattgaagccctttggcttttgaaactgttccaccttggggataaactcattttttgcagtcatatcagaaatgagtttagcaagacatgaagcacaactgtcagtttcctggggccatgtagtcaacatatgttctaattaaaattttattttagtccatttaaattaagatcatatgtcatactgattgtctgtttcttcctatcttttgtccctcattctatggatctgaaggtcttatgtcacagggttggagtagaatgcatctgctgaagggaagggggagcacatttatcaagggattgcaaatgataaggggggctgagcagaagaactggggctctgtgtgccatttattgccagtttttgttgatttaagtattcatagcagaaggtataggctcagatcaacctccacacaggcatataagattaaattgaacttgtagcctttctaacagtaatgagctattatctcttaaatgcctgaagagtggtctagaattctgggagttgttaagacttgctttgtattgtcaatttaggggtctaagagccaaaagtcagaacagatttttccttggacttttactcataaattattcattgatccatagataatattcattgcttatttgaatatatatgaaggaaaaagcctcttttctggcgcttctggtttgcccttatgtatacaactggagacggatggaagcaagcataaatcccttcatgattgttacagttttgggttacttaacctctttcagcctcattgcctcacttgtatttaacagtgttttaacagtgtataccagccaactttaagggaaggagtgtcatataaatggattttccgagagtaaacaaaaagtttctagcttctagctgtcttgtagtcatgacaaagctcttttgcagttacctgggcaaggagtaagagatgagagagagagagaaaggaggggaaaagagagaaagctgaagaaatacctttcgtttttggaccctggagaaaaagtgttcaatgctca

SEQ ID NO: 42374 - DNA, 1164 bp, Bovine  19866880821758
  misc_feature (1)..(1): n is a, c, g, or t
nagttttagaacaatgcctgataggtttttggaacagtactagcctgttactcaaattctcaatgctgcccttttttgaataaaatccttaattttgatgtgttaaatcactcattcttattttatggaatgtcttttaagttctaattccctatagttttacttttcatttttaagtttttaaattttcctgaagcatgccttttaatatggtcaacaaatttatttttcttgcacagtgagtttgctgtccctaaatcatcatattcactgctttaaattaatgttttaatagcataacaaaatataaaaatagacaattcataaatgtttaaaagcaaaagtgaagctaacatgtgaggatgattatagcaattaaaaaggggatgtagtttctaaacttctcagttattagttggataattattttcctaaggagcaaatgctaatctcttttctactttatatcattccacaaaagataatcacatcttagttttaaatgatgaaaattgatttaaaaaatgagttattttaatgacaaaagtgataaaatataaatgacaaaatgtaaggtcaagggcaaatttgaattgcatcatatatattgcatataagagatcaatttaggattttatttactgagataattactttggttcttcattttagtgtttttacatggatccagacttcacagaagaaagtttaatacatctatttgggtaaactttctaatgccttaaactccttaactgaaacttaacattttacatgtagctcaattccccagacacattttagccttgctaatggagttatttacccacatagaccaagctcaaagttggaaagtttataagaatcagaaacttaaataatacaatctcactacctatattattggcaggaaactggagtatttctatatataatcagattttttaaaaaagattttattgaaatacacagtaatgaggaaaaggtatttcacttcaattatatgaataattggctcaatttgcctcctcactgtgctagtttagacttgtactaacacaagagaataaatttatgatattagaattttgagagagagaaaaaaaaaaaacaggatttaagagatttaaagagtgtcattaattgaaatactgcaatccccaa

SEQ ID NO: 42375 - DNA, 1656 bp, Bovine  19866880881730
  misc_feature (1)..(1): n is a, c, g, or t
nttaggtccatacccattttctgtcctttatcgagcccatctttgcatgaaatgttcccttggtatctctaattttcttgaagagatctctaagtgtttcccattctattgttttcctctatttctttgcattgatcactgaggaaggctttcttatctctccttgctattctttggaactctgcattcaaatgggaatatctttctttttctcctttgcttttcgcttctcttcttttcacagctatttgtaaggcctccttagacagccattttgcttgtttgcattttttttccatggcatggtcttgatccctgtctcctgtacaatgtcacgaatttctgtccatagttcatcaggcactctatcagatctagtcccttaaatctatttctcattccactgtatagtcataagggatttgatttagttcatatctgaatggtctagtggtgttccccactttcttcaatttaagtctaaatttgttaataaggagttcatgatctgagccacagtcagctcccggtcttgtttttgctgattgtatacaatagcatatgtaacacaaaaggatttgaataaggaaaaataagttaatatgattggagaactgtgtacttacttgttttggaatggcaaaatagttaacgaggcattgtgggagggaaatttagaaacattggcaaagtcagaccatgaaagtcatttcaggtcttcctaggaagttcggattttatagtgtaggagactttgtgtcattaaaggattttaagatggaaatgatatgatcacattaggcacgctcttagagcactatggagatgatttagaagttaaaacgactatgttaagtgcaggcaagaaactgcaagtccctcacataaagtagtggaggggagtagcatggaggaaatagattagagaaataactaagtaatcacatcccctgagcttggtaaaacctacatgcaatatgtgaataaactgaaaatacaatttagtcaacagaaagtactctgctcgtgtaaactaatttgatttgaattgtatctaaaagttgaaattgattctctaatcagtaggatcaaaattatttgttctgaccctaagaaactcttcagatccacagctgatcatctctaaagtgtctctaaattatatgaaagtagtcatgcttggatgtctctgatattaaaaaaaagaaaaagtctacatagctaagtttgtacttagccgagataatttcctccacctacactttcagaactgcagcccaaatgtgaattgtgaacatatttgctttcaccaaattcagtcaacctcatttacagtagcatcatctgcagacaatgtttaattgctgcttcttttcaatacaactgaaactacccagtataacttttttgaaaaaagtcaaaagcaaggcacaggattcttaagtgcagcttttgtagtaacattttgaacaatttctaaaagttgaaaaatgccgattggttgcctagagggttatgctaaggaaaacaaggcagaaatccaagctgtagaattcatgaaaacctttgtcatggcaaacaatagtgaaacccaacattgcctggaaggggaaatttgagtctgcaatctgttagactttatgcgctgataagcga

SEQ ID NO: 42376 - DNA, 1159 bp, Bovine  19866880907112
  misc_feature (1)..(1): n is a, c, g, or t
natcagccaaatgggtagcatgtatcccaggcattcaagtcacagataataaaggtggagatgactcaaaggaaactgtgtaaccaaatggattgttggatctgaacactatttggtgtgtgtttttcagaaagtcaccattactttcactgagattcctcttctggatttttgggcttacccaatggatttacttccttcagggctcacataatcacttccatctgatgttcaggttgggtcttccagaacagagatagcagagtcttcatcttatcaaaagataggatagcagtgaacactaggatagcatcaagcactaggttgacaaagcttttatgatccatcgctgatgcctactgtaagtgttggactgtgttatgagacacaagtgtctggtgtcccaacattaaaaggggttttctttccatttggaagtattatctccagtctataaaaagcaaaattttagttttttttaggagaagtataaatgacagaaacactttaaacctcattactcttactcatttaaacctcattactcattactcttgcagggtagagctgtttatctgatcttccgtaagggcctaggggtggttttcagtggctgaaaatttctgcaaatctagaaacaacctgggaataaaccctttgggtggaaactaaagcacagacagggagagcctgggctccaaactttttcccccctgtttcaagcttacctgttgctggaagtataagaagaaacattgaatctatctctataggtctctagttttttaagattttaccagttgtgtgtagttctcttttgatatagtataaccttttatcaggaaaaatacttagaggaaaaacctttaaatttaacataaaatctaattcttttgctcctattgaagcttggaagactggatctttattagagtgcatttctacaaagagataaacattttaaaaaataagcatgaatggaatccaggataaaatgcatccatttgtgcaagaaaatagcttttactgaagaaaatggcacaaattcatcatatggagaaaaatgtcatttcaaagcctatttctgagatcaaaatgtagaactttttcatataatatattagctttttagctactctaactctacaactttttcaag

SEQ ID NO: 42377 - DNA, 1888 bp, Bovine  19866880999934
  misc_feature (1)..(1): n is a, c, g, or t
nttgtgtgttccggattatctaacccctttcttctggcaaccgtctattttagttgcttcagtgaatattcttgtacacatgcttttgtaaaagtccatgctcttacacattgtaatatatgctccaaaagtggaggaatcatcttttacgaataagtattgtatgtttagcaaaaagtaaaatatgactgagcttaaaaaataaaggtgacatatggagcaaggctgatgtttggaagattattagtaaggagctaagcatctcattaaacgctacagaaaataccgatcctgtttcagtgatgagtttccccaggccacatctatattgatctttgtggaatttataagtagtctgtgaggtctggattggtatgtctatcatctttttctacctatttaactgctatcttcctatagagattgctttctatatacttcttttttatataacagttattgttattagcctaaatttataatgctcccaattgaactctaaatattctcccttgtataaaggatagattataaaactgacaccaatgattgcattttggatttctatctccactccttttttttttaaagtttgcaactgttgtgttagtttctgccatagagcaaattaataggttatatatatatatatccactctttttagattgttttcccatatagatcattacagagtattgagatccctgtgttatacagtaggttcttattagttctaattagtcatctattttatgtgtgtatttcaatcctaacctcccaacttatccccctcccttttccccttggtaggtgtaactgttttctgtatctgtaattcgatttctgttttgtaaataagttcatttatagccacattccctcagagcttcaaaaatgactaagaagtcaatttttagataaataaaaaagacattattgcccatttggttggtcagagcagaaatggaaagaaatttatatttaattttaaaggtgattcacttaaaaataaagcagttcaatgtattttttgtctttcctttcagctaaatgtttaatagactggtgaaaaaaagtgtggtaatttaggagctgcaagaggacaaaccctttaaccttctgtagatgctacttaaaatggtttctttgttaatttttacaatttaatataaattcaaaaagatataattgccttagttatttatctttaagttacaaatataaaagcactgtggataactgtaagtccagcctcctgaaacatgtactaataatgtccaagtaaggattaaaatgaggataaatggcttttaaacatataagtctgtattaaacaagttctctccttttatgaaaatgcatcaaattttaggcagctagactggaagagttgattatattagaaatatattatgtctcctgaattttaaatgaaaagaaaaactttttttttttttttttggttctctagtgcataatacactaatgtataaatgacaagctttgttgagagaaaatctggttttataagtaggcactttaataaagtgatcatgaatgggaatataatagcttaaatggaataacacacttatttacaaataaatatttcttcaaactaagggtaggtaaaatgacatgtttcctttcttaggtttatggttaaaattatccaaaatgtcagcaatcaactcagaaaatgcctcaactgaacaaattgaaataagatagttgggttaatggatatgtgattaaaactttaagaagacgctccattccatctagcaactacacagagttctcaagggtagccacaaatttacaggctgaaatagtttccctataatcaatttatcagaatgaacagtaggggacgatatttcacca

SEQ ID NO: 42378 - DNA, 617 bp, Bovine  19866881015775
  misc_feature (1)..(1): n is a, c, g, or t
ntattgggtacttactctgtgcctgatattgttttcgttttaagtgttacacacagtactaattcatttaattttcagaactgtcatatgaacaagtgctactattacctcattttacagctgaggaaactgaagcttagagacagtgtttaatgtcacacaactagtaaatggctaggttgtgaaacagacaagttgactccagaacatacacacttgaaaaacatctaaggacaaaacctaatagcatgccaagggagcagattattttcccaaaaaatgtaatccatagtttgatcataccatttatgcacaggattttcatgatcagtaaatatacccataatgaatatatcattttgaatagcctttcccaaatttactacttgagcttcagtgaccatttgctgacctggaacctaggtgtcaaaaattcttagtgctctttaaccatgcgtatttatagatttccagataagtagaggagttttattttctgctttgatggatttgtggacttatttattgtaaagtactcactagagagagacatttaattgtaaaacacccctagtatcgattcattaaaatgagggtgtcatcattaaacaatcttc

SEQ ID NO: 42379 - DNA, 964 bp, Bovine  19866881017175
  misc_feature (1)..(1): n is a, c, g, or t
ntgtgaaagtaagaacagaaccttggtctccaaagagaatcttttggcccagaagcaaaaaagattacagcaatgacatctaataattctaaacatggaatgcctttaaagattgcaaaggttagattttgccttttttttttaattctaggtttttcatttttaaataataatttaataacacagttcgttggcccaggaatgacaagactttagtcgtcattagacaaagtctagctgcatataaacactatctattctcctccatgtttttttatttgtatgcagtgttggcagccatggactatgataaagtgcatttttctgcttgggtggttagccctttcatttttacaagtgacaaaataaaaatgtgctgaagagtgaacatgctgctttcactgtgtcatctcagccctgcaggtcattttattataaaaatgtaaaaatccagtcaattttatttaatcagctgaaaaggaaaagtgtttccaggtcattaatcaagtgctccttctctgtgggacttgtctcttcagaaactgccatatgaatcattaataaagctggaaagatttttttttttttaccagcatgtttttgagaaacctagatgttattaatataacagaagtaaagtaattttaggtcaacaaataaacccttcgttgccattgcctctagatctgtacctatgttattaaaatcagctaattctttactttctaaacatttaattgttggaaatgttggaaatgatcagctgttagattgtatatgattatatattccataattacatgttttcctgaatgttacctaaccttatatttacagtaaacttttattagtgtgaattgatcaaaacataatgagacagtaagaagagataattactactgtatctgtaataataataatgatagtaattaaacacagcaaactgcattcacataatgtcaag

SEQ ID NO: 42380 - DNA, 2528 bp, Bovine  19866881083825
  misc_feature (1)..(1): n is a, c, g, or t
nacagaaaaatacaaaatatatacatatactcagagtagccagtgttgtcctcatgaatctaagagaatagttggcatgtaccatcaggcgcatgtatctggaaatcaccagggcagcaaaagtaattgccatccatagagaaaggaaaagcaaatcaaaaacaccagggatggtatggggaaggaggagggaggcagcttcaggatggggaacacgtgtacacctgtggcggattcatgttgatgtacggcaaaccaatacaataatgtaaagtaattaacctccaattaaaataaataaatttatattaaaaaaaaacaccaacatttgtccaccgtcaatgctagatctctcaggtaagcatatttagaccgtctttgcttattgcgatagttaatgagaaatcttcagttgccgtttttcctttgggtaattgtgtgtggtgtcttgtcctgctttttcttctcattgtcccattgtttaggttcgtgttacaaacataaaagttgttgaaggcatatcacctactacattccttctttatttttcccttcatcgtagccccttccaacatgtgtggcctttacacattacttttttccctaaaactatttttgattgtcatgtagatgtatagcatgaatatcagcacatgttccccaaagatggattttccacaaattagaatattctatttcgctctaaatatggaaactaaaaatatattacccactgtgaaatgaattactcatacattgtgtgtcacattttaaactaacaactctataaccttaaaatatagctcaatctttaagtattaattttgaaatgatgcatttgtgctaatgatttaccgggaggaaaaatcctttaatctaactcttttgcttatgaacttgaaagttgaactccatagaaatgactgactgcaacagcagggcttttcaccagctgatcaaaattaacagtttctttcaattgttctaattaagaccaaggggagttctggaatgtaccaacagtatctcaaattgctccctgcttaaaactagttctaggggagaaatgtcagcttttacctttccctacaaatagtttagtctaagttgctaatattactatctactaaaaggccttatgtatatatcccatgagaatttttttcagttttgttttattagaaaggataacaattaaagatgagaaatataatcatctagagtagaaatgtatcagaagtgagatggtatatcaatgatctgtaaaactgatgaaaactctataaatatggttaatgttttacagagtagtcattttatcttaagaactttttcacattatactagaaacatatttagagaaatcagataattgaatcaataatcattgtaaaaatacaaaaattcaatgtatttaaaccttaggaaatataagattattgctttcaagtgtacatttttcctgctagctgaacatctctcaaggaacattttctgcccctcaaaatcaattcatttctgctaagttgtagtcttttgtcattcatcatctaaagttctgatctaggttattaatgaaacgtgttttcttgcagtaatttctttcaaacttattcattttcttcaagattcgtttttcttactatttatataaaacatctactttaaaagttatataaatggtgaagagacataaaagcaaacaccaatattgtcattatagaagcaaaaacagagtaaagtttaaaatcttgacctacatgtaactcaatagtaagttatttaaatggaacttttaggtgataattaaatgaagactggaaggtcaactattgaacaagtatcttgtatactatgataacaatttcagaatcctagaagtcaatcaaacacccgtttgcttataaagtatgattgtgttatgagtgatgaaaatacattgccttgcttcatcataattttaagccatctcttctttgaattggcaattctcagtttaaaggcctttgagaggtcatactctttaaccccatacacaatccctaaataagtaattgactctttcaactctcaccactgtgttaagatataagcaatctcttgttgtaattagcattctttcctaggagaaggatgatgtttgggtggctaaatgggctagcagtctttagagaagcattctcttccctagggctgaacacagactatttaaaactgctgtgaaagagtcaacaggattaacatggagtcaacttccttgggaaatggagccaaagagattctaaggagacaaaatacttcaaggcaatcacagtagtagtgaaaatgtccaggcttactggccctgtcacatctaatttaactgatgacatgaacattaagcagggccacaaagactttttttatgagtctaaattctgttttcttttttttaacctcctgtaaacttaggatatttccattttttttaaacagaaatcgaaaaaaatgtatcataaaaccttggaaaataccttctatttatttaa

SEQ ID NO: 42381 - DNA, 1936 bp, Bovine  19866881240789
  misc_feature (1)..(1): n is a, c, g, or t
naccccctggagtaggaaatggcaatccagtccagtattcttgcctggaaaatttcatggacagagaagcctggcaggctacagtcccatggggtcacgaaagagtcaggcatgactgagcgactgagcacaagcataacatctaccccagaggctgcattgggtccattggattctctctcagagaacactacaattggtacaatcagatcaatcaaattcagttactagacttgtaaaatgaatgatctcaaatatagaggtcactttgaggggtaagtcaagatgagtctgtctctgcaaataagcagagtatattctctaaagacaaagcagaaaacatgcagggagagagaaggtgtatacacacacagccccagagaaaaacagatggagagggtgattgcctttattatagatgacttctcaggtcctgtttccaattccacataaggcatggctacagtttctgttcttggctttcgacagatggccattcttatttgcttagattagttgtagtggatttcagtttcttgcaaccaaacaattgctggaaaagacagccacctagggataaacttcagtcatagaggatggttagcatagtgcagaggctgagtttggagttcaccccagagagtgcatatccataaagagtgaggtcagaaggaggacttggaaacaatggatttgtgtgtgggtgaggtagaagtgaactgggaaaatcaaaagggaagattcactctcatggaaagaaaatttgggaaaagaaaggtgcaggttatgcaagtaacgagagcaatgacaaattttacctacttcagttttaacatatgctatccctgagcctatgaaacacatttccttttgaattcaaaaaatgtggaccattcatttctgccaaaagtataaaatattttttcaaagccatcaaaaggtgcaagatttctatccactaattctatccactaattctatcaggttctctaactaaatagaccattgagaaggctgtgtttatttatttagttgtttctcaaacactatcaaaaatacttttatagtttgatatttcagggattccctggtggctcagacagtaaagagtctgcctgcaatgtgggagaaccaggttccatccctgagtaaggaagatgccctcgagaaggaaatggcaacctactccaatattcttgcctggaaaatcccatgatggaggagtctggcaggctacagtcagatatgaagaactttgaagtacaatctgaagtataaacaagcttattcagaagccactgaagtcctgtgtgtgactgaaccatgctgcaaccacattagatctcatgaagctctcagtaagcaatgtaagatgagactggattacttgccattctttttaactcaagctgttgtggttgttcagttgctcagttgtgtccaactctttgtggccccatggactgcaggacaccaggctttcatgtcctttgctatttcctggagcttgttcaaactcacgtctagtgagtcagtgatgtcatccaaccaacttgtcctctgtcgtccccttctcctcctgccttcaatctttcccagcagcagggtcttttccagtgagttggctcttcgcatcaggtggccaaagtattggaaagtcagcttcagtatcagtccttccaatgaatattcagggttgatttcctttaggattgactggtttgatctccttgctgtccaagggactctcaagagtcctcttcagcactacagtttgaaggcatcaattcttcggcactcagccttttttattgtctagctctcacatcagtacataactactggaaaaacattgctttgactgtgtggaccttggtcagcaaagtaatgcctcagctttttaatacgctatactaggtttgacataggttttctt

SEQ ID NO: 42382 - DNA, 911 bp, Bovine  19866881253684
  misc_feature (1)..(1): n is a, c, g, or t
naaatgaaattactaagaagtcagtaaaaatgagggctttaccttctctatcaccctttctatgtataatacatttgttaatacatctttaaaagtttagaagctctaagtgcatcacttgattcccttaggttcctgtatttaggaaatataaagggtagaaatcatccagagaaagttaccatataatagattaagaatcatagttaagtccttgggtaataaccttataattcctgaaatattaatgctaaatttaaactaatattttatatgatgataatacttaatatagtgactttatcctactttgttggaaaccttttagtcattttacagtttcatgtgtgtggtttgtttggaggagatgctcactctagtgtgctccatcccaagagaaaaaggaaatgtgaacacagggactcgacttgtcagattgtcacttgtctaaaaacgcctttagaaaagaagataaagccaactctaagcaatgtaaacaagtggaaatataatagctttgaccttctatgttcctcttttcatcaattgttttaattcttagaaatttagatttttttttagaatacaaggaaaacagcctctcccaagaatttaacatcttaaagatgcccatatttgcttttattcaaagtgttggacagacttcccagactttaagaattgccacatggcaaaaaaaaatttcaaacagagactatagtttagaatgaaaaccagactatttgatcttcctttcctttttaccactcatcctctttctttcatttgttgtttgaaagcccaatgtaatccttttttatagtagattcttggtttacagaggactttcagatgctattaagagtcagaggttaaaaagaagtcttaaatcattagacacacaaggctag

SEQ ID NO: 42383 - DNA, 1738 bp, Bovine  19866881367515
  misc_feature (1)..(1): n is a, c, g, or t
naattctaaaaattctgctatttaattggcctacatctgtgatctcaaagaaaatcttaacaagggtgttacctttgaacaggcaactgagtgtgggatattaatcagacatatagaaactatctcttggtgtcatctagtggttgtatttcatcactgcataaaagaaatggcttactgatttttctgagtaaagattgttttattacatttatttctgactgactggagtgaaagaagctgccatttttaagagacaagagaaggttagtagcaatcaagcctttctgggctcttcaccctggccctttgctatgccttcttataaggtcaagacacatcgatgggaagctcagttatcgtacactggtgtgaaggtgctgtctgctgccccatttaggctgcatgactgagtgactgggtgttgttaagggacatccacagccaatacacaaggtattttctctttgctggctgagcagcactcgagggattctgacagcctgagctgacatgctaacaatctgattgcagatggcaatggtaggaggctttgagtgagagagaagagtcccctgaccctcctgtcatctactctctcaatctccatcctaggatcggagcgctgcacaactatcacagggagaggtgacatagtgaaaataacttatccacaaatgtgctgaaatgtcatctctaatgttatagttcctttaagacgaactataatttctaatataacttttcagttttgaaaggaaagggcaccaaggctgagttgacagaaataaattatccagataattaaggctaactactccactttctcctactccctggcccacgcacagacaataatagagctcaattatttataattcaggaatattttttcttttaaaaaaaggattttctataaagctggtgtttgaatggctcaaaattataatcattaagggaagcaaattattaacaaattataatcagaaaatttacaaattttaaattattataattctgttaccttaacaaagataaggcatgataaaaaaatgaaaaaaaaaagattatgacacttcattctcaattttccacaattacctgatgtttttaggcaaatctgtgagtttttaaaaatgatcttaatggatttaacaatatcaaccaagatatttctccacatatttactttatattacaaggtgaacattttttgttgttgaactatttttcaatgatgtttgctttttcttgtatatatctctaatgtttatatgtcttactgctaagtcacttcagtcgtatctgactctgtgcgaccccatagacggcagcccaccaggctcccccgcccctgggattctccaggcaagaacactggagtgggttgccatttccttctccaatgcatgaaagtgaaaagtgaaagtgaagtcgctcagtcatgtccaactcttcgctaccccatggactgcagcccaccaggctcctccgtccatgggattttccaggcaagagtactggagtggggtgccattgccttatatgtcttatacaagcgtaaattgggaaaataattaataagaacataggactttcctggtggtccagtggttaagaatccacctgccaatgcaagggacacaagtttgatccctggtccgggaagatcccacatgctgtgagcaactcagcctgggcaccacaaccactgaagcctgtgtgcctagagcctgtc

SEQ ID NO: 42384 - DNA, 1220 bp, Bovine  19866881428311
  misc_feature (1)..(1): n is a, c, g, or t
ntttgcacaaatggagtttgagctgtcattgagatgcccaaaaagaagatgtagggtaggcatctaaatatgtaagtctggaaattggagaacaggtcatattaaaaaatataaatgtcatatatcaacattctatagatagtaatcaatttttatagcatagctaagattgcctggggagagactgtggggtgagacatgaagcttgtaaggagttccaaggatctctgatacttaatttttaggtagtgttcaaaacagactgaaaagcagatgccagcaagacagagaaaaccagaaaaggtataaacacagcagccgaaggaagagaatgcctctagaaagattaatgtccagttctgctgaagagacacagtaacagctaaaggctccaccactgaatacttcctttgtaaacttgggaagttacttaaaattgccccctccatatgatctagatagaattacagacatcacaggaatattgtcaggattaaatgagatagtgtttgcctagggcttagcaaaaacagtctcaatttatagaaacttcagcaaggaagaggaggacccttgttaggtttataatgtccctgtaacctgctttgcactcactgtagccatgcgaaattgaatttctgtttcctagcttaaaaggagggtggcaaatccagacagtataaagtaatccctaaagcaattccagtagctaaaaattcagagagccatagttgttacagaacctaattacagctaaaccacatttattcaccaccatcaggaaatgatggaatctacatcagggcatttttcaggtgctgtacagtatcatgttactcaagttattgtgtctgctttttaaagtgtttctcctcaccttctctctgttgtagtccatggtgacttcaagttgtggttaggatgcccgtgagtaacagtcattcctttctgtcccacacaatcactgatttattgcctttaattatgaggctaccatcttttctttttaccatggtatgactttagtttggggtaatgtgtaggttctttatgtaaatatctaatgcaggtatgtattaaattatcacactagacaaatttactggtggtcatctctagttggtatgaagaatcttcacttctgccttcaaaagaacaacttactctagtttatctctgtaccttttgtgtccatatgaatcatccaaggagctttataa

SEQ ID NO: 42385 - DNA, 1170 bp, Bovine  19866881431267
  misc_feature (1)..(1): n is a, c, g, or t
ntatattttttggaagcttttaatctgtggtttcttctttaaaggaaattaatctccatttatatttgtggaaatcctaattctaaaagttacctcctgtgttcataaaggtctaacattaggatataaattggcttttccacattattgtctcagagctggccatgagcatgctctgtcactctgctgctcccagctgtaattaaataatagtgaaaggcaagtccccataatcctgaatttccctgaagtaatcaaattctgtatttttatcacataatgaacaaccttttccatgtattcagtttttctctgggaaatgttttgctctgccgaaacatttgctctgccaaactgtcgaagcacagattacaggaacactgagaaaccacttctcttacgtccaaaagcagttcctgatggctgaatgggttctgtgaacaaatgacttgtgatcaaatatgtacgtttaccaacactttttttaaccccttgaatattccctatgcatcgtaaactgagtttcttttcagtaaaatgatccagaaaccgatccaagttaatggcagacctcacatggactttgtgctggtgtgcaacctgcatcagaggccaccttgaagctgtccagctagtccttgctgctcctccctgactcaagaaagatgtgttcttggtcttttctgccaaattccttgtgaaggtgtaactggttctgggatccaggcttaggcatccttctaactgccactgcagagtggagagaagaccaatctggtttttgaaaacaagaaatgtggcttccttatactaagtaatatagcataagcaacatgagatgttgcacagacaatttcaaggagtaaattttagttttatggattattctttggaaattttaattctcctactggaattttagaaactagtattctttatagggggcgttgtgacagacactagaaaagcaaaaatacaaatttttgagttaggagagacttacctttgagatttattttcaaaaatatcttcttctgatggatctttcaaattttatgaaatacagtgcatgcacctgagtcagtatggacactccaggtcagcaaacatgacacaagcaatgttacagagatcctacatatcagaggagaaagattatgctctatcaat

SEQ ID NO: 42386 - DNA, 1541 bp, Bovine  19866881538703
  misc_feature (1)..(1): n is a, c, g, or t
nttccagcatgtcatacacacaattgaattcttaacagctgccattcaaaagaactgtggaggaccatttgaaagtaatattttgctctgtgtgacatctcatttttttcccctcagaaatcataatttttttacacacctcatagtcttcctaacaggaaaccagctctgcctgtcattttgattggggaggaaccttgttttccaggtcacttgcttgaatcctggagacaagatattcatgagggacctggatggggcatttacatctcagagcagagttttcctctccatttgccagcatgccaggtcagtgagccgctctgtcggagggaagataatggctgctgtagtgccccctgcttattacacactgagtgctctgaccttcttgggagaaccccccaagcattgtgactcagggcattcccctactctgtaagaccctgtcaccaggatccttccatctgaaacacaatgttagtgacaactttggaaggggctacttccaaatgccatatttcaaacttcttccctctgctgacaacgtcttgactatgcagaacaaaataaaaaattgttcattttttaaaatgtaaatttgacttaaaaaacaccacaaatcaatgaatttgattcattgaatataaataaactaaaataagatcataagtacaattgaaaaaaaacttatattttcaatctgtatttacaaattgaactagtccttcttaaaacaaataaaactttatagatataaaaatagcaaaacaattattgaaaaaaattaaattcattatatatttttagtagatagcagtaccattttaggacctggaaaaattggaagtgacttctcttcctatcttataccttaatttgattctttcctttctaacaaaatggattttttgagacgtgaaatacaagtgagggttaactatgtcttcattttctatcccagacgttcagatgttacctgaaatactctctacctgaattttattttatttctctagacaacgaagcagtctagcacccctctgccatttggattggtagctagtaaagaatttacctggtaagtggaaacaaagctggatgactgcctcaatacggggagaggagtaccactgtctttggctcagaggtggtttccaatcacagctttcttacttcatttatgataggcacaattgtgacaataataagcaagcataatttctgggcaagaggaacacagaagaaatttttgaacatccaatacctccttctccttatttttcagttacaaagtatattgataaaaagagtacacatgttccaatacaacttgtaaaaatcacagagatagaatatttttttctctaaaaggggaaatacactgatgctggagaagcccccacaaagacttcccctaattaatgtcttttgtagatttcttaatttaacattttaaaactgaatcttcatgatgtgcaagaatgttcagacagctatataaggataacaaccaaaaagtactgagtcattacaatatt

SEQ ID NO: 42387 - DNA, 766 bp, Bovine  19866881709870
  misc_feature (1)..(1): n is a, c, g, or t
naatggatgaatggcttttttcccctccctttgtctggtcatcattgttactgtggatttctttaacaaaagatagcaaaataaacagaaatgtctccgatgaactgtgagcctgcagttaagtggcatatctatgggagtgtgctctgggatgtatttagtatagctatgatttttttttaacagtacattattgaatttttagcaaagtcacactagaaaaaagaaattactacttcagaatgaacaaagatctagaaaagcaccacatgtagctttttttcttacaaaaagctggattacttatttcattagacatcttaaataaaatttgtgatgattttggttaaattctgttgattatagacaaattcatattgaaattatatatactcatttgagtgattttttaatcacagtcactattaattttcagccttttttagtgtggaaacaatattttaaaataattgttagtatgtaatatttgctagtaactctcagtactcattagtgatatttgaaacatttcaaatgccaacatcctaaaactgtagaggtaattttattaattataagctgtaatttattacccatactgtttttgctagataactcttgtggataaatgattaaccatttaaaatgaagttttttgcttccatgtttataaagaacttaattattctataaggtgttccctattttggtctattttccatttagtaggatatctggattaaattatagattctgcatgtagtag

SEQ ID NO: 42388 - DNA, 853 bp, Bovine  19866880356150
  misc_feature (1)..(1): n is a, c, g, or t
ncccagctctgccagctcaatgacagactcatcaaggagggaaaattgaaactctagggcgcccccactgcctcttctctagaggtcagacgggggtgggggtccctggttgtgatgtcacaggctgccatgtttaggaaacacagtgtaccctgctcccagcatcaccaggcacttgcccacacgtctgtcccagcacggccctgggccgcttttaccctggggagcatataaagaagtttgctgaggagggcgtcctgctccctggcgtgtcctgcacctgcagtttatgacgtcctcaccctgaggtgggggcccagagcgggaaggcctgtgacaggtgtgcttctcctggacgacccagggcaagaggtctgtggaagtgcaaggcctgagatgctcacgggggccctcctgacctcccccgccccctattccgagcccccacccctgagccctttcctgaatggggctctgtaaaggaactatgcaaatgtgggcccctctccccccactgtgtctgtctcccctgaatcctcacagccgtccacgccctgctcacagagacacgtcatgaggtctgaagctggctggggtcagttatccgtgggtggaaatgctcatcaagtaactgcatttgacgatttccttaggattaacgatactgaaacaaagaggcccttgtgtgggcagacacatcccccttcttgaaggactctcctagatcaatagtttgaaaaatgtgactccttagaaggcttgagttcagaatccgccttttagggatactcggctctcagtcccttggtcgttagaagagtagttccttaggcagggttttatttttcttttt

SEQ ID NO: 42389 - DNA, 796 bp, Bovine  19866880377823
  misc_feature (1)..(1): n is a, c, g, or t
ntttggccacagacatggccgctactcttctaggctgggtacatccaatcttgcccctggaagtgtagcccgcctccgccagggtactgggtgatctgcgtggtcttcccagacccagtctctccaataacaatcaggatctggttgtcatggacagcctgaaagcaaccaaatgtaaggtcattaaaatctgccacacattactcaggagtaaaataattaagttctaacattaaaggagaaaagggggaaacagtggtgcacatatgtaagatgacaaccagggtttaaatttttaagtacgcatagaaaaaaatattaatggtgattttctatgggtgatgttctttttcaacttagtaggtaaaagaatctgcctgcaatgcaggagttgtgggtcaggaagatcccctggagaagggaatggctgcccactccagtattcttgcctggaaaattccatggacagaggagcctggtaggctacagtccatggggtcacaaagtgtcggatacgactgagtaactaacactttcactttcaactcttccccagatggctcagtggtatagaatctgcctgccaatgcaggagatgcggtttgatccctgggtcaggaagatcccctgcagaaaggaatggcacccacttcagtattcttgcctgggaaatctgacagaccgtggagcctagaaggctgcactccatgaggtcacaaaaagagtcggacatgacttagcaaccgagcatacatgcacgcataacaaattaaaactttaacttttaaattattta

SEQ ID NO: 42390 - DNA, 1704 bp, Bovine  19866880452092
  misc_feature (1)..(1): n is a, c, g, or t
naaaaaaaaaaggaagttcaaaaacaaactaaccaatacagtgtttagggacagacaggtggtaagatgctaaaaaaccaggaaataaggtaaaattcaggatggtgattacccagaagaggaaggagaaaggtctaattagagcgagcatgtaagggcttcaaaggtgctgataaagttctactcctatggcagaaagtgaagaactgaagagcttcttgatcaaagtgaaagaggagagtgaaaaagttggcttaaagctcaacacacagaaaactaagatcatggcatccggtcccatcacttcatggcaaatagatggggaaacagtggaaacagtgtcagactttattttggggggctccaaaatcactgcagatggtgtttgcagccatgaaattaaaacacacttactccttggaaggaaagttatgaccaacctagatagcgtattgaaaagcagacattactttgccaacaaaggtccatctaggcaaggctatggtttttccaatagtcacgtaaggatgtaagagttggactatagagaaagctgagcgcaaaagaattgatgcttttgaactgtggtgctggagaagactcttcagagtccctcggagtctcaaggagatccaaccaatccatcctaaaggagatcagtcctgggtgttcattggaaggactgatgctgaagctgaaactccaatactttggccacctgaagcgaagagctgactcatttgaaaagaccgtgatgctgggaaagactgaaggcgggaggaagaaggggacgacagaggatgagatggttggatggcatcactgactcaatgaacatgagtttcagtaaattccaggagttggtgatggacagggaggcctggcgtgctgcagttcatggggtcgcaaagagtcggacacgactgagcgactgaactgaactgaattgggtggtgggtacacaggttttcatttgttattgttatataaaccatatacactttattaaggaatttatttcacaatttaaaaaaaacctgccaatgggctaaggttaaaatttgtttccatggcaactcagaggtaatctaggtggatccaaggtttagaggacaattactaaaaatatgagatcaaattcactccccaaaatactagaacttcttgtatcttaaaaactgattgtaagcaccttatatcctaaaaacaaacatttatcagaaaaataagggttttttgcctctatcatgaaaggaccctttttctttgagagaagagccatgagacccatgaaacagatgagtttaaccactggtttgtataaactacaaataaaccctatccacggctgaacttgccaacagtcctcccaatccatcatcctggcccatccgagtgcccggttaccttcttcatcatccactttagggagaatgccagtctcttcatcgaagtctgggaactcttccttggaaaggacattggcagcaatcatctagccaaaggataaaaggaaacatttgtcgcctactagatcaacactcttcttttgactttatacaaagacttcatgtaggaaaccaaggtttttttcctctgctgacccaagactgcagggcctcaaacaccatatatcctacccgtgggggcacaacatcatgcccaaaagcacagctcaagagtcgcattcccaggacatgttat

SEQ ID NO: 42391 - DNA, 1591 bp, Bovine  19866880467373
  misc_feature (1)..(1): n is a, c, g, or t
ngctgagttcatggactgatggtcactgaaaaaaaggatgtggatttagcagacaccaatgaggtggagtggagaaggcaatggcaccccactccagtactcttgcctggaaaatccatggatggaggagcctggtaggctgcagtccatggggtcgctaagagtcggacacgactgagcgacttcactttcactttttactttcatgcattggagaaggaaatggcaacccactccagtattcttgcctggagaatcccagggacagaggagcctaatgggctgctgtctatggggtcacacagagtcggacacaactgaagcgacttagcagcagcagcagcagcagcagcaatgaggtggagtgaccatgcccccggagctgatggagacagatactaaaggccatggctcagcaccctctgtcctccaactccctgtcccaggccacagaagcccttggaactaaggagcagccctggtgagacagatgagaaaatcctgaataggtaaacttaaatctgaaatttctgagttcagctgaaattgattacaagtaaattaaatttgctgctaccaggtgggatgggctctcaaagagagatataggaaaataaagttgtgttttttagaagcatcctcccccccagttatagctagttcatttcttctttcttttcaatcaggagctggttgaggtctcgggcctttccaactatcacatttgctatgggtctgacctcccagacttcttgactttgtagctgccactgctgctacagctcaaggaactacccagagaaacacagggcatgtctagcaggcttttgccggaccagatctggaatgtgagtctttttttattctttctaatagtcctccacccgagtcggcatggcggggcccgcgcaggacgcctacaggccgtatcgtctcctcggagctgcagccaccgacccgcagacctccagccccggggactggaatgtgagtctttcagccaacagatcctgttaagaaaccactgtgtgtcactatgaaaatgatatggaggttcctcaaaaaacaagaaagaccaagaccatatgatagcacttgtatgggaactttaaatgtggactcaaacatatttgcaaaacaaaaacagacttacagatatagagaacaggcttgtggctgccaaggggtaggggatatgggggagggaaggactgggagtttgcgattagcagatacgagctattatatataggatggataaacaaggtcccactatatagcacagggaactatctttaatatcctgtgataaaccataatggaaaagaatatgaaaaagaatatataaaactgagtcactttgctgtatggcagaaattaaacacagtgttgtaaaccagctatacttcaatacaattgaaaaaaagaaagaagcaactgcatgcaagtcctgggccgggcatcatgcctcgttctggggacagccaggtgaataagacataggcctcatcttctacatgtttataatcttgtggcttcaaacacagaagccaccggctctaggaccttcattatgaattgctcctgattg

SEQ ID NO: 42392 - DNA, 1028 bp, Bovine  19866880522305
  misc_feature (1)..(1): n is a, c, g, or t
ntgatgggggcagggttgccattaagtgtcacaaacccctcattttgtaccagctgatgggagaccataattgcccagatggtgggagagcatgattagtccctcttttatgcccagccccatgagagatgaaattaatcatggagccaggtgggaggggctctcctgtctcatcctctctcaaactggcaagaaggtccctgataaatatgcagtagagtaagctggtcagtcttcctgcttttccaatccagtctagctgtagttgaggattctggcagattctgggttcaaaacaattttccttccaagtcctctcacagtggctgcgtgttttgcttcttcccttttcctgaacactttacttcttcacctcccactcaccccttttaatatgcttttatgttcttggcaacattcttatcaaagtcaacagtaaactcctactaaccaagaaaaatggccttcaggactgttttttatctatttgacttccctataatgtttggagtggttgggctcgtgttccttctggaaacactcttttcttttcttctgggatttctgctcctccttttctgatcatttcttttccatctctaccttccttttctgtcctgaaaatgttgacaagttcccagttctctgtcttaggcctttgtctaatctcttggctccctcagtgagtggcagatactgctggtcgctcatgcaagaattattctttttccttcttgttcaggaaaggtgacctctcctctgagccaggggacaaatcatgattggtccaagaagtcacagtaaataattcatctttgcctgtgatttgtttaagggtggacatgtgacatagccctggccagtggggcacaagcagtttaggtgggagggacttcaggggacaattgtacaagcagactttggtaccctttaaacaaaatgtgagaatatggggtctgaagccctggcatctatcttgtaagcccgggggagaagaccaacaggttcaatcataagatgctgccctg

SEQ ID NO: 42393 - DNA, 4703 bp, Bovine  19866880564250
  misc_feature (1)..(1): n is a, c, g, or t
nacctttgcaaggggaggggcagaaagggtcatgtggcagagataaaaccattcctagagattagggaattgattgtgagcctgacagctaacttttttttacagttacttcatttctctgagtcttagttttctgacatgtaagtgcgactaataatactgtccaatatcacagtgaggtatacaactctcacattttgacactttcatcttgttcttagatttagctagtagtggaggctgaaaaataatgagacaaactgggaaacctttaatgtattgaaacaaaaaatttggtgacatgcaatatttactttcacatatcaaaagtatgtgtccacccagtccattctgaaggagatcagccctgggatttctttggaaggaatgatgctgaagctgaaactccaatactttggccacctcatgcgaagagttgactcactggaaaagactctgatgctgggagggattgggggcaggaggagaagaggacgacagaggatgagatggctggatggcatcactgactcgatggacgtgagtctgagtgaactccgggagttggtgatggacagggaggcctggcgtgctgcgattcatggggtcgcaaagagttggacacaactgagcgactgatctgatctgatcaaaagtatgtaaagcagttactttaaaaattaaattaattaattaatttatttttggctgctctggttcttcattgctgcttaccctgggctttatctagttgcatcgagagagggctactctctagttgctgtgtttgggcttctcattgcagtggcttctcttattgaagaacacaggctctagagtgcataggcttcagtagttatggcacatgggctcaatatctgcagctcttgagttcaagagcatgagctcagtaattgtggcacatgggcttagttgccctgcagtatgtgggatcttcctggaccaggaattgaaccaatgtcccctgcaatggcaggcggattctttcccactgagtcaccagggaagcccaaaccagttacttttaaactcaaatttgtttcctaggcaagatctaaattctggaattcagtgtctaattaaatcatatgggggggaatcaggaggagtaacatatacacattactgaatataaaataggtaaccaacaaggaattactgtacagcacaggaaactatactcaatatttcataataacctataagggaaaataacctgaaaaagaatatacatacatacatatatatatatatgaatcattatgctgtacacctgaaactaacacgatattggaaatcaactatacttcaattaaaaatataaataaacaatatctttaaaacaggtctttcctggcagctcagatagtaaaagaatctgcctgcaattcaggagggttcgatccctgggttggacagatcacctggagaagggaatggcaactcactccagtattcttgtatagaaaattccacggacagaagagtctggtgggctacagtccatggggtcgcaaagagttggacatgactaagagactaacactactggtaaatgaaactgtgtgaatattaaaaaatataaattgatctgaagagtattataaatattacataactaacaaaaagacaaaaaacactagtgtaggcataaaagaacataattcaatgggaaagttttctgttttatgcaaaccaggtttacaactaataaagggaaaggtaaaatgtagaaaattaaatggatagttttttaaatcaagaattcaaattataataaatatattgataatatatcattctacatatacaacttttaatatacaaaatatgcaatgtatgtctgtcttttatatttacagaaatagctgaatgacacccaaagagtatgtttctgtgtgctctggagaaagaaagatctcctttgagaagggatgttaataacctgagcatcatttccaaagtggccagagagtcagtgtcttgatcacaaacctgcttgaaatttacaggtagctgtgaatgattgcaccaagccaaggcaattggggacaatatggctcttagacggagttgaaggatacagttccaggcttaaatcatccctgctcaaatttactcctgaaaagcagtagaaattggaggccctatcatttgagacctggccaaatggcctggctgaccatctccccactcccctgtatcttgcagatcctacctacctcctggggttgtgatgataatgactaaagtattattatactcctatcacactatcatatgcctaccatatcatttagtaggtactcaaaacctactgaatctctttctttttcctatggctcaataaaaaaaaaactttggaaaatcacgggcacataaacaaagatggctatagacattcattctgagagcaggccacatggctcaaatattgaccacggtatccactgatttgtttaaaagtgatttcctgatggctcagacggtaaagtgtctgcctgcaatgcaggagacccgggttcgatccctgggttggaagatcccctggagaaggaaatggcaacccactccagtactcttgcccagaaaattccatggatggaggagcctggtaaggtacagtccatggggtcacaaagagttggacatgactgaacgacttcactttctcttttaactttcagaggatcccacagtgattctcaatttgattcaagcaagctcaatttgaaaaatatcttagtattctaagtgcttcttggcccctaaggaatcaggcaagctaaagcatgtttggatgaagattcacatttagcccatgaaactatatattgcaataaaatgcttatattttatcttgtatgacacagccacatgatataattatactgcatggtatgccaaaggctcagaatagcagaacacttatttaaattgcagtttagaatttctcaaatcactaccttttcctaagaagtccgtgtcctcatgacattgtcagtccaattaaacaaaaaaagcaggaaatatagtttatcatttgaaaatgctgtctccatcttatagcagaacatctagccatgtggctttgggcaaaccatttgatctcttcaacttgaaaaacattttcatgcctaccacgtgcaaggtttggggatggacttctgtgggatgattcagacatgcctttgatgagaaaggcatgctgggtagggatcttcagtagcagtaagtagagaatctgcaatagttctggaagcagagtattaacgagggggaattagcaagtggtttggtttggtggaagcatatggacatgtagatgcgcaggggcgctaacgaaggttgttgggaagctattaataggatagagggctcctaagtgaggcaggcatcccagatttggagcctggatgacttggagcattggatgtcttttaagaagcattagggaaaatggcaggaagtgttagcgtgagggaaaagaatgatgcttttggttttaaacatgctaagcttaagatcctacttggatatccagctggagcttccaataggtaactgatatagaagattagagtttgagagttgcaggggctggaaatagaggtctgcgagttgccagaagtgatagccgaatttgattggatccatgttgattaggacatgggttcagcttatataatagcaacaccctaatgtggtgatttcaaacagacagaagtgtatttcttcctcacataataattcactatagaggagcctagggctggtatggtggttctgagaggtcagagattaggatgcttctatctctttgctctaggaaccttagggtcctgacctggtgtacactgtctgagaagactcgacattatcacctctgtacttccagggaaggggggataatgaggaaaagacaggacctgaaagtaataggactagaatcaggggagtcacctgtggtttagtggttaggacctgacatttgcactgccacagcccaggttcaatccctggtctgggaactaagatcctgcaagttatgtagccatggccaaacagacataaactataggaccagaatcccagtcttagctagatgtgtggctgctcacaacaaaggttacattgcttgtccttcttgtagataagcagccaataagaggtgagcaaaagacatatgaaccactttaaggtctgctctataaacatgttttaaatatcaatatatccttgcataatgaatcagagagtgcactgtggtggcagctgaattaaagaggagtttcacaagggcttcccttgtggctcagctcgtaaagaatccacctgcaatgcaggagacctgggttcgatccctcggttgggaagatcccctggagaagggaaagactacccactccagtattctggtctggagaattccatggagtgtatagtccatggggttgtaaagagttggacacaactgagtgaccttcactcactcactcacttcacaagggcttccctgataactcagttggtaaagaatctgcctacaattcaggagaccctggttcaattcctgggttgggaagaccactggagaagggatagactacccactccaatattcttgggcttcccttgtggctcagctggtaaaaaatccacctgcaatgagggaaacctgg

SEQ ID NO: 42394 - DNA, 822 bp, Bovine  19866880598638
  misc_feature (1)..(1): n is a, c, g, or t
ntatgtgtacatagagatccctgttttggtttaatatcactgttggatttaaattttgatagtacatgccaataaagtgaaccattaagtatgtgatgttttcatgccactaaacagtggtgatataacctgtgaatataacctgtgaactgcctgtgacacctttctaggaaaatggggcagagtttccattattaagtctttatgggtgcttacattcttgttctatgaatcaggaagtcaaaaacagtctaggtgtgaaaggtagttctaaaccatgggaaataaaatagttgaagggaactaagttgcatgcctgcaaagagtcataaatatcagttttctctgaggtatgttactaggttcaggccacatcaggttgacgctctgctttatttgtcccagttagttaaattcaggtgcattaccactctttctaaaggacagcccttttcttagtatttttaagcactgatccaggagctgacaatctttgttctgtttcttttcaaaggattcactcattagtaacttgctgcgtctcatacaaaccatgcggcctccagcaaagccttctaccagcaaaggtgagcagggcttctagccaagctttgtctccagtacggtttaggttgtgagcatcctgtaaattgcatttgtttaccttgctgcagctgctgaacaagtagattaaagtaataagacataaccagtcaaatgcatactgaatcacactccccatcccagtgccagtattgttgttgagggttttgtaatcagtattttcttttttaggaagttgaattatgtttatagtaatgt

SEQ ID NO: 42395 - DNA, 1348 bp, Bovine  19866880615462
  misc_feature (1)..(1): n is a, c, g, or t
ngaattaatttctagactcttacttccccttcagatctccatcccctgatccagggtctcagaataaacatgtatgcttctacacacatgtatatgtctgggttagagccacagcaggaaagaataatcaacatttacacgcctgcattttcccaagccgagctagtccttgcttccaatcccagctgaattttgtggccatccactaaaagaaagctgaggactttcttatatgtgaatttcataacatatgtgtgtcctagaaagaaggcatctgtccagtgcccacaactttaatcaaacctatctcgtgctttaagaataaaggcttgaatagttaattaattaatagttaattttaaaagatttttttgtggaccatcttaaaaatctttattgaatttgttacaatattggttctgttctcggttttgactttttggccactaggcatgtgggatcttagccttcctgaccaggaattgaacccataacccctgcgttgaaaggtgaagtctacctgctggactgccagggaggtcccatatgtgtatgtgctcagtcactcagtcatgtccaactctttgtgactccatggactctagccagccaggcttctctgtccttggaattttccaggcaagaataccggagtgggttgccttttcctactccagaggaatctttccggcccagggatcgagcccgcatctcttgcatctcttgtatcggcaggcagattctttaccactgctctacctgggaagctcaaaccgctggaccaccagagaattctctacataattaataatatgcaaattattcttgactgggagtcacttggtctttaacatacagagacaggagaacatacaaggagagagtccctcttttttatacacacacaaacacacacacacacatacacccctctccctaccataattataattaccgtgctggcgtccagatcaggggttagcagccttggcacggagacgcctgaaaggcacccaaggcaattagtggtgtcgctcctccaccccctccataccttcagggcctttgcacttgccgttcccctccaggcacacacatcccctccgccccactccatccttgtgtggctcactcccccactgcatttgggtttcatctcaaataccacctcttcagggaggcctggcctggccacctccacggtgctctgtctactcaccagctttatttttctttacagaacttttcactcctgggcatcatgctgtgtatttccttgttctctaacatctacctccctgccagtagggagctttgagaggctccgtgatggcgaccatgtgcccag

SEQ ID NO: 42396 - DNA, 1991 bp, Bovine  19866880625902
  misc_feature (1)..(1): n is a, c, g, or t
nttcctgtgacttctttgagtcttctgctctacttcctcgtgcaaaggtggtctggtctgtacttataggtacagcaagaaatgtgtgtgtctgagagacaaagacagagagacctattagtatttccctctgtccctctgtctgtctgactctcagactattaatacaagccccatgtctggctgcacccctagaacatagcactcccacagcacaacgctgccctcccaactgagcctgttgtctgttccgtttctgatcggcgccaggctcgtagaccccatgtaggtagaatataactttccataaataacccttaacccgacctacaatttagcctttgggttttttttcccctcgtggtaatgggattatagcctgggtcatccctcctaaatcttcaggtcccagaagcagaccctaggtgttaaatcgggattagggggggttggtttgaattctctgttcccccacactgcctcgcacatgacaaggactcagtacacattaaggaattgagtctcctctgcccgtgaaccttcagcctcagtgtcttggctggggccgtgccttctgcctagaatgtccatgctcccttctttacctgctgctgctgctaagttgcttcagtcgtgtccaactctgtgcgaccccatagacggcagcccaccaggctcccctgtccctgggattctccaggcaagaacactggagtgggttgccattgccttctccaatgcatgaaagtgaaaagtgaaagtgaagtcgctcagtcgtgtccgactcttctcgaccacatggactgcagctcaccagggtcctccgtccataggattttccaggcaagagtactggagtggggtgccattgccttctctcccttctctacctggtgaactgctaacccacctctctgaaaccctccctaagcttgatccctttcccacccaccacagagcaaattcctgccatccttggtccctgtaacattttgtacagaacagtgtgacctgattatttgcccacgtgcccaccaggctctgagcagctcgagtgggtgtcagggtaaggatctgagcccacggctggctatgagcaaaccatttaaccccttggtgcctctgtgtcctcatattcaaacaccaacctggctccagagcccattgcccacccaactgtgccacatcacctttgggggctgaacgatgtatccatctcccacctgagcccgtgttctgggccctgggactctcttcactatgcatggattctctgcagggtctcattgaggtctccttggggcctggaggcagcagcatccactgacacctatcaaaggcttgcggatgatgataatgggtttaggagggcttattgggagttaaagggtaaaattacagggaagatcttggggtggggttaccccaagatgggctggattcaatcctttgcaaagggtcatcttatggcaaagggagagtatttcttgagcctctgttagtgcctagcactatgaagtgagacaagagttttgaaaaaagcccaagtcatggtccttgcttgtgaagagtttacattttcatcacagaggcattagatttacatttgagaaaaagcttgactgagctcctgtgagctggtcctgacacttgactttgtgtctattctggtactaaacatggcttggctgggtgggacaggtgacccatgaaggaatgctaaatggaagacatagattcagaagtcaaaggagtaacagggacaaaggggacggacatctggggagaggggatcagcgggagttggaatatttctggaaggttcagggaagaggtgacaaggaacatgaaccccaaagaaagagcaggagttgttgggggtggtaaacgagggcagtaaactacaggttgggacagtctggggccacttgggagtcattaagggagtttgggagagtgggggatggggatcaagcagtcttccatgtcag

SEQ ID NO: 42397 - DNA, 1471 bp, Bovine  19866880645794
  misc_feature (1)..(1): n is a, c, g, or t
naacaagatcccacatgttgcaactacagaccccacatagaagactgaagatcctacatgctgcaactatgacccggcgaagacaaataaggtagtaaatatttaaaaaaaaaagaagaagaacagagagaaacatgaggaagagatggtggcctcatccatcactgcactttatcctgttgggaggtggtaaccagatctaccacaggcgtcttcggaccatcaggggagtccccaacactgagggtggcagaagagtcctgaagccaccagagagctactgcatcaaccagccctggagctggtcacctcgggatttcttatcacagaaaataataaattttcactattgcagctatctgaataggggagcagggctggcaatcaaccctcagccaaagtcaatgcaaacacaagggtgccgaggccttgtgtcacgtgtggtcacttaacaggcagccaggtgagcagagagagacccaaagctctcagcctttcacacaagagccagaaaacatcaggttttccaagaaaaggcctgtcatgtgcttgttttctaaaaaaatcaagttcaacctgcctcccagtaaagcaactctactccaataaaaattgattttaaaaaaagctgcctcccaccgtttcctgggtggcaggtcccttaccgttcttctgagccagagcctggtcgatgaagtctgccgccttttcaaagtaggcgctgaggttgaactcctgtgtgtcattggccttgatgcccaggtaggtgatcccggagtccttgtagaagttggcattggtgtttgacgtgcatgaaggacctgccctcagctgcattcaggacatgggtgatgcccagcttctgcagcttgggggatgtcttgagccacagacctggacaggaaacagcagcaggggaggatcaactgactacctggcagccctcaggggaggaagatgggagaagaccctaagcctcttggctcagaaaggaaccttccgtgctctggcccctgctggcttctccagcctcagcttatgaccctctgccctcactccagccagctccaactacctgccacaaatagccctgcgtgctttcatgcccacactattcccgctacctggaatgtccttctccaccttcttcataaaggtgcaccctctcatatctcacctcccttggcagcatttcctgatctccccttcatccagcatcgtgctctcgatcctgtgggtgggtgatatcaccaagaagctaaaaatggagccagactccagacagccctgtcacttactaagcttgaacaagtcacttaacctttccatgcctcagtttccctatctgtaaaatgaggatgataacagtatctactcctggggctgttgttagtgttaaatgagctgttctataagacagagcctgacaccgtgatcagggccactatcctaatgcttgattgtgcttatt

SEQ ID NO: 42398 - DNA, 987 bp, Bovine  19866880829366
  misc_feature (1)..(1): n is a, c, g, or t
ncccctcccccgcccacacacagcaggcttttccacaatcccatgccttgtcatttgcctttccactccgccaaatgtttcctgttttctctgccaggtgaactcttgcacattcttcaagatccagctcataggtcacctcctccaggaagttttccatgccctccaggcagagtcagcccctttcccatgctagctgtgtagaagtatacgctacttctcccagcctgtaattatctgcttgctggcctgggctccaccgtcctgttgttcacagatattccctcctcctctctggagaaggaaactacttccctgactcactggcctcactcaggcttgaccatgtgacttgccctgggctgtgaagtggaactcatgagtcagtgaggaacagaagcttccaaggctaagtatggttcaccatgctctcttttccctttgctgcaaaggatggcaatgccccatccagaaaccgcgctgccagcctggcactggagtaaaggaaagtggaactgactcatgacatacatgaagcgtgagagagaaatgaacttgactgtgatgcatgaggcctctgggaccatggaatcatgtgttactgcagcataaccagctgatcttggcttctccaacctttgcctctctgccccagctttaccagcacaaaatcaggaatctcatcttactcacattacagggcagaccttcagcccatgttctttgagtggctgataatattaataggtaaggtttgctgaatactgatcaggtgctcggcactgtgctgtcctcttgccaaatgtcaccccatttcatcctttcaatagcactaggtaactactcttacatagaatttgcaaaagagaaaaggggtgggacttcccttggaggtcttgtggttaagagtcagtactttcagatgtggatgaacctagagtctgtcacacagagtgaagtaagtcagaaagagaaaaacaaatatcg

SEQ ID NO: 42399 - DNA, 2432 bp, Bovine  19866880874739
  misc_feature (1)..(1): n is a, c, g, or t
ntgtcctgacatctgtacaccaagccggtaacatatccactgctatcaagagccataccaccccccaggcactggtgaggagggacttccaggcagctctttatgaaaagcaaaggcatttttgtccacggggttgccacgtgcttccccacagaagctattcaaatgtatactgtactttctggaaaaatcaggtttctctggcgttgatgaagacttttctcaaagaccagagcaagagcccagagaaaaggccacagaagaaacagaatccttctcttggaagttcaaagtcttgttctacccacgagcacacaacgggcttctgaagtggaggagtttcaggaagctactggaggtcaagagaagggcaacggttttctttgcagcactcttgtgtttttcattcaaaataaatagaacagaagctgaacaaaaagaaccctcaaactcaaaacccaatttcaggggacacccggggctccccaaagccagactcactctgtggccaccatctgggggatgggctcatccaggagttccaggctatgcaggatccagtagcagagccatgggcggctggcatccagacactgcgaaaggaatagggcagaaaacacaccccttattcagaatcgttccaagaccctgctgacaaggcgacatctgtctccctcccggccgcctggcaaggaggagaagggccacctcagagggatgaaggacactttgcctggaggccttagcccggagctgaagtgaccatatgtgagcaaaggacaacgggacaaaggcgtttaacctgaacccaatgagtccttccctgacaggcactgaaagaagccaagcagaggactcctcacacagcagaaactcaagtgctactgttttctcagtgtagacccaaggagagccacaattacagggaaggatttcctgcattcactcgtttattgatttaacaaatatttaataagtatctcctcaggcccagcactaggggcacaagcatgaataaaattcagttccttctcttgaggtgcttgggttagaatgtgtgtggttatctgtagaggaggagggcattagacagacacggaagtactagtgcatttctggaataaggcagaacaagacaagtgcatacacagagctggataaatgctataacgggcacatggaagaaactggctaattctgcctgagcagctggaaaatgtttccaaaggtgacctgtgaacaggtcttgatcctagttcaagccataaacactcaagcattcaagcctaggcaggctggtagtattattgccccagttttacgaatctaaagtgtataaacggtgtataaatgagatccagagagatgaactttttccagatgacaaagagagtaaatgtaagaaacaagaacccaggtttctagactctcgatccagtgctcttttcattggcctaagctgccgtcttcataaacatgcacataaatacgcttgctcaccacctaggggcagctggtgtgctgacagaagacgttgctatgggtttcagtgccagctccttctctcattagctacgtggtggtggtggtttagtcactaagtcatgtccagctctttgtgacccccatggactgtagcctgccaggcgcctctgtccacgggattccccaggcaagaacaacggaatgggttgccatttcttctccaagggatcttcctgacccaggcaacaaacccaggtctcctgcttgggaggtggattctttaccactgagctacctgggaagccccctgtgtttctggagatgtagaaaatagacaatattccagcccaccagcccccaaactgagcacataacccaggcctggcccaatccacttaagggaccccatccccaaggtgactgagctggttcaagtaggcctgggcttctggggccattttcccaactctatggaagaggcttctctataggcaagagaatgaagccaagaccaaaagatgccttgccaagagagacagggggacaagaagggaggtgtcctttgaggccctggattcacttgagcggccacaacatgaacagtgcccccttgaagttagcattcagtggggccatggctccacccgtcaacttcccagctagggaaccaacacatttcatttttcctgttttttttccttaagaaatttgagttgaggtttaatcacttgctaccaaaagtctgaatatagaaagggtttccatctaccttaccttgctggtcctcaaaactgtggccaagtctgtaatgcattttttcatattgaagtcatggggagggactgatttccagtctgggtcaacccagagcagtacctgcagggcggtgagactctccgaagtcattcctttgttaagggcacccttttcatgccccgctctggtat

SEQ ID NO: 42400 - DNA, 932 bp, Bovine  19866880907128
  misc_feature (1)..(1): n is a, c, g, or t
naggtgtctttccgtgctgaagtttctaaggaagccagcccagattccaccctttccttccgagaatgtatcctgtgatgtttaagtaggagtcaagccttgagaatgaatttctcctaaagtgtccttgttccaagagaggaggtggggatggatacacctaggaaaggaagcacgcaacaaaaggggtttgagtcaaatgttccctgggatcccaaagttttctaagggaacagtgcggttcaactgacccactgacaaggaaagaggtcaacgtgggcaacccagtaccccacttcctggaggctttcaaagaaactcagcatttcatgctgagtttcagaagagaaagggcagctcagaggcaggaaccaaggatgttgagggtagggaggaaccaagaaacagacaaaggaagaaacaaggtgggaagagggcagataagggctgaggttgagacccagagggagagcagaaagaggacaggattgccaaacacaggcagcaatcagggctctggcgtgcccaggtcagcgacttcttctcctttcagtccacaccctgagtggatgccttgatgccccgcccaggcccctctactggctgtaagtgttggttccagtgactccaacaatttgtggtggcctcttctctggagacctgagcaaccagcagcctattaactgactgatgggataggggaagggtaccaaagaccagcttccctgtctcagggggctcctctctgtggttccaggctccatccagagcttccctactgagtgaagtccaaatcagaatccagctgtgagaaggggcttttgctgagcccctctcctgccctatcctgcttccctctctcctcttctcctgagactttgccctcaataaaccttgtgcctctaatccctgtctcaggctcgcatcgagga

SEQ ID NO: 42401 - DNA, 1331 bp, Bovine  19866880979073
  misc_feature (1)..(1): n is a, c, g, or t
nctaaccctgaggttctgcatcccgagagagcctccttatttcactggctgtcacgctgtagaagcaaatagctagtgtgactcagagatggtgtggtttaataaattcaactgtgaagtcagctttggaaggttatagatgttgaggttcaaatgtaggtcctcagcaattccactgcgaagtgtccaccctagagaaactctaactcatgtgtagaagcagagggatgtaaggatgttcactgccgcactgtgcttaacagcaacaagtcagcaacagtgtacctgtctctcagtaggggaaccagaaaatgaatacactgggctctgttcacatattggagtataacacaacagtccaaatgaatctatgtctctatgcatgtcagtaactatatcacttatatgaactagaaatctcaaaaaccatcgctgcttccactatcattccattatgtaaagtttaaaaacacatataacaggggcacgtagtttacatctaaatacatatgtagtcaagatgggcaaatattcaggggcatggtatcatcaactccagccacgggtcacccgtgggcagggacagcagtggaaatgaggaaaaggggagaggcatttactggacacactttttatttcttaaaaagaaagagccagaactaaagcaaatgtgatcagcattcacatcctggagggtgggtactacgtgctttttctgcacactttcttgtattcattcattcaacaaacattcagtgaggacctgttatgtgccaggcaccgttttaggctctgggaacacagtagtaaacaaagccaacatcgctgtcctcaaggagctcatattctctctgtttgaaacatgcataactcctcgttttgatttttaatacataagtccagtccttaaccactgactaagaggcaacctacctttttccaatctcctccaatctgcttggttttctcttccccagaacctcccactagcatctggtccccttccaagccccatgtcagaaaaggccacagctgtcctgtgacagagtccccacctcaccctgtggaagacccaccacctagctgtactgccccaccccccactatcatccaacttcctggtcacacccaccaccatttaccggagaccctggggctgcctccagtgtctccccaccctcatgcctgtgtagacacgccatcccacacccaatccatccattcctagaattctttaacactgatggcctctttgcccccccatagccacattcaaaatgttatccctagaactgtcctcctggaaacctttcacttcccacctccctctc

SEQ ID NO: 42402 - DNA, 1658 bp, Bovine  19866881078066
  misc_feature (1)..(1): n is a, c, g, or t
nacacacacactttctttaatgtgcctcctataacactatgaagttattttattgcactgttaacaaaattccccaagtcttggatttgaaaaaagccttaagtcagatccagaaaccatcaagtgccaaattccagggagtgaagcggggaataagtgcaagagacaagtttgctgattgcatttgatttaaaggcccttctactgctgcttgcaaaaaggaaggtggattaaaagcaatttttttttgcaagtctcagtggcccactacggtctgtagtagaaagagagacacgctccagaaaaaaaagtatttctctcggcccacagtgacattctcactttctcagtaacttaaaaaaacaatcagattcttccttccgctctttaacctccaacttacatgccaattagccacactcttgtctagtggggtttcaagtcatttttctccaaggcaaaggaaagacacttaggtaggtgccttgaagtttctcctggcttcccccacctgctctctggccctgtaaccttcgcccacctgctttgtcttccccacccccaggggccaagttttccatggagtctgtgcatggaaataggaatcaggagcttcttgttccccaaagagttctctctctctctttttaaaactatttatttacttggctgcaccgaatcttagctgcggcacggggggtcttcgatttttattgcagcacatgggatctagttccttgaccagggattgaaccccgggccccctgcattgggagcatggagtcttagccactggaccaccagggaagtccccaaagagttctctttgacaaacagtctcatggtctaagagcttccctggtggctcagagggtaaagaatcgcctgcaatgaatgcagaagaccagggttcaatccctgggttggggaagatactctggaagaaggaaatggcaactcactccagttttcttgcctggagaattccatgaacagaggagcctggtgggctacagtccatgcggtcacaaagagacagacacactgagcgactttcactttctcatggtcttataggctggtgcccatcacaggaggatccattgccatttcaactggccagtgagtctactcagtcaccatggcttgctggtatctctggagggttaatacaatttcttggagaatgacattccaagcatatagggtcagagctccttgcccactgaattatttacatagtctagtgcagcaggattggggctgaaatgggaatggacgataagaatagtgtatatgctggctggttccaaagatgcccaaggttccccgaggaggggccatgggtctcagccctgaggcctggaggcagcacacatgatgttaattaaacaggcatctcatcttccagaacaggcagccagggtgttgcaggctggtggaggagctggggtcaaagccacaaaccagactcccctctctgctttgtccaggacttacccattgagcgtacatctctcctctgaaccttacaaccctcctattttgagtaaagaaagaattacactctacatttatgcacatgaagaaatagaggctcagacagataatgtgagctgctcggaatcacataattaagaaacggcaaaagcaggcat

SEQ ID NO: 42403 - DNA, 1596 bp, Bovine  19866881129043
  misc_feature (1)..(1): n is a, c, g, or t
ncatacgttctgagcctctgggcaaaatttctgcgtgtttgtctttctgggtctgacaccaagaaatctatctattttataccttccaatatgtcccttttctcccacttgggccctcaatggctggtaaggtttctgcttgtgtctccaaccagagagaatatggtgagctctggagggcttttttctaggtcaaggatgttagacgggtagggccaataagctgccaccacccactcttacacccacggcagacatcactaattgatcatagcactctcttgctgaatgtagatattgcttttggatatttcaggatatagtatctggtctcaattgagcagaactggcaagtgaattaatcttgtttgccatccttgatgcagcaattttaaccttctctgtcatccactccactccctgcaggaagtggatttttaaaaattacaaccatctgtccttcacagacaatgcttagctatgttaaacactggccgattgtgcttttaccattgaatacatacatgctttaaggcatgtgactcatcacagttttacatccacttatgcagagttacaccatttataccaccagtcacaggatcacgtgtgaaaaaaaaagaaagcatttgttgacttttttattaactaccgaccagcatatacacaaagccctcttgaatcatatagtttagaaacaataagcagcatttttctatctggtggagtcaatatgaatctattttttttccctgtcctctgaatacagtctccaaccattgcttcctttaaaagtcaggcttatggtttcagagcaagatgatgtagaatcattttttccctccttctcaattctaaatctggcttccctggtagctcagttggtaaagaatccatctgcaatgcaggagaccctggttcgattcctgggttgggaagatctgctgaagaagggataggctacccactccagtattcttgggcttccctgtgactcagctggtaaagaatctgcctgcaatgcaggagacctggtttcagtttctgggttgggaagatcccctggagaagggaatgtctacccactccagtatttaagcctggagaattccatggactgtatggtccatggggtcgcaaagagttggacatgactgagtgactttcactttcagtttcaactctaaatggcttcccaggtggcacagtggtaaagaacccacttgccaatgcaggagacacaagagacttgggtctgatccctgggttgggaagatcccttgaaggaggaaatggcaacccactccagcattcttgactggaaaattccatggacagaggagtctggcatgctacattccatggggttgcaaagagttggatactacagagcgcacacgtgtgtacataccaccaccacaactccaaatacaacttaaaatcttaggaatttattgataaaaggactctgaaagatggaaagaaaatgggttaagtagggaaactcaagatttgaggaacaaacaatgtagtgactttcctgggctttcttttcatttcccacacccaactgagataggaaaggcctacaaccca

SEQ ID NO: 42404 - DNA, 830 bp, Bovine  19866881155533
  misc_feature (1)..(1): n is a, c, g, or t
ntggcatgggcgcatgggggtaactgcactgtggagaaactgacaaagcctcaaccactagctggtcaaggtcaatgtcaactgggatatgtcatgtagacagtacgtacctttttttggtgggggaaggggaggagagaagcagggtccttcataagggtctagtagatatagtggagatggaggtgaagtcctaggcctaggcctaggaaaaggcagaggtgaggcagaggcctccggagcagaggccaggcctccctgactccccccagcaagccctctgctacctcagattcctcactccagcctccccctgcctctgggaacacagagcagcaagaactgccatgcaggaccctccagggtccccacttagagcagagcacaggatccaggatgctccctccccactgtgggagatcagggggaactcggtgtcccactctccaccaggatgaagtggggaagctctctgtcctccagaagagaataaactcttgttctctgtgatggggggagagagagtggggcttggcctctaagcagaacctagaaagaggccagaggtggtgcccccagaggagattctcagatgccactttcacacttgcagtgtctccactttcccttcccattgactctagggagcagctcagagtctgggccagagtgactgatgggaagaggggatctgctccaaagacatctgtggatttcagagtgggagtttccccgacaccaaattcacctctgtatacacagggcagtagtcatgtatggatgtgagaactggatcataaagaaggctgagcactgaagaattgatgttt

SEQ ID NO: 42405 - DNA, 1823 bp, Bovine  19866881232791
  misc_feature (1)..(1): n is a, c, g, or t
nctccatcaatgttattatttctttttgtagtaacatggttttgtggcaatcagtgaaagctccttggaggaagtgccctttgagctgagcctcaagaaccggaaggacttccagaagctgagatggtggtggtgaggaggctgaagaaccacagattttgtctgaaagcttgttatttcttctctcttgctcgtttcatccttccctctttagctggtactctcttctcccagagtctctctctttcctttcccgacctcctcctttttccttctcacccactggaggcctccctctggtgtccttggccctacaaggtcgctgactgctgggttatgaggtgctgctctggggctgcagggtcaccttgcagtcccctgatggggactctgtaccggttccaaaaggaggtgggatgctgtatccaggattcttcccttgcagttcagggagagatggatttagtgtgggtcactttcactacaaattatcaagcggtcttccatgtggatgtcagcctgtgttagggctacagctgtaccagctcgaccttgttcagttaataatttactgccgggaaatgggagttaaatgggccagaaggcatattttgtgtgaaccttgggacacctctgacagcaatttgtgtaatttgtccgggaagagcctaaagctatctgaattctaatgttctgcctgtcgcactgaaacttagaccccttttattaacatggttggctttgatttatatttattttattcctttggtttcacttctgatctcatgactggagcagtggtgagtgtggaaaatggctgtgtgaggaattatgttcccagtgtccttattcgaagaaatccaccagcacctgtggtgtgggttttctctgttttgtgtaaaaggaactcatacttgatttaaagctctgctattaccatttttggaattcttaataatttatgaacaaggggttaccatgttgtattaggtcctgaaaattaggtacctggtcctacaggtatgccttggtttttgatgttgaacttgagtgaccctccaaggtccttgtgtcctttctcctgcctcctggaccatcctggaattgtgtcgaagacctcagggagcctctggtaactctttccaagaatcgtacaaccctgccagtcgaaatatcttaaaacacacacacaggtaaaagaagttgtttggtggtttagatgctaagtcatgtctgacccttgcaaccccagggactgtggcctgccaggctcctctggccatgggattctccaggcaagaatactagagtaggttgccatttccttccccaggggatctgcctgacccagggatcaaacccaggtctcctgcattgcaggcagattctttacctactgggtaccttccctcataagggaagcccaaaagaagttgttttaaaataagtaatacatggatttatgtcaaaattcaaagttctgaggggtactgttgtttccccccagttttcttgttctccttccgcagaagcaagcagttatccatctctgggcacctatccaagagagtctgtgctttgatgaacacatatgtacatgtctccatatttctttttcttcaccagatggtgagataacttgtatactattttgaactttcctctttttacctaactctgcattgtagaaataattctaaatcaccatacagatctactttattatttttggggtaatgatttcccattgtttggattttctataatttacttaacaagttccctgtgacgacacttaaggtgtttctaactataaacaatgt

SEQ ID NO: 42406 - DNA, 484 bp, Bovine  19866881304083
  misc_feature (1)..(1): n is a, c, g, or t
ncctgactgctgccctgccctgccacagcccagcctgcctggtgcacgagagcttgttagtgcccttctcatcctagacatcatgtctgccgtgttttgggggccaagtcctggtccaaagctccgcctggggcatagttggttccccttggcaacaacagaaggcctggtaaccctgtgattggctcaaggcaggttgagaatttgctggcacgtattctcctcatgattaaatgtctttgcaagaggcaagggctgtgatgtgatagagaaaacactgcatttggcatcccagaaagctgggtgaccttgaaggtgcttaccttctctttgcccctgtcgcttacctgtcacatgaggctgtgacagcattacagtcgtgctttgtttaaagtgctgtgctatactaatttgagatgttggttttattttgtcctcagcatggcaaggtgcctgctgggctgtcccccctggggtggcagag

SEQ ID NO: 42407 - DNA, 1681 bp, Bovine  19866881319452
  misc_feature (1)..(1): n is a, c, g, or t
ncaatgccctcttccagaatgtttacatcctaatgataactatgccttggttgagaaaccatccctacccctattgtacagggaaggaaatcaaaacttgatgatttgatgacttgtccatcaaggttacacaagacacccctggtggctcagttagtaaagaatctgcctgccaatgcaggagacctgggtttaatccctgggtcgggaagatcctctggagaaggaaatggcaactcactctagtattcttgcctgggaaatcccatggacagaggagcctggtgggctacagtccatggggtcacgaaagaatcagacacaacttagtgactaaaccaccaccaccaccaaggttgcacaattgtaacgtgatggagacaagattctaacccaggaccagctgaccccaaagcccttgctctcctgcactacagccttttactccatattcctcagctctttggaagaggggaccctttcaagagggtcttctagaaggatcctcaggaaacaaggctgggggtagggaggatggctgtgctgaagacagggtctgagagaggcagatggtctgggcactcccttcctcctgtccccgacaccctccacccccgccccagtgcagggcacactgtaaggtcaccaggcttgcagtctccccatgaaaacagggagactgggctagatcagccctggctccaggaagtgccctgctctgggtctctgaagaaccaccgcacccccggctcacgcacggcacagaccagaatctggctaatctcgtcgggccgcttgtgcaggactgtgatcccgttcacttcccggagctcgtctccaacgtggaccaggcctaggagacacaggggctgaccgtcagcacagcaaggggtccaaggttcccagagcgcgaagttttaggcacctctggcacctgcctacagaacccaagcaggggagattcaaggcttaaaggtagtggatgggactggaatgaacttatccccaggtgtgctgggtggctcacctcgaatcacagcctcacagcagcctggcaaaaccctccagtttacaaacagtcagctgagattcagaaaagtgatgcagcttgcccaaggccacactgctaagaaataatggagccagtgcacagatgcagttacttggctatagaaagcccatgttctttctgctgtcacctctgcttctttaaaaatatcattaactcttccccttcctgggtgtacagacataactccaaggacatccttctccaattttacatgaaaactgaagggcgccagagaagatggagtcaggagtgttagacacacctgtctgttggcttctgctttaatgataagcaactctgcatatggggccctatttgccactcaacatggacaccagtccagaagcagcagcatcacccaggacgcaggaagggctgcagaagtcttgggcccatccaagacctgctgagtcagaatctgcattttaacaagacactggggccatttccgtgcttgttaatgggaggcactggtcttagggctcccaccacaatggtctccagacttttgggggcaacactcccctacaccaggagatctgcctcccaacttagttcctccacacaccaaagattctttttcttttaattttttattttatattggtg

SEQ ID NO: 42408 - DNA, 1047 bp, Bovine  19866881346459
  misc_feature (1)..(1): n is a, c, g, or t
nactcttgtcttttattagtaagctacgtcaaatcctgtttagaagagatggggtacaaacaaatgaatcacttggtgactgaattgcaggtctctaccgagcacttgctccgaggaccagatggatgatctcttcccaagtgactgtttcaaagacaggactggagtcccaccacccccaccacccgccttgcccactcccttgccttcagctccgccataccttgctgtcctttaggcggtcttcctcctgggtggctgggatgattttcagggtgatggatccctgggattgtgcctgaaaggagacagcacatgaccatatcatctcccaggtctaaccctccaggacatcacatgttacctcccagatctggaaactcacatgcagaaggaaagttggacgtgcagcctcccctatgacctgcccttcagtggtggcacccagatgaattaactgaagcatttttatgggacaaagggatagaacacttttctctttttttttcggccacaccacgcagcttgcaatatcttagttccctgaccagggattgaaccttggccctggagaattgaaggcgtggagtcctaaccactggagcactaggaaagtccccagaagattttaaatgagaacttgagaacaatgcatacaacagatacagctcgctctctcccttctgacctctagtgcccccaagcactgcccttcttttctcttgggttattttcatatcatcgttcaatttcattttcctctttcctgcctgatttggggctggttcccaaccagcacttccctgttgacctgcatcttccccagtctcaggccactccatcttccccaatcttcgggtccccctcccttctaccagagacagatgctgcaccccacgtgggggcccatggggaagcacgtgtcggcccattaaagcacatctcacccaatgctgtccctgatcccgcctcactctgggaaaatggaggctggtgcccagaaccagggggaaaaggagagggggcagaaagactgaaggggtctgc

SEQ ID NO: 42409 - DNA, 1568 bp, Bovine  19866881584986
  misc_feature (1)..(1): n is a, c, g, or t
nagaagcccagggacaccggcatgctccactgctcctctttcttccccggggacctgtccctgatgtcataactgagtaactatgacaacccatcatggacagctaagtacctcacagaggagcctgggtgcctcatttcagaagtgagactaggaagagaagatgaacaattccctggattatctggcctaccctgtaattgtctctaatcatagacagagcacatccttcaggaagaagctggactttggccactatgcatttcataagaatagaatacaaataggtatgtggggcaatttaaactggacactatgactagaattctgaaagggctcaccttaagagatattgatggtgaaccagagcagtacacagctttgcaatgatatggccttatctgctgagtctggtcaagagggtattagcatcagtgacaaaatttatcttccaccagggagttcctttgatggaaacactcatttatgctctttaaagccaaaaagctagacagaggatgagactgcagcatccagtagccaggctagtcatattgggaaagggtgggagaaaggctctttcattagcttcaaggaacatttatgtctgtaaattttatttttctcagccctcatcatgctttcatgtctgctcaaaactcttcaaatgatgtcagtttgggaaagtcaactaaaccagaatccctgaactgaattggttcagaattcaaacttccaatgttttaatcagtgtcattgtgtagaatgtgagcagagtctctaaggctactaagaggatacctgtgatgtaacattgctctccttccttcctctccagtgaagcctactgttgataccaaacctccagcagcgcacacacatcacatcttaaaattgagcaaactgcaggtatttgttcttgccatctgcaaatgtaccttatctatgtcccaaagaggtccagtttcccagagccttctaaatacccaccacttcctcctcctctccatacaccacccctggattcctcagccctgctcccagtctccactgtagcccccagtttgcccctttcccataatcccacaggagggggatactcaccattgtgagagggagcatcatgtagtgatgatgtcaccatggtggggtgggggtttctcaccagggtgaacaaaagagaatcgacaaaattgaatacgaaaacaagcaactgtgtcaaaaaatcgccaatgcccaccgaggccccgccaaggtggattgctggaacgaatatttttccaagaggtagtattatttctcttcattttctgaaagtcaaaactgacttcccccttgctgggctttagtactagaggcacacttaaggaaagttatcctgagggataaccaaagagaccatgttaaggagaaagaaaaccaccccaaacaagaacctttctctaacgttaaagagctaacttttgttccctaagagactctttggagtcctatttagagttcgtcacagaaaagcacttttgtaaaatggtgatgataactgggattttaatatagcattcttaaaa

SEQ ID NO: 42410 - DNA, 1304 bp, Bovine  19866880907254
  misc_feature (1)..(1): n is a, c, g, or t
ntttcagacagtacagagatgggcatctgctctgtgtttattttcatgtgtgtgttctcatgcgtatgtgtgtttgtgtgtgcttagcacatcagacccctgatttcacaaatattgcttaagagaaggcagtgagccagtttaaagaaaaatgttcagtaaatgagaagaaaacctggcatctgagtacgacaaagtcctaatggaagttgacaagtgcctgtggtcccaggccagagggtctctgaggcccttccctctccaagaagtggtgggttcagaccccccggccccctagaatgagaaacacacagaccaggccctggtttccaccttgtcctcatcagcaccaagatataccatcaccaggagcggcaggagaagttgctatgaagtaagtggggtggtccttcctggccacaggcccccatatgacctcagaggacacagacagtgtccacacacatgacccctggtgtgattcaggccagatgaggccagggcacaggactgacccagactgaaggcagatgtggccggagtcttaacagagatggctcaggctgggcctggcgtgtccggggggtcagcagccacacctcccttagaggctagggggaggttctgagctcccctgggcaggcgaataagctcttccacctgtgctgcccaggggagagccgcctgtcccacagccccaatgtctctgtcctccaagtggccgggtatgaatcacagggatttacagcccagcctcgagtgggatttatgggtctgtctcaagcccggccagcggggagtggccgcccgtcagtcccccattgcagctgattgatgaggatgtttcctgccaagaaaaatcccctctgtggcaggcagccgagagaaaggcttccaggcccaggggccagcccctcaccccatacctgtccccagtctggtcccctctcctgcgcttacagctcacaccttcccacgatccccccagccccacacgctgacagcctaacagtaggtgcacccaagggccccagcttccagggagcattccaccttcccagacctgccacttgctcatccctgggaacagtgtgctttgaacaaatccatcccagggctcgaggctggacatgccaaattccagaatgaatttctgaaggaatccagaacacacacacacacacacacacttcacagatgaagaaccagaagtccagagagggacgggccttgcccagagtcacacagcagcacaatggtgtagctgagacctgagcccacaagaccctggactagtcaagtca

SEQ ID NO: 42411 - DNA, 1600 bp, Bovine  19866880353522
  misc_feature (1)..(1): n is a, c, g, or t
nttaactcaaccatttggcatagtggcatggcttttttagacaattgataatttcagggttttattcacaggcacaatcataagaaaaacaaggagaagacggtcccccagttgtgttcaaatgcacagactttaccttttgagaacataattgaggatgggagtcacagagaaaagatcattaagacttacaaagaaagaaagaagggaaaacagcccttcctggtttgtgccagtgcaagccaggaggaaggtagacttcctggagctggagaccatgcccaacccaagagggtggaaacaggagggtcctcagaggcagcagacatctgggcaaggaaataaaaacaacaagggggcacagagaagttgggagaaagctgcaaggaaagtctcttccactgaaacattaggcaaacatagcaaatacagctgctggcaggggtccctgtatcttcccactcaccccagaaatagaatgtccccatccaggatctcgaagaatctacaaatccacccccttagtgaagcatgggttagcatcccagtcaattcctgcctgcgttctctgaagccaagcaggggtgaaactgggcggaggtgcgatttgggtgcgcctcggccactaattccagaaacaatcagagtgtgaagggatggagggcatcaggatgtttgcaaaagcaaagacatgtcagcgccacgttgccagcagaatctgagcatcgatttagcaaaatctttcttcagagaagcaaacagctcggtgggtttagctaaacataaatagacaattagagatatcaaaggtgaacatcgatcaatcttcaacaaaaataaatagatatttttaagaacttcctaggaagtagagcaaagagggagtaaaatcattgtcttagggggttctgatacaaggacagatggagagctgatctttctatcttgagtcttgatctttatctgtttatcatgtatgtatgcatgtatctatcatctatctggccatccatctatcttgcaaaaatttttttaaatttattttcagttgaaggatcattgctttacaatgctggtttctgccgtacaacaatgtgaatcagtcttaagtatacatgtatgtccttgctcttgagcctcctcctcactctgccatcctacccctctaggttgtcacagagcaccaggttgaattccatacagcagcctcccattagctattttatatatagaaatgtgtatgtttcaatgctactctttcaatacagggtaaagtaaggtaaataaaaagaggaaaacgcatattgtatgttagtgcatatatatggaatctagaaaatagtacagatgaaccgatttgcagggcgggaatagagacccaaacatagagatcagacctgtggacacagcggaggaaggagagggtgagacaaacgagagcagcatccatcttgctaattttctagtttttcctaagatatcagccatacacctttacaggcagactctattccatcctggattttcttatagaacctaccttagtacaggggagcatgtattggaattaatacataagtaaaagcattcctgataaggc

SEQ ID NO: 42412 - DNA, 1749 bp, Bovine  19866880647364
  misc_feature (1)..(1): n is a, c, g, or t
nctatagcttaattgtggccttatttatgacattactacataacacacatgtgtacatacacacacacacataccatgtatatttcttctcactaaaaaagactttttcacaagtttaggagttgttacatccaaaaggaagcctggaaagatggtattgatgatcccatttgcagggtagctttggagaggccgacacagagaacagacttacggatacagttggggaaggagaaggtgggatgaatggagaaagtaggatggaaacaggtacactaacatatgtgaaatagacagtcagtaggaatttgccatatgacccagggaactcaaactggggccttgtgacaacctagaggtgtgggatgggatgggaggagggaggaaagttcaagagggaggggacatatgtgtacccatggcagattcatgttgatgtatggcagaaaccaatgcaatattgtgaagcaattgtctttcaattaaaaataaaataaagtaagcctaactcataattttaattagatctggataatttagaaaaaggattggggaaaaagagtttggcctaaattactcatattagccaataagtttgtaaatattcaccagctaacacaaaatactacctccctaactgactcaagaaatacctagctggaccttgtagggagccttctcccaaggaatctgctcagtttataatcacccagtttatcctccttccttatcaggctacgtttccaactctacttgaggtataagagtacttcggtgggtattttgcttctgtacttttgctgtcatagaagttagttcaggatagacccagtgaaggtctctcatggtttgaaacacttcctggcaatttagaaagataatgccaccctctttggtgacaataatctcatgtaaataaagctttttctttttttaattaaattttttcatcataatttgtccagcaaaatatttccaactttcttatttccaatgccaagcaagagctttagttgggattcccacaggctgcagagagagagatgtgaccaaaagacacatttcttagtataaaaaaaaaagatccgaccttactgaaggtatacaataaaatttaaaatattttttatctactattattttactattaatttcttttgaaagctaattttagaataaagcagatacccatgtacagaagacttttttaaaaaagaaaaatctctaaacagaacaattttcagtttaaaataaggaaaataaaattgctcacaaaactttaacataccagctggccccaatacaattacccaagtagaatacatttaaaaattatgtatcacaatttgaagcgattttacatttttatacttttagagttggcaaatgaataaatgtcatagtttttctactgtttaaaattaaataaatgcttcattttgcaggtaagttctgcaatctgacgccaaaccgtaattgccaagtgcatttcagatagtgccaggatgtcatttacttttattggattatgaaatgactagagaagatgtctttccaattcttcctggttattcccttagggttctcattgcccatgtccagccttcactgccaaggacacaggttcaatccctggtcagggaactaagaatctgaagccttgcagcagggccaaaaaaaataaaagaatagaatgaatacgaaaagttaccttttgcttctcaacaaccaagtaagcgtatagcctta

SEQ ID NO: 42413 - DNA, 769 bp, Bovine  19866880708172
  misc_feature (1)..(1): n is a, c, g, or t
nctaaataagtgatcttgcagtgggtaccttttaccttttggttgagaggtcaacatgagttgagtaatcataaataaatgtttcctgagaactctttttaaacatataaagactaggagtcaaactgattgaaatgcttataaggcactatcctggctcatgaatttcaggctgatgttttatgtttttcgatattctgttctgtcttagaaattcccctgtgtgcagggaatgactcacatagttccaggcaataataagttacttaaaggggacttccctggtgctccagaggccaagactctacactcccaattcagggagcccagagcctggttcgattcccagtcagggaactagataccacatgtcacaactaaagagcagcacagccaaataaataagtaaatatttaaaaaattgagatacctaaggtatcagtgagatggatggatggcatcatcacctcaactgacatgagtttgagccaactctgggaaggacaggggaatctggcatactgcagtccatggggttgcaaagaatcagacacgactgagtgactaaacaaaaaggtatcatagagaatgtgtgaggtttggtgggtagaaagccactctatacttgaagaatcgcctctgagctaaacatcactcttttcaggcaaagcctggacaacctcttccaacttccctcacctccaaaatggaaatcacatgaaacaaatctcacaggatacatacattgctgagtaaacaagaaagtgta

SEQ ID NO: 42414 - DNA, 1420 bp, Bovine  19866880761222
  misc_feature (1)..(1): n is a, c, g, or t
nctaggcagtcttaaacctctttgacctggattctatctcaatattccaaatgcataagcaattactctaggaagtaagcattactgtaggaagtaagcaagtgaatgaatcctatttttacgagcaaaggctcaatgatccaattgtttcattccacatattaaatatttcacaaagtagtttatcaaatattatagtaaggaatcactagaaatgaaatatttagaaacagatactggaggaagtaaagcattgctattcatgcaagtatatcagcatgaaataaaatgacacaaaatactgaacagctccatatgccctgtcataatttagtattcttattttcaatataaatttctggttttggtctggtcgctgcttatttatggactatattttttaaaaactatcaactcactatttaattcccgcttctacttacccaacgatgctccagctcctcagccaagattttaattgatttttgtagtagccagttgttaataggataatttgtcaatacaataataaaacaattgtctcaatggctctcattgctcagttcaccagataacaaagttgagttttgtttcattaattgaatgcaggtgtaggatttgtgggatgaaagatataaatccctgtggaatggtggaaatctgggtcagagatcacggaaaaattagttaagcatgctgggtcaagagaggcccagacaggtgtcccagctctgtttctctgtgtcacttcctgtgttctccattgaacactggtctgttgatctccagcacacaggtcaacacatgtatttctgaatctgtagtaaattagaaaccagactaggattccttacactcacgaacatgtgactccaaacacccagacagtattaacctctcaggataaaaatatttcactgtacatttagtgttttcaaagacagtagtgagatactatttttctccttcaagatgcgtgataactgtaaaagggatgcaaataatttttctttctcaaaaaaataacgaaaaattaaacagaagacatccgtttatacccaaaaggaccctagaagggaaccttggctccaaccgttcaatatagcctctccagatctcttggatgaagttacataaacttcattcttaatgtttctctcatttctttagtttttagacctgattcaggccagagccacaccaggactgtctctttactcttgaatgtctccctcctggttaaggagatggccttatggagcagttaggaaatcacccatctctactctaactcagcagctcgaaggccaagcaaaaggaatcccaggccaacctcccctcactccctgaaaatctgctttggctcagctgcaagactggaggactgagtcatgtaattaccccatgggagacagaatat

SEQ ID NO: 42415 - DNA, 2221 bp, Bovine  19866880833123
  misc_feature (1)..(1): n is a, c, g, or t
natggagcagacgctattagccagaacttggggctctggggcttggtaaacagggcagaacatgacacagctgtgcacatacgcttctgcagctgcaggctggtgtctacagaggggactaaacatcgcatctatgcccctctccagtggctactctcagagaagagatctgttaccagcactttgcccagtggtcattctacagctactcaatgtaaacttcttatccagtctacattttcatctcagacacagctgttgagatcctgaagagcaaggctgcagatgtggcatgattcactcctaaagtatataacgtgatcacctgcaggaaaccatcccaaaaggccaggtcctggcttgagaccgtgacacatagaaccatctggtgtacacactgtgggagaagatgtggacctgtctcttgctgactggcaggccctcctctccaggtctgaccactgctctctctggtgatccagctcccactgccctctccacctctcatattttgctacttttactcgcttttgcttctactctatttaggcattctcacctttcaacatttccaaagagatcaagcccttccccgcagctatctgccaccgctgtattccactgattgaaagagcgagtcactatgtacagtggaaagaacactgattgaccttgaggagaactaggctagccctagttgttaggtgtgcgaccttgggcaagaaatagcctctctgggtttctgggtttttaatctttgaaatagaaaatagaattagatgatttgaaaaaatactttcagttctaaaataccgtaagtgaaaacgtggtcttctaaactctaaacaatggggctcttaaccttggatccttgattgaggacccaggatggctgctatggtttctaggaaccacgtgaacttgggtccagatttctgttgttttgttacctgctgtggaagagattactaattgatgtgtgctcagttgttaaatcatgtgactctttgtgaccccatacactgtagtctgccaggctcctctgtccatgggatttcccaggcaataatactgaagtgggtttccatttcctcatccaggggatcttcccgatccagggtctcccatgtctcctgccttggcaggtggattctttaccactgagccacacgggaaacccttattaattgataattgatgtgtattatctcctttattaatagaatataccaaattttatttgatcacatgaccatttagatgaacatacttgctagtctttcttgcagctggaggtgacaaagtgactaggttccacatgaccaaaggactcaaagagtgtgagcaaaagtgatctgggcagcttctggctagtcactctgtgcctgtcctccactctttcctcaggatggtgcgtaaatacattgatgctgagccagttttggccaagagctttatctcagagttgtgtgcatgcgtgctaagtcatttcagtcatgtccgactttaataccccatggactgtagcccgccaggcttctctgtccatggaattcttcaggcaagaatactggagtggattgccatgccctctccaggggatcttctgacccagacactgagccccaggtctcctgcttttcagacagattctttaccttcccctagccagggaagcctagtctttatatatttcatttccattcaatggacatccattggggccaacactaaacttttaaaatgttttatggtgatgtggccagctgcttatcctacacaagaaagcatggagaaatgcatctttgctaacagttcccaagtcctgatcgttttttttccccctatttcttttcctaagtatgtatacttggaagtatattgatatttgccttgctttttgcaacttgcacaagttattcttaatttcttagagctgtgtgcctgacagtcaaattcttaagtttccactggctttccacacaagagtccacctgttccttctctgctcgtgtctcctaacgttctgttggaacattcccagttaatgcctgaacaggaccctttgtgtggattcacgcacgtttgtgtgcacagccaatctgccagcctggaccgacagccccacaccaaagcctccacttctcagcaggaatccagcaaaccagatgtcaagtgcatatttcttgggtattttatgggatccacagagaggttctca

SEQ ID NO: 42416 - DNA, 1277 bp, Bovine  19866880839881
  misc_feature (1)..(1): n is a, c, g, or t
nagagttagaccttaaagaaggctgagcaccgcagaaattgctaaagttccaaaattttggcccctgatgcaaagagctgactcactggaattggaaaagcatcatgctggggaagattgaaggcaggaggagaagacaggggcaacagagaatgagatggttggatggcctcaccaactcaatggacatgaatttgagcaaactctaggagatggtaaagcatggggaagcctggcatgcagcaattcatgaacacacagagagtgggaacaacaatttggtttcagtggaaagtataatgttcatattttcttcttccctgaaatgaataccatgttggaccattaaatgaggaaagtgatagaaatactgccacaggagagtacttttttttccctatttacatgaaactggctaatagccagacagtctggtgtttcacttaaaacacagaggcatttactacacatagcataagccagttgcctacctgagataacccgcctccttcaagagctgtacttggaaagaagtgtatttcaagcttatttgtaaccagcctcccagggtcattcgtagagtaatgtaaggcaaggagcagcccagtgattaattatcaatccatcaaaacactattagtaatccccacctaaaaagagcaatggcttgtttaatgtgctgaatgaaaaatgttaaagcagtaaaaatgctttacaggagacttttaaagcagagatgatcacgtaaccagggtttaattctatagttcagatactaaggcaagacaaaaccaaaaacaattaaaggattaaagaagaaaaactcaaagttttcttacagaaaaacacgaagagtaaatttcctatcaagaagtgccctctcttcttttcaaatgtatgggtctagggagctcaaagaaatttgatttaaaatgacggtgacatgaatgagggaaatatttggcatctttggaatttcggcaacttaagaaagtattttgtgagatgtaagggttgttactaatcaaggcagcccaggggccactttgaccatttattcctcttgccctggtggatatgtgtttttttgttttttgttttttttttagtttttggaagctgtaatttgagaagtttcaaagcaaaaaaaagtaaaggttagtcttaaaagggatgcatttagcctaaaaataaacgagctttcataactcagcctaagtttccctctctctctttcccctgcccccttccttctctccccccacccccgactcccc

SEQ ID NO: 42417 - DNA, 1729 bp, Bovine  19866880887758
  misc_feature (1)..(1): n is a, c, g, or t
ngatctgggttctaccctggtagggcaagtagatgccacatactgcaactaagaccaggcacagacaaataaatcataaaaaataaaatatttaaataaataggtggcccttagaaccaattatttcttccatggactctgatataagcttcaacacatcttataagtgagggctttcaggaacatataaggattagaagcaagaccatgagaaagtgaaagtgttagttgctcagtcatgtctgactctttacgaccccacagactgcagcccaccaggctcctctgtccatgggattctccaggcaagaatactggagtgggtagccatttccttctgcagaggatcttcctgacccaggtagtgaacctgggtctcctacattgcaggcatattctttaccatctgagctaccaaggaagcctaagaccatgaaagtgaaagttgtgtacaactctttgtgaccccatggactatatagtccatggaattctccaggccagaatactggagtgggtagcctatcccttctccagtggatctccccaacccaggaacctaactggggtctcctgcattgcaggcagattctttaccatctgagcccccagggaagcctaagacagtgagaagaaggcaataaattattgccattggtcaagggtatctggcacctttctaacgaattcatttttactcactggaggcttcaaagctctcctgaagtttctccattgcctgtgataaggttgactcagatataaacaccttgaacatgtggcatctgagtatccacacagctctgttacacaggacggttccctctgatcacatccttcataccagggggctcaataattcccgcccagcctgcagggccgtgggctctcatgctctccacctgagagcagggaggtggagagagtgatctgaggagagcccggtgtcgaaaaatccatatcgacattttgatcataggcagcgtgggactgaaagtttttgaacaacaaaccatttgagagtgtgtaatacgcttgtgaaaatattcaaggcataattagataaataacagatcccagtgtctatttttactttgccttgatgagaagctttgcaggagagactgttggtagttaattctccttaacaacaatctgtgtaatcacaaaccccaattagccgtgcctgttctctgcgatacaaactatttccttagcgcttcacatcactactttgtaattagctttcatctacacgagctttgactaaaaaaatataaaagagtgtaagtgattgtactgccactcagtattctgagaaataatcgcctgcgatttcaatcagattaattttatcacccgtattaaggaaaattacctccctcttcactctctacagctgagggctatttcatttcctgagatgttcataaaagcataatataaagcaatctgtaattgtaaatatccttccctaataactttgagatatttccttaatacatctctacatttggagtttccgttccataaaatacagtaacaagtgctctattatgttttaagtgtgcgctgttaagccggacaactcggcgctgtccttcctgtttttacatagggttatatttaacttgcagataatgggaacaaggtttaaaagtgatggagcggaataatggcgttacagcaataatatattcttgcctttggaggaatagaactttacagc

SEQ ID NO: 42418 - DNA, 1254 bp, Bovine  19866880897377
  misc_feature (1)..(1): n is a, c, g, or t
ntttttctggttttaaattttgtgactaggagacatattggtgacatgtctcctaaaatatcaactttttcccaatgaaccatcactgcagagaagtaatccaccaggtcctgagaagtggacacagatttccagactatcttcccagtttcctgaaggagctagtaaccctctgattggctgagcatctcttctctcacatttaccttatatgattgtcttaaaaccaaatgaaacaacgtatatgaaaatggctgtgttgactctgagatgcttttcaaaagcatgttactaccaccaaggatagtaacacaggatagtaacacattagtagtaaaaggactaggacttattttttttttaagactttctgatatggattattttcaaagtctttactgaatctgttacaatactgtttctgttttacgttttggattgggggccacgaggcatgtgtgatcttagctccaagaccaaggacagatactgcaacccctgcactcaaaggcgaagtcctaactactggatcaccatggaaggatcgaggaccagtgcttaaaatgtttattagaaaaggaaaatttgacctcaggggaggtgtgctttcctgccgttcttccttagttgtatgcagtttggcccgtgtccaaaaggcgctgcagtttcagatggcacccaggacaaccaagggccaggggatgttgctggtacatgacaccggagggagggtgcgctccgctgtgtccccaccctcgggccccccaccccccagtgggctcggctcccctgccagcaccacagtgacaatatgagacagcgcatctgaagcagcagagccaaatatttgatttggatggctccgctgaagatgcctcatcacaactgtgggtgcccagattaccagcttcttgctcttggcttccgcgtgctctgcagcgagtacaaactgcacagagagctccttgcaacagggacgggaggaagcccaaatggctgatgtggagtgtcttgtttggggaagagttcactgatgaggaataagctgaggaggcaagatgctgttgtttttcctgtcaaggcacatggtaataagcacatggcaagtgtgtgtgtgtgtgtgtgtgtttttcctttctaacttagattcagaaatttctggcgatgagaaagcaattccttttcagggaagagtcaccatgacttttacccttctctccctgacacacatgggctccacatcagttagcatca

SEQ ID NO: 42419 - DNA, 1418 bp, Bovine  19866880907728
  misc_feature (1)..(1): n is a, c, g, or t
naaatgtcaatgattttcaaaaatgtcacctttcctatgtagagaatggcattttgttttctaaaaaaaaaaaagaaccaaaaataaagcatttgtattaaaatattctctgtgaagatgcctaggaatctctgttacacatggctagaaactaattgatcttcaagtgggctcattggccttacccaaatgagcaggaatatgctggaccctcaaaacatttggggtggttgtttttgacttgagtctggcagcatgaataaaaccctcccagaaggacctcattatatttagaaatctccctttttagctaagggacaaaagctggagtttattgaaggccactgaatcttcccatttctaaagggacagagaaaataagctaattttgaactcaaaacagagaccattttggtgcatcccactgaattctgttgttatgagacaggattcataaagagcataaatgcctctctctgtgcaaatacatttgagattcaggaaagtaaaagccccagatcaaatacaaagcccccatcaaatcagccctaactgcactaagaacatcaaaagcaacgtctggtcgacacatcaaaacaaaacaaaaatcaaataaaatcgtccatacccagtgagtttctgttttaatgaagtagatcatatacaccattgtgaattacacaaattctggggtaagtgcatttaaaatttgcatttaactgcaattttgatatccatacgctaatggagaagaagaaaggatggcccggtacccatctgcaaaagggaacctggagataaaaagtcaaaaccaaaaaataatacaggatgtgttttctaggtgatttacaacattacacttggtccttccaactatctcaagtgttaggtattatgatgcacccccttttttcaggtttatagaaatggggtcaactggatggaccaggaactgaaatccaggtccattaagccggagtttatgcactgaatcttgattccacaaagaaagaaagatgttcctgggagcacttgtgctaacactttacatatcgtctctcatttaatctccacattaatctttctccacgtgggtggaagttaagtatatgttgaaagaataaatataggcatgaaaagtgactgccttcaatgctgggaggacagagggaaacagcaacaaaagcagaagccaaaggtcagagccaaggtcaccaggataaacataacactatcaccacccacaggagaacatcattcctaccaaacatgggacacgtgtgagaacattcgcacctaatacttaaagggaaagatcaccccagcaggcatgaagactcaggaaacatctgggttttaaaaagatttttaaaaagctgatgaaagtttgacacaggaacctctgtccctcaaaggca

SEQ ID NO: 42420 - DNA, 2740 bp, Bovine  19866880923945
  misc_feature (1)..(1): n is a, c, g, or t
nctacccactcctgggcatccacctggagaacatcataattaaaagagacacatgcactcaaatatttattgccgatctatttacaatagtcaggacatggaagcaatctacatgtccatcaacagaggagtggatagagatgtggtacctatatacagtggaataatactcagccataaagagaatgaaattgagtcatttgtagagatgtcaatggacctagagatattatacagactgaagtaaatcagaaagaaaaaaacaaatatcatatattaatgcatatgtgtgaaatctagaaaaagggtatagctgattttatttgcaaagcagaatagagatacagatgtacagaacaaatgtatggatatgaagggggaaaggagggagggtgtgttgaattgggagattgagattgacacatatatgctgttgacactatgtataaattaggtaactaatgagaacctactgtgtagcacagggaactctactcagtgctctgctgtgacttgaaggggaaagaagacctaaagggagaggatttatgtatattgattcattttgctatacagtagaaactggcataacattttaaagcaactatactccagtagaaactaatttaaaaaaataaaataaagttcattctccatttcaatggaaatttactgagaccctactatgtgcagggcatttttatataacaagaatacagaagaaaaatccctactatcatacagtatctatctgagtgaaaaagatatatacataaacattcataattttttttgtttttttttttccagtgattatcactttaaggtgaaaaacaaagtgtaaagaaatataagaaacaaaataatgtaacacttcaagtgatgcactgaaatgttagcacgtgcagcttgggcaggcctggctgaggagatgacttttgagaacagacctgaacaaagtgaagattttactccatgggcatttgggctgtggagcttccaacagggatggcggtgcctaaggcagcagtgggcctggtgtttcagaaacaaccaagatgctggagcagccgtgcaagaggaaagcgggggagagaaggaggaactggagtgtctgcagtctgaagctgtggggtgagctcggcgttcctgtatggctgatcatttagctccgttccttggatgtgtgcacccaagttcacaccagtacagactgcaatagcttcaagtgtgccccagaacagtaagatgcacagcgtgatgaccagaggacctgcgtggacagcagtcttcaccctgaagcaggaaagagacagtcacgtgctctgaatctagagtgtcgtctcaattcctcgaacagcaacattcaaggaaatgtttgaaaatgaagaccagaatcggattttggtatctgcagacgttcacacacacagatgctcttaaataaccctcaggagaaggccagcccaactctagatgctgatacatattttctcttttagtaactgattcggttctaggaggaactgcccatgtcggtggactctgtatggatctgtgcctgggttctccgtcctgcttgactgatctgcatgtccattccttcaccaatacagtgctgccttttaaaaaaattattttatattggagtattgctgactaacaatgctgtgatagtttcaggtagacagcaaagggactcagcaatacgtatacatggatccattctcccccaaaccctcctcccatccaggctgccacataacattgagcagagttccttgtgctctacagtaggtcccttttggttatccattttaaatatagcagaatgtacattttggtcccaaactccctaactatcccttacccccacccttctccctggattctgtaagtctgtgagtctgtcttgtaaataagtttgtttatatcgtgtcttttcggattcccaatataaaggatgtcatatgatatctctcctgtgtctgacttacttcactcagtatgacaatctctaggttcctccatttgctgcaaatggcattatttcattctttgtaaagatggacacacctttttatatggagaaagactggccgggggtgaggtgtggtggcagagagagagcaaaattcagccaaggtggtctggcttctcgggagtaaaatcaggagacttgagcccacattgtctgtatctcttgcttctgatatgagcctcactacaaagaaactgcccatttattaagagatatcatataactaacagtaatatgcagaatccttgtgtttttgtgggtcccaaagggttacctccttttaattgaacattccaccttcttagtaatagactattgagaatatacgagtagacatttgaactctgcaggactatctgcaagaagccctgtcagtcgtcacgtaggtcacattttgatccaaatgttaattgacagtgtcctttaatgtgcattttggggctcaggtatagcagcgaggaaaactcattataagctcggcaagaaggcagtgtgcagacttgtgacatagcatctgatgttcgaaaggggttttcactgactccgtgcagctctgcctgaggataaaaccctgcctctgccagtgacagggaagaaggctgcagtggcctgtggaagtgccctcaggcagcggggtccctgtcacccgcaggatcacccaggcttgaaaagcacttctttctcttttctttaaggatc

SEQ ID NO: 42421 - DNA, 1249 bp, Bovine  19866880931960
  misc_feature (1)..(1): n is a, c, g, or t
nctcaaaagcatgtcaaagcccccacagctgggaaccctgggggagggggggtctccttgaaaccttgctgatcatattaaaatataatttgtatcctgggccaccgatcccatattttcatgcataagaagtctaccagcactgaagactaggcatacctagcccataccgcacaactatctatatctgtcctggtgggctcgggtcatttgaatttgataaagactgcggggggcaggctggtgcagaagggaagtcgcatcgctctgtgcagtggaccttgaattgctctcatacaggcaggccccatagggaaatgaagtgctcagatgcctttaatctgctcccctgcagcaaacacagtggcgtctgccagctcaactcaaaagtgctctcccttgcttaatattcttcaggcctctctgtctcctggcaggtttgcaaaggtttttttccctgcaaaataatgtagtgtgaaccaaaactttgggattcgaaacgggaagggaaagacaaggaaccatgtgttctcttccgggtcttctgatgcaagagagggcatgacagaggcaggcgctcagatgcgggagcatgcctgatgagaaacatccacagcgcccatttcccatgttgcgacttttttctgaccccaactcctggcacagggatgatttggagcagcagctgtgatgtgaggcaacctatgacctgccactacgtctgaagacatagcctcccaggatgtgagcagtgacacaaaactgagaccctgcaaattagccttcctcggtttatccccttgctgtctgcgaagtcaaaacagggtttaacacatgctcttgccttgtatgttttaacccttccatcaagacagaagaccttttaggacatgaagatgtcatctgttgttatgaagaaggcttgcacgtgtgctaagttgcttcagtcgtgtccaactctttgtgaccccatggatcaccgtagcctgccaggttcctctgtccatgagattctccaggcaagaatactggagtgggttgccctgcccccctccaggggatcttcccaacacagggatcgaacctgtgtctcctgcattggcaggcgggttctttaccattgagctacctgggaagcctttacaccacattagggtctacagttaacatctgaccctgacaaaggaagctctgatttatgatatctaaagatgtaagttatagtcgctgggggaaggatgaggggaag

SEQ ID NO: 42422 - DNA, 1579 bp, Bovine  19866881068310
  misc_feature (1)..(1): n is a, c, g, or t
naaaatagaagctgtctgcgcctgtctgagtaaagaagagcagtgggtattgtctcccaaacatgatgtgtcttctgaatccaatggactggagagctttgagagcagcctcgggctaaagctgagcagctcccattccagaataagcagactgttttttacaaacctgagttaggatagattcagaggttaatttgtcttcaaaatcattgcattaaggtcctgtctatggggtgctgaaaatactggaagtgggtagattttatcagtaaaatatgaaatgagtgttcgatgtcctatagacaacctatcttggggattctctggtggtaccaatggtaaagagtacacctgccaaggcaggagacacaagagacgggttagatccctgggtcaaaaagatttccaggagaagggtatggcaactaactccagttttcttgcttggaaaatcctgtggacagaggaacctggggggctacagtccatagctgggctacagtccatagggtcattggagatgactgaggggacttggcacaagcacccacataggatctcagtgaccatgaagagccccaacgctgtgtcactgatcagctcccagcatccagagttcagccctgactccctgtaactgtgagaccagccaagtccctggtcctcttgagagcttacctctttttcctctagaaagatagcaaattaagtcattagtaagaccacttcctcgcctaaaattctgtgattcttctgtcaaatcgcaaattacagtgagtgaagactcaagatatcatttctggaaggttgctgacctctagtgtcagcacagatctggaaaggaaattcagacctcagtgttaatttcctgttccccggtggctcagaggtaaagaatctgcctgccaatgcaggggacctgtgtttgatccctgggtcaggaagatcccctggagaaggaaatggcaacccactccagtaatcttgcctgggaaatcccatggaccaaggatcctggagggctacagtcctcggggttgcaaagagtcagacgcgacttagtgacggagcatgctgcatgtgttaatttcacattcctatcaagacttccccaccccttttccagtttccttatggaggagaagaaaatgtaaaatacttcaaattaaagttctattaactaaagcttcatttacagaataaatatttctgctgacatttgacagattatatcaattttgaacctcaaattttaataaggtattaccaagcccaagaataaacaagctaatcaggcccactttcctatttcctcctttgtattaaatgataagtgaatttaaagctatgctttgtcttattaatatctgctaaatatggatgatatactgaatatatatttattcttaaactcatttggaggcaaatatttacaaggcttttctattataatctgattttaatatctcaactgaaactgatttatggcatgtgacttcaaatgtggtgttagttaaagaggccaagaattaattagctgattctatcaaggggttttttgaaactgatttttaaaggg

SEQ ID NO: 42423 - DNA, 1397 bp, Bovine  19866881092417
  misc_feature (1)..(1): n is a, c, g, or t
ngcctcagatgctgctgctggtaacacttctcttgccatggcagaatatccaagcacctagatgccgccccaataaattaatgctaaacctgagaagattgaaagtcctaagcagtgtggatggacctagagactgtcacacagagtgaagtcagaaagagaaaaataaatactgtatgttaatgctctacgtggaatctggaaaaaatggtatagatcttatttgcaaagcagaattagagatacagacagagaacaaacgtatggacaacaaagggttggggaaagggtggtggtgagatgaactgggagactgggattgacatatgcacactcttgatactatcaaatagatgactaatgagaacctaccgtacagcagagggaactccattggatgctctgtggtggcctaaatgggaaggaaatccaaaatggaggggatatatgtatagctgattcgctttgctgtacagcaataactaacacaacattgtaaagcaactatattccaataaaaattaattttagaaaaggaaataaatcatgaacaacaacagcaacaaaaagccctaagcaggaatgtataaatacaccagcatgagtcagctgactgtactttaccttccaaatgtggggagagaacgcccctctccgcacctcccactgcagagtactcttctaatctggaaggtggttggattctaggcaaccaaagggcaattcatttcctgcagcaattatacataagcaaatatccaattaggaatatccacaaggtattttctgacaaaaactgacacactgagagaacttcttccagattagcaaaaaagcattaaaatattttgagtgaaatacaataaactccaacagcaaaatggtgtctatgaaaattggatggagacgatgaatagttattaataaagggtatcttacactgaaatattgaagcatatagtctcagatgaggtgactttatatttgtggatttagatgaaatgtgtaagtaggtcactctagttaaagtaataaaacttttttttgaagctttggatggaataagagagacagaaaagtattgtgctgaacccagactattctggtctttttgatgctcacatggggtcttgagaatgaataaccaagatattacaaaatattctgatgttgaattattgtttgattttcttttgagggacaaaggaacagagcatagctctgtaggtgatggcagagttttccttgaagaaaatcaaatttcccctgtcagtcattctgggaggccaaggggaggggggcccttgacttcagggagggaaacccttttatctctaagggtttggggtaattggcccagaaactctagtatgggaatcacccatagttctttttta

SEQ ID NO: 42424 - DNA, 1099 bp, Bovine  19866881277796
  misc_feature (1)..(1): n is a, c, g, or t
ncccaccaggctcccgtgtccctgggattctccaggcaagaacactggagtgggttgccattgccttctctgcttctttccatgacaaaaaagtaaaaaactggtacagtttcaaatagacacaatttgtcatagattaaaatgtatttatattattgccaaatggattatcattgatgcagaagtgattgagtaaagtaatttagaaatagtctgcctattaaaataaatctgagaactttgtgacctattgttttattcatcaaaaaaaatcacatgtaacgtgaactaaataaatcaggaattttaaaaggaagtaaatattcccagctaagtccaccactctttaagtatcaatcaccaaaatatttcttactacattcactgctaggattatatttattttctaagtgaatagggttatagggcacatggtcagttttaggatctgaaataccaggaccaatagcatgtgcagcgtgtttctttgagtcctaagattttctgcattctttgctaaccaccccctacagccttttcacaaacgcatggtctgtagctattctacagcgttttcactgatgtcaagaatttgggggggaaggatattcacttttatttagtaactatcataagcaaacagttttctgtggtaagcagacatgataatgatctagttggactagtttttcaatagtaaagaaactcatgcatccttactatctcaaccaactccttaccaaagaatttaaggtaatattttaaaaacagttgtgtcttttttatatgcactgtgccctttctcaatgttataaaatatccccatgttgactcactgtacattgattttaataggcattctccacagagcaatatgaatatcattggaaactgtataatacaattttctacccctgaaatgctatagaaaactgcacattttatactgacacgtgccccatcaataatagagtttttatatcttatttgtagttattgatctcaacagcgtaatgaaaaattgattgcgacggagtgcacaatttcttaagtataaattttaatgtcaaattatttttatctatgcttcccaattata

SEQ ID NO: 42425 - DNA, 1171 bp, Bovine  19866881372146
  misc_feature (1)..(1): n is a, c, g, or t
nccctggtgacccagtggttaagactctgcacttccaaagcagagggctcaggtttgatctctggtcagggaactaatattcaagtagtgtggccagaaaaagaaaatttaagaaaaaaaaattttaagtaagaaataaatgtaaggttatgctaatatcaccctacagcagttgggaattaatggtgagatggaaagcaatgcctcagatgtacgtctgacttttgtgttttaattaatttccccctggtccctaaatcctggccactaaaaacatctcccacttttcttcatggattcatttgcacagtaattaaaaatttttgagtgtgttgaaaatttcaggagaaaatatttcataaaatgtaaatatctcttgctatgaaatggccttgagctgttgcgtaagtcactcagttgtgtccaactctttgtgacctcaaggaccatagcctgccaggctcctctgtccgtggcgatttcccaggcaagaatactggagtggccttttttcaggagatcttcctggcccagggatcaaacctgagtctcctgccttgcaggcagattctttacccactgagcccctgactaccaccatttactatgttcctatcttgatgttctccctggaagcattatcattctcatgattgccatggagcaaggaattcatgtgtatgtgaacttccccagccctgatgggagagttccttaacttcaagagaaagtgaagtatttaaatgggatcctggcaggtggaagagccatgctctctgaggagtagggttacacgggcaacttcaacgaaatctatgaggtattctttctctgaaagagattcagagaattggagagggagaaaatgggagtgagcgattaaatgaatttgaggagcatttttatctgagagacaagtgtgaaaggaggaataataaatgactccctgcctttcccgaaaaccactggctatccattgtcttctctggaagccatctgatagcccatgctctccaccaatgggcatagaaaagtggacaaaaaaaaaaaaaaaaaaaactggggtcagctaagtagagagaagaggcttagccaaaacaaaccgaaaggcttcgcttcactgaggtttgattaatggcatattagacagcgtcctccgtggaagacaaga

SEQ ID NO: 42426 - DNA, 877 bp, Bovine  19866881374935
  misc_feature (1)..(1): n is a, c, g, or t
nattattattattatttgaatcctctcaataatacattttgttgaagaagaaaaaataacatggatcattattatttcaaacctggaaattaaccctttcttatagccacctattcctaatgtgataggaatgttccctggtaccccaaagtttactaattatccccagaaggctctctggtgagggaattcagccagactacaccagaggaatgtgaaccatcttcttcaggattgtggagaatgtaatttgatttctccatactccaatgttttctataatttgtattttatccttttgcttaaggtttcaaagccttacaaacccaataacttagggataagagaagacagaaaaataaatgatattgtttctagggtattaaatataagcctggctatcggagctgcatggcacttgcgaatcgtaatcaggtactttgatttaacactgttttgttttataataaggtggttgccatatgttggaaaaccgatctgcctatatcggagaggctccatacctctgtaacaaatcccaaaactcattttataatacctcaaatctacccattgtaatgtagctccacaagtgtaaatccacagcaatcttggctcatgaatgtggctgcaagattacctatattatcattgaaagcaaaggggaagcagtgaattagaatgcagtggatctcacaaaaataactttcagtaaatcttcttttaatgcatagtttacaattttcttttgctcagcatgaaactgattaaggtccccctcctaaagaatactttccccttcacatagatgcattgtttaatatagttacaaccccaatacctgacaaatcagaatttcaacaccacaaatgtgatg

SEQ ID NO: 42427 - DNA, 1047 bp, Bovine  19866881544824
  misc_feature (1)..(1): n is a, c, g, or t
ncacatcattccttggactccaggtttccctgtcggccttcttcttctctcccgtctttctgcctcttctgtttgtttcatagatgatcaccagggattttcgtggtgactaaaagaagcaataggggaaggtacgtgtgcttcatcttcctggaagcagaagttcactttatctagttacattccaaaggcacagctgaccggattcactgatggcctggtgtgaggtgtgagggaaagagcagagtgaatgaggacactttcttagcaactggagggatgaagctgttatttttagtgatggggaagggtgagatagattgctaagaggaagcttgggtagtgtttggacatgttgaattcaggacacctagtggagatattatgtaggctttggggttccagagtttggagttaaaagtggccctttgggcagaaagtgtgcatttgggagacattgcttgggggtgtatttaaaccatgaagaaaaataagaccatttggagagtgagagtgatacgcttggccaagtgctgcctgaaagtagagtgaggtgtggatggaggtctgacccttgaattgagcaggctgtccacaacaacttgacctcgtgttttgcaatctagatttatttcttctcaggctcacaacccttatatcccctttaacacatacatcacattttgtgtaatctctcttttctttcttttacctttaaatgaaagcatatgaatgatacatgtaagtcttgcttgataaattgcagtgctgacatgagggattaattagattcagtgagtttatcaattattgcagctgttaattgctcaaagacaccatcatcattgcttcaaagttgttcactgatatccatatgttttgtttctgcgtattaatacctactaatctactgacaaatatataagaagaaaaatataaaaatctttactatcacaacaaaatgacttgttccatttcctgtgacaagctcctattacgtgcagtcattgaacaaacccacctactttattttacaaatactgcctt

SEQ ID NO: 42428 - DNA, 936 bp, Bovine  19866881572258
  misc_feature (1)..(1): n is a, c, g, or t
nacaaacgtagcagttttctgaaattaaaaacacgcacatgtgaatgagctggctcaaggattaagttggagtgggggcggaaatccattcaggattttcccagtgagtttacgcttccaaccaatcaagccacgagagtgcacaatcccctttgctactgcagtgtggggggagacgggcatgaaaaggatgctccatggctcatcctgcagacctgccagagagaaggggctcagcccagccttgcctttggggactggagggaaagatgaatgctttcttcagactcttaggtaaaacccagcccagataacctgctgcatgatgtcctgctctgttatttgcaacttacattgagttaaggctgaagaataataacaaactgtgatttctgacggctgattagcctgatcttatctgagtctagccacgatgtcctttctgctcacggctttctcagacttctggtgctatcgaatgaaagtaatgtgtttctaaattagaccagcttccttagtagtaacaccgcttaatggctaactcattaccaaggtcgaaaactaattatcttaccagtgtgcttttttttttttaaggatctcaaactctaaattgtttattttggctttggttttagtttttccctcctctttaagtctctccctgatagccatcatgactcagaggctactggcaaaatgtggagactactcccccctgccttttaattgaggattatgataaaagggggggtctgatagacatgcagtttctaaatcgaaagagacactttctgattgatgccctcaataaataccacatgaaattctatgaagctgagggctctcaagttataaaaacaagttggctttggtcttgggagaatgagatgtttttgcatagcttaagaataaaagcatgttactctgacaggc

SEQ ID NO: 42429 - DNA, 2790 bp, Bovine  19866881612474
  misc_feature (1)..(1): n is a, c, g, or t
naaatagaatagctccttagaaatacagttgcattctttcaactgtatttgctatattgttgttaatctttgaaaatcaattcactgaaaaagctagcctttatcttatttcatccaacaatgaaagaactgtttataccttctgacttactgtgggttgaaattattagtcttatcaaaattactcctgtgataaatcaaagtatggcacttaaacaagtcaagattatggagtatatcataaaaatttgagatcacagaagacaggccaatagtaaattggcatatgttaaaggaacaaaggtatgatgaaatggcattttgagagaaatatttcatagagtttctgattgtcatttgggggaggaaaataagcatgcgatctgcggatgaaaatgatctaggctttggtaaagtgaagtaagtcagactttgcaagaggaagagtttgccaagacttagagaaggaaaaaatattttactccttaaagggtatatgatgaaatcatcaagatttcaaacaacattaaagttatttcttgtggtttcttcaaatgctaaaaataaactttaatcattaacttgtatggtctatcatctacatcttttccctgaaagtagaatatagaagaaattttgcattagttagaaccaatcatagttagatctaaatttattagatttttaaacaacaactttgtgtgtgtgtgtgtgtgtgccggtcattatgttaggaactagagaatactgttgtgaaaatgaatgaaatccaatgatttcaactgtaggtggtgttaagggcattctctccactggattaggtcatgagttagatgttttagatgaatccactttccaggtctcctgtgctattattccatatgagacttttaaggaggttcctccctattcaataattctctgagtttgttgatctgtagttttattttgcttgtgtaccccccacagcctgtatttctcttctactgggaacaagtcttcaggcagcctctcaataacaaatagctctgtcttgccttccttcccagccaatcagcccctgtggaagaactgcacccacgcttacctgtcgccataccccttcctgagaggcgagcacaactccacctcctacgactctgcagtcagtaagtactcagtcctcagggcgcctccagaagggtggtctttctgaaacactccccccacagcagctttgtgggcaatcaaaagataatttataatttcaatgtgtgtttttttaatatcagtcatgtataaaataataaataagatgtcatttttatttatttatctttgatgtggactttttttgtttgttttacaagctttattgaatttgttgcattagtgcttctgttgtatgtttgtttggccatggggcgtgtgtgatcttagttccccgaccagggattgaacctgcaccccctgcattgaaaggtgaagtattctccactggactgccagggaattcctaagatgtcatttttaaaataccatttataatcttaataaaatgcaactgtggtccaaaatcaaagcccatttgcttgttgcttatcatgataattttttacaagtgtgtttgttttctgatatgaaaataatggtattcatcaggaggatgggcttcccgggtagctcaaatggtaaagaatctgcctgcaatgcaggagacccagggttccagtccctgggttgggaagatctgctggagaaggaaatggctacccactccagtattcttgcctggagaaatccataaatagaggatacagtccatgggatcccaaagagtcacacatgactcagtgactaccactttcactttgggtagtttttaaaatttcaaaataaatttcctgaccctgggatcagctgttttccagttggttaataacccactgtaatattaatatgaaagatcaaggcagcattaaggcttcacagtacattcagtggaaatggcataagaatatcctagagactggagtgccaatagaaaggaaggtactttagaactgaacagtcctggcctgcatcttgtccttgctacatactagctgtggcaagtcatttaacctctgaacttagctatcctcatgtatagaatggatagaataaaaaaatagaataattagttatcctcaatattctgccttaaggaatttctgtgagaaggaaaatgtagcatttagccctatatccagcaatatagtaggcactcaataaattgtggtgagcattattattattaatagtaatatcaccctcattctttaaaactcttgattaccagaaataggggcaagtcctccatatatgccagttcttacctgttagcttctcggccagcatgttgagctgatctgagttcaggccacgaccaacgtatgatgaaaactgccagctcatcacttccaggagttgactcaaagtggcagatggaggattattaaagaaaaccaagttctgaaacagagttgtattgatgattgtatgtattaatcacactgaatacattgcagctcaatatataggattcctgattaaactcttcaggttaaccctaagttaacaatacagatctattgtctcatctctgttgtgcttttaaattaagattgattttgtcttttcctaaagagttcctggttctttgagtctaatgtaatatatggttctatcttatacctgaagaatcattgggcagctctttaactttccctggactatagactatcagtcaactcatacaagtacttaaca

SEQ ID NO: 42430 - DNA, 3021 bp, Bovine  19866880457728
  misc_feature (1)..(1): n is a, c, g, or t
nctctgcttttcatatgctatctaggttggtcatcactttctttccaggagtaagcgtcttttaatttcatggctgcagtcaccatctgcagtgattttggagcccaaaaaaataaagtctgacactgtttccactgtttccccatctatttcccatgaagtgatgggaccggatgccatgatattcgttttctgaatgttgagctttaatccaactttttcactctccactttcactttcatcaagaggctttttagttcctcttcactttctgccataagggtggtgtcatctgtatatctgaggttattgatatttctcctggcaatcttgattccagcttgtgtttcttccagtccagcatttctcatgatgtactctgcatataagttaaataagttaatctccttacttgtgcttgaaactcacctcgatcagagcagactgggtatgattgtaagtctcagctgcctttatgattcttgtgcatgggcaggataaacgctaacaaaatgtgggcagagagcaaacagaaggagggagaaacagcattctgatcatgtccaaagagaataagaccgcttagccctgagcgatgtcgggttgttcaggtagactcacttcagggcacctgacgtctgtcctgacagagacagctttgaatggctcctgcctctctggattgtccctgagaccctctcaaagctggggtgttggcgtaccaagcttgtgcagaattgaggccatgccgtgtggtgttgagcatgagataatccccagtgtaaaggcagtttgcacagcaagggaatttcttgctactcatcttctctgtgccaggcactggctaaaacgcttcagacaaatcacctcatttgattcttactgtatcattgccaggtggcgctagtggtaaagaacccgcttgctaatgcaggagacataagagacttggattcaatccctgggtcaggaaaatcgcctggagaaggaaatggcaacccactccagtattcttgcctggagaatcccatggacagaggagcctgacgggctgcagtccatggggtcatgaagagtgggacacgactgaagcgacttagcacgcacgcgtgtgtcattgccagtaggacgtcctttcagtcatccttgtgttattattcccattttcctaatgagaaaaccaaaacgcagagaagtggagaaacgtgccccgtgagataagatttgaatcatggaccgtccaacttcaagtccataccttttctaccgtatcgttctttttacaaaagatgacacattttttgaaataaaatgaatagttgctcttgttgatctctaagcccatcttgttgaatagctgaaaaggctcccattcccataatttggaatttttccccagagactccccgtgggagttaattcatttgatggatggccctctgcacccctgtgtactcatgtgtgcctgctgctaaatgctgctgtcatttagtaggaaaaatacaatcctgtgtcctaaatgtccttgtcagtagccaagacagagcctgacattagatcaccctctttgattttccacttgtgggctgaaccatcgttacccaggacattgctgtgatctgaacaggaagactgctccattggggccactcaggatggtgaaatgaggttggtgatcataatttgcttcctaaatttgcagcctacttggctgcccatacagtgctcttcagaggatgttaaagagcctgtatcaaagaacaggaatgcattctattaaagtcgtatgtgagtcctggcagttaaaagacagaaaggttaatgggggtaggatggggggcctggggtgcaaggacagggcttggctgcagcccgccagccttcacggtggagcgtgagcagttctgataggattctcacggggtcagcactggagtgctcagctagagagtttttcctctccgacatggtggcagaggtcagccactcccagaggactgtcagcatatccatacacagctcgcagaagtgcaagcacagccttcccagggtgagggagaggtcagagaaatccatttatatgcctcagaaatgtcaccgaggatggcagaggctctgaagagcatttctttatgaggaaatgcggtcatgtcaggcaggcgggactagaggcagattccagtccagaacccaagggtttggacccaatccactgcccttctctctgttccaaagagtaagtcacaggtgtaggtgaagaaagggctctgaaatgggaaaaaaaaaaagcaaacagggggggtctgtggtcaaattaatttgagaaacagcagattaaatgaggtaccacaggacagcccagagcctctacagttcacttcgttctgttgtaacataacgagtgcattggtctatattctggtgcttctgaatgtgcagtaaatgttcgaatcagtgtcagcaacagggtgaggtaagtgacgtgtttaaggtgcagggtttaagaagacgctcattctcaggctcctacaggtgagccccgggagcaagcatgcccagagcctccctcgcctcaccctcctccacccaccacccagcacccagtgggggtgtggatgtgctgaggctcccccgcccacacgaaatgctgggactcagtcttcccagaggtctgctcatctcatgacaacttgagtgagtgcttaaaatagcccaccaaggttaagtgttaacttagaccctttcattgactctttttttcattatttattttatttatttattttggattgagctgggtctttgttgctccacacaggctttctctagcagcgagcagggggctcctctccgtggtggtgcacgggctctagagcgtaggatcagtagtgaggcacaggcttagttgcctctcagcatgtagagtcttcccagaccaaggattgaatccatgtcccctgcactgacaggcagattcctatccactgtatcaccagggaggtccctttctttgactctta

SEQ ID NO: 42431 - DNA, 1700 bp, Bovine  19866880470177
  misc_feature (1)..(1): n is a, c, g, or t
nttttttgtttaaatttaaaattatttagagccctctcagttttttataaacttcaaaattctcagttaatctaagacattattctgtagcctggattcctattttccttaaattttctgttcagatgagaaagcaatgaaattcattcagctcgaacgactgtatcacgagcaattgctcgcaaatctttctgccattcaagaacagtggggtgagtacaaactagagtgcagaattatcaataatctaacaagttgctatctagaaagttaacatatttgacctggttttctaggtcaggaagtagatgtttctagtcaagttagtgttgcaaagaaagtagcatttttaccgcaagtttacctcattttaagaaagtttttgtctttgtattttgtttttcatacaagtgccaagaaaagaacacttgcaactttttcatttcttctgatgtccttggctgatttagtctctgggatatatgcttagatttaaaaacaatcacttagctatttctgtgttaactttgggctgaaaagataattttgcatgataatctttatcagtagagccagttaagtattttcccttctaaacgtgttttgtaatagctagtgactaacaaatattttaaatttagaaacaaaatggaaaactgtacaaccacatacagttacacctttgaggaattcagaaaaaggatttaatggtgaagattttgaacggcttgctaaattttgtgcaacacatcaagagtaagtacttgactgtttacaatgaattggaatagaatattggagaagcattgtaatactgaatatttaaaatgcagaattcacttatttgttttgttaatgctaactggagaaattaaaattaataaaatgatttggttcctttctcagattttatctgtttcttacacaaaacttagcaaaaggtctgttttacaaaattcaaagcaccttctaatcagaaattttttaatgtaacttctaatttcagttaatttttgcttaagagggtaggtgattccgatggaaaaatttgtgttaggatttttattacaattgttttccagtgtttctatgtctgtctctgtatgttgtagtaaaaacacacttttaagagtagcctgatactggaatgcaaatgcatttaatcagaataccagataattttaaattatttgatttgtatcaaagagttggatttttaaaactgaacatagtaataataaagcacttaagtatatatattttaattattatttgaagactcagaattataaaggtgaggggatatgataattattttaaactagtgcagatttctggggatgtacaattttcttgtgttagtttgaacttttaaaacagtctttttatggattctgcattatgacctaattttaatatgttaaataggttaacttttggctttgtaaaacttttaaataatggaatattaaagatagataaggggagaattgttttcttactttcaaaacattcaatatagatacttttctgctcttcccagggaactaataattgtttaatctgttacaaatgttttaattatttaaaaataaagaattattgaatctaatatagacgtgactctttttcttttttttcctctttttaaatataaggcaacttgccaacacataatggttttttaatttttatcacag

SEQ ID NO: 42432 - DNA, 1069 bp, Bovine  19866880547777
  misc_feature (1)..(1): n is a, c, g, or t
ntgcatttctaagtctgtgcatggatgtcattcttctcatcttgggggtttgattgaagagaggtaatggattggagaagttgaggaaaaggggacatctttggaaatgcctctgaggaaagggggaacaagctgacttggttctcgtagaacctgcaggcagggttgagacccagcttgagatttgcagtaagaggagtcttctgactgggcggaaagaagaatgtagcatcagcttcatccacaagttggggagatcagatacgaaaaatgtaaaggtcacttaaatgtaaatgacaaaatgcaatttttttagtttataggagaaaaaatggatttataaggcagggtttcaagaactttggaatttataaaaagacttgtacaaatcagtggtttttttttaaattaaaattcttcaaataattaaagtacattgttgaagatactaataaaaagaaaaaaaatcacccataagctcaccatctaaaaatagcaatcacaaatactttgaagtgcctatttccagaatttctcgtatgtatcaatagaaatcactaaaaaataatttttaataaatctaaaaggcctgaaggtgaatgatgtgagagagattactgtacttgggctgacatgtcttggcttgcaatgtggcagtgttagagcaactgttactttcataaacaggctccatttctgggtttcctctgaacattgtcatcatcagtttgctggtatctccttctttaccaaggtcagcaggccacaacagctggtaccaccacattcctgattgtctaattaaatatttcacataaagcgcatataccatctgcttcggttacagatatagtgatccaaataataaactgaattgcttgtgtgtgcttcagctgatctggagatgaacccgcatttttgacatagtgggaaaatgctgggcttgcactggtttaaaaaatgctcccgcttctgaccccctttagcagggctgactgtttgtcattagggattagtgattagtgatttttgcttatgtgttcatgttctcacctggtgtccctcatta

SEQ ID NO: 42433 - DNA, 1735 bp, Bovine  19866880641462
  misc_feature (1)..(1): n is a, c, g, or t
naagctcaagcccgtccccatcaagctgattttcattttcatctgatgcagaaggcaagcatgttactttactttccacgccgtcaccaggatgacatccatcttgtggttctatctgcagattatatgcaggagtttcgctgtcatccattagagcatcttttgttgaaccgtttaagtttcattaaagtccttcaatgtctacaatgacaaaaagaaaaatctagtttatttttttgaactctggattttcagtgatctttgattttcctcttctcctggactgttttactgcaaatatggaagagacagaaatgacaaaggctcactcctactatatctacttttctcacaaccctaccccacctcacctggttcctgcttgaatacaatggctctaaatcctgggtgcatgtttattacctgtggagcctgtcaaatttctattgtagacctatgaaatcaaaatttctgaggactaagcctaactattgatgtattttttgaagttctcaagatattctaatggtgcaacatgctggaaccacctccttgatgaaagaaattattggttaagtaaggttgtctgctaaaaccaatcattcatcttatccctgcacacttaagagacaagtgaaagttaagtgtaagtccttgtgtaagtccttatatggccaagcagcagcaatatttacaaatgaaaacatttaagaacagttttaaaataaaatttttaaaaagtatatgggggaaaattcaggtagcatatattctcattacatactttactttctaaaaataagcgctgaaaagttctttagaattgtcagcaaatttcttttattcagtttaaaaaaagagagaaccatgattaactctaggctacttagtttagacttggaaaaaatgtaaatctaccccaagaatccttgtaacattttaaagacatacaaaacagactttaagccctgtatcagtcatgtttttttcccttcttctcatccaaaagtatatcatattttaagaaaaattatgccagccagatttaggtattttatgcttgccaagttttgctttgggtttgaatcaaatataattcagcaattttgagaaaaacattgtggtaagaattttgtaaattcttcaaattaataaacagaaaagctatttgctctttagaaacagtaaatatacacagtaaataaacatcatatttaattttttttgaaaaacagaaaaacaaagtataaaacaaaacatgagctctacactgactgtatcacatgctttcaattatcttacaactggaatattttatctgattcagaataaatgtactgcttaccaaatataaaaaatatctaaatctggctggtatcattttccttaaaatatatactatatttcttcattaacagatacataatataaaaagtaaaatgatttaacttgactaagaataacttagtttagacctaaaatgaattcaaactagagtataatttttaattgaaaagtgattaataaagtattttcagatctctatcatgagaaaatccaaattctaataagagcttaaaagtgcatgtggctaatatggtgtcctatgatggatgaagagataagcaaaatgcgatgtatttatacagtagaatgttattcaaccataaaaaggaataaaattctgatacatgccacatcaggagaaccttaaaaatagtaagccgagcaaaag

SEQ ID NO: 42434 - DNA, 2143 bp, Bovine  19866880657223
  misc_feature (1)..(1): n is a, c, g, or t
ngaagaggactggtctgggaacagagcaccccaccgtgacagcgatccactaagcatcagttctgcagtttggctcttcaaccatttaatgagacgtctggtcactctagcatctagcataaatctcttggttacttttttttaaatcaaatctctttctgaagtccacatacaaactttaccaaagaaagccatgactctgcggactcacccgctcttaaggaacccctgcagcatcctggtgatcacagcttcctttccattcctttggtcaccagcttaaggtcaccagtaaactgctaacaacaaacaaaaacccactggactatagattttatgaattacttatttcacctttaaaaaataggaacatttgtctaactgcctctcctgctcttttacaactttttaaagaacactgtactttggaaacctcatttatagattttcttagtgcctgggatataatttatctaatgatgttttgcaatcttttttttttaatctaccttagtctctttctccttaccttgtggtttccttttgtcacatttttgctcaagctaattccactactggaagtggctccctctcagcctctgcctatataaaccttgtccctgatttgggctacttttcacacagtataacatcggtggagctttcccagaggacctccatcataaacggtctctccttactctaaaatgtgacccactcacagtccttactacttatgccaagaaaatgtactgtgcagcatggctgactaccactgtagtcatggctgactacagtcattaaattataaggatttaaagttatacattatagagatggaggtcatgggaggaagggaatccagaaatctgttaccgtgtacataagtaaagagagtactccatactatcctactaatcctagctataaattttgattttcaaaaattgaccttaccacaatcttccctcaccatcactgaaattgttggctggggacagggatgcagcctgtgattgtggaacagagtgaagctctctggctcacggagaggtcaaaccctggacttgaattcattaatgccaggctccaaccagtaaggaagcaatcctataaacagctcagtccgtaggtaaaaggatactccaatgtgccttcaggtcttcaatttttttcagggattcctggacttccttccatacctgctcatcaccagtcagcatatcagcatcctgttcaggccacatgaaaagaacagaggaagacaaattcctcgattaaaaaaatgggcaagaatagacatttctccaaagatgatattcaaatgaccaatgagcacatgaaaagatgctcgacattattagccaatggggaaatgcaaatcaaaaccataaggagatatcactttgtacctactaggatggttataataaaaaagataataaaatgttggtaaggttgtggagaaattggaatcctcatacattactggtaggaaagtaaaatagtgtagccactttggaaaacagtctggcagttactctaaaagttaaacagagttattatataacaattccactccttccatatatgtccaagagaaatgaaaatatatgttcatacaaaacttatgcataaatgttcaccactacatcattcatagtaacaaacaaagtggaaacaatccaaataccattaaccgatgaatgggtaaatcaaatgtggcctagttacacaatgcaatgctggttgacaataaaaagaactgacgtacaacatgtacagcatagataaacatgaagaacatgatgctaagtgaaagaattcactgacaaccacatattatatgatttcaccaatatgaaatgctcagaacagataaatccatacagttaagtagatcagcaaaaggctagggcaggagggtggtaagtacacagaactgaggagggactgctaatgattttttaggggtgatgaaaatgtttaaaagcaatcctggcaatagttttaatcattttctgatgtgatgaaaagctacaaatcgctacacaaaaagctatcaaattgtacactgtaactgaattgtatcctacatgaattatgtctcagtaaagtctacatacattcataaatgtatgta

SEQ ID NO: 42435 - DNA, 1822 bp, Bovine  19866880675499
  misc_feature (1)..(1): n is a, c, g, or t
ntgaaattcccttgaaaagttacaatagtgtaaatctcagtgatttattgtacaactgattatactagtcatattaggacccaggatatggggctccagaaatactatagatttttctgtggcatcaggcatgagttctgggaagcaacatagggtgagggcaaagcacacactttggttcagatctcggccagaattcagaccccaccacttactgagtgaccttcagttcagttcagttgctcagtcgtgtctgactctgcgaccccatgaattgcagcacgccaggcctccctgtccatccccgactcctggagttcactcaaactcacatccatcgagtcggtgatgccatccagccatctcatcctctgtcatccccttttcctcccgcccccaatccctcccaggatcagagttttttccaatgagtcaactctttgcatgagatggccaaagtattggagtttcagcctcagcatcattctctccaaagaacacccaggaccgatctcctccagaacttattcaatttcacaagtcggtatcattcctgtctgtaaaatgggaatgctaacatccacttcactggattgctgtgaggcttcagtaaaaaacaagcgtgtaaaatggccagcacagtgctgacatttagaaagtgctaagtatatactaatttttttcagctgccctttctgaagagccccaacagagaaagaacaattttcattttcagtcgagtatccatagtaagtgtcctctgtcttgtttgataaaaacacaaaggtgagagagaagaaaagccctttcaggatcctgatacctgccctccagttttcaactgagagtcaacctattaatgagcactagggtgaaaatggaattttgccaggcaaggtacctgggagagttcataacacacttgactttaattcatgtgcactataatcctgtgggttaaagggccataaaagttgttctggttttgcttacacttcaaaggaagcaatttaatggccatgaattacagtttcccgattacactgtaactatgaaacgcaactgttctggtatgatttccagtctggctcctttaccaaaggaacttcaaggaaagaatttaaacagaataacctttccaggcgttcatccagcttcctcatgtaggagactctatcttgggagcccaagaatacatgtgcacacaaagcattatgtggggtttaggactagagtatggtcagccatagagttgagttggggacaacccaggaggagaaggggatgacaggggatgagatggttgcatggcatcactgactcaatagacatgagttggagtgaactccgggagatggtgaaagccagggaagcctggcatgcttcagtccatggggtcacaaagagtcagacacaacttagttactgaacaatatgaaatgaggagcccctagacactgttccctagggagacccatgtgatgacagatgttatcagatataaacaaatggagtaacaatgacaacattttaaagggaggagggtcctattaagaatgtaagcaaagaaagatttcacaaacgggggctcttcctttcttttcaatcattcaccagtaaggttaaggcaagcctaagagatccccactgtcctgagactcagcagacaaactataaatctttgccacagcagcaaacaaatgcttacagcaggaaagtgatcacatgtgggggattgaagactacacttggaaatggatttaaaccctggtttatcaactgactagctgtctgaccttggacaacgtccctgtacactggt

SEQ ID NO: 42436 - DNA, 911 bp, Bovine  19866880782383
  misc_feature (1)..(1): n is a, c, g, or t
ngatccttaactcctgatattcctcatgcctggcctagggattcctttaacctttttatggtcaagtcatatacattgaacctgacgttcagaaccacatcttgcccgtgctttttcttccctcgtccacagtgattaatattgttcccccaggcagactacctttggttattctaggtgggcagcatgctgagtctggcctaccctcgagaccctcatcttttgcccaggctcccatctaggataccctcctcttccatatctgtgggcctgcatcctcagagtcaaccaaccacagatcaaaaatattcagggggaaaaaaaaaaacaattccagaaagttccaaaaagcaaaacttatttactgtgggccagcgactgcttacatagcctttacattgtattaggtattacagatactctagaggtgcttctaagtatacaggagggtgtgtatagattatgcacaaatactatcctgttgtatttaagggacttgagcagacagattttggtatctttgaggggtcctagaactaatcctcgacagatactggggggctacttactgtgcattgatgctctttgaattcctagttggctaagattatatctatgaaatttttttgtgtattggaccagacttacctgtctagagactattgtggggctggagcttgttggtgatctccttaattgaataacaatataaaaattctagactatgagtctagtgttggcttatactaaacttctgatctttcattttgaagtgaaaagaacattggcttgtagtttatggccctaatctctatatactttggtgaaagactgcccatgggctgtattaacacagtcattgcttgctctctaacatgtattccttattgatatttcatatagatcttatt

SEQ ID NO: 42437 - DNA, 645 bp, Bovine  19866880794069
  misc_feature (1)..(1): n is a, c, g, or t
ncaatgatgatctaaggctgtggttgctgcagtgggtgattagttgttcaccatcttctttaaccatctttgatctggccactgtatttaggttgttaggctatccaaaaggcagaaaaaaactcttaaacttttgcaattgggaagctgagtgatactttaaaaacttaatgaaccttgaaagttgttacttaccatgtgaaaataaaaatggcacatcagggagattaaaaaaaaaaaaaagaacaaagtggttggaaaagtgtaaatgagaaagtaagagtggaagataaaatagataaaatgaaaatatcttgttttacacaatattattcaatgacttggaagatttcacttggccatagattgaagttgttcggaagagatcatttagctttttaaataaaaacagcattacaaatgacagccaactttcttatacttttgtgtttacaacaactaaaattaaaaggacatagcccaattccctcatcctaccttcacaccttcatttatccttcttcatctagttaatctgggttaaagggttttttttttgttttctctattttttaagttgatgcaggtagttgaatatggtcactactgaaaaatggagtctgaatatctctcttatgcacattt

SEQ ID NO: 42438 - DNA, 1445 bp, Bovine  19866880832494
  misc_feature (1)..(1): n is a, c, g, or t
nactgtatcctcctggggtcgcaaagagtcggacacaactgagcgactttcacttcacttccttcacataattaaaacatatcttgagatagaaccacataaccaaaatatatgattattttaacatgagggatgacccaaaacataggaaataactcaaggggacaggggggtagctcccagcctttgcacaggtaatggcacaaaagatagacacatgtcccgtgcagagcacaggtttgtggtaaagaattgatgctgtcttaaagtggataccaacttgaaaatctgataaatgctgtttacttttaaaacatgattaaatagcattgataatgaacatgcttagaaactgatgaataatgtattacatgtggagtaaaaggaaaatacaaaataattgtctgaaggggtagtttttccccggcaacgtcccaaaactatgacagtatgttcttttctcagaaacactgggatgaggactctgcaaaaggcaaaaatcctcaacacagaaaggaaaccaaataatgattctcaccaaggaaaaccaaaggaaaacctgtcagagcactagatttaggaagattcagcgtttactacaactgctgcagtgtctgtaggtacattctggtgagaaactgtagcttctcaggtatgtttcatttttctcccagatctcagtgaagttcccttgcaggctcttttggctaagacttgtatttaaaaatgaaaaaaaaaaaaaaaatcattccacaaaataacatactccaattttcctctaattcaacagttttataaataattaaacacagatctaactttaattgatacacagtatatttttttaagttagggggtactcattgtgcaataaaaagtcaatatttggattcagttcttagtgtaaattataatggcatcaccgacttgatgaacatgagtttgagcaagctccaggagttggtgatggacagggaagcctggtgtgctgcagtccatggtgttgcaaagagttggacacgactgagcgagtgaactgaactgataatgattcatggttcaatttatgggaaatggcttaaataagtccatgtctacacacaccaaaataacatgttctagatgaacacatagcagaaaaatgaagatatcacgtgatgttcattttactttcagggaaatgaatataaacttgttaatgtttatgccagagtaaagactctcatgtaaatggatggcttgggaaataaattatgtaagtacataaagaaagaactaatttaaagatgacacacgctaactcatattttgcagagaggctagaggtcagatcactgagaaaaaaaattcatcaagtaaactgatttccagcccccttcacttggcacaaaaatcttatgatgaattgtttatttgaattaaggctgcagaacaggtaaagaggc

SEQ ID NO: 42439 - DNA, 1048 bp, Bovine  19866880861389
  misc_feature (1)..(1): n is a, c, g, or t
ncaccggaacataatctgatcctcctggcagacttgacatctactttcttccaccccgcacgggaagagaatgtggagtccaataaaacgtacctagaggctaacggtgaaacaaaaacctatgctgtctcccttttctccagtacaataccttgaaaaaagtaccactggtaaaacagtagtctcagaaactgtgatttccagtgagaaagtgttaaactcattagaggggcttcttgtggtcttgattccctaatgagctgtgggaacttacataacgaggagaactctcagtctacataattcaaaagcctacaaactctgtaaattctgtttcctctcttacatgcactaaactagcttttgttcaaatttttaaccactctatttaaaatacttttgtctgtttcctgacttgttacaaaaaaaaaaaagcctgtgaaaatgacaaaataataattattttataataacaacaatcaaaatagtagctaacatttattgaattgggggctttctgtggtgttacttactagtctaaatgctttacatgagtttacgtgtgttaatcccatggcaacctatgaagtagatactattattataattatttttcccattttacagataaggaacctgaagcccaggggtttgaataactttttctaggtctgaaccaggattgcaatcagaaagcctcattataaaacccttggtaccaaccactattctgcctctctcatttccaccctccttatagtattatgggcttccctggtggctcagcttgtaaagaatctgccttcgatgcaggagacctgggttcaatccctgggttgggaagatcctctggagaaaaggaaaggctacccaatccaatattttggcctggagaattccatggactgtatagtccatggggttgcaaagagtcagacacgactgagccactttgactcactcgcagcattatggtttttctcttaggttctttaagttgtatgctaaaaggaatgttactctgtaaggaaaataaaactttcttcat

SEQ ID NO: 42440 - DNA, 1423 bp, Bovine  19866880908479
  misc_feature (1)..(1): n is a, c, g, or t
ncatttccaataaaaagtaaatctctccctgtaaaaagaatttactcagaatgaaactgaatgtaaactttaagtatcataatacaaaaaaaaaaaccttctaaaattctcactttcagatctatgcaatcacagtatatattgcaaaaccagtggccactaatagcatgagtctggaaggcaagatcaggaggtcatagatgtacccttaagaataaaaagaacgttctaccaggaaaactattattttgtttaaaagaaaaaaaaaaccatcttctcaaacagatgtggaattgctaatcaaaaaattctgttgcagttgtatattatcgagttaaaaagtactttgtagagctctggcagcaataacaatgacatgttttgtggtcagaaaggtcacttttattcttgttgcttccaatttaatatctggctttgaaacattttacgcaactagtccattttctattttattgttcagagcttatcacattctcatcagtctaccaaaggcatttttagaaaaggaagttctaagtccaggaaaaaataagtatatatttttaaaactctgtacaataatttctaaaaaatatactctatgcattggaaataagcttaaaactaagtctactgacactaaatttagaaagaccattaccaataattaccagtgtacgtttgaggggatagaatagaggaaatactatacatgtcatttcagtaaactatgccatggcaactaacaaaactctcataatttcatttcatccttttaagattcatgtataagaaacatttcattcatcatagaaagcctgcttttatatttcctccatgaaatcccaagaactactctgaaatcatgacgttgtgatgaacgtaggacacagtaaatgatttttgaccatgaaagctacgggctgaaacgaagccagttaccaggggaaaggtactactctctgtttgcaaaattttcttctcaacaacagaggtaatgctgagtgtgggataccagcaccggacacatctgtatgcaagtatctgtgactctgatttacagtcagctgcagattacactcctgtttcatactggaacacaaataaaggtggaaaatggggcagtattagcagaaattaataacatgcatcagacactctaagtactttatggttaatcctcactttaatctgtatttattattattttttgtgttttctgtttgtgcactcagtcacttagctgtgtctgactctttgtgaccccatgggctgtagcccgccaggctcctctgtccatgggattttccaggcaagaatactggagtgggttgccatttcctcctccagaggatcttgccaacccagggactgaacttgtatctcttgtgtctacctgcataggcagagagattcttaacca

SEQ ID NO: 42441 - DNA, 802 bp, Bovine  19866881110490
  misc_feature (1)..(1): n is a, c, g, or t
naataccctgacattttaatgtcagaatgcaaactcctcttacccagcaaccatagtaatgctaaccacatcattgacttgctttgttctggaacctgggaggattgcattatcgtctctttaaactctttagctgttcctaacatcagaaccttaggaggaaatatgctatacaagttcaaggaggcatcaggaaccagcctcatactgctattgataataaaagtccactcagcccatagtaggctgctacatatgtggagaagagggagttgttttgttttctaaataagtatcacatcaagtattggataaatttttacaaaagttaatctattcacattgaaaataatcatagtatgtaattcagagatccctttatgagcagattttggcaacatgatatgccatatgaaagtaaaccattcatttttcatttaacatatgtatgtgtaatctgttggcagagatgtcatatgttcagaaaactaaaggcttcagattcaagcaatttttgtttttagaaataatatcataatttctttactcctttactactgcttgggtctttaaaaaaacttttaatctgaaagagggcaacacatgttccttgtcctgtgtctatatcggcagcattacttagctttaggtctacctgtctcacgggaaccaaaatagggaaggacataacctagaactttctgatgggggaggaaggtaacaacccagaattggtgttgagtttgtctccagagaaactaatctaagtgacttctgtgcagtagtcatctctgtctcttgg

SEQ ID NO: 42442 - DNA, 2619 bp, Bovine  19866881135702
  misc_feature (1)..(1): n is a, c, g, or t
nccgtatgtgactactgggaagaccatagccttgactatacggacctttgccagcagagtagtgtctctgcttctcaacacgctgtctaggtttatcatcgctcttctgccaagaagcaactgtcttctgacttcatggctgcagttaccatctgcagtgattttagagtccaagaagaggaaatctgtcactacttccaccttttccctttctatttgccatgaagtaatggggccggatgcatgatcttagcttttttaatatttagttttaagccagctctttgactctcctccttgaccctcatcaagaggctctttagtttctctttgttttctgccattagagtgtatcatctgtatatctgaagttgttgatgtttctcccacctatctttttgccggtacataatactaataaataccatagtgacacacaaagctggagaaagagtttagtcccagaagaatgccctcctggccaactgcaatagcaatctctagcaaaagagcctaccaaactgacaaatcaaagcaacaacagcatatgagccttcagaggaagaatggctcacatttaaaatttatgattgcacaaaggcactctagaattttatgttcaatgtactgaataaaaagcagctgttaggcaaagaacaattaaatggcttcaatgtgaaagaattaatcacattttcttatacttgggattctgctgtcagtgaaaataaagatgaaaaggactacaatgtcaatattctaaaaaccaacatcaaaacaagcatccaatctaggattcatccacaaaaatgtaaaactacttccttgcgttaaaattttaaaagcttaatcacactaaaaattttttacagcactcattctatatttatataacagaacaaagttatttctaacatcagtgtatatttttaattgttcaaaaacactgaatgttgagaattccctggcagtccagtggttaagactcgatactttcactgttatgtgcctgggtttgattcctggttgggtaactaagatcttataagccaggcaacgggccaaaacaaaacagacaaacaaaaatatttgcaagtataggcctacacgctcttcatgggctttccatttcacagaatggactcatattctagtaaacatatgaaatgatgacataagtggaaacgtcgaagtataaaatatatgcagataaaaacatcagaacaggcacttggattattatacgactccagtcaagcatgtggagaaggaaatggcaacccactccagtattcttgcctggacactcccagggacggaggagcctggtgggctgccgtctatggggtcacacagagtcggacaaaactgaagcgactcagcagcagcagcagtcaagcgtcagttcagtgattggccagtttatcacaagagggaatagaatagccaaaacgagcactatgttaaatacatcagaagtgaattgaatggctgcatgaggataaatggcagtgtgactgctacccttatttcctctacttaccaggaaggaagtttcagaatgctattttttctctcgtgctctgtgtctactgtaatctgaacacctgctgaagttactgggctttgaaattccatttagaagacagcaaacagaactgtggaataggtattttgcatagaaatgctcccagggacactaattaggttttggaaaagaggaagtcagtcacttgctaaatggcctcatggccaaaagataaatttcacagcactcttcctatgaatcacaatttagccaagtagattcaaccaattctagaaacagaagggcaaatgggcccccacaaacttggtaaagcccattaaggaaacagttggctcctgcaagagggggggaaaaaaaggcaaacttaaccacaaatgtgctctgactcagggaaaactagacacatatggaaatccaggttttaaaaatagagcagtaagtttaccaaaataaatcttcctccacaaaaagattcagaacctccttaatcttcaaattttcctacttcacataatttgatatgtatggaagttattcataagcaatattttcaaaaaatacacagtatactatttaatacctattttatcacttaatgcctaatgcttatcgttttgttataaatacgacaatgacagtgttagtcactcagtcatgtccgattcttcgcgaccccatggactgtagcctgcaaggcccctctgtccattgaattcttcaggcaagaatacacgagtggattgccattccattctccaggtgatcttcccgatccagggttcaaaccctggtctcctgcattccccacagattcttcactgtctgtgccaccaaggaagcccctagtaaattggtaattttttaagatctgctttttaaaaaatcatgaatcctttgattcttcacagaggaccagaatgataagagataaaaactatcaaaaaggagaaaatgacatgattagaatgggaggaaagacttccaagtgtctggatgtgagataccgcagtcatcttgggcagccgttcaaccctgatggactggaacctctgactatgcccttttgtgat

SEQ ID NO: 42443 - DNA, 1184 bp, Bovine  19866881195712
  misc_feature (1)..(1): n is a, c, g, or t
ntttgctttatatttaaatagaaatattatgtatttctaccaattttagttaaagtctgtaatttggggattcatacagtatgtttgtctgttctttatttttctccttttttaaaaaattgaaggtgtgaaagtgttagtcgcttagttgtgttcgactcttgtgaccccatagacaataagtagcccgctaggctcctctgtccatgggattctccgggcaagaatactggaatggattgccattttctattccaggggatattctggacccagggatcgaacccaggtcccctgccttgcaggcagattctttgccaactgatccaatagggaatagtttatttacaatgtcatatcagtttcaaatgtacgccaaagtgatttcattatgcacacacacatacacatatattctttttcagattctttgccatataggttattacaagatattgagtgtgtcagtagttgttccctgtgctgtgtgacaagtccatgtatgtgttatttgaactcaggagtggctaacctcaccacctaagggaagagccagcattgaccagcatcattgacaaaagcccaatataagtgtattctcattgctttgaaaatgttttcctgttgctgattttaggccatgtatgtcatttctgttttaaataacaaaaaattactttttggtcacggtatcagttcagttttaaatgctgtcttttttttttctttttttatgttttctctatctgccaaggtccgaaaagccagatatggccccaaattttggttccctttttggatttggatggcaatgggaggatttaggaatgacatttaggaatgacccatgagctggaactcatcagtgtggttgagggaggctaattttgtttactgatttccaattttgcaactctgcacttgtttctgagactaagtgttgtgtaaaaagataaggattattttgtggtcactggtaatggagtttttgctggggcctggaggaggcaactgaaaggaaaggaggatgttggaatggaataaaaaacgagctccttagcgactttgtgtaacattagcttagactagaagacttgttccccattctcttgctgctcttgagtaaataaatacctattctaaaagaaccatggaagatgtagtaacttgggtcaatgtaaatt

SEQ ID NO: 42444 - DNA, 940 bp, Bovine  19866881228415
  misc_feature (1)..(1): n is a, c, g, or t
ntcttttttaaacataagataatccgtcttattgctaggctggatttttctttctgaattcagtaagccttttatttttaaaaaatttaattcccttatattaactggaggttaattactttacaatattgtggtggtttttgccacacatcaacattttgcattctattaacctggcttcaggttatttttgtcatctggggaacctgcttcctgtgccctgtttaagcagaagggggcagtagagaaatcagttggaaagtcagcagcctggtttgcttcctcctgatagaagtggttgtgccatataaatatgctgaaaggaaatgagagttgaaattaatcccttttatttatttaagcctaaaattattagaaaaaaattaaaatagcatgatttagatttcttgtcagttttagcttatatagttgctgcagaatagctataatatttgtggggttttttgttctgaaatctgatcagcaaatgtagagtgtgttatttcgtacagttctgatttcagtgagacttgttttctgcaagatatcttgtgtgtttacagaaaagcagatgctccaatgcgtttttgtggtttattttgtttatccattggagttagagtttctaaggaaaaccatttcatttcttgctgaaacaaaggggaacttaatgtcacttgactaaattttggttttggagtcagagatctaattttttgttgttgttctttttaatttgcctgcataaattttttccccctatttgttacaggaaatgaggtctaagctagctgacttgttttcatgcccttgatctttgaaaatgtgttactacattaattgaagcaatactgtttttctgtaaagaatgacttaagtcttgcagatgggcctggctaactagttttatttactgtgtatgaaagctattctgtttctc

SEQ ID NO: 42445 - DNA, 2394 bp, Bovine  19866881334829
  misc_feature (1)..(1): n is a, c, g, or t
ncactttaaagcttttgttccactgcctttccccctctacagtttctgggaagaactcaaaataatgtccctgtaatatgattttctctggctacttcaagattttctcattttgtttgtttgtttttttaccaccagattgagtatgataaatatgaggtttttagaaaatgcatcctacttgtggtttgtggaacttcttgaatatttttttttcttttgccaaatttaatcaagttttggtcattgtgttttcaaataactttttctactctgcatccctttctcttcctgttctttctctggactccagtaacacacattagaccttctgatattttctcacagatctttgaagcttttaaaagtttttccaatcttattctctttgttctatagattagaggctttcactgactttttctttgctattgctacccactattaagttatgcaataattttttttattacatatattgaaggttttagaatttccattgtactctctctagtttttaaaacattaactttctgatactatttcctatttgttcatttattgcaagcatgttaacctttattccattgggcatagttataaaacctaaataaaaatattcttatctagctattgcaacctttatatcatcttgggttggtctccactgattgcattttcccctggaaaatggatcacctgttcctctctctttgtctagtaattttgacttgtatcctgattattttgaatattttctaggatttgggactctgttatatttctctgaagaatactggattttgtttgtttttgtaagcaattaacttggctcaactcatgatccaaacttggttaactctgtgaagggctacttttcagtccctttggccttagctgggcttcttggcatctgcttgatccaagtggatttcagaagttaaccagagattcaagtggattttatgcagtagatttagggtttcccctttgtgctgttgttgacatttcttctcactttcttctttttcttcaagtttcagttgcccagctgatacagacttaccttcagccacaaaaccttaaaaacaaggaactcaccagatgatgttcatttttttttcaaatgttaattcccctatagtttctgcctacttttcattactctccagtgccttcagatagttggtttttatattttatccagagtctctagttgttatatttgggaaggttgctatggtagaagctatgaccagaagccttattataacttttaataactgttgtttctagtgtatatttacagcttttttggcaagccaacaaaaaggaagataatttttttctcctgtttttatttgcaaaatgtgttttaccagaatttgtctgactcttagaagtatcaaagtatattctttggaggtgcaggccacttcttaatttagcaggatcctatctagacattcctctagtattaaagacctagaccacaatcaacttgctggttactacatttaaatttttctttggaaatcgtgcctgagtcatggatctcttaagttggaatattaatggagttgtatgctttaggaactgctgcagcacctacatagtgctttctttccgagtatctttaggtgctaggcttcttcagtactacgcagtcatgacgtgattaattacagtgagctatagttaatctgaaatcttaaaatatataatcacttaattttgaaagatacatacaaagctaaaacctgccctggtcactgttctcagtccccatttcctctcctcctacctgcccatcttccctcaggtaaccattgctaacattttggtgtatgatctttaagaccacacacacacacacacacacacacacacagaaaaatggagaattattccgtgctgttttgataggtaggattatattgtgtgtgtgtgtgtgtatagcatccttatttttactcactaataggccttagatatcttttcatatttaccacatacagatctactacatttgattttgtatacttctgtttttctcagagttaatttatcctgttgtaatctccttaggaaacccttcaactagtattcttaattgaaccagtaaagcctcattgttgtggaacctacttactttgaaatttgtgataattagaccaagaatagaattaaaatttatggctgccaattaatgactttaaaagaatatttttttctaactaagagataaatagcttataaaccctagtttaaaatgtaccaattacatataaatttttatctgtgtttcattatctaatgaaatagtagcttgttctgctaactgtatgcattgaaagcaataaaaggtacatgccgttaaaatattccacaatc

SEQ ID NO: 42446 - DNA, 1915 bp, Bovine  19866881384575
  misc_feature (1)..(1): n is a, c, g, or t
natagccgagttaaatatgtaatccctctccagagtaattacaacgaaagaatggatgtaattaggaattgtgtctattttttgtagcccatcccataactgacagttctgctttgtccatgcagttgataataagtggctctgatagtttcctttgagcaagtgctaaaggagctggcactttcacacttatggtccaatctgactttgacataactttttcatcacgactctggtgtggcatctgtagtcatacagggaggtcaaaaacgtacacatactgtgtgatgtctcttttttttctcctgcagtgtagctggaaatgtggctttttaggaactgactgatttttctaaatttcaataaagataaaggacattttgaggttttttttttttttttttaatggctccttcttaagaaaaggagaactgagtaaaaatgaagatttaagattgaagtttcactgcctaggttgagcttgaacagactgtggcagaattggagagtaattaatgtagcagatacgtatagatttgttccttttagaaattggtcatacaaagggtgtgacctcgttcatacaccttttcataaaattttgctaagcagtgtatttatgagagttttgattagtttctttttcctcaaaaagttaacattgtgattaatattattttgctcaaaataacaagttcttgttatgcttgctgaatttgaaaatattttaatgtgtgctttacagctctttttgtttaggataaacatcttgaaattgcatccaactcatcctttgcagatgctattttcctctccttccacctgatgacttaccctgttcatctgggtcactttgactcagcttggatggatgctcagttgctcagtcatgtctcactctttgcaaccgcatgtactatagcctgccaggttcttctatccatggaattctccaggcaaaaatactagagtgggtcgccacttcctcttccagggtatcttccccctccagaaattgaacctgcttctcctgtattggcaggcagattctttaccactgaaccacctttggctcagctcaaggggagtctgttctgacctccccagtgtgcactccaactcccattccggccactccacttaaactgcttttagtcaggccatcaacagcctaaatccctgggaatgtgttttggttcttactccatcttgctgtgaaatttgtcggtattgatgtctctttttcttacatgctgttttcctgctctcctgattttctttccacttacggtggttgctgcttcttattctttgtgagctcttctgctcatcccactaatggtgatgttcctcagattatttctctgagttccttttttttttccccttatgtgtcacatcctttcagtgaaacatcttatttcataacttcagctattatttggtccaaatggtgatggtttagtcgctaagtcatgtctgactcttctgaccccatgggctgtagcccgccaggctcctcttgccataggattttccaggcaagaatactggagtgaattgccattcccttctccaggggatcttcctgacccaggggttgaacctgggtcttctgcactgcaggcagattctttaccgattgagccacctgggaagccctagtgagtcttagaggagtccagatgagtcctaaataaaattcccagttcacatctttcttttgctttcctgactcatatctaactggattctgggcccttgcaataggtgagaaagatcaccaagatgtcccagaagccctttaaattcagtgtatccaagcattctttaggggatgccccctgctttctggtcatgtcgttttctctactggaaaacatttagtgcctctccttgcctgccagtactctat

SEQ ID NO: 42447 - DNA, 991 bp, Bovine  19866881426513
  misc_feature (1)..(1): n is a, c, g, or t
natctcctgcttggtttatggaggatactttaaaagaaattgctgagatatacttttattgaacactggcaatatagatttttatttgaactacttttgaaacttgaaagaagggaaaatattagttttcgttttcatttgacaaaccattatttccctttttaaaatgagagtatcaccagaacaggaaaggcattccagagcatgtgtaaaaagttctgcaatagtttttgcctcaaaaagaaatctctttcttctctgaggtttgtggtgttattttgcactcttttatgaccttttactcaatgatgggtattctgattatagaagaagtttattcttctagtctctcctttcttttttagtattttaaattctttactcttctgtgtatacgtttcatgtcacctagagggcatgaattggataaggcagccccgatcttggcatggtttctgggcagcaccatagtacaatctgttctccatgctgctgctttggaaattattaagctttacacatttagctcccatgccaggctatcgtcttcttgagggactttgtagaattcagtttggtaccgttactttttagcacagtttctggcactgtatagtctctcaaagaatatttgttgtaaatggagaagcatggtaattcatagttcaattatttataatatagtttaattatttacaataattgtttataatttacaataataatttacaatagctagcactatttacagtagctagaacatggaaataacctagatgtccattgacagatgaatggataaagaacctgtggtacatatatgcaatggaatactactcagccataaaaaggaacatatttgagtcagttataattaagtggacttccctggtggctcagacagtaaagcgcctgtctacaatgcaggagaccagggtttgagccctgggttgggacgatccccggagaaggaaaggcaacccactccagt

SEQ ID NO: 42448 - DNA, 1359 bp, Bovine  19866880234963
  misc_feature (1)..(1): n is a, c, g, or t
ntccgtcccatcacttctggcaaatagatggggaaacagtggaaacggtggctgactttgtctttctgggctccaaaatcactgcagatggtgattgcagccatgaaattaaaagacgctttctccttggaaggaaagttatgaccaacctagacaacatattaaaaagcagagacactactttgtcaacaaaggtccatctagtcaaggctatggtttttccagtggtcgtgtgtggatgtgagagttggactataaggaaagctgagcacagaagaattgatgcttttgaactgtggtgttggagaagactcttgagagtcccttggactgcaaggagatccaaccagtccatcctaaaggaaatcagtcctgggtgttccttggaaggactgatgttgaagcttaaactccaatactttggccacctgatgtgaagcactgactcattggaaaagaccctgatgctgggaaagattgagggcaggaggagaagggaatgacagaggatgagatggttggatggcatcactgactcaatggacatgggtttgggtggactccgaaagttggtgatgaacagggaggcctggcgtgctgcggttcatggggtcgcagagagtcagacacaactgagcaactaaactgaactggagcaactgagcccgtgcaccacaactactgagcctgtgctctggagcctgggagccgcaactattgagccccacaaccaccctcgcgccccagagcccgtgctctgcagcaagagaagaaaccacaaccagaagcagaacacggcaacgacagcagccttgctcgctgcaaccagagaaagccctcacagcaacgaagacccagcacagccaaaaacaaagaaataaattaaattattaagaaaggtcccttccaggcaaaaatggaacatacagttgtctgttttctaaaatgctctgtccgtgcagatgccaaatacattctacattcttgaccgactcattagctgtatttaacactatacctattgcccagagacacctggtacatcaacagaaagtgaataattgtgaggattgaatgaaattaagcaccctggatcagagatggttttgtgcaaggaaaaggcacagctgttgcccttttaaaagataaaatgtgactaactggatcatctggaaatcaattagactgaagtaggccaaagatattaggtgtttggctaaaagagatatagtctctggcagaggggagacagagctttgtgtgcacaaaatgtgacatcaggagttggaattctgtggatataaactttaagatttcctttcccttgtgatgacaagggggacattttgagggcagatg

SEQ ID NO: 42449 - DNA, 759 bp, Bovine  19866880387977
  misc_feature (1)..(1): n is a, c, g, or t
ncctgtgtcagcgtctgttttcagggcaggtatttataaaggttacagaaattgtgacttacctgcatatatttatccttaatttgttcacaggtagaaatgcaattggatatataaaggtgaataaattcaggaggtagatcaacagctgtggttagtctgtttcataaaaataaaggcaggcctgttaatttcggtcacttagtgaaaattctaatattaatggtttatgcaggtaaacatcggagccaccccaccccactcacccccgttaataagtgacacttcgtttctcaggtctgcacatcatatgtaataagcgctgagcaccatgtccctgggtggtcttggctgaatcatagttctagttaccatccaggctctgacgatgtgggcagttactccgtctacctaagtaataccaacctgattacacatgagtgctatgcaaggagtacttgtgaaggaaggcgtggtaggaactgaacagcacaatgcatgactgagtacttacatgaggcaaatgtttgctcaaggagcagtgtaagtgggaaggattcacagggcatatgacttaaatggaaacccaaggagagaagtgttcttcaaatcagtaaataatctaagtgaagtgtagaatcgggggtgggcgtggcacattacccgagtacagaatttttttcccacaaggccccaaggaaacgcagccataggctgctggtgacgcgtggatggggtatgcacaatgagggggggggt

SEQ ID NO: 42450 - DNA, 1694 bp, Bovine  19866880572042
  misc_feature (1)..(1): n is a, c, g, or t
nacagctgggagatagggccaagaaaggagggtgctgttcccgctgcaaaagggaaccagacaaagcatggggcagtcctgccccatctcagcccctcaggggatacgatggagcacagggtgatcagcagagacggccacttctgcagcgcacccaatccctagctgggggcaacctgggatcattcattcaccaagtatttagtcagcagctatgtaccaaatgttatatattcaagggggaccagcagaaaagaatgggtttctttttttcctttgctctctgcaattctactctgctgctaagtcacttcagtcgtgtctgactctgtgcaaccccacagacggcagcccaccaggctcccccatccctgggattctccaggcaagaacactggagtgggttgccatttccttctccaatgcatgaaagtgaaaagtgaaagtgaagtcgctcagtcgtgtctgagtcttcgcaaccccagactgcagcccaccaggctcctccgtccatgggattttccaggcaagagtattggagtgggggtgccatcgccttcttcgattctactctattcctcattaaaaatcaatttcacgaaagttgtcactgatttaatccaaagcagaagcaaaatttcacaggtaataccaataaaaaataaataaattccatgggtgaaaggttgtgcctctatttttaaagttaaaacataagtaaaatggaaatttcctgtgttaggaccagtttcactgaatactaagttcaaactgtaaaaagaaaaattatcacctattactggtgtctgtgtgcatgcttagtcctgtccaacttttgcaaccccatgggactgagtccaccaggctcctctgtccatgggattctccaggcaaaaatactggagtgggctgtcattatctgatgtcagaacaaatccaggtcatacatctaattacaacttaaaaggtaatgcggcccatgaacctcagggagaccttcagaaggactgatgtgtgccaagaactcctttcacatctaaaactccactgtatttatgattccttcatctgaacgccccaccaggaacaactccattcatgaagccactgtttctgaagccaagagaccaggtttacgttgcatagaactgggctaacaaggaaggcaggctacttacggggagcgccttcagccatctcaatggcagtgatgccacaggaccagaggtcactctgcagaacaaagcagatgttagggcaccatcctcactgtgaggcctggtactcgccaccactgggcactcacacaaaccacataaatccattcttgggggtacgaaccaaaaggaagtttgccaagaaattacgagcacaaacacatctggaagaacaccttccaagtaaataaatgatcagctcataaagttcagtcaactcatgaagagggtgatggaaaagctatacaatctgccttgtattgtacagctttgtaaaaagttatgcaataatgataataatgatcgttaattagaaccacttgccgtacctatgatccaactctcagccagagtctgatgatcaaacaagacttttcatcaggaccaagaactgcattattgatacacgtctctagaggtcactctcagagtttaaacacatttggaccaaagcaaaggtgcacagctctttagcaa

SEQ ID NO: 42451 - DNA, 1896 bp, Bovine  19866880908970
  misc_feature (1)..(1): n is a, c, g, or t
nttttttcgtagaaaatggtagctgatcatccacaggtaggttagtcatcgctttaccgattttgctgattcagtgactacctgtgtatttcagtaactctttgtcttgttctcagaactggaagttgtctgggcaccactctgtccatggcgtgcagtgcatgctgggagaaccggaggccatctgggtgcccgtctgtccactgtgagcagcgcgtgctggagtcagaccctgggatgctgacctcagcgctctgagcctcagtgttcttgtctgaaagcggcaacgatgatgcgtctccttggttgtcagactccagtgagacgatcctgtcgagggcctggcccaaggatgggcaggaagcatgccttcagctactgacttccttcctcccttttcctgtatgtggcctcttcttcctttccagcccctccctctctcctcttctctctacaccacagactgagtaccactccctgtgtctaagagaagggggcgctttgtcacagcaccaggagagggggtctggggagcctgatggtgaagctgccctcccctaatgcactatcatgacctagaacagggctgcgcaccaaactcagggttctcacgtggtttgtcacggtacagtggggaaaaagcttcatgagtgaccagtacattttagcagatgagactcaagaatgcacccaccattcagcagagggatggtagggaaaaagtgaaagtgttagtcgctcagtcacgtccagctctttatgatcccacggactgtagcccgccaggctcctctgtccatggaattttccagacaacaatactggagtgggttgccatttctttctccaggggatcttcttgacccagggattgaacctgggtctcctgcattgcaggtgggattctttaccactgagccatcagggaagcccagcaggatagtaacccatagacaaagattcctgcaccctcagcctgaacacaagatgacagctatatgatgcgtatttagttcttctgtggttgcaatgagcttagaaccaagacacggctttgggcacaacaagcaacaaacatattcttataatacaaaacaatcacgttgtacatacaggcatactttttgtttgaatggaacagcagctgtctcaacatgtcactatgacaaccaacaatgctcccacgcaggtgagtctggtttgaaagcatgtgaacagacttctccaggtggagtccctgtgtgatctgggtatttgcaaagggccacttcactctcctgccagcacaggggtccctggtgacctgctctcgtcctgcttgctgtcagggagacaggcctgctgtgaacccttcccaaaaagagacagcagtcaaccactgtctggcagcgctgtataaaaggtttccatttcacgcaagcatcacggactttcttctccctccatcaggcctttcttggaacggctctgaagtactcctccctggagatgtcggctactcctccataccatttctgaagccagatgtgttctaccttcatcttcatgaagaaccattcatatggccgaggccactttctcatcactgggtgtctgcagaaataaagaagtcaccatagagcagttttcattagaggctgtgcctctggagcacagggccagatgtagccttggccaggtcacagggccagacgccaggtctcttgggcttgtgctcagttgctcagtcgtgtctgactctttgcgaccccatggactagaccctgccaggctcctctgtccctgggattctccaggcaagagtactagagtggggtgccactcccttctccaggggatcttcctgacccggggatggaaactgcatctcctgcattgcattctttactcactggg

SEQ ID NO: 42452 - DNA, 2421 bp, Bovine  19866880947316
  misc_feature (1)..(1): n is a, c, g, or t
ntccttttatgctttggaaaaaaaagaatctaaatgacaactttattctgatgatggagatgatcttaacatctctcgaagccttcaaatagttttccacagcaatatcttatgctcctaagacacaccttcagaggatatgaagctgatcttggtttaaaacatagatccctcccaacaattaaaagtctaatgccaaagtattcaaagatattatgactttcaacatcccttttcttagccttgttagtagttcccttttccactattgacatttacagcaagtccaataaattcagagaactttcactgcatgcctggcatgtgtgcccagcatgaccagccagtgtgtgaatcaagttcagttcagtcgctcaggcgtatccgactctttgcaaccccatcacaaagtttgtgaatgaccagctgaaaacaggatctggtaatgacatgttaccattttgtaggatttcttcaaaggttaaagccaccccttatcataattctacatactgttgttaagtgatacttcaaagacagcccccgagtgctgagctaagtaacgatgagaatcacactctataaagggtaaaggtcgtgatgctggacccagcagggcttgggaaaaacctgagaaatatttgtgtgtatgtctgagaatctcacctgctgtactgaatgatcgtgaacagaaattgcttttgcatgcttctgtgtcttccttgaagctaatagggtaagaaacaaattcccttaagttactgaattatatgactgaaatattacttactacaataaaatatatgagtgataagtgaggaagtagtagaaccctaaaggaaactataacagaaagttcctgaattccaaagaccaggtaagatgtgaggtttaaattctatccccagagttgccaaaaatttggggcaggtggtgaaggcagtgggattcccagggcagcttgtgagaaaggtctttagtaaccctccaaccctccatgaatttcaatgcctttcccccaaataactttcaatttaatagagtggttttttaattagttttttattttgtcccttaattttttggtttgttttgggccacaccacatggcatgtgagctcttagttcccggaccagggatcgaacctgggcccccatgtggaagcatggagtcctaaccactagaccacgagggaagtcacaatacagtgtgtttgctgtttttctgaagcttcaagaataattccctcaccactccccatccacaggcgccactgctaagctcctctgtagaaatcatgaagccatcaacgggtaaaggggatagattgggaaccactctgcctgggtttatgacctgtcaaaaccgtggtgatgtcatgctgctgttgcatccccaatgctctgttttctggtcagagacacagacttagctcccagctcaagtcagtccacagccctgtattgaaaaggccctttttttccccttgatgtttgttagatcccaggcctgccatttgggacctgcctgcccatcagtgatggccccttcgacaacagtactgggattcctttcttctatgtgacacccaaggacctcctggtggccgatctgatgaagaaccccatggcctcgctcctgctgccagaatctgaaggagagttctgcaggtaggcaagggcctggcctccgtcacccagctcctctacacaaggcagggaggttgtggcgttcatggggccctgagatgcaaagccattcctcaccactcggccagggctgttcctggtcccggctctgggtctcaccaggttccaagactggccgaggccctggggtctccatgctgctttcatcatctacggaattaagcgatgaactaggtagttttgaaggttcttttttgttttgaaaaaaattatcaaagcaacagctttattccgaggatggcaattattgtaaccacttaggcagctcccaaatggtttttcatgtttctgttttatgtccctaagacacacctttggaagacatgaaactgaaatgtgaagctgatcttggtttaaaatacagatcatttcaagcaattaaacgtctagtgctggggggatttccctggtagtccacaggctaagactctgaattcccaatgcagggggcctgggtttgatccctggtcggggaactacatcccgcatgccacagctaagacccagcgcaggcaaataaataaaatattttaaaatatatatttttaaagtctaatgctagggacttccctcgtggttcagcggttaagactctgtgcttctaacacagcgggtacagtttgatccccagttagggaactaagatcccaccatgccaaggtgcacggccaaaaaaacctataaaagtccagtgccagtgtgttccagata

SEQ ID NO: 42453 - DNA, 1079 bp, Bovine  19866880959977
  misc_feature (1)..(1): n is a, c, g, or t
nacaggaactgaggggaacagtgtctgtagagactccttcatggagcaagcatgggaggccagcggtgtgggcaaggagcaggttggcgcaggtttcaggcggtgccaggaagcaccactgatggagaaagcagaaaggcagaggtgaaggaggacccgcaggaggagagaggaagccacagggaaaatgacatggcagctcctccaaggtaacctgagggcagcccttcttctctagttgtcttgagaagaggtagcacccacttgggtgggggccctgtgaggccccttcatgggctttactttggcctgagtgctcagatcctgtgtccccaggggtgggcatcctttttggtggctggtgggagctgagagcatgtctgcttccatcctgcagtagctccctgccacccaagaagctccccaagatgcccacccccatttccacagacattggaaataaccaagagacaagctcactgttattcaaggccaactcgtggtcctagtgtgtcattgctgattatgtaacactggcatatttactgagccccagcaagcaccaagcactgagacaccctggaaatacagtaggataccaggattcttcggttgactgttggtctctctgctgtttaccgcatcaaatatgagatgctgcaaagtgtgcacattacctcattttgctccagagctattgaggtctgatggtgagaggacattgctaatgaggcctttgggtcaatttcacaccctccacccaaaggacgggttaatttcacccaccaccgctgatgtctctagttcaaccagtcccttaagatgaagcatttgaatagatacatgttagcactgtaacagtcagggtttgtttgtttttttttcacagttttctgccttccttatgtgctggatgtagaaaggacacttacctctgtacatgatccttccactagcagcataattacagctttcatttgagttgagcttatagccacatagactgctaaatagaattaggtataaaatccattttcttttcaaagaatgtggccttgcaacagacataacaaaaattt

SEQ ID NO: 42454 - DNA, 1842 bp, Bovine  19866880993241
  misc_feature (1)..(1): n is a, c, g, or t
nttctcataaagggaaggatttataaatatatcagcttcaaaaggacccaagctggcctaacaggtatgccttcagaagtctaaatatggacgtaacgcacttctttccacacctaacttttctttgcccagggctgaggttcgggcatcaccattttgcacattagcactgggcaaagaaagcttattagccagtaccgtctgtgatgggtgaagtttcgcccataccactgctggaagcgcccaacctcgggtcaggccctgccgattctcggtaagcgagagctccgggccggcagcctggatgcacacacagagcttgcctggcacacgttttctctgtgaggccctcagtcatgcggcagccctatgcctgggcactgtcccaagctacggaatcaccaacttaagcggcacagaatgtcagaaatgtggcaccacacttcccacgaaaggacacctgttgtcagtctgacgctagaagaccatgtcctttccagcctcacctgggaacgtgtgtgccagcagctaggcacttctctgccctggggcatccacaagttgccacccatgcaaacactgatttggggccacaaacaggcttttgtgggcagatttgcaaacgtggcctggactaaagacagaccattgttcatcatttccaggttacagtcctggtgtttacttgacagaggaaagggtttcaggtgtatttcaaataaacagcttacaaagaatagtagttatatttagagaacattttatgggaggaaaaaaaaatccagaaacatttacaacaccagcaaaaagttcttcgttaaacatgtttaaaagtagaagaaagtttacctgaaataaaaggaactataatcctgggatttgataactgcatcaacttttaagtttaatcagatgagttcatgttttctaaaaaccacatcttgaattctctggactttcagttccaatttctagctttaatatcttcaaatcacctgcttaaaagaagacagcaagacgacctgttaaaatgacatcttagggtagaaagatgtttgaaaaagtatttgtgagcctaaaatataactatttcaaatacctttctttagcaatattgtttgtttatgcaactctaagaaaatggtatcattcagacaaatgataccatgataaatggtatcagaatagacaaactttcataaattttaatggactcaatggacatgagtttgtgcaaacgcttatgtggaaaatccttaagaaaaggacttccaaaatcctgagattcaataactaatcagcctaacaggaaacataagtgttttcccaggtttctttttatctgttgataaataagcctccaacgcgtcaaaaagaatgggttgacttttcttgtactaatcttaaactaatgtaatgcaaatacttttttgatttacaacttgttttgtacttttcctgttagaatgagggcacacttctagatacatggctgatgatattgttttactactgtaactagtaatcgatgtgccagtacttttgaaaatgaaatgcttttaaaagtgttttaaacttcaaaaatgaaaattaactgggaaaagcattggtggcttttctaattggtgatcttgtgacagaagcacagcgtgcagaaaaataagatgaactctggttcaggccaaagttctgtgctctgtaagctgcaaattagagtttacaccgagcctggagaaatgcttttgactaaaacatgtaagtacctcaggttctagttagccacatatatgtgctgactttacctcagccctcattggatcatacgagtgtgctccaaaacag

SEQ ID NO: 42455 - DNA, 1107 bp, Bovine  19866881018159
  misc_feature (1)..(1): n is a, c, g, or t
nttcagtgtatgtcactcctcttagctgtagtgatctgctgctcagtgagtctgttcatgccaggcaggctctgggagggccaggggagagcagtccccatattgcacagctctcatcagaccaggcatgttttggagttaagcagtggtcaacagacacactggcaaaatcgcttatagcagagatgaatctagaatcctgtgtccttgtttggacaatgtataaccccctctatgggtttcttagggcttccctggtggctcagatggtaaagaatctgcgtgcaatgtgggagacctgggttcaatccctgggttgggaagatcccctggagtagggaatgacaacccactccaggattcttgcctgaagaatcccatggacaggggagcctgatgggctacagtccatgggattgcaaagagtcagacacaactgagcgactacgcccagcacgtgggtctcctagccctctgggttctcacttcctgagaacaccggtggatggaaggctgggccacggtgtacataccttgttgcccgtgacggtgtctacgaggaagccaggcaccctgaccaccacactgctccccgccgtggcaccggggctctggcccttgcatctgagcatcacccgggggggatccgcactcaggctttcatgctcctgagctggggggcagtctggagggtggtggggctcatggtctggctggacaggagactggtcatctggcagtatctccttgagacttcccacgttgtcttcctcctcttcctcctcaatgcacgactgaagtatgtgaatcacatattccgaaagcagcaagtgaaacaggtgccaggagcctacatgaaataacaacccccagtgaataagcacacagacagatggacaggtaaacggatccccgtggaaccaacagcttttccagggctctcagctcctgtgcactagagcctcactcctcctggcaaagcctgagtccctgcagcgtccatcaccctcgcagcatcccacacccagaggaccccagaaggtggctttagcacaaggtgctcagtgagctgagtcatgacagggaacatcaacacagctgctgtga

SEQ ID NO: 42456 - DNA, 729 bp, Bovine  19866881042921
  misc_feature (1)..(1): n is a, c, g, or t
naaatttctgagcctgagagtgacccctcccaccttgaaagcagcacctgacttagaacagagctgatgcagaaatggaccacacacacacacaaagcctcaaaatactgtcctggcagatgtgccctacagcaggagtccatgcggtcctcgctggagcagggagggggacgtgggggcagaacccgtgcccaggaccggcagagcccacaaggcagggctggcgacaccttaccctgtaatcgtaggtggcgtcggggttctcgtcacaggcaatgacctcaggggccatccagtacggggtgcctatgaacgtgttcctcctccccacggtcctgtccagctgggcactcaccccaaagtccactgcggccagaggaaggaaggaaaggggaccagagtgagcaaaccagtacacaacaggacgcagacacggagcgcaacagggtcttcagagtaaaccacacaccagcacggcgtggatgcgtgaccctccagcaacacgggtacggagcgcccctccagagccaagtcaccatagggccaagacgcccgaccagcctgggggtttccccaggggcctgtacccacaggtccctgagtttaccacagggaccaccagagggactgctgggggagtctggggcttggatgaagtgggcctggagccacgctaagaggcaagcctggctcccacttctccaacaggacggaaggggaaacgggagt

SEQ ID NO: 42457 - DNA, 1540 bp, Bovine  19866881162869
  misc_feature (1)..(1): n is a, c, g, or t
ngactcaatggacatgaatttatctgagcaaatttcaggagatggtgaaggacagggaagcctggcgtgctgcagtccatggggttgtagagagtcagacaggacttagcgactgaacaacaacagggctgattaacagtgttgtgatagtttcaggtggacatcaacaggactccgccatatgtatattaacacaattatttccccattctttccccaaactcccctcccatccaggctaccacctaacgttgagcagagttccatgccgatgaacatctttttaagtaagttcgctaggaatggaggcaagaagggaagtgtagagataagaagtagaattttgcatttatagccctccagtaaatttaaaaaagaaaagctggtggggagggaggacaggatttttacagaacagtgcccacgtttaaaaaatagcaatttatgtgattgaaaaattggtgggtgtttttttctttcaattgaactatttattttccttagataaatgctttcgattcacgaagtgacaaggtagccgtatccgcctggagatggttcatcaacaattacaaagggctccctttcacggcaagttttattttaccaggagctcaagaatagctccttctggagcataattaatctttctattccaccctacctctgagaagagcctgcattaaaagactaagtgttcagtaattgtttaaatgaatgaattagtgcaagtgcatgaacagcatttaaaggcacaagaacaaaagcccagaagccatggctgacacactccctttccagtcccactgcacctgaccaaaatcaagagcactttttcttacttccattaagaatggatgataatagtttccttttccgattttttttttctaacccatgcagcaacagaaataatacgtatgcaaataagcgctgtttccattgttataaaagggaatatatatgtatttgccaacactcaaaaaatgcttttggaaattctcttttaaagttggcaggacattgcagcaaaatagaaggtgagcaccacccatgtgaaggactccgtgctaggcctggacaggcgaggagaaccctttaacagtcagcttcccacagcatttatagctcaggacggaataacattaagcatggaacgaacatgaagaagctgctccctaggtacccatcgaaacagtacgaggagagaactcacaggcgggactgaagtggtcgccaaggcccagaccgtgtgactataccggggcacagacgcttcctgaggcaggaggcagatggcgcaggacgcctgcagagcccagagagcagctgcttgggcgggcaggcggctgtgtcggaaggctttcagcagaagcaacaagtgatgttattttattaactttaacgaggagaagggaacaaagaagccaccatttacacgcagaacctgcatgctggccactgtgcatctattatgttattttcattctgatgagagcctgtgaagtaggaattattattccattttacagatgaggaa

SEQ ID NO: 42458 - DNA, 1174 bp, Bovine  19866881278180
  misc_feature (1)..(1): n is a, c, g, or t
natacctgggtgttcggctgtttagaaaagcaagatgagattatataaaagtcatatagggattctgtttgtgagagcaattatgattaagaagggctgagacaggcaatatttcatttcttaacttggttgatggttacaggaatgattacatattagtataagtgactgtagagtcaacaaactatgacctgtgggctaaatcctgtctgccacctgttcttgtaaataaagttttactggaacacagccttactcctttgcttacatacgtaaacaagaacacagacagagtctctatttcaccatttacacaaccatgtggggctccatggcccctattttctctaacacatttgaagattcatggtgtgtttttaaacatgtgtattgtccaaagatgctcagttcagttcggttcagttgctcagtcatgtcctactctttgcgaccccatgaaccgcagcacgccaggcctcgctgtccatcaccaactcccggagtttacccaactcatgtccattgagtctgtgatgccatccagccatctcatcctcttgtccccttctcctcctgcccccaatccctcccagcatcagccaaagatgctacaattcattaattcgtatttatagtccatcccattcttaaagctaagtgactccacgctccagtggggatctgatagcccctcctcccttgacctgcctgtggatttgcaaagtgacttgactgtcaactgtgttgtgagtgttcctcttattctcagcaaagctgctttatccaggaagaagagtcacttttctcgggtttgaggaactctcttctttgtgtaagacaaatagtttttcagctacacaagagctgagtttgggcgccattgtttaagctttcctgtgctgcatttcgtgataaattgagacttttgttttgttttgtttttcttccttgcagaggaaatcaagtacaggagacgtctttatggtgggctatatctgatgcagcaaaggcaacaaactcaggaagttcaaatgttgtctccttggatgggcccaaacacaaaaataccacctccatctaataaagtagaaaacactatgctggagcaaaagatgcaagaaatggtcttcttaagaaacacaaaactcaaggtttttttttatcacttcttctt

SEQ ID NO: 42459 - DNA, 1041 bp, Bovine  19866881665772
  misc_feature (1)..(1): n is a, c, g, or t
ntataccaaccttgaaaacatggcttgcttggcaaattcgatttcttctggagacactgcgaccatccgaccagtgagcgttaaccgggcacagcgaaggatcttctgggtccacgatgttttttctgcatttgaaggacagtttccagatattaaaatgatgatagaacatcagctggacatatgaaggattttactaaaaagagaaaataagagttacattgatagttatatcattcaggcttttacatttttctggaattacttgaaaatactttgacacatctgatccagaaattccactgctaggcatatatccagagaaaaccataatccaaaaagatgcacacaccccactgtctactgcagcactacacacaatagccaagacaagcgaacaacctcggtgtccatcgacagatggtcggatgaagatagggtcaggtgagtggcgcccccagagctgtacagagcagcgagctgactgaacaggggctcccactgagggtcttgcagagccctggcctggcctgggtgctcttgcctagcacttcccaagttgtctcctgccccaagggtgcagactgacagctagtgtacacacaaacacacctgtcacaccgcctgtgtgaaaatagtttaactttttaattttattggaacacagttgatgtactgtgttccaacaaaattaagggaaggttgtgttaattcctgctgtgccgcaaagtgcttcagttttatacatatatatatatatataaaatactaaaatatttaatatattttattatttattcttttacatgatggtttatcataggatagtgaatacagttccctgtgatacagtagggccttgttgtttatccattctaaatgtgatagttcacatctaccaaccccaggctcccagcccatccctcccctaataccctcccctttggcaatcacaagtctgttctctatgtatgtgagtctatttctgttttgtaggtaagttcattgtgtcaagttagattccacaatcagatcagatca

SEQ ID NO: 42460 - DNA, 1292 bp, Bovine  19866880501520
  misc_feature (1)..(1): n is a, c, g, or t
naaatagatatgacttgagccaaatacataaggaaaattcttctcttttatttctatctcaagtttcttagtacaaaatgacatatggaaagtgtgtgtttcctatcttccagccaaaattactttaattccaaaacaaaggtaaatagatgcaaaatgaaaaaaaaaaaatcatcttggaaaatccaggagtttgttgtatattgtgttagtcactcagtcatgtctgactctttgcgatcccatggactataactcactaggatcctctgtccatggaattctccaggcaagaatactggggtgggttgctattcctgtctccaggggatcttccccacccaggaatcaaatcctgatctggccgcatcacaggcagattttttactgagtcagcagataattttttttttttaattgctcaagtaatgacttgactttattcttgaaacatgttcctgaaaagcttagtatattgaaaacctttagatggatcatagcaattttgatattaaagtacttgtatggtgaaaacttttgtaaagtaagcgatcatctcccgatttatcagttttgcaaacccaaattttcaatactgtgttggcttaagtttttaaaattataatgtactataataaagtaagaatcattatttgggctttgatttcaatttcctaaacatagtacatccaattaaaaataaattagaaactgtgaataatgaattaaattgtattcattgtatttctttgccccctctatattttctttttatattaagcaatttactttcattaaaatattctctaaaattcaaatatttacccatgaattgattattctctgggtaaattacaatttaaactatattaattggaaattgtatttgtaggtttgaatgaaaaaataaaaatgaatctaatacatattagcttgcattgcttcttcagaaaagaggtcatagctaaaatgatcaaatcaaaagccatttttatcaataagcaaaattagaatgcaaaattctaaataccaatgacatcctttttgcctattttatttttctgaatttttgatgaatcaatttcagccataaattatgaatactttagcgaactgaaaatgccttttgaatgttaattattttgaatattaatccttattaatctcagctttgctaatatcaaaaagaaattataccatgtgaaaatttttgttgcataatgcaccacacttaagtgtattttttaatcagtctggaaggttctgcatgttactaagatctcctgaataag

SEQ ID NO: 42461 - DNA, 2394 bp, Bovine  19866880652315
  misc_feature (1)..(1): n is a, c, g, or t
ncctttcttcctccccaatgtgggccatctgtacagataaaccaagtactggagcacttcataagatttccaaaaatatctagaatagcttctgctctaatctttattcctcccattttccaagcagtgccatcaaatcaaaatttgaggaaatgtaaatattctcacagctgtcaaagtgtttatgtttttaaatggatattttaaatcccattcaaccacaaaacattgtaagacagtttccatggttacttctattaattccagcagccataaaacatttagcaggcttcttaaaaaaattagtgtcatcaagcatttaaaaaaataaaaaacttttggaagtgtttatcttgactactaatcatctctgttgtatgatgataataattctgaaaactcagcagatgtgttaaattcaatgaacactgtacagaattcaataagaaaatgaatatctaaatttatttcacttttattgcaatttattatattcatgacttcaatttgtatatggaatgctgaacacacatataagtgcctgacacagtatattacaaatcagatctatataaattttaaaggtcttcaatttaatggcagattacaattattttttacatacattcagacttgatatttcaagaaattaattccttgaagtgaaaatacatcttaaaaacatatctcatatccttacaatttaaatataattgttatattaattgccaaaaaaattaagatgcaaaataataatatgtaaattattttctgtaaatctttattcccaatgacacaattatcttttccaaataatatttttaaaaatttcaaaaagagtacttgagacagtttctcatcccttcctttgtctgtctcacataggtcaattgcttttgactatttttacctttcttaattacactgatttacctgccacactttctaataattatataactatacaaaaattgcaataattttggttgagcctgtatttagtgtttcaattaatgtgcctttgaagagtacatgctcagagtcctttgtcgtttgtttgtttggtctctcctgcattttcactcttcacgtaagtacttgtgaaagaaattagttttttgactgcgctgtcttcgttgctccgcatgggctttctctagctgcagtgagccgggctcctctcccaggtgcggcgtgcaggcttctcatcgcgatggcgtctcttactgcggagcacgagctccgggacacacaggagttagcagctgcagcacgtggcctgaatagctgtggctcacaggcttagttgccctgtggcgtgtgggatctcaaaaccacgtctcctgtattgtcaggcagattgttaaccgctgggccacaagggaagcccctgaaagagtatttttaaatgaaacatatgcagatttcaaaatgaaaggggaaacgaggaagagattgagaaagagagataagaacaattctcttcttcatgaaaaattttgcaggacaaacatatcctttttttttccaccttccatttaaaataaaatattttgcttatgtttcaaattagagtaaagagatattacaaaagaaatcttttgtgtcttctcattcagatatagaatagtcattttgatgagatttattttaatattccagtattactcttctgctccctgattttttttctttaaatcaggaaatattttaaacataaatttattatctgaagattagccatgttttagaatagaatttttatgtacatatattttaaaaatggaaaagatcacattttccctgcaggtagaggtaccctatactcttagcaagaaaggtaggaagaaagggaaaggaaaggaaaagatgagaaggaggagaagggaagagaagagaaaaagaaaaagagaaaagtaaagaaaactctctcaaatatagctctctagctctattaaatgcaagaatatcatcactgtaaagacaaaatttgattctcccagtgtttgtaggtcttactgatttgtgggcattaaaaagacatgtctcaaaaggaatgctttgataacatcagtttattttaatttaaaacaaaagcaaagcatttgaaattaaataaaagatgatttatagaaaaaaattaacacttcataaatctatttaaaatataataatgttcctctcagaaagcttagaaaagtcctcttgtaaaagaaatcaatcatataatttgggatcatagattttaactcctttcccacttttttcatctgccaattctccgtaccctgctcttccacccaaaagttactcccaaaacacaaaatgatgttaattcatattttttaaatttcttagtcactttctatgcattcaagaaaatttttcatattt

SEQ ID NO: 42462 - DNA, 1401 bp, Bovine  19866880836103
  misc_feature (1)..(1): n is a, c, g, or t
ncccctattttcctctacagaatataaccttttaaaatgacatttaaacaacacatttctgaaatacaaatagattatttcagtcctataaggaaatatctaggaatgaataaatcaatttgcattgtattttaagtgtcatttaaacagttaattctcaaaccaaaatatcataggtaattcagatttgtaaatagtcattaaatcaaaaattgcaaattcacatttgtccaaactctctctcatactccagagtaaggcattattcacataaatttatatttatgtacacacaaaactatgatgaaaatgttaatgaataatatgacgtaaaagtacttgattgaagtcagaaggctttgtcactatttcataatctatccagagatccattttctaggcagttaatcaattccttattcaataatataagaatggtaatagctgccttgcctaacacgtatgttgttacaaggctgaaattaaatcatctaattcatttgcttttcagtttaaaatgtgtctgatatacagtgtctaaaagtaatgtcaagattcatatcaaggcttataagactctcaagaccccttccttcttcattggcctcatagcctcacatgtttccctttctgagcacttccgtggtctcccttcacctatacacaccttaggcttttgctaaacatgcatcctctgtctggagtattttccatgctttgtccatctggaaaacaaaaatctcatcttgatttgtaaattcaagagtcactttctctctaacagtgtccatcctttcccttccactccagtagaactgaccgctccacctttagccccacctctagggtccacaaatattttctcatcatctataacatttcttgtcagttacatttgtgtgtgtttattccccctgcaagactgagagcagcttgggagccagtttttctgtgctttaaccttatctcttgattcactctgtccccataggaaaatcttcaggtatacactggccacatccagcgagatatacttacatttcaaggaaagcttaagtgttcagataaatgaggaggcagaggcaaatgaaatcgtggagggaataaagaagagagctgtgagtaaagacaccaaagtgctttcttctctccatcactttaccttctatcaccaaagacttagctcagaaccaatgttcaggttacgggaagtgagaaccagaattgtgagaagcatgtgtcacggagaagcagcaaccacaccagaaaaaacagactgtggccaacaaactggttgatgttgaagctgattatccaatagtagagtcaggaatatccatctaagtgcaagaactatcacttttagtatatcataaacaaatgatcagttttgatgatagg

SEQ ID NO: 42463 - DNA, 2055 bp, Bovine  19866880850947
  misc_feature (1)..(1): n is a, c, g, or t
ncctaactcaactgtaaatgtaagagagccaatgtgagatttgggactggtactatctgagaggtttgattaaaatttttagaaatattaattggacaaaattgtataaaatagatgatgccatcctacaaaaagataggctagttcttttaaaaactgtcaaagtcatgaaagtcaggaaaagacagaggactcattccagatttaaggagactgaggagttatagcaattaattgcaacacatgatcctgaacggactctggaccaggaagaaaaggagaaatggttgagacagttttgcaaaatttaaacagactgtggattggacaacagtgctctaccaatgtcatattgatatggagtccctgatttggaggtttgaactgtggtcatgtaggagagaatcttttttggagaaacacacattgaatacttaagagtgatgaggtatcatgtttgcagcttgcactcaaatgattcaagaaaatactatggtaattagtatgtatacagagaaacagtgagacagagaaggaacaaatatagtaaaatgtattccagttggggaatcttaatgaagcagatactgatttatgtgccatgtccttgtaactttcctctaaattttaaattatttcagaagaagtttatttttaaatttctaatgagtgcatcgcaagagtcaacatgagagatatttatagatcaatgttagaactcatacttaatgaaaccagtgatttctttgaaattacagaagaatatgagcaacactgctccaacaactgctctgtgggactcctcattacatttcagggctgggcgtctccagccttcacatacacaagctaaccagctggcctcagaacattatgcatggcttctgctagccaaccagacattataacagcagtaaagcatctccaagtgcttagagacgatgttgaaaatgggaatggataagagaagaaactgtaaaggaagaatcaaagcaacaggtacataattcatatcactagggcaagggaggaaattaaaggaatgataatgcctttaactaaacaagaaatcagaagaagctactagtttgatggtaaggaagataaattttctttttaagtgggttgatcataaagtgcacaagacatttcaaattaaacatccggcagactgtaagaaccaggagactaaaactcaaacatgaaatcgattctggcttctaaataaagaactgatcgtcttcctcaaaaatttttcaaattgctatatattatattcatcctttaaacctaagaaatcaataaagttttcactattggtaaattttgaaaactagtaccatcctcatgttgggtcaaggatatatctgcttttattattgagataaccagcagtattagtcataaaccaactccaactttcactagtgctggatatattattaggactaagaacatcctaacataactcaaaaatttctaaaacattaggtttagatcaccgataaatttagaatatagaaaaccaaaaaatccagtggaaagcagcttagttagggagctaattgtatatagacaatcttctttacgaaatgcactattaatcttcttacataacagtagatcatgatgttcaattaactgaagtgctttcagttagctcacttgatgataataaataaataaatatgcaatgatagtccataattggactcaaatactgaaacaggctaatcaactttgtaaaagactaagggaacttcacacagttaccctatccatattctacataacaaatccatcatgacctgattactgtttataaaatactaacataaggattttttcaaaacatttattctattagtcacagtctaaaccaatatagaattcattagtcacagatgccactagttattaacaatttcctgaaggcatttttacccttaatatctgctacatttgctgctcatgcattttaattataaattaaaagcaatgcaaatattataatcagagagagtatttctactcactaaatactatatttaaaat

SEQ ID NO: 42464 - DNA, 2377 bp, Bovine  19866880867458
  misc_feature (1)..(1): n is a, c, g, or t
nagtcagagatgtttaatatcttgactgctactgctaagtcgcttcagccgtgtccgactctgtgcgaccccatagatggcagcccgtcaggctccgccgtccctgggattctccaggcaagaacactggagtggattgccatttccttctccaatgcatgaaagtgaaaagtgaatgtgaagttgctcagtcatgtccgactcttcacgaccccatggactgtagcctaccaggctcctccgtgcgtgggattttccaggcaagagttctggagtggggtgccattgccttctccaatatcttgactaaggtcacagaaaaactagtaagtagtagaattataatttgaattcaggagtgtcaaactctaaaatcaatgccctttctagtataaaacactgcctttagtattaattgcatgattgtctggacagaaaaaaatgtttttaattgtgacttttaaaagtatggagtgttttgaagccatatacgtcagttttctattgctatagcaaattaccacaaatgtagtggctttaaacaacagaaattttgtaagtcagaagttttaagacagactgtgttctttctggaggttttaggagagaatctgcttcctcatctttcccagcttgtagaggctgcctgtataccttggctcagggtcccttcccccgttttccagaatacatcaatgcaacctctacttcccttatcccatccccttcttcagcctttggccctcttgctttctgcttgtaaagaccctctggctacactgtggtccccttgataacccagactaatattaccattctcaagatccttaacgtaattacatcagcattttttttccatgtaaggtaagaaattcataggttttgggggttggggtgtggacatgtttgaggcgggcattattcaacctaccacattgtactggcgatgggcacctaactttgatacacttcccacacaacagagtcactttacagcatcatgaatcactaggtaagtatttacatattccctcctggtaccaaaacatttatttaaagaaccattcaatgtaacataaatgaagtgtaatcctaagaaagatgattgtaatcaaaagaggactttagtaagttatctttatttgaatccaaaatatattgcattcttcatttccatgcagatataaattaaaccatgctcagcagaagataagagttctataatcagaaatcaacatctgcagatattatgacattgcacctgcatgttttgaagtgaagaacacaaaaataccaaccatgtgtaagatgctatctttaagcagtaataattttgcttttactttttcaaaacaaagtatctgttattcctattaaaatttttgaagacatgcttagtttgcaaatttaaatgatgctgtttttctccttcctactcaaatagctcctctgttaaatgaagcttccacaaagagtttttattaccaatcatgaaaattaagcttacaaatacactttgaataaaatataataagaatttccttataatcctgaagatgtgatccttggtttcatgccattaagcttatatttttagtgtgagaaccacagatttgagaccattactattataaaataactcatactattaaaatctcatcaaaaaacaaagtacttagaaatgaacctgacctaggaggtgaaaaacttatatgctgaaaactataaaacaatgataaaggaaacagaatgatttaaagaaatggaaagatatctcatactgtttgatttgaagaattagcattattaaaatggccatgctacccaaagcaatctataaatttaatgtgattcctattaaattgcccgtgattttttcacataattagaatgaataatcctaaaatttatatggaatcatataaatataagagatgcagaattgccaaagcaatcacgagggaaaaaacaaagcaagaggcataactctcccaggttttagacaatattacaaaactacagcaatcaaaatagcatgatcttggcagaaaaacagtcatgcagatcaacagaacagaagagagcccagaaataaacccacatacctgtggtcaattaatccttccacgaaggaggcaagaatatacaatgaaaaaaggcagtctctttggcaagcggtgctgggaaagttggacagctgtgtgtaaatcaatgaagtacatcatactcaaaactaaactcaaagtggcttaaagactcaaacatacaccatgacaatataaaactcctagaagaggacctaggcaaaacattctctgacataaatcatgccagtgttttcttaggtcaggctcccaaggaaagcaaaaagaaacaa

SEQ ID NO: 42465 - DNA, 1158 bp, Bovine  19866880891824
  misc_feature (1)..(1): n is a, c, g, or t
ntcgcttttctataacagtttcctcatccataaaatgagaaatacttttgtcatggggatttctgtgaggattagataaagactgcatttgagaaaaatgcaatataaatacaaagtgttccaccagccagactacgataaattaaaattatcttttaaaaaagtatctatattaactccttcatgtctgcacagcattaatgtgtgtggggtatacaggaacttttgtttacttgaaaggattccagggatttggaaagcagaatgtgatttcctatattttttttagtagaaagaagcctaaaaacagagtttggtgtaactgaattatgcaaatatatttaaatcattcaagctacaaaaaatggcattttgtccaaaaaataataaatgagcaaaaatacccatccaattcacattggttacagtctcaagcttttagttaaaaaaaagatggaaacggaggtatttgatcctagtctgctcttctgtttgatatttaaaacagagtatggtttctctgcctaacgtatttttttagccgacacagccccccacttccgctacgtcacaagcaggaacagtgcctgagggcgcccagagcggggcaagcaagagaaggcggccgtccgcagctgccgggagagcgccacgctgtaacggaggctgcgcactgggaacaaaggctgttatctgagtcaggcagaccactctctctggactatggaccaggaagtgaatagatggcgggagagcagtccagaggagatacgcagacaggaacatagccatcttgagaactgaagccacgttgaccgtgaaacaagagtcagagaaggcaattagcccctaggacagcttctgtccccagactgctttttcagttccagttatccgcacgttttcctacagcgagccgttgtcacccaaggtgccctgatcactcctctgtcccttgccaacccagcatggtttggacttttcttcctcatttcaaaccataaaagacacggtatagatatatatatttttttctagactaaattttcagaaatttcacatgccaagtttattcatttctcatttcttttgtccatcactacattaggtatcatttttgaaagaatattccttagtgagctctataattctagttat

SEQ ID NO: 42466 - DNA, 1361 bp, Bovine  19866881220457
  misc_feature (1)..(1): n is a, c, g, or t
ncgatttcacataccaattacctacttaatatctccactatggtgtctattagacatgtccaaaaccaactcttaatttccctgtcttcctgcaaatcttttcctcttacagtcttccccttctcggtacaaggcaccttcattcttcccttttctcaagccaaaaaatcaccctattttttctctcataaagtccagccgaggcaataacaacttctgttgcctattcctttgggacctggtcagaatcttgccacatctcagcatcccacctatagctgttgcaatatcatcctaaccatcacctgacttgcactattcgtctctgtagtctatgttcaacagaaagcctgaccgatcgagttgaaatgcaaatcacccctttctcctccaggctctcaagcagcttctcgtttcattcagagtgaaagccgtcctcacgacgggccagagggccctccattccctgtcccccaacctcacccccgcttctctgccctcagcccccagcatgttcactgtcttactctgacccagccatgctggaacaggcttctctcacatctctataattcctccctcactgttttccaagtctccgctcaaatgtcacctcattccttgaagggaccttccctggccacctgatgggacacggcagtccctgtcactcctcctgtgcccttaccctgacttgctttgctctgtagcatttaccatcacctcacatagtctgtattttttaaatgtctatattgtcagtctctcccttctagaaagtaggatacctgacggaaggatttcattaagcttatttccaaattcctgtattctcaatgtccagaagactcctggcatatagtaggcctacaataaaccaatgaatgactaattgaatgattgaatgagatccccaaattatatgattctggagggataataatgttttccccataaatatttacttcattctgaaatttaaaccattgccaagttaatttctcttaagcgactgaacattttcctccattaatatatttgatcaagctccatgtctgatttcacaacatttttatcacaaaataccaccaagtcttttccaatggctcagagcaaattcacagtttaatgtgcttttaagctatttggggtcaaaaacaaaattggactcatgctttaactgcttccacaagtataagcaggagctatgcatttgatttcctctctacaattgctggtttcaactacaatcgttataatgactcgtgtgactcagatttggagagagcactgtaatcaggaggggactgctttcaatattcacctccagagtctaggatatgagttaagactccagtgaa

SEQ ID NO: 42467 - DNA, 749 bp, Bovine  19866881279343
  misc_feature (1)..(1): n is a, c, g, or t
natagtaatcatagccaagaagcaaactaattgtcattccccttcagtgccagaaagaactgacatctttcaaaggagatgaaaaggaagatagaatattgacgacaaccatcattacaaagatgggcactcacataacagggcctctccatatcccgggagaatgcatactgttggaaatgttgtagaatggaaagcagtaacaaacactgaggtgcacattactccttcccttagtgaacaggtactgagaaaatcagtggcctaaggcttttctaaccctttgtcaaaatgtattcattgaccgcatttcaataaatatatccactttaatgccagattacggaatcataaaatttcaaaaatggtttaagccttttgtgatctaaaaatgaatcaacagcagataaccactttctaaatgcaaaattgagattagtaaaatttaaacaaaaaactggctgctacctaccacataaatcatcaccatttaatacacttgaaaattctaattatacattttaggcatcttcttacttaaattactcagttaaaacttaaggaaaaattagctaattgcattttagcattatatggaattattattttaaatgaatcaagtgacaattaaattatatcaaaatacttttagtatagtaatatttctattataggatattatataaaattttatagtagatttatatacatgagttaagaaaagacttaacactaagtattgatttagt

SEQ ID NO: 42468 - DNA, 713 bp, Bovine  19866882184731
  misc_feature (1)..(1): n is a, c, g, or t
nttttgatattgatatgctattaaaaaattctctttccactgggctaagatctggaaagggttgctgttcttatgtctagtgatgtgtttgtggatatctgtgcatattagtatacatatgggacttacaaattttaaatctctgtggcaatatttctgtaacacttttgtgacttcagtcttaactagtcacttaagttctaacaaagttaggcaccaccgtatttatagactattagaacatgattcactaaaaataaaagttagtgctatgtacacagtctctagcacttacaggtaaacagaagaatagatctagagagcagactgttggaataggtttgcaaacaagatttggagccacaaatgcatcataggctgttctacacagatcaaaaataatttaggttaggaagttgtggatcataatatccatatgtacactaccatatgtacaaattaatgtgtacaaacaataccatatgtagacgtgaaatgtgacaagcaactcaaacttttctcagtatgtagaggtaaatgtgagaagacagcaaagtgagaattggttaagctttattttaatgacccaactttgcttacaacttgtttttaggatagagcaaaagatacatggcttaaaatcagaattgtgtgtaaatttcaaatatttttatttagaaatttaatcctacaaaaatgttcacttattcaaa

SEQ ID NO: 42469 - DNA, 1170 bp, Bovine  19866880426079
  misc_feature (1)..(1): n is a, c, g, or t
naaaaaacttttgaggttgggtggggtaagaagaaggactcatttttacacagagtcaagctggaaatccagtctccaaatctgcggaaggggatcctttagaatccctccggagctcactccctgacttcagaatggcccccttattggttctctcagccccgccccctgctggagagggccgggcttgagggcggggccaggctgggggcgggtcctcacctgctgtgccgcccgtcgccttgacgaccgcgacaagatggcgaacctgacgggcacgattaaggggctgtaccccgaaacactgagcccagagcagctggagaagctgcgcggcttcaaggtgggtgcggtcccaactcccgcctccatcggagtgcagctcctccccgggtgagggccgggccccagagagaagggactcgggagcctgtgcccagataaaggggcggaaggctgcgggatggggacatctccggcgtacccctggcttctgggtccttgaacagatccccgcaggctcttgaaagtgcaaaaagaactaaaataggaatgtaccagaaaaatggaccgaattgactgccggatactttaacttagatacaaacaagaacttcccaacggtagacacccgactttagttaaggcgcctaagcctgagcctgagacagcactggagatgttaataatctgtaagaagagagatggcttaactgttcaaacatcctgggaagagacccgggttaagggagccccttgtttccccaagccctctgcacctccgcctggaaccctgaaatctttctcttcatggagggtgaccttttgctcttgacccccagattcaaactcggattactaatgaaaagtaccttaggacccacaaagaagtggagttgctcataagtggtttcttcaggtaggtggttttccagactggccttgagtaaatagtgtaaatttttaccaaatctcgttggggatagatgagtgtgagtcacgtcctctttgtttaaacacagcttgttgcttcctttagggtctgaagattagaaaatatcttaagatggaatgttttctaatgctggggcctgtgacacccaggattttcttgttatttctagaggcttccttcagttatctcagaaatattaatatgcattcatttta

SEQ ID NO: 42470 - DNA, 2036 bp, Bovine  19866880489262
  misc_feature (1)..(1): n is a, c, g, or t
nctgatatttgctgtgcaccagtaggatcctcatcaggcagaaactccctgatgtacttttgtagtgcttgtctgtcaataaaaaagacaagaccatctgagctgtcattggtgagggatgcactcgactggtttctgcgggatctctgggcttgctacactggctgtctgagcttgattttgatgcttcccttgggttacgtttgtttgctgcagcatcttctcctgcagggcctcgtacaggggactagagtgttctgcacctctctccaccaaacagagttcttggtctctctgcatcctctcttcaaggcctgactcagagactgaaggatcatgttcttttgtagagagactttgttctcctgccagctgttgggggctttcagtctcctcctccagtgttgcagggcatgtcttttgggagactgcattgttctcatccagactttttactaaatcctcctgggcttctagggctccatcttcctcttttttggtacttgggctctggtcctttagctcttttctactgtctttctttgtagggagttgccttacggaaagctgtttggtgatgcctgcatttggggcacctgggatccctggctccagggactttgtgttttcatctctcactatgaacacctgcgtgtcggagtgtcccctgggctccacagctgggcctcggcctgttgtcgctgagccctgaccctcgtgctcctgtgcatgttcctctgtgacctgctcatcctctcctctgactgccagcactgctgcctcctgaactctcttttcctcactcagtgctaagtgtttctgagtttctgggttattactgtcacttccttgcacagaccctctgaatgggtttgtttgactttgggaatccccttgcacaaacagatcacttgtctctgagttgctgtcaccatcctctgcagtcaggctgttgggggtttcaggagacctctcatcattctgtgtggccactggctcagaaccttccccctggtagccgtcatcttccttgaccaacttgtcatgaattttggtgatcatcttatttttttctccagattggttctcaagtgttgtcaactcccatattctttctcttgttcctggtgtcccttctgcttcaggggcatttttactgttcacaagtgcttctgctgtgccttcctcagcatgtcttgcctcttctcctgggctgatggctccttcactttcggaatctttctgttctcctccttctgagtttaactcatgtgtctcagaatcttctccagcattcttttcttttgatgattcctggagttcatgatacttcttatcttctgttggctcttccagagctggtggctgagttttttcctcaatttgtttctgccctactgtttgatggacctctggacctcttacacccttcctttcaactctaaccatgggtgtttctgaaacatttctgttctcaccttggactgacaagtcccttgtttcatattctttttcttgtatgggtggttctggagtctcagctgttctactctcatccttggcagcagctgatttctgtgtctgagatggtttccgagcagcagcttgttttggcaggtcgacatgttctgaactgggctcatcttttccctgtactgatggttcttgtgatttagggtgtcccttaacacccttctctcctgcaacttcctgatcctcagatgatccaccaggcctctgtgtggtttcttccagtggagaatgcaggattcccaagctcccttcctgttctccaaaccgtcctcctgtctcagtgccactttgtttcctggctagtatatctcccttctggagaatctccttattctgtccctccccctttgtgtgactgctgatctgttctgatcctgccattggcttacttgtctcacgttgggttctactgtcacctgttgctgatacatcttggtccactttctggctctgttcatctcctttcagatgttggttcttagagtcactgtgttcagacgttt

SEQ ID NO: 42471 - DNA, 1311 bp, Bovine  19866880490391
  misc_feature (1)..(1): n is a, c, g, or t
natgcaagataaagcaggaggaatgagaagaggatgaatttaagaggtatcaagggatccccatgctgcctgctcttccctgactgtccctttcctagatacctaacctggggagaaagggatggtggctggtgagaggtgcttttaagcctcacttggtgatacaggaaattgcagaagagaaatggttttctcagtctttctccagtgaggtctctctgcctctgtctcctcacaggtctctgggcctttttcattcccctccactggctgagtgctggcaatgttgatttactatttgcagtgttgggtatctgtttggaaaatgcttagtccaaagaaacagttattgagcatttgccatgtgcaagcagtaagataggtacagaggatacagagagagtagggaggagagggagggagagagactcgaggagcttaaatctaggctggagaggtagacaaattggatcattttcctaaaatgggatttaagtgctacacagagggaagcccaaaggaagggacccttaatccagggaaatagtcctagaggaggtaacactgaaggtgctagaattagccaagcacagaagaattgaaaaggcattccaggtaaggggaacagcatcaacgaaggcaaacaggcgcctaacagtgtgtaagagagtcacagactttcactattataaaagcatggggacttccctgatggtccagcgattaagatgtcatgcttccagtgcagagggcatgggttcaatccctggtcagggaattaagatcccacatgccacatggcgtggcaaaaagatttttttaaaaagcataagagagtgagagagtcctgaacagggctcatttaaggagtagcaggaacaccatttgggggttcagccagaaaacatgttcctgtcccactgcggttcttgcgtgcttccagttctttgaatacagaccctacccctaccaatgggatctggctgacccccaagtgctgagtgtgcagggagggagtacagagggttatcccagcccaggaaggatgggaggacttctctgacctggggacagagctgcagtactcacccttcttcccatgaacccacctccagctgccacccaaggggaagctgcggagcctgtgtagccagcacgtggaaaagctgcaaaccttccagcatctccaccctatcgtggtccaagctgctttccctccactctacaaggaactcttcagcactgaaatcgagtcacccgagggcctgtccaagtgatctggaggagggactccgttctcttccctagagc

SEQ ID NO: 42472 - DNA, 984 bp, Bovine  19866880512733
  misc_feature (1)..(1): n is a, c, g, or t
nacggagaagcctggtaggctgcagtccatggggtcgctaagagtcgaacacgactgagcaacttcactttcacttttcacttttatgcattggagaaggaaatggcaacccactccagtgttcttgcctggagaatcccagggatggggcagcctggtgggctgccgtctgtggggtcgcacagagttggacacgactgaagcgacttagcagcagaagtgctttaaatcacatcgttgaaaggaaatttcaatatttgtaaaatttgtaagaaggtcaagatactgggctcttgtgtgctgactcatccagtatggggtagggcagaacagagtcctccctgcagagaccaaagctgaatcatctccctcttccttctagaaaaacaggcttgaggctaagtgctattaatgctcatcagagccttgatggatgtgcctagaagagcttgaaaggaacaggctgaacctttgcaggaagaacccacaatgcaagggctagtcattgattagctgctgtgcataatgtgacaaataggatttttacattgagcagtccaagttctgtgtccggagagttaattgatattatttttccacttttggtcaatcttattgaaaggatgatgtaaaaacattaaaactttaataacaggctatttttacttttatataacctcttccagactttgccctaaaaaaatattggatagctgcagtcagagtgaacataccgtttttcagataaatgggaattttggtgggaaacaaggtgacttcatgttctatggaggtacctttctcacccagaccttatgattccatcatcttgatcatctccctgtcttagttttggcttcccaggtggctcagtagtaaacaaacaaacaaacaaacaaaccaaacctaataatacacctgccagtgcaggagacataggaaatgtaggttgatctctgggtgggaagattcccgcagaaggaa

SEQ ID NO: 42473 - DNA, 2513 bp, Bovine  19866880566584
  misc_feature (1)..(1): n is a, c, g, or t
nttccctacctcctttcgaagacttgggttgcttttctgggtgcctgatgtcctctgccggctttcagaagttgttttgtggaatttactcggcgtttaaatgttcttttgatgaatttgtgggggagaaagtgttctccccgtcctactcctccgccatcttagctcctcccccatttgtgcatcttgtcctctaagtgtctgttcaaacttttgctcatttttaaattgaattgtttgactcattatttggtttaaaaatttctttatatattctgacttgtttgtgaaggattggaccttggaaaataactatttgagttagttccttgtctgactacttgtgagtgagaatggaatgaaacagaaatgagacaaatctcagtatttgatcaccattatttattgttagttttaatacagttcaattatttgaacccaaagggttgaaacaaatatgttacaatcaaagcaagaaattacatagccatggcacatagtcttcctttccatatgagtataaatgatattttcctatgtggaaaagccagtgaaatatagcaatactttgaaaccattgtatttccttgctattgcttttccagaatttttaaacctgaaacaaattcttttgagttggtgggggtggaggagggaggtctttcttgatgaaaccatgtcagagcccacatttggatcctttcatcttgaactgactcttccctgctctttaagaaatatgctctaagacactggctgtgaagaagcaccatctgttttaatgtctcttgttagcttactgattaaagatgcacctaagaataaaggcgtggtggtttgataagcaaagaaacctccagggcttatctttacttttagggccttctcctttctgccaccatccagtatggggcacaccaagaattgtggttcatattgctataagggaagctttggttccagaattggtaatgtaaattttttactctttagagatgaaagcttagctttggcatcctgtaatgagtaaggagctgtcaaaaagacagctaagcctcaagttcctaaaatgttttgcattattcttccaaatttattcccacaccttatttatttcctaaaacagtggtccccatagccttacattctttgaaaggaaccgtaaacaaggaattgagtataaggtattggtagtattggatttagactgtccatagaagggtgtaaactgtctaaagccacaacttgaggagctttctacttgtctgtaactgcttcctggttgcccgtcattataatttttcctttgcccatcattataatttgatggttacaaccagattccctttgaccttggctgcatccttggctttgttgcctacatgtccctgattatctatgaatactctcatatccatcaaacttgctgcttgatgagctacaacttctacttttttttaactttctactctgaccattcctggctgtttcttcttgatcagttggtgtgtgtgtgctaagttgcttcagtcatgtccagctttttgtgaccctatgaaccgtagcctgccaggctcctctgtccatggaattctccaagcatgaatactggagtaggtttccatgtctgccctcctccaggggatcctcctgacccagggctcaaacccacatcttttaggactcctgcattggcaggcaagttctttatcactagcgccactggggtttgagtctatttggggtttactatgcccatcataagttccacttgagcctggcctacctctcctttgcatttcaagttgttcatggcttgaatactgaccagatctagaaccaccttattcagagcaagatgagtgacacaaaccagacccatattgttcagaactagaacattgacccaagccagatccatgttgactctgagtagaacactgacttgaaatcccagagtacgtatattaaaaaggagcctggtacccagagcctgtttgccttagagcacattctcataattgatagcctttgggagtatttctactcccgctcacttacgtggttcaccagaggaataagtaggatagagactgaagcagcttacaggttgctgctagttggggatagtggcctttttatagaaggaataatggtctatcttagggaggaactgccttctctgagatgtcctaattcattcccagacaagcccaactccacctccatctctacctctcaggtgtttaccttctcacttccttgcctgtccacctgagattgtgttagcagttcccaaatctgggttagtctcaaccccacttgccagagtctctggacactgcaaagaaagacctctttgctgttcaataaagagtaaagcattatgcattgataatgaattttgtgggcttttaatcgaagttgagttgacatcagggacaaaatgtcaatgaatcatggaatctgatcttcagaaagaaccctgaagtcatctagtcaaacttttttaa

SEQ ID NO: 42474 - DNA, 1271 bp, Bovine  19866880686776
  misc_feature (1)..(1): n is a, c, g, or t
natggcatttatagtgatgatgatgacacaaactctgttcatgatagatatagaatcttcagatgagaatatttacttttacatcagcaattcaaagcatacgccctagatttgctttcaagggcacatcaattgtttccttctttcttttccattcattctataattgatctgctgccaggaagggggtctatggcctatttatcttgctttaacaatctgtaccctttcttcctctagttacattctagcctctggaagctccttcctggttgtatatacttcctagctacctcatcctcagtaggaacacttactcttcccaaactttgaaaccatggattcttcaggagttttatagatagaaaaatccttctgtcccttttctttcataaagaagccagagtcctagcagtctttaatggcttatggatttatgggcttctctactgcctcttaccctcctaccacatagaattctggtgaacagatagttctaagtgtttcgaattggcctaaacgtcagggagacatcagctgactgaggtgtattttgcagttttgacttcttctacctacaagtaaagctaagctaccaagttcagctgcttctttctcctgcaagctgctcaaggctgttagtggctgaaatagcaaaactcaacccatttcagggctttatgtaaagccagaggcaagttgagtcaggtgcatactagcccagttcagatcctgccagccgtaggactggttccctcccctgttggttccacgacccagcaatctggggccttggctaagctatttgtcaagcagcaacgtgaggtgataagacaggctggatctctattttgagaatgattgtgaagggagggacctttatattaatttaaatatagattctgtggcccccaccctaagaaactctgaggctggctgctctaacccacttctgcatcaaccctatagcagaggactgtacttcagctcttcgtcagtttgaaaagagagtcccatatgccttaattcttataaccaataaatattcacaggagctgatatgtactgggccattagaaaagaaatgggaaaaaaaagtatgaggtagaaagtcagtgcccattctctagacacaacttcaaccataggagaactaacctttaaaccttttgtgaaaatataaaagataaatacaatacagtataatacagagaacactggttcattattaacttcttgtttctctcatactcaaaggcaaacgtcagcaa

SEQ ID NO: 42475 - DNA, 1128 bp, Bovine  19866880804697
  misc_feature (1)..(1): n is a, c, g, or t
ntgattctttcactgaatcaacatttattgataacctactgtgcatcagacactgttctagaaatgagggttacatcagtgagttcctgtcctcatacagctagtacattctaggatgggaagaaatataataaacacataaataacatatgtagtatgttggttggtgccaagtactacggcaagtacaactctgggagacgttgggggacagggaggcctgacgtgctgcagtccacggggtggcaaagagttggacatgacttggcgactgaaccacaacaacactatggacagaaataaaaaaagggaagggatgggacgtgctggggtggtggagtgggggcagggacaggttatggtttgtaatcaggtggctggggaaggctgcatttgacggtggcctgaagtttttggtctggccccagccagaggccagacatttagccccatacttcacagtctcttttctctgtgcatcagtcactagtgtttcctttcccatccaagtccttccagtttattcagtaaagcttaggcactggggacacaccgtgaatgagatggatgccttggtggacctttcagtcccaacaacgtgagggatgctgtgttaggacactcagggccctgaggcagcatggagcagggaaccatcctctctggagggtgtcagagaagcctttccagatgagatgggaggctgagtcagcgtgccctctcttcacttccagtcctctatcctggccttctgccagttcctttctttgttgaatgtctccccagatttcaagttcctccccatctcacctttcttgttgtcttaggcttcatgactgattctttcttggcctctatttcccagttaaatgaggataatagctgttgccacccttatgctcccaagaatgcaaaggtgtttcagaagattaagagcatttggggattaaagacactagatgatagtttaaaagcttttagctcctgaattagggcatctacctgacacaatgcattgttaagcctcacagatttccctatggtcatacttctgtttctctgtaggctcaagctgggcatatttgggaaatctgggcataattgcttggggtggtgaagtccctgtcc

SEQ ID NO: 42476 - DNA, 975 bp, Bovine  19866880812930
  misc_feature (1)..(1): n is a, c, g, or t
naccccatggactgtagcctagcaggctcccccacccatgggattctccaggcaagagtactggtgtgggttgccatttctttctccaggggaatcttcccgacccagggatcaaacccgggtctctctcattccaggcagacgctttaaccgctgagccaccagggaagccctgaacctctataaagaccatatttccaaataaggtcacattataagatattctgagggttaggactttgccatacctttttaggggcaggggacacaattcaaaccataacagaactttagacaagaataaaagtaaattgagaaaccaatatcgtagaaaatatattctcttccagtagattgagttgaatctattgcaggcaatggattctttgggcttcaggttcttgcttgttttctccttattgaaagtttaggctgaactgagatcaccatttcgaaggtcaaactggtttagtattgacaatttcctatggctcaacctaataaattagaaatatctttgtgggggcttccccagtggcttccctggtggctcagtcatgaagaatctgcctgccaatgcaggagatatgggtttgatcccacattcctcagagtagttaaggccatgtgccacaaccattgagcctgtgctctagagcccaggagctgcaattattgagtcaacgcactgcaactactgaagcccacataatctagagcccatgttccacaagagaagccaacacattgaaatgaaaagtggctcctgcccaccacaactagagaaagtcctcacaccaatgaagacccagcataaccaaaaataaataatacaatttttgaaaaaagaaatatccttgtggtaccctagccagtcatccttccacaggcacaagatcagctggactcctctacttccagggccaactgatcctgggatggccaagtctcctgtcctaaaagctctgtctgtag

SEQ ID NO: 42477 - DNA, 2990 bp, Bovine  19866880850138
  misc_feature (1)..(1): n is a, c, g, or t
ngcagatacagggaaagcagaggtacgtgaatccatggctgtacataccgaaatggttagactatgttctggcattgttaacttgaaacttctttcaagttatcacttgttgggatgtaattggctctctgtgagggacctttgaaacaaagtttttcttttctaccttaatgtgaagctagtctgtgaaataaagagttcattttataattctgttgatttgttcccttcagcaacaccagcactgtaagggattctgctaactgttgggtccagtttccccactgcctggacctagagaggaggacttagaaaatgatttgtgtataaacgagggaagttctgagcctaacggactcctcaggcaacttctggccttcattcttctccaggagtcatgtcttgggagaagtagtttgcccagaatctaatggctttcccattttagcatttgaaaacggtatcccagaaagaatgcccatcttctggtctttcaggaccttttagttcccactcagatgctgcttctccttctctttatgattgaaatcctcagtttatcttttacatcaatgtctctttgacagctttgattcaggggaggggaagtaatagctttgggtactgtctaagtctgatctgatgatctgtgcagaagaacggctgacatttgttggggaagatgacatcgagatagagatgcgagtcccccaagaggctgtaaagctcatcattggtcggcaaggagccaatattaaacaagtaagtgtgtgagcaggcaacagctttcccgggattgatttctgctgtccatcctctgcccccattctgtaaaacccacttacactatgtatattttaaacaaaacaaaacaaaaataggaagtttctggctgctattttccttccagagatgagtacctctactccttatagaatgggtgacttagcttgaaatggggatttttaattggatggttctcatcctggtatagtttgaatcattcctgtctgctatggaattatgaactcttattaattggcagtaattaattgctccctaattctttttaccatcttccattattcatttggaatgtcaagaaaactaaataattgattgtttaatccaaatttggggaaataccagtctaaacacagagaaactgttttggattaactgctgttcagggttatctttgtctctccttccgtaagtacatgtaattgaggactgcttacaaaacccgatttcactgattactgtgtccggttccatccacctccagggttaggtttagagtatccttagctgacccaggtgagagctcttccagaacatactgccacatatccttttctctgcagctaagaaagaagacaggtgctcggatcgatgtggacacggaggatataggagatgagcgggtgctgcttatcagtgggtttcctgttcaggtgtgcaaggccaaagcagcgattcatcagatcctgacagagaatacgccagtgtctgagcagctctcagtcccccagagatccgtgggcagaatcataggtaccactggacaactttctctgctgtttccttttttgttccctttgccttcctttctttcacaccttccagagggcttttcctggccttcttccccttcatcttgctgagggaaattgagagaagagctttactttttttataaagccagtggtaaagcaaaactcattacctcaagaagttgtaagagaacttccctggtggttcagtggttaagaatttgccttccaatgcagggaacatgggttcgatccctaggcggggagctaagatcccacaagcctcagggaagctaagcctgtgtgccacactggagagatgcctgcatgctacagctaagacccaacacagccaaaaataaataataaaaaatttttaaagtatgatctgaaccttacaaataggttccacaagggttcaggtaaatgtatttacctcatattaagacttttaaagggaagctaaggatgctcattttatcctaaatctctcaagaccgtgccatagaaagcactttttatgccttctcctagagcattcctcatgctgctgtgagaggcagagaagcgtcctgtgcttggtccagtggtttcatgtgggatgtctgctaatgaagtgaggacgtgaagtctgcttagtggccagaagatgaaagtgacatgaccacattaacttagccagtgtgtagaatttaaataaaatgggtagagcaaataatctagtacccccctgattacagtaaggatttcagtagctcctgttttccattcactatcctacattctgtttagtttgaaaatgagccctgactctcacctcatagtgtatacaagatagtggcatcactaggagtagtagaggaaaggacagggtcttatgtattattcaatacagggagaggcggcgagacaattcgttctatctgtaaggcctcaggagccaaaataacctgtgacaaagaatcagaaggaacattgctactatcaagacttataaaaatctcaggaacgcagaaggaagtggcagcagctaaggcaagtagctaacctgaattgtatctgagagtgagaagaaccctttactccatcctgggtcagtatctgaccatgtagatatcatcccttctcttattttccacagcatttgatactggagaaagtttcagaagatgaagaacttaggaagagaattgctcattctgcagaaaccagagttccacggaagcagccaatcagcgtaagaagagaggaagtgacagagccaggtggagccagagagccaactttatggaaaaacactggcactagcttaaaacaggctgcacctctggcagttcctccccacaaaggagatggtgacgtggctgctgtgggaccagaagagggttcctgggagaaacctaatgatgacagctttcagaggtctgctgtcca

SEQ ID NO: 42478 - DNA, 1701 bp, Bovine  19866880898094
  misc_feature (1)..(1): n is a, c, g, or t
nttactacttggtactaccttgtgggcaggtgggcacagagcctgggtgtccaggaaagttgcttatatccaggagggaattaaaggctagcggaggagtggccacaggagctgctttttcatttatttatttattatttaggctgtgctgggtcttcattgctgtacacaggctttctctagttgtggtgtgtggacttctcactgtgacttctccggttacagagtgtgggttctagggcgtgtgggctcagtagttgtgacacacaggtttatttgcccagaggcaagtagaatcttcccagaccttctgtgtggaactgttgttgagtatcttgccctgtgggtagtaacttgcatcctagttttgattaaaatccaagtgtggggtaggcagcctgcctctggccacctaggacctttggacctggtgacccatttggtggctatggctggaaatggagcaagactcatctgttaaagaccgattactatgaggttggtggtagttaaagagagaataaacttctcaaccttccaattcttagaaaggatcaattaccacaggtagcaggtggggagaagttgtcaggggaactcagagcagtgtgtccttgctcagaagacgaggaagacaaagaaagccccatggagacttgaagtgggttttttttctgacatgattaaaggactccatgcattctcctgttctgaggccctctcttcttttgcaggcctgggtccactgtgctcaaatacagaagcctggggactgccctggtggtccagtgcaaggggcatgggtttgatccctgttcagggaaataagatcccacatgctgtgtggtacaaccaaaaaaaaaaaaaaaaaaaaaacccactaagggctcaggtaaagcatttatgagtcctgttgactgcatacctgagtaagggaactgacacacactgtctcaagtgtgtgggatgtttatataaactgcgctcaaaaacccttttaggcaagcagcagcatttccaacatgccctaagcagtcaactataacctgtctatgcagctacctccctcttttggtgggtttcagttaattctggcctcaaccccagcttcctggctgtggtcacaagcagtgcaatttggatgacataagggatcaggtttagaaacaaaacgctctgtcagtgtagccagtgtgggtgtgcctggaattatgaccccatgcttagaataaattgtactgccatgttccgaactgtgttgaacactttatcgaaccacaaagcctttaggaagggtctttgtctcatgtgatagtcatcttggcttctaacttacgtaacaacacaattaacgagtgtttagaagcagactgagagcttctttgtgtgatgggcaggtttacaatgagaacattttgtccttgaattttatgcttgcctagaaggatcacagaaagtgaaagtggtcttggagataatcatgtccagcctctcattttacagagcgcctgaactgaggcacagaaagctgaagcaaccttcccagtgttagttagggtcctggtctgggtttgtatcgcagaactgtaagaaagcagagcaccagtgtcctctaactcattctaggatagcactgtggtatctgcagctctaagatacaaagttaaatgatttctatctgtttatttgactgatactgat

SEQ ID NO: 42479 - DNA, 1523 bp, Bovine  19866880898553
  misc_feature (1)..(1): n is a, c, g, or t
ncctcacttcctgcattggaagccgaagcctcaacccctggagcaccagggaggtccctaactgttgctttcttagtgaagctttccctgactaaagtgcttactgtgtgttagacactgtgctaaatgctttacgtacaacgccttacttaatctgaatgtggtcctcattaagttctcccataatagctggaactttaaagtacttattatagtttacaggtaaatgtatatttctatgcctccttcaaatgactgtaagctttctctgtgtctctttggctcatccctgcatccctagtgcctaactcagtaattaaccgatcttgggcactcagaaaatagttgctgaatgaacaaatgaatgggaaacatttggaaagtaggctggggctttttatttttctctctcaactcactctttcttttctcatcaattgtcaatttaaacaccttattctgatgctcccaacttatctccagtgagttctctttacttaatcatctgaataattgtgtgaaataaccattgttatctctgttttatagttagaacacctggagaaaattatatcttccagtactatcatcaaatgtagggttttggtgggatgttataatgcgttcctaagacggatttactatatcactctcattacagagtgctgggatcagtctttttcaacatgacttgcattgaattcagagttaaagactcctgtaaaatttgttatgtagacacctggattgatctaagtattagataaagattctggtagtgagttggggtctgttgaactggataaacagcattctttacagaattaagatttaagaaagtttatttttgccttggtatgccatgagtaataaaaggtaccatttataaatactatacaaattttaaagcacccacatgttactaaagaaacaaatccacttctgtagttgtagctttcctataggccacactttctttcctgttgtataaaaccctttaggattagatattaactcaaatgccttaagagtcttgaaaagcaaagctgcaagagattaacattcatactgtccctgtgtgagttactgaatctctgagcaagtgaagtctgagttaagtcacgaggggcaggagttgtcccaggaatgaggcgggagaggacattgcaactgcagtgtgtccaggtgtcatcctccatgccggaggacagcactgggccactcactcaaggaactgctaccagtttctgtggggttgggacagggaggtagagagagatgaggctgcagaagcaggcagagccttcaagatcctgaaggaccattaccactcatactattaataatatgccagggggttactctgggactctgggcagcaggagccaaggaggactgctagcagagcagtgacattgtttaattgacatttcagaaagatcatgatggagaccatcaaaattgtattggaattgggacttcctttagcagtccagtggttgagacttcaccttctaatgttg

SEQ ID NO: 42480 - DNA, 1517 bp, Bovine  19866880909701
  misc_feature (1)..(1): n is a, c, g, or t
nggttctatccctgggttgggaagatcccctggaggagggcatagcaacccactccagtattcttgcctggagaatcctatggatagagaagcctctcaggctgccgtccatagaatagcaaagagttggacacaactgagtgactgagtccatgcacacacactcccagtaagcagacaaactgaccttccaaacaaagcatatttcaggggtcagactgagctcagatggaaataagcaagctcaactgaacaacaaagttcttaaatctaagattgaaacatgtggcagggtgtccaggaagcacctggtatgagttagtgtccttgatcctcagaaccatctaaaaaggtaggagctattactatccccctattttgagtaatgaaactgaaggacagagaataaagtaacttacccagcctcagaggcagtcaactgcagaggtgggtaatgagctcggacagtcctgctgtagggtgtgcactgtaatggcgagatgaatttttggcaatcacaggttgctgacctctccaggacaggtctcacagtaataggttagtgcccttgcttctgtggcttagccattttgcattatgacacagcataaagcattaagcccatagttacttcatgttacctttaatgacctgaattaggtctaagaaaactgctagccaacaatgacagaatgcttaaattacttcaatgcctaaaaaaagtgactccatttaatcctcagtcggcatttgaatttaggttcaacctaaatgctcttggggtctgccctggtggctcagaggttaaagtgtctgcctgcaatgcgggaggcctgggttggatccctgggtgtggaagatcccctggagaaggaaatggcaacccacttcagtattcttgcctggagaatcccatggatggaggagcctggtgggctatagtccacggggtcgacctgcaaaaagtcggacacgactgagtgacttcacttcacttaaatgctcttagctgagcattaaatgaatgtggtcattgcctccctttttatcttctcaaataatggctctggacccaaagctagtagccctttcttgagttcaagcaattcaagcagcgagaggggtgtcctggcaagtgaggacgttacttcagggcattaggttcttatgggtgtccctgatggcctctgttggtaggataggttctgcggattgtgtttccagtcatggcagtggagttgtgctgatccgtccccagcagaagcccctttgtgatgtgggctggggtttgtaccatgcctggccaaattgggtggaatccttggttgtggaacagtaacactggcaagcataaggaggaatttaggtcgattggcagcaaacagaactttctccatgcatctgtgagtggaacatgtccatcctaccagctgggtctctaccacttcctcagtttttgcttgtttatcagttaactgacaaattagaaatccatcctgttttagtcttcaaagcct

SEQ ID NO: 42481 - DNA, 1942 bp, Bovine  19866880932333
  misc_feature (1)..(1): n is a, c, g, or t
nctagtggggcgctctttttgagcgcggggaggaaaatgagtgagtgcttagccgctcccttgtgttatgtaatcccgcctatagtacatccgaagccttagtgcgctgcagttagtttacaaagtctcctcccctggctctaaaatttcttcgggatggcgccgtgatttataaaatgggatggggcggaaaaagcttattttcgtatggttatatcctgccgcggtgggcgccatgtttatcccagggactattttctccagattcttagcaccttctgaaaaggagggatattgttgatccacctgctttttctgttttcgcaagttgtcctgctttctttcccgtcagacgcgggattccttcaaactgttaataatactgagcgtttctttgcttgtctaggacattttcagctcagaaaaaggtagagctggaaggagtcttgttagacatttagtccaaatttctttttcgagatggaaactgagatacaggtgttctgtctcggaatagccgtcattctattgcagactgtggcccagccctctgcactcctttagacacctcccacctccgcgcaaaaccccacagacgtgcagtttgactttcaaaggaatttttccatctagatgaagggaaacggcgggggcggagggctgcttcttggcaaacggcgttaaattttgagatccgttgcttttggctctgggatttggattctgagtttgaactacttagcacagtcggtctcaacttcaagatgcataaaaagtaccttgcaggtcgctagaagtgctgtttgctggatacctcagctccaagcttatttggatgggatgctgaggggggtatatcgtctctacatttttaatctgcagtccttcagctgagatagattaaggtaaccaccatattaagagttatggttctagcataaaggtgctcaaactatcatcttcgaacaattaagtggcaatctatgctcttgatttcctcccctttctatattatggttgtaatgtaccagctatgctgaagtatctaaagctaaaggaactgacagaatagagtctcttgggatgaacatgattttgtgttcaccccaccttgaaccagtggtaaaatctggaaaagcagttcgcaaaatgtggcctgctaattcctggggttcccctcaggccctctcaggagagctacgaggtggtaactgttttcaaaataatactaagaccctggttagctttttcactggcatttgcactgatggtccaaaggcaacacttgataaaactactgtgggaaacaactaccatacttacttgagaatgtctttgatgaagcaataaattacatttcaacccttcggtacatgtatttttaacttgtaagaatccgtgaccaaatgggagatgtacataaaccactgatactgcctgcttaggtaaatctttgtcataaggaaaggcacttatgagatttagctgcgagttgctcgtttcctggaccagcatttttacttggaaagaacgactgacaaactacagtttttcacacatgagttttcttgaaagcaaatgaagtgagcttgtcacttcagggaaaacaattgacagtatttgttctcagtgataaaaatttgagagtgaaaattagaatttttaaaaatttgatatcaggtttaacaacttctggtacttaaaagactttccttgcaagtcattgttaatgactggttttttaaaatatattttatggtggaatgtgtcaagatttgggacaggcataactcagtaaatctgtattttcaaatgacttttgcataactcaagtcactgtgagtaatcttcaaaattcaacatacactgatggaatttaacataactttcatcagtagggtttcagattccaatatccaactattgtttaagagactgttat

SEQ ID NO: 42482 - DNA, 1912 bp, Bovine  19866881095024
  misc_feature (1)..(1): n is a, c, g, or t
ncagtgctgcttctctgtcctgcccctggctcttgggtggctgcaggggcaccacggccagactcctgagatccacatactccctcaggaccctcactcagtgtctcgaaacaggcctgggcgactttgaacactaagaccaagaattccttgaattccactgtccctgtgtcatcttcgtccagcaggcgcaggacttcatccacagtggccggatcatggggtttctgtggagaagatgaggctacgtcagtacccctcctttgaggaggacaaggtcaggccagtcagctaagcttccaggcatcctacctctgggcctaagggcccaactgcttggcaccccccacaccacacacacacgcacacacacacacacacacacacaccctgctaccacagaagcactaacataaaatcactgtcattgagtccagctccctcaagggcaggaagcatgctttgtgttgtatcctgtgtgttgggcccagtttccggtctacaggagaactggataaagatgtcatgaagaatggctaaatgactgagcttgtagattcttcaggctgccctcaggccctggaccctggcatggaggtgttttttttctccagcgagcacaccaccaagaaaagctcagcaggaagatggccccgtgggaattctgtgaggtcctcactgaggagctcaggtgttttcccaagttggggcatctggtgggttgccctcagtgtgcagaagcagcaccctgctgtgcccacaccttcctgcccccaggactttcaccatcccggttgctttagctgtacaccaaaggcagggagagtgagggaagtgcatcagggctctggggctgtcttgcaggaaggggctcccagagtctcccctagctgctacacctcacttctgatgcgacctctcagctaatgtattggagcaactgcttccagccaagcacaaagccgtacttcttgtgaatgctcgttactgatgatcacacttccggtagacgtagacgtggccgccatatcagatttaagaagcagcagaaagtaacgattgccatttctagaatagtcaaaggctccgttcctttctgagctgtccctttagtgtcctcttactctgtctccaaattagaattaattgaagtcaaggtatttctttaaggaccaggcccgtgaccatccctgctccctctcctgctctttctctgctgcgcagcctccattaggactggcgggcctgggtgtagcggcttagaatcccaagcaaatatggccattctctcttccctcctgctccccacaccccgacccgtgcgtctcttaccacgatgacatcagcgaactctttctccaggagccttttgagctcccctctttccagcactgcgcaatcgccctccatcctggcatagcgcctgaaggcttcgatgatcccattaatgtttcgaagtaactgcggcatctttgagtcctgctgaggaaagaggaaaagccccagcttgggggatccataatcaacctagctgtttcctagagagcacttttgcttctaagtcctttctttgcctattcagctctgctttgggcccctctgctgtgtcttccttggtattgcctacgtaacgcgttttaccaacgggcaggaggagcaggtgtggttgcaggcagggtctagatgcggccccaccgcctccctgtcaggtgaactggggtgggctgctttgcctctccatgcctcagtttactcactgcgaaatgaaggcagtattattatttattttatacgattattatgaagatttaaagagatttttcatataaaacacttggcagatgctggtaagactaagtgctagctattaaatatcactagcaggttattatacccacatataatttgtgca

SEQ ID NO: 42483 - DNA, 3638 bp, Bovine  19866881133331
  misc_feature (1)..(1): n is a, c, g, or t
ngaatgtctctccctggcctttaaggccctcctatcaggccttccttcactttcctctatttcctgcacgtgcccccactctagccagactggacccctctggttgtttcactgagcgctcttctaggcagtgcagaaacaaaagtggagatgacgcggttcctaccctggaggagttcactctcaatagaatgtgagctgttcccttgactttccagacctttgctcctgctgcttccttgttctggaaggctcttgtccctcagcctttgtcccatgtgtacctcaaggtacacatctcaaatgccagatgctgtgtgatgacctggggggtcttgtttgaagaggctgccctctctctgatctctcagcacactattctgaaccctcctgtagcactacctggaggttacttggcattttggaaacttacccgtttccttgtgcttgactgtcctttttttgaggtggggctgtatttatctttttaaaatcaatccctcatatcttatatagtgacttacacctaatttgtgctcagcagttgtcaagttgaattgaaggaaaagaagggaagcaaaattgtcgaaacttggaaggcaggggcctcctgggcaggcagggcagctgtagccacgaggctatgttgcagaaccctggccttggagccacacgacctggggctcctctcctttatttactcacttcatgaacttgggcaaatggtcaaccttttgaaagctcggtttcttcctgtgtaaaacggggcacagtcattgctgtttcacggggttggagagtgaggtaatatctgtggacctgctttatgagccataaaactccgtgggatgtgaaggcagtctcagctgcccagtgggccggccctgcgggtgtcgtcacagcgtccacgggcctgccgggccaacagctgcctcacgtctgtctgctcagctttgtttcctgtgctctcttgccccacccgtggcaatttctggttgctcttcctcagaaggttgtgggtgccacacctgtcccccacacgtgagaccctcagggacgaggcagcgagctcttcaaccctggcctggccttggttttgtgaaatgattgtcgagtgaatgacaagcttcacttggctacagcactcgctgtctcgtgagctgatcattccctaggctccttgcttctggccccggatcctgacttgaaggagaatcacaccggaaagggtccttggcaggaggcctctggctctctgcccgctacgacaggtgtgtctcaggtcatcggccgacagacagctcaggacctgctttacctccaccccgtgccccttgttgttttccagagaaatgtttttgaaaagaccagacaacattccagaatttgccgcaggtgagtaaggcagcatccctttggggtgagtgatcaacgcgcaccaggagtgttcctgtgaactgcgacttggacaaggcagagcctgggctaccacttcacccgatgtctcccaagggagctttcttcaaaacgctctttcctccatgttatttcctcagaatgaggacagataagaaatgaggcagaacttcctcgtggtaaagatggttaagaatgttgagattcccaaagggacagacaggcagctcttttcccgggaatcttaaagcagggttctcagcccaggctgtgcattaaagtcacctggggagcttttaaaaaataccgatgcccgggcccaccccagggttttatttaattagtctggggtggggcctggcatccactgttttaaaggctccccaggtgattctaatgggctccgctgccctgagagggcttgaggtcaatggtatttaaagggaaggggctaggccgactgatttcttaggtccttttagccctgggagtccgttacagcctcacaaggttcctgattgaatctaagtacgtctttgctgccacagcagatgctgcctctgattcacattatgccgggtgtataaaaatcctcctttgtcgtcatcctgcgagagcctggccctccttggagaggatattctcagagagggcgtgatgtctcagacaggagccggcaggccgagtggagacaagaataacacttggtatttatttgggccccaagatgggcctggagcagaaagccagagactcgtcaaccctctgacggcttcctgtgcgtcagcaagctgataagccagtggcagggtggtgtggtggggaccggggccaccccgtgtcccccttcccgggaacactggagctggaggctcagaagtgctgggggtcggggcagtgcagatggtgaccctggaatttgctgtgacatctcatattacatcgtaaaactggtctgcaggaacagtcctgccaagacagagctgtccctaactttttagcagagtgagctgtctctcccctcgtctacttccccttagatttagatgatttcttctttttgattctcatcccagactatttcacggatccaagacttcccaacaagattcacatgcagctaattaaggagaagaaagcggcttaattagcaaaatcacgatgctcagctgttgagagagaccagaaagaatccagcctttggtgggtgttaacctcacttacagacagaggcttcttcactcctgtgaaataagcactggctcatcggcctggggtgtgaaagaaaccaaacagtctgcagagaagtttctgcaagtgttgagttttcctgacaccaccttggggaattaggggctgtgaagagaggcccagggtttgtctggcgtatctgtggcagagacatccgtcttcttaatctagtgacgtggttgagagtggaagttggagtagttctggaggaaagagaggcagggaagcgggggtgggatctgttgccacaggcttcctgcgagctcctgtagtggccttttccttgtgtccttggtggtgggagtggaagggcttccccgctgcttctggaaggggtggaggccgcttccctcgcagcatttggattgggcatgcccccacccccatcgtcaaaccaggctaccctgtgagggccagcacacattttccaggcaggcttctgaaatgatgtggaaggttgggagttttaaatgtgaggtgggaagaagccacactcctgatttagcagcaccatttcttttttttgcagggtcatctgaaagccagagagctgtgttgccctcagtgtgggtttccaggctgccctgggctgcgcctgctgttgcaaaggcttttaaagatactcattaaaagcagaccttcctgtgctctctgctttatttcaatcaggaggaggaagacatccttcacgggaggctgctctacccctcctctgacctgggaggtagcagggcctgtctctgtgtccatggcagaggcctctcagttcagccagtgggctggctgcccgcatgtgctccctgcccctccagaccctccctcccagggccaagactagacagaagaacagtggcgagtatctggagaggaccacagctggccgtggtggtactcaaatgaacggagtccccgcttccgaggtggcttttgttttttatcttacctccggggttactgtaccgagagtacag

SEQ ID NO: 42484 - DNA, 1276 bp, Bovine  19866881152257
  misc_feature (1)..(1): n is a, c, g, or t
naatgaaacaagataataccctttccccttccttcgatgagtctaaaaccattacttaactgaaggtgcttaaagaagaaaataaaaataaaacaatccgagagtagagaaggagggaagactgggtttggtggtgatgaatcagggctttagacccagaggctgtctccttcctaactgtgcaattagagactcaataaaaggtttgagcacctcctgtcagctcacagccgctgccccacattccacttgctctcactcgagaacaaggtaagtctcagagactatctgcttgaccatatttagaatctcggctgctattcttgtgtgagattgtatgagaatgtataagaattttagaaaaaaatacactcttaactctaggttgatgattattaataataataattaaattattaataataataataaaatttcattttaaaaacctataaactatttgtatgacataggtatgaatacaatttaataagacacaggactcagacctatattaaaatatagggtcatttaaatgatggataatgactaaggggttgagactctgttttaccagtgaattcatggagccacatttcttggtaaaaacatgttgcttggcctgcataaatggaggctgattttctgtgttacttctctttcctctggaagtttttcctaacttaaaagttatactttcctacaatgaggagctagattgagccaagggcggaggaaaacaggtggccagactcagatgatgctgaaatgattagtaccactctgttggcttcatttgtacattttagtacttacatttgagttctttttctactctccttttacaataaagctttccctgaacacatgagtgtctctattttctgcagggtagggagaagtatctcttctaatatttatctatgcaaaaatcctatctcaccacattatctggcacaaattttaagataaagaatagaataaatgatgtcagtggagctgggggagggacagaaggaagggagatctggtatctccttcctgagagatctatcctaggaagtgagctttgtttgttctttctcacagtctcctgagtttgtaaagatgcctcagctcctgagagacatcctctgtgtaattgagacattccacaagtacgccagggaggatgcagcgacgctgacctgcacagagctgaaacagctcatccagagcgaatttgaggacatttttcaggtgaagtgctcatggagctatggaaattcttctccat

SEQ ID NO: 42485 - DNA, 982 bp, Bovine  19866881194726
  misc_feature (1)..(1): n is a, c, g, or t
nacagagtcggacacgactgaagcgacttagcagcagcagcagcagggtatcattagtttttatacgactcacaagctaaaaatgctttccacattttaagttgaaaaaaacttgtgacatgaaatcatgaaatttaagggtcaggtcaatcagtaggttttattgaaacacggcagtgctcatctgtttatacagtcctttaatgctgtaagagcagaggtgagtagcccatctggtctacaagcctataatatttaacacctgatcctttacagaaaagcttgccaactcctcctgcaggagagcactggccccaaaaacatgtttcacccacaatgctttcttccctctgtggtgacagccagctcctgcaggaaattagccctcaacaaattccacctcccctgcaattccatagtctcagtcacacctctgatgaagcgagataacctggcccaaatcaggcatccagaggaagcatggccacagaatggatactgactctgctagccctctgagtaacacctagaacaaagcatgcagcataataacggttgaatttggaatcatataatttatcatttcccaatagttgctaccactccttcccaattcctgatgatcatattgtataagttgtaagcctatgtgacttcacccagcttcagtgagacttgtgctatacatttacaacagatggtgtgtagagcaaggtcctcaaggacgacccctaacatatgattcagtttatatccatgtgaaatcacgtcctctgaggtaaacacgggaagagaaaggacagatcctaatcctgtgaaaaaatagaagtggtcaatgcagatcactgcagtcatgagccttactcctctttcaattcaatttggcaaacacttagggggaccttaatgtgacagccaatgtgctgtgtctataagcaacatagggatcatatgagtgaaactgttagtcactcagttgtgt

SEQ ID NO: 42486 - DNA, 2454 bp, Bovine  19866881268468
  misc_feature (1)..(1): n is a, c, g, or t
ntagagctttcgtcttttccggatacatgcccaggagtggaattgctggatcatatggtaaatctatttttagtttttttaaggaatctccatactcttttccatagtggctgcataacttgcggaatcttgcacagtgttttctcaaccagatattctacaagggtagggaccacgtccagttcatcaccaaagtcctgtcatcaaggctctgtagtctttagcccatcacgttaatagtgattgaatggaacatgaagcccagttgcttaggaagcttttattgatgtgttaggatagacgaggcaatggacagacagcagaatctataaaagtaactgaaacccccccacaagctaaggaaaacgtggcacaaagggatgagttgttgcatgtcttcttgcccctgctcagcaaaggaggtaagagagaaaaattaaggatagcaatcaccttgcagaaatggcctcactgagaaagagctaagagcgaagtaccaccatgaagagctaatgttcagggacttgctaaccggactggccagggcacagcaagccaactgccctctgctcttctctgtgctgggcactggagtccagggctggggcactcatggcttgctgcttttgaagtaagaatacagtcccctggctgtgagtcctcgcttcccgtctggcggggctgcctcccggccttgtgctgaagggacactagcgtgtaggctgccctggtcctgccttcggatcactgtctccctcgtgtggtcatcaacccactcctgatgaaccacagtgggatctctttctccctggcctcctgtcgcactggacggtgggtgagtactgcttctgtcctgcctgcccgtcacagtgctcgccccagtctgggcctgccctcccagcactgtctctcctgcctcgcagttgctcacctgtgtctgtctttgactactgcctgactgcctctggggctggccctgttctcctgccccggtgtgccttgtaatctggcccctgtcctgttccatggcctggggggcacctccctgtgtctgaatgtgtcctcctgtcacaacctgccttgtctgatacctgtcttgactgtgagtctcagtccctctggtggactcctgtggttgcgtgctgacacttcctgtctgatggctcctgtcctgctccgtggtatgagtgtgtatctgggtttgtggccttgtctctgctgtctgactgtgggtctcagtccctctggtggactcccgtggctgggtgctggcgcttcctgtctgatggctcctgtcctgctccgtggtacgaatgtgtgtctgggtttgtggccttgtctctgcctgaatgtgtcctcctgtcaccacttggcttgtctggttcctgtcttgactgtgggtctcagtccctctggtggactcccgtggctgggtgctggtgcttccagtctgctggctcctattttgttccactgtctgggtttgtgaccttgtctgtgtctgaatgtgtcctgtcaccacttggcttgtctgcctcccactctgactgtgggcctcagtccctctggtggactcctgtggctgggtgctggtgcttcctgtctgatggctcctgtcctgctccaaggtatgagtgtgtatctgggtttgtgaccttgtctctgcctgaatatgtcttcctgtcaccacttggcttgtctgtctcccatcttgactgtgggcctcagtccctctggtggactcccgtggctgggtgctggcacttcctgtctgatgactcctgtcctgctccgtggtatgagtgtgtgtctgggtttgtgaccttgtctctgcctgaatgtgtcctcctgtcaccacttggcttgtctgcctcccatcttgactgtgggtctcagtccctctggtggactcctgtggctgggtgctggtgcttcctgtctgatggctcctgtcctgctccgtggtatgagtgtgtatctgggtttgtggccttgtctctgcctgaacgtgtcctcctgtcaccacttggcttgtctggttcccgtcttgactgtgggtctcagtccctctggtggactcccgtggctgggtgctagtgcttcctgtctgatggctcctgtcctgctccgtggtatgagtgtgtatctgggtttgtggccttgtctctgcctgaacgtgtcctcctgtcaccacttggcttgtctgactgtgggtctcagtccctctggtggactcccgtggctgggtgctggtgcttcctgtctgatggctcctgtcctgctccgtagtatgagtgtgtatctgggtttgtggccttgtctctgctgtctgactgtgggtctcagtccctctggtggactcccgtggctgggtgctggcgcttcctgtctgatggctcctgtcctgctccactgcctgagtggcacttgtccgggtctgagttatggttccag

SEQ ID NO: 42487 - DNA, 1811 bp, Bovine  19866881343043
  misc_feature (1)..(1): n is a, c, g, or t
nttctcctcggtaaaatatagcatttagggatctgtgttgagtacgcatatgtcagcaacaggaaccagaatgaatgcatgtctccagttcctattgagactcttcaggagaagatgccagcctccccttcaaccactgctctaaaccaagggtccctatcttctgggactgtggaccagtacctcctgtcagatcagtgatggcattcaattagaaataaagtacacaataaatgtaatgctcttgaatcatcctgaaaccatcccccatacccattccccatctgtggaaaaactgtcttccacaaaaccagcccctggtgccaaaatgtttggggactgctgctgctgccgctaagtcggttcagtcgtgtccgactctgttcgaccccatagacggcagcccaccaggttcccctgtctctgggattctccaggcgagaacactggagtgggttgccattgccttctactctaaaccaattcctaacctttttttttgagtggtatattagtctcgattcaatttcatctgtttcctatccagtagtgattttagttagtgtaagccaaagctactctgttcttgctgaagcatgccttccaattaagcaaaattcactgggctcctcttcagtaccaggcattgggccttgatgagacaaatgcccccagattattatacctgaatataatgatctgacaaatcctttcctttcttttaagctattcacaatgaaaagctcttcctttcccactgcacctcagactgtgagagtagctcttctgtctagtgctgccaaaaatatatcagatccccaaagtgattagtatatactgttacttgttatatatacctcaaggctttgggtagcttgtatttgggtagggcaactgatgttgctaccaaagatgcaaatgactttgttatgatcaataacaagttcagaactttagtaaagaatactaggaattccctggagatccagtggttagtgttcctcactttcactgaagcggcctgggttcaatccctggccggggagcacagatcccacaagccatgctgtgtggccaaaaaaaaaaaaaaaagtgctcagaagatgaaattcattaagcagatttctaaaccctagaatgagaccaagcaaggtctagtgaagcttggagggttgaagttcttttattaatgacgcttgactgtggctgttggtattcagccatgtccacatggaagagtcccatttaccagcgcccgccaccaccgccaccaagagaagtggtgagacatctgttctctcagtaggtgctttgtcagttaaacgaaggggcactgatcttgcttttccaaatgatcagagtttttattcttcattatgcaaacttagcaggcaactagataaaacccctcattcagagcaccagtacctgaagtgcctgtttccatcagcaggaggaaggccccaaacctggggtgaattggaaaaggattgaatggctgagctcttccagtcattctcaaaagactggtaattcatgtccctgaatgtagccttggggcaactaagccgtgtgggttacagctactgagcttttgtgctctagagcctgcctgcagcaactaagacccaatacaaccaaataaataaatgaataaaattttttagagttaatgtgtattgtttctttccatcctttaataggtttcaacagacttcaccaaaatgccgtctcaaatggagcacgccatggaaaccatgatgttcacatttcacaaatttgcaggtataaaggtacttaacaaaggaaga

SEQ ID NO: 42488 - DNA, 852 bp, Bovine  19866881497021
  misc_feature (1)..(1): n is a, c, g, or t
ngcgtagtgcagttggccttccttatccgaagatgtggaacctgtgaataccagatggccaactatattcattttttccataaaaagttctttaataaaaccccccccccctatttacatctggttctaattattaaaaaaaataaaaaagttaaactttaaattcatcttcatccacagaaagctgttgagactggacactagacttttctgttgtgctgatgtctcattggacaggaaccccctcctgcttgctgttccactctgggtgtctgagtttgttttgcatgtttggtttaaatttatgaatttgtacaaaaagcttagcgaaaatgagaaaatattgttttgacttcccagctgaatctgaaatcagaatgaaattgttcatgcagctagtccacaagctttattaaaattagaggccccagaggcatagttatgggcttggaaataatatcttcatctgttggcttctataaacagcaaaagaatgtcatccctcaagattcactctgcatgacttgtgattccttcacatgtgtatacgtgcattaatacattcgtcaaacatttatggagctcctggtacatattgaatattttgtaggctctgaaaacacatggaaagacttgggccctgaagttaagaagttcacagtctagtaggtaggatagatgtttaaagcaagtagttgcagtgtgctgctgctgctgctgctaagtcacttcagtcgtgtctgactctgtgcgaccccagagacggcagcccaccaggccccaccgtcccttggattctccaggcaagaatactgggagtggggttgccatttcctcctccaatgcatgaaa

SEQ ID NO: 42489 - DNA, 820 bp, Bovine  19866881791023
  misc_feature (1)..(1): n is a, c, g, or t
ntacttatatcttttggtcttgggcctcccaaagttcaggacagacataggcaccctcagagtgtcatttagcaagtgagacaaaattcatattttatggcaagacaagaaaaatataaacataaaattcctctctgccctttggcttcccctctccccacactatggtgtatttgcattgtgtattgaccaaaccctcccccatgagcaggtataaatggcaacattctcctagcaccaacaaggcaactccttaagagataacattacttcttgatcttttaaggggtcatatgacccaccaggatgttgcttagagctgaattatataaacagtcaataatacatcatttgggaggtgccaaacctgcatacagcccctgacccactccaggggcagcagtgagcaggggaagctgctgtagtggaaaaaaaaaaaaagataaaaaaaaataatacatcatttgatgttcaggcaactgtctcaaaaatttttacataaccgtgccttgatttctaactggcagaaccgttctcagaactttctgatatgctcttctcaggttataatcctcaaatttgccttgaataaaattttctaattatttcttagattgactgattaatttcatgagcaatcgccacctcacaccaatattcatcccactctgtggtgggctcttctggtaacttcagtgcatgtggggggtgatcacaacaccaggatttctgggggaagtggcaacaactatttcagaatttatctctcattcgacattgttcttcacctccatctccaggtgacttctttttaaaaatt

SEQ ID NO: 42490 - DNA, 1250 bp, Bovine  19866880350507
  misc_feature (1)..(1): n is a, c, g, or t
ngcttgaagtggttttttgaataattcaagggagtattttctgtattttgcttccctttggagttcgtatgtcctaaagggaaaaattcaaggagtaaaataaaggaaaagtctgggcttgctttatcccttatgaaataaaggaatcaataaatgttggttgaatgttgaatatatttgctatactcagaagttagatgtgtgctacaacactttaacttgggagatagaaaagaaatgcaaaggtcctcttggtttttcagatatagaaatagggctagcctatgggtgccttaaaggaacatatttttgtgctttcaaaaagaaaggatcaagtaattaaaatgtcttatgcaattaacagtattttaggagtatatcaatagttctatgaattacagtaatcttctttctcagttccagtaagtttacccaatgataagtggagccacataaccaaagagacagataatttacctatggctcagaggagagctacaagaattgtctaataaccagaaattgttttgcagaggaagggataaaatagcaggctttttatcctgaggaaggacttttaaaaagcatttttgaaaactgcacagagaataaatacaattgaaaaaaattctgatctaattcttttatgcgtcatatggaatcctaggaagaatcattgcaataattatccaaagtaatgttcaatgtaacaaaagagatgtttggtcttaaatgtatatgcatttaagtgtagaatgtccaaattaacaggtcaaagggaaagtattaatatatgtgcagtttctaacagcaaaaaaataggctagtttgtaaataccgtattcttcaatgaagaaaacaaaaatcaagaataaaatgttggatagtcttatcaaccaggtcatctttaaagacagcttttcaagatagcaaaaatgtgcaacaattaagcttgactcatgtaactaaaacattcgttgctatactagcagcagtactttttttaatagagttcacaattcagaacacaaccaataattatatattagtatcagtaggaacaccaaatattatctcacaaccgccactaggtatttcttcttgtctgacacagtctgcacagatccaggcttgctgcgtttgatacaattcagttcgtcaacgagcttctttcatgatgtgctgctcctgaatctggctggagacagattttggtagatattggtgatgagagatacgttttatgtgag

SEQ ID NO: 42491 - DNA, 1381 bp, Bovine  19866880398573
  misc_feature (1)..(1): n is a, c, g, or t
ntaggttgtggttaccagggccaggggggataggagacaggggagtgactactaatgggtttggggtttcattttggggggatgaaaatgttctaaaactggattgtggtgacggtctgtgaatagagtaaaaaccactgaactgtacactttcaatgggtgaattacatgctatgtgtattatatctcaatagagctgtttaaaaaaaatagagctctaaagccagactgcctgccttccagtgtcagcacagcaatagctgtgcaacacagggcaagttatttcacgtctactaaatttttcctcatttcccctatctgtacaaaggggacaatcatgcaaataaaatcactggattgttgtgaatattacaaaagagcacatgtcaagtcctttccgcagcgtccagcgtatactgtgtgctctgtaagtgtaaacaattggcaaggcctagaggcacagatgagcagcagctgttaaagatgaaccagatgtcaagggagcaggtctacaggcagggaagtcacagaaacggcagctgggccccaggaatgtgcactggatactgaggtggaggttgcctgaatgtgtgctccttgcatgccagaggcccgcccctggggtgcggagaatacaagatgctgggctctggcccccaagtccatgggctccacaggtgtgttctgaggcccagatatgcacactttttgaaagttcccttagtgactctaatcatcagctgggtttaagaataccttgtatgtttctcagagaggcagccaagctcagaccaagcaggcccactgggtacccctagaacccagaacaatggcaggtgggagctggggcagggctgatgatgactgtaggagaggttcctgtgcccactgaggaatgaggtagacatgggagagaatgcacttcaacagggtccctacaccctaaagacatccttagaaggcctttgaggttgtcagtagaaaacatgcaatcagcaggttcatcctgcctaaggagaagtgacagctttgggaaagaccagatgacaaactagaaaacagagctgcagtggcatagctcttgaatgtgattgattgggtctgaattgtccaagaggaacaagagccacgcagtatggctagacatccagacttatatttttattaagggtgtgttcttccgtatgaaacatcttctcacaaatttcctactgaagaatcaccaggtactagttcatcggggtctggtttctaaggagatcattacacaaactattccacccgaagaattcggctaccattggcactcctaacacctgttatcatatgagggtggttggcaataagaagtgagccttttatttgtaacaaactgaacata

SEQ ID NO: 42492 - DNA, 1260 bp, Bovine  19866880514933
  misc_feature (1)..(1): n is a, c, g, or t
nctgtgctttcctgccagggcctaggttcgtccctggttagggaactgagatcccacaagctgcatgggaaggccaaaaaaagtaaactttttcttctgttatgtctatatgaagcaagaaacaagtttctagaaggctgtgattagcaatgagaagtctgaaacagggggaaagactggctatggtgttagtagctataagtgttagtagcatagactatttgtagtgaggaaggctgattattaggagactagttaaccactgagagactatattaatagtaattttgtaccttaagtgtgaaatatttttacctttcttccctggattatgtgttttttgaaaccacaattttatatagtcaaaacagcacaatataaggaaaaaactgtttagaagacatctgcactcctaggtgaagacgctggggagtgggttcataggcctcagaggctctaaggtagaatcctaaaccagggccccagaaagctgctgaggccgagagaaccaccttctcctctgtccagggtgctgcacgggaccggggaggggcccccaaactgctttagagtattacatggcaggacgatgctctatatctgcagactgccgttatataatacagctaccgatctgtgcttttaaaagacttaggtctattcggagaccttatcctactgaaaatattcatagtaagcattttttatttgtttgtttttagtgcctcagcataattcatttcccggacacttccagcatcactatcttctcgagactgattttaatgcttgccaggaactataagcagatatgtttgctttcatgatattcagtttatttgttttcagacagcttagacgcctcatttctagtggtgctgtatgtgcatatacataaatatgtgtctgtcaactcaattttctccttggaactttggactgggttgtaacagctttgattgcctccagaaagttttgctacagctggagagtttgatgtggctatgagaactcttattctccaatttctctctttggccttaggtttaatgttctctagttctttcacacatacaaagagggcaggggcaatctcttgtgattcatgaaaaaaaattttttttttttttgaggagcaaccaatgtagaaaaagaagtatatgttgactaaaaagagtgtgtgtgtgccctagcactccttcctactgcaaaatggggactccagggtgttttccaaagcgaataacctgttctctgatt

SEQ ID NO: 42493 - DNA, 674 bp, Bovine  19866880552458
  misc_feature (1)..(1): n is a, c, g, or t
ntccagagcaagaagaaaccccacaggtaaacattctctgctacctctgctggccccttccagggctggcatcacctccttggagtggcagccatggggctgcccagcctggcttctccagcacaggccctgggctctcccaggccaagcagcaccaccactggacagtctcccttctgcctgaatgttaattccatttctgccccatggaggtcaccctgaactggtccagtttcccttccatggacactttgccaaatgctttgttccctgaaatatccttctccaggctaaatactctcagacatcttctaaaatcattcctctcaaaaggtcattttcactcttctcctgatctctgggtgctctttggctcccacggccttcctaaactgtgacactcagaagggagaccattataggtgggcagctcccatctgtctgttgtggatattgttctcctgttaagtccaccaggcactcaagctatattttttatttctaacagccacatcacccttaagtcttatttcacactcttcactgccaagctgcttatccacaggtgtcctttaaaaatgtcatcttgttggagtcagtccgctgctctgacctctggagatctttctggactctgactcattaatgtaattgttcttcctcctaaatctctc

SEQ ID NO: 42494 - DNA, 1329 bp, Bovine  19866880692890
  misc_feature (1)..(1): n is a, c, g, or t
natggcttattttgtttttatatttaagtatcctgctgtataccatctttaattctgtcagcagatttaaatcttgaaattactcagtatatgtatgtgcacctatgtatttcactttctctctcttaagaaaattttccttctgatatctctcatattttctggtatcattttatactaaacaatctaaaaaatttttaacaatattgacatcaagtagtctgcatcattaactccctttgtccttacccccaacaaatcatgggatggcccgggggggaaggcaagcacatcacctttgcagtagtctgcggggtcctcctgctcctcatcgtctgagcccagaatctcctcctctggctctggtggggcagggtccggcagaggcggtggtggtggcggaggcggcggtggaggcaccaagggagctttctgctgaggctccggcctgaaacaagaggagggagaattcctattgactcagaaggaaatcctgcgtcatgaacacactttagagtttcttaatatggaaaacaatataacttttcacacactaagaggagatgctgattaatgttatttcattttaggtgaattcaagtaaagtttcaaatcacaagagggctacccttggctgtcctattagccgacgaatatttttgcaggcacattttcactcagagtttcaatacttcaattagatatatactaatatcatgaattgtaagtgaaataagacaatcagccccccatgacatgtaatcttgttagttagaacacattcccagagattagaaaaaagaggacaataatcctggacattaaaaaaaaaaaaaaagtttattatccatcatttttaaatcaaaattcatttacccattgaaaccatagaaatgtggttaggattcttggataactcataaaagccaactaatgtttactgtaactgatacatagatattttcattaaacaattcagttatctatcaaccttacttatcaagacaagaacattgttccaaactggaaattaaacaaagaaaacatgtgaatgtagtctaatacaaatacaattcatacatcaatgcaaagtttccatgggtcatttctgattgtcacataaagctaaatatttagtatactctttacagaagataggaaaacctataacactaaaaagaagcaaaaaacttaagaggttacagatgtaaacctttcaagtatctagaatacctcaagaatatattaaatttgctcaaaaataaggcattcataatgcaactctataaaatgaagtttccacttataaaatttaactgcaatttctag

SEQ ID NO: 42495 - DNA, 2962 bp, Bovine  19866880719476
  misc_feature (1)..(1): n is a, c, g, or t
ntcttaaggccctgcagagccctgcctactgccctggcccagagttctttcaggcccgtgttaagtccgccttaactccatccctctggaggtcagcacagcacatgctctcaggcttgtcactgtgtcatttaggtgtgactctgtgagtcagtgccctgaggaagagcctgcctggggccaggggcaggcttcctggtaatttatgtctaagacaagcttttaatagagatacacttttaaacagtaaccaggaaaaagattctctctttttaactggtatccatttataggactcagctgttgaagctcaagggtagcattaggcttaagtttaatcttctgtatgccgtaatttacagcactgagtaaagcattgtacgtacaactatttcagtcatttgctgtgataaatagctattgctcttggcggaacagaaacgccatctctgctttccacttatgaatattgaatggtctcaggcaggcttctgctgtaagtttttaaaggggaaatccccactggtcacatctcctcagtggccccaaatgccatttccctgctgtgtgcactagtcagtgctcgattcggaccgcagttctgcggcacccatgttgttcctggtgaatgtcacacagggcacgcccagcagctacgggccccagtcctgctgaaggctgcagttttgcactgaatgcctcgagctgttaggtagaagatttagctagtggcaggaagccaccaacagggatcagggagatatcttagaggcgataatctggcacagggaaaatagaaggggtgtgattctgttggattcctgatggtgagaagatggtgttagctagggaaattgaaactaataggagcaaaaggagacggggaatgcccaggttataaatctctggggataaactctttaggaacacagagacacatatgccttcctccagacctcccttagttcggatgctgtgttccctgccagctgggaggaagcaaaatgtatattcaaatacgatgctcaggtccactgaccagcttgacccagaagttcaagtccaagtcaactggttaccctagacttgggctcccagaaatccccccaatttctttcctgtggacaaactttctgcattggaggaactgaaatctttagattggcatcctttggtgtgtctcatgtgtgtgagtctgcactgggtccttacaagtactccaagtatcgcactggatggtgagataaggactcaagggcgaacgtgagcagagatggtgaacgagtgaaatgctgcgctcttgcctgcttctgaatcctgtgatggagactgtcttccgcagtcacattcccaaatgccacttctcagcagtatctctagaaggtgattcctttgaaaacagagatgagaggcttctgttctcactaccgccttttgagggtgatcatgtatctttagaaacagctacagcatcttgccatttacgaagcaccctctcctagcgtgttcattttgatttgagtaacagctcagtaaggtggactggtaggggctggtttcccaggtttggaagctcaaagaagtttagcaactttcctaacatcacatatctcacctcagtgcatttgccatgaacagagaccccagtgagaaaatacacagaggccaccaaatagtatgtccacaattggagacaaattcaccttttatgaacctgacagtctttgtatttctaattcccagctccaggcagtgaacacatcttctgactctcttatatctctttcacttgagatctgagctttctctaataattatttgaaaaacaatcttaacagtgttgactccgaagaaatgttattcagcctgcctataggttatgatatgccttttcatttcttggcctgaagattccttcagaataaagtcacggtcatttcagcagacattgaaggcagttagttagttgtgatctgcatgcgaataaatccactcagcattctgattagttataatgggtgataagagaattgtacagaccaaaaactccacatacttgtttcatgcatgtaaacctactaatgagaatgggttttggcaaaaatctgagcattgatgttcctgccactggacctcagaattgcttgttagtattctgggaaccagagtgcagacacagatacagtacaacttgatcttgagggcctctctcatctcctggccttcgataagtttgttaaacagggagatgagaggaagcagtctggagagaggatgatacgtaagtggcttaagagacctggcagtttaggactccttggcaaccttgctgtgacctcccacctcttcttgcccatctgtgaaatgggctatgcaccaggattattattcaagatgataatcttgagaacatcttggcatgtgactcatgctataaatacaccttgctgccatgtggaaaatatgagtttttagctgaaatgtataatggggtgaggcagagggtatcagtcactggtagcaggaggattgccagaggcaggaggtgtgcgggaatgaggcagatgcttgcctaaagaaggagaacagagagaagcgtgaagcatctggggcaatgtggtggaatgttcaaacaaacaaacgcaatatagatgtttggatgtctggcctggattttgaaagcagtcagggggttggagatgagcctctgtcttttcaccttgcaggctctgtgctcctgctttggcacacactgaactccagaggccttatctaaccagtccccatgtggggttcagctgctatgtttgaaggctggttgtgttgcagatgcagggaggggttagaaacagccagaccctgcagccaggctgtatgggcatgactgtggctctaccactgaccagctaggtgaccttcagctgacgcctcagtctcaccgtgtcttagtttccccatctac

SEQ ID NO: 42496 - DNA, 1090 bp, Bovine  19866880732585
  misc_feature (1)..(1): n is a, c, g, or t
ntattatttttatacagaaggtgacttttgctagagagctgttcctacctcttcatctactgggacagacaagtcactcaaatggctgattcgtccatctcttcctatttcgtgaacgacaaagtcagagtatctgaggaaaagaaaatcagagcattattattttgctgcctattaattttaggagaaagtttgtcaacagtaagccttattgttgtgcaaacaggtattaaaaataaaaactctcagtgcaaagtcatgtagttattttttctggtttcgtgatgaagtctaatccacaccttggcctggtaccaggtacagaaaagaccttctgagcttctagaatactcttccagaaaaatgcctaggtcaaagcttattaatgttgccctatgattacatagttcattctaaagtgaatcatgaaacacagcaaatttaactaaattggaagctagtgtatctaccttgagccaccctgaagcttacctttatgctaaatactttacatacattatttaaagtcctattaactattcccaggtagcattatgacccatttttcggacaaggattctgaggctcaaagaagttaagtaactatgaagtggctgaactacattcacacccagatccacctggctacaaagactaccttctctctcctgtcgatgtggcccattcaggtaaaagagtttaagattttaagaccaattcaagggaaaactcgaaaccatttaattaccattgaaagtaatatattttaaggaaatacccattcacatactaacaaagcaggccacagggaaattgctattttttactcattttatattcaaatggtttcatttacttatttgggcagctttcctattcctgaccgaccactggtgtgaaaaatccttggggacagaacactaaaaatggaaaaatagactgatttctttttaaagaaaagaattaataaaacaaaaataacttgatacaaaaacaaaacgaacctttcttttaagattcctgagaatccctggtgagaacttacgaacttggtgatgcccacatccagctctgtgagcccatgcttcat

SEQ ID NO: 42497 - DNA, 1519 bp, Bovine  19866880760103
  misc_feature (1)..(1): n is a, c, g, or t
ntgactttaagaagagtttggagggggacacacagtaatcacgcagccatgagagcaaaggagaaaagttctccccgcctcacactttctatttgacataagtgattaaaatgcagctgaaaagtctactagcagagagaaaagacacattaataaaaactggataatgagcatattaagattaatgggagaaaggaaggcatttaggaccagcttctcccaccatgaaaggtacttctcctgagtggcatctctgtctaaatgtgaatccacttggaggcagccatgtgtgtccttgaatcacagttgccgttcttcccgataatctcccctgtcctgagtttatgtaattggaagcccacaaatcaaaaccactgccagccgagttcatctttttggtagctttccgagggagtccagtggcactggctctccagccatcatcacacggttgtcacatccagagttcccatcacagtctgtggatccattccgttacccaccacgggcagaggctcacacttaccttcctgcaaaagattcagtgtggtgaaatcacataatctgttttttccattatgttgtgtttttttagagtcagttcaaaagggaaactcaattttaaaagtatatgaaactattgttatactagagtcatatgctaccttgacattttcatgatttctatagcaaccggggtggtttcagaaccctgaaaaagactttgggggaacctgaggccattttctggggctttttttgttttttttttttcaagaaattaaaattcaatattgtctactttgctgtcttccttttccctactgtgggatcttctgagcgagtgcaggcatcactgctgaagctgcccaccccccagcccccggccttcaaaggcagtctgcttccagctgcttctgtgtgcagcctttgcttaacttggccttcccacttgcaaaaggaaggaatccctctttcttaagcgttttgtcttttgaactctcaccagttgttgcttggtaatacccaggtcttgagctttggaaggttccaggggcaaattcaaaagtgcacagaatctagtgtgatcctgcagccacaaaaccagttgtcttcccatcatagaaacaaatcctgtacaaatagctaattggacatgtcaccctgccttttcctttacctcagccattttcactaagtgaatattgggtataaaggaaaatttatacacaactttgcttgtctgaagtgttccctcagaaggccatttataaaatgctgctcctcctagtctgccaatttctttctttctttttttaaatgtatttgtttatttatttggctgtaccaggtctttgttgcgacatgcaggatctttagctgtggcatgcaaacccttagtggctgtgtgtgggatctaattttctgaccagggatgtaacctgggcctcctgcattgggagcacggagttcttaggcactggaccaccaggcaagtcctgccaatttctttttcagt

SEQ ID NO: 42498 - DNA, 2306 bp, Bovine  19866880772210
  misc_feature (1)..(1): n is a, c, g, or t
nactctgcataacactctatagtgaaatgaagttgcccagtcgtgtctgactctttgccccccatggactgtagcctgccaggcttctcaatccatgggattttccaggctagagtactggagtgggttgctatctccaggggatcttcctgatccagggattgaacctgggtctcccgcattgtaggcagacgcgttaccctctgagccaccagggaagccctgtaacactctataggtggatccatatctctgcaaataacccaatttcattgctttttctggctaagtactattccactgtaccacatctcctttatcctttgtgttatactttgttgatggatgtttaggttgcttccacatcctggctattggaaacagtgctgcagcgaacacggaggtgcaagtgtctgtttgaattatggttttctctgggtataggcctagtagagggattgctgggtcatacggtggttcttgctccctctgttttaaagttttaaagcatatggttgcacattgtttggacctgcactgcccaatagagctggactgtgagtcagaaatgagtgctatgtgtttaaatgctctagtagcccaatgaaaaaggtgaaataatacaagtgaaattcattttagcatagttgacctcaatatatccaaactgttatcctttcaacatataaccaacataaaaatgattcatgagatatttcacacccttctttcatagtatgtcttcagactcgtgtattttacatgtacagctcattttctttggaccagccacagtgcaaatgttgtgtgatcacaggtccccgtggttggtggctgagacccagtacttgcttccctgcccatgcaccttctgtgttgtgacgggtgcaggtggagcaggctcagaggcaagcatcaggacacaaagacatgcagaatggtccctatgtggataattatattcattggcatttcctcctgccctttctccacctcctgaaggaggctctatgggccccactccctcccacccaactcccacactccccgccccctgctgcttggaaatggccaccgtgactgcagcaaagcctcctcagagactcaaagaacgttaatcagtttcacagctggaggcaaagtgatctagtgcagcaattcctccattaaggggctttctcttggcctttccattagggaaggacttctgcataaagtgaaatgtgctttgtcttcaccagggcagacaaaggatgaaatcaaaagagccataaccttgctaccagctgggctaccgggagaggcaacagggaaggcagttctctctctgcttccatctggctcatggctctgaaaagtggtagcaacttctgtcagatgcctgccggtcccactggatgggacttttaagatgccttgagcagcattctatttcctgacgagggaaggaactgaggcccttgccagggccaggtaatgccggtcagaatgaagggatcctgctcatccccttctacccctttctggcaaattgtccttggtgtcctgctcctttctttcctgagtgatagcacccttcctgttccccagggacgtccatccccacaacaggtgccctcacacatacatcccattcactgccccccaggcatctgcctaactcagaagtcaccaccagaagtgtttgcaaaatgctttacaccccaggttcttgtgagactgctcaagaaaggaaaaagcagtgctattggataattccttggagaaggcaatggcacccactccagtactcttgcctggaaaatcccacggaggagcctggtaggctgcagtccatggggtcgagaagagtcggacacgactgagcgacttccctttcacttttcactttcatgcattggagaaggaaatggcaccccactccagtgttcttgcctggagaatcccagggacgggggagcctggtgggctgccgtctatggggtcgcacagagtcagtcacaactgaagagacgtagcagcagcagcagcgctcagctagcagttgaaacacaagcagtctttctctagaggtgtcgtcttaaatccttatattgcagccaccgattaaaggcaggttcaaagggtatacatgagagtggctggtattgtctccgtgtctctgtgaatcattctatcttgaaactaaaggggaatgcaacatattcagtgtttggatatttagaatttgtagtgcttttttttttttaaattgagcataatttacatacattaaaatgcacagctctttacagtagagtttatat

SEQ ID NO: 42499 - DNA, 1030 bp, Bovine  19866880868184
  misc_feature (1)..(1): n is a, c, g, or t
nttcataatcccaccacatagtcacaaacaacctcaatcattttagagcacacctctccaagatttcagtggaagtggacatcttgaccccggagaagaaagcacagacacactgaccacactggagattcgttaaagtcattaagccagggcagggcaaccacatatttcatcatccaattcactcagagtgaaagggcttctttccctccttctattaataagttagccaaaaaaacatacataaattggggttatccctggccaatccaagtgtacactgccccttcatatcagaatagttgcgcgtacagtttaggaatccttacttaagaaacagtcccaaagaggctatgaattacaatttcttactcagcacagcttatttttataatttgtcaaaaagagaaaactaaaacaaaaacaacaaaaaagatgatgatgatgatgatgatgatgataaacccaagttctaacaagttgaaaattttaatgaaaaaaaatttttaaacaaaaacctacaatatacttagcatcaaacagtacaaaatatagatctcttgcctaagttagcaaaaacaatgaaacaatttatctttgcataagaagtcacccaataaaaaacacatacagaataagacttcttttctgattatcaaggcaccactaaagcagtacatccagtttttcacacccaaaataaaataacacatctttctggttttccctcctataactgggtcagaggccttaagaaagctagagggaggaaagagcctgaacatcaaaatacactgtttcaaacagactcctaggagatgataagaagtaatgggatgagagcagaaaataaaaccatgattaacaaaatctagttagaaccagatatagaaatagtactattctatacataaagcaagagaaaaatataaagtatctgaatacagatttaaatacagataagttaaacgacacttactcctggaaggtaagttatgaccaacctacataacatattcaaaagcagaga

SEQ ID NO: 42500 - DNA, 1873 bp, Bovine  19866880892661
  misc_feature (1)..(1): n is a, c, g, or t
nctgaatgtatgaaacgccctgaactgtatatttattttttggcccactgcacaaaatgtgttatcttagttccttaaccagagatcaaatccatggccccctgcagtggaagcatagagtcttaacaaagagactgtatactttaaatgaatgaattatatatgagttagatctcaagctgttaaaaaaaaaagtatcttaaacatgttaacatatttttttgctttcagttcttcttacagcttcaacaggcagcactggaagtctttgcagagaataacactctgagtaaactccagctaggacagctagcctctatggaaagctctgtctttgatgacatgattaacctgttagagcgtttaaagcatgacatgctgacccggcaagtagaccatgtttttagagaagttaaagatgctgcaaaactgtataaaaaagagaggtaagtcctctgtattttcttataagtcaactctcaactccagtttatgaaagttaacagataacatgcagtcagatttccaaagtgtctatagacagcgtggagtttggccttttgcactcccaacttttaaccatttttgatggaaatctttctaaaatatgttttgacagtcttaatcagaataaatggataacttaaccttcagatgtggctgtaaatccagacggctggtgtctgatagggggttaaatggcctagcctgtcacccactgacaaagccaggtgttgctgcagtacctgtgcatgcctgcactgtagtgtagtcactgcccacgattccttgtgatgtctgttacctcccccagacggtggcttccttgagcacaggcagtgtctgtcctagcacagccgtgtcacacagaggacttatccgtttagaagtgtcaatagtccctgttgttttgctgaaaattaacagtgtaaaattaactaatgtcttaaatgttaatgcattttacattttaactgttttatatcagtaagtcatgttaaatttggaggtttacagattttatcatcctgcttaagtaaagagtgtttcattgagaactaaagtataaacatgaaagaaagtgtaagttgctcagttgtatctgactctttgctactgtatcgtccacggaagtctccaggccagaatactggagtgggtagcctttcccttctccaggggatcttcccaacccagggatcaaacccaggtctcccgcattgcaggaagattcttaatcagctgagccaccaggaatcccaagaatactggagtgagtagcctatcccttctccagtggatcttcctgacccaggatttgaaccggggtctcctgcattgcaggcagattctttaccagatgaaccacaagggaagcaaaaagtataaacataggtacagggaactccctggccatccagtggttaggacttggggctttcactgctgaggcctgggttcagtccctggtcagggagttaagatcctgcaagctgtgaggcatggccaaaaataaaataacataacataaaataaacaaacaggtatatttattttctgagagcacttctaatgttgggctgtatagtttttcttatccagaatgccccagaaaagtgtatttccccagatttaaaataagtaaaaaatcttaaacatatagaatgatgaaaaatttcataataaaaatgaatatgctgcagacagtgctgtttctgctttttccaggtggttgtccttgccatcgcagtctgaacaggcggtgatgtccctgtccagttcagcttgccccttgctgcttactttacgagaccgtttacttcagttagagcagcagctttgcttctctctatttaaagttttctggcaaatg

SEQ ID NO: 42501 - DNA, 1817 bp, Bovine  19866880904495
  misc_feature (1)..(1): n is a, c, g, or t
nacagataggaaaccaacagaaaatgaggacaggaagcagaagatgagtatcttcaaatgccaagagcccttatggaccggcttagtacagagcctccagccttatcttgctggccctgtgaaggcagatgagggataagtatggagattgttcatctatatacttaaagaggaagaagtcttctgttaattcatgctagttaattacacttacgttcatagctgggaaagctgtggatgaaagtcatcatcaattggtttgtcactgcacgtgggaaattatgatgactttgtaaagagctaattgtgccagatcaactgaggagcctctcacgacagagaggaagggttcagacgtggctctcaagaaggggatcacctgtcatgcagccggggttcatggccaggctttgctgtcttccaagtgttaggatctccatactgtaggacatgactgtaactggttaggaaagacctagcctatgagtgatactggtggcctctgggcctgcctgctggtcgcgtgagtgttcctcttttggtgacctcggagagcacctgaaaggttgtttgccaaggcatcatctcgtgtcctgatgtaagtgcttcctgaatcactgcctctatacagatctcagctggtgaccttgggcaagtgactcgatcttggtgtgcctgttttcctcatgtgtaaatgaagaatgcggttaacaatatctctgccccacgggattttgtctatccccgtgagtatggcttcccttgcagctcagctggtaaagaatccacctgcaatgcaggagacctgggctcgatccctggagtgggaagatcccctggagagtggagaaaggaaaggctacccactccagtattcttgcctggagaattccatggactgtatagtccatggggtcgcaaagagtcggacatgattaagtgactttcactttcatgaggatgtagtagtctaagttttttaaaagcagcaagtgtgatgtctggagcagagcgcatcagtaaatatttgatgatcatgttatcattatcactattgtcacatgtgccaaaggacagaattcctataactcctcaaccagatttagaagcaaaatctcctggtaaaagtagagaagtggttcttcaaactcagactgaagttcaaaatggaaaaagataacctttgattcagagtctagaaatgagctctagagcaaccaaatgagggaaactgggacaaggctcatggggagtgagttgggaggagactcaggggtcacagatcacagtgtgaatgctataaatgataaacatggtcccgaagggcaagacacagcaccaagaattctcctaggaaacaaggcttcagggggaccgctggggttagatcagccaccatgtttgggtcacaccagctagcctgcacttcctaagccctgctctgggcaaggccccttcagctagagacagaaggtggttttgagagaatctgaaaatactagacagggtccaaagaacggcaatcaaaaggattgcaaggagagaaatagccattctgagaaaaggactccaaaaactacagcactgaccttgtgtgaagagcagaaaggtcctggggtgatctacctgactgcaagtaggtggatattctagacagatcaagggatgcaggaccagtgaggcttgagcgttgattgcagcagcctctctctcatctctggtcagtccatcccctgcccgccaacaccagcgaggtgtatcggagggctgggaatagttgatttggtggcttccagggcctacctcagttcaggaag

SEQ ID NO: 42502 - DNA, 1579 bp, Bovine  19866880904725
  misc_feature (1)..(1): n is a, c, g, or t
ncagatggagaatacacgttcttcctccaggatctggtaggtgatccttggcttgaatgatagaagcaggagagtgagtgggggctggtggtgtctttgacttcaggcaccctcttcatgttgggtggctgagtgttcattctgctctttgttcttgctctaaatatctgatatctgtgtgctcatcattctagctgctttaacccatcaccttatttatagtcttgccatacatcatccaaggaaatggcaacccacttcagtattcttgcctggaaaatcctatgtacagaggagcctggagggctacagtccatggggtcgctggagtcaaacatgacttagcaactaaaccaccaaacatcatccattagaccaaagcccagcaaatgtagggaactgggaagcaactctaggcttaatttcattcactctcttcccctttcccaaagataaaaattccattggcatttttttccctcccaaataatggcataatctagggactaatatagccattgtctttcactggaaaggcatgagccatgaaagttgtttttttgtttttttttaaatactttgtaggcttctcagtgttcactcactaccagctgcattgccagctgagcaggctgttatcacagtgagacctcaagttcagtgtttgcttcccagagagggagacagataacaaacaagttatagagatttccagatgggggatgtcacaactgggttgtgtaataagtcccagaaagatggcggctccttattcagaggcaccaactggctcctaccatcactgaaagcccttgaggacacctaatgcctccattcattggaaggagaggagaggaatgttgagcagctcttggtaagacttggagaagcagaatttgaacacctatcataggttgctttctgaggttctgattccttctgtgtactccaattgtggggctgcttgccaggggcacaacttttactaggagcaggaggaaaggggacaaaagagtctgtatgaatagaagccagttgatcaaggagtcaggggtgataatcctcttgtcagattctaagactctcccctcctttattacactgattctattgtggcacctgcttattttcttcctactgtttaggacaatttgtaattagtttattaatttgcatccctgcttgtaatctgtctccccctctaaatcagaggtgctcaaactttggtgcaatctaaaggcttattgaaaacacagatttctggactccatctgcagagtttctcatccagtatacctggggatgtgaaattccaggtttcagcattcttccctggaggtcatagtgatgatcatggtcaggagaggtataactttaatgttctggggtgggctgaagaatctggtcttctaataaattttcaggtgatggtgatattgctagtctggggactacactcagaaccactgacctctactcgtaatataagctccacgaaagcagagatcattttttacttatttacctaagtgcttgcttgataatatagggattatcgtatctacagattgaatgaatg

SEQ ID NO: 42503 - DNA, 1150 bp, Bovine  19866880909864
  misc_feature (1)..(1): n is a, c, g, or t
natggttttctgtcccttctctccccacttccccagattcctggacacaatgcccaggaataaagacaatgggtaagcactgctttcctgtggttacagggacaagcagcgagaacagtcagccagccgccagcacccacccgacactcaccatggtttgtcccttgatcccttcgctgaaaagattgtgtgctgtttgctgctggaggtaagtagattgtctttgggcgttttgaatggctttgaggagctgctggcagagttatggccgctgagacaggttttcgttttcacctgtactagggatgtcctggaattggagggtggagacgccggagatggagaaggtctacacattgaaccgtgtcttctctctacagggggagaaagaatagaactcagcacgtcatctgtagcaagtgagtcacatgcatgctagtatacacaacaggcagagagcagagtgctgatcttgcagtgctggcccctggagcctctgttctgactacagtttgcttgacatcctgtcccgccaactagcagtgattaccttctgaatctctgtatcaaatggcacactgcactcgcgccagagttctcaccggaggcgtttaccaggcaatcctccaaaatcattgccacagacgggaacagagaggggatgccaggtgttacctgggcgcagtgagagaaccacacaaccacacatcctcagacagccactcagaggccacagggtccctgagggcagtgaggagggtacgacttttaagaaagccaacagaaatttctcaaacctgaccccctagcgcatgttaagtcacttcagtcatgtccaactttttgcaaccccgtggactgtagcccgcctgactcccctgtccatgggattctccaggcaagaatactggagtgggctgccattcccttctccaggggatcttcccaacccagggatcgaacctgcatctctcatgtctcctgcattggcaggcaggttctttaccactagtgccacttgggaagacccctagtgggagcactgaaatcacaaggacctgcagggctgaatgaaagcgtcctctagatctgggaggtggccaagcttctgtccacatgtccctgggcctttccaggactcactgaggcc

SEQ ID NO: 42504 - DNA, 1339 bp, Bovine  19866880920186
  misc_feature (1)..(1): n is a, c, g, or t
nccccatacttcccaggcattcagaatcccttttgcatcttcttggcagccaggaactttttcctttagttaagactgtcctcctgggatggtgccccagattccaagattattccttattgcctacattccaattaaaactcccacttttctcactgccaggagggaaaagaataagataattttttgttgaagtattatgctgtaatagaccttttaatgcagtaattctccaaggttgggtggttagggttgtcctcgttctcttaggattatacctggataacaaaatcaaagtcaataaactcctaggcttctcatcatttggtcattccaggaaaagaaaaaaaagaagaagacaaacaagaaaccagaagagtttatctaaaaacaaacagaaaccttgcttttacagcaaggaaaataacaacaatcgaattgtttcagaaagcaaagaccaatttatctagcttgtgagaaaattacaagtgatacttgctttaaagaaaaaaactagggagcataaaatatacaaactgatgaagcataaagaatgatcacaaggaggttctccaaaagaatcctttgaatggccaactcttaaagtgtgtttaaagtaaaattccatttacaaaaattatctttacagttaactttttaggaaacaagctactggataaaacactttcttttgcctcttagagaaattataaacaaacttacattgccatcattccatcagcatcagatttttcaaggtcagctcctactcaggtctttattttcccttttgtatcacttaagaagattggtttttgttgttgataagaggacagacttcctgggcatgtcttggtcaacactgacagtggtcattcgggtgatctgttctctcttaataaatgccacagcgtcactcagaagatcatggtggtcctgatacaaaatcgacagggccagaatcaggagggaaatgcttccatgcatttctttttttttttttttttttttatgttaggtacaggaagttcagatcctgaggcaaacctgtccagcttgctaaagaaaaagcacttcatctgctcactttactgtcccatatctatcacaccccgttctctccctggcaggaaggcagttctctgtacttgcaaatagaataaacaaactatccatagagaactagtagacattttgatttttattttccacctgatttcaagagagtaaaatattaggttggtccaaaattaattgcagtttcagaccgtgaattttaaattgctataactaggctcaaacatatcttattatcaaaagaggaggcatacaatcaaca

SEQ ID NO: 42505 - DNA, 1034 bp, Bovine  19866880920721
  misc_feature (1)..(1): n is a, c, g, or t
ntttagttgcaggagataagattattcttttttttttttaacaaacatataaattattttatttacaaagccatgttacaaaaaaaaaaaaaaaaaagcaaaagcaaaaaaaaaaaaatacaatcgctcactggagaatgtctccaggcctggtgccgcaccacgtcagtatcaatagatacatgtttgttctttcctttttaaaactgtaagccatagaatttactatttacacctactttagaacatttattctgcttacaatatcacaggcatggaatgaattctatctgatagtgctaatacataaaggtgcgggacaaagaaggaaaatacttagtgttacaaaatatggatcgtagaaaagaaacccactccacaagtgtggtatttgtttagaatatttggacatgctttcttcaaaatttctggaaaaggttctaaaattggtagtaggaaaggacaaatgagcaggtgcaaattctcttctgtgcaacaacagttattgaatataccccatgactgaccagctacataaaacccacagagttttgttaaagtgccatgggctgacagcataacaaaatagaaggtgtaaatagaaaatttctttttttccttttttaaaacaagagttcactgagaatcagcaataatagaatatgctgtataaactattctttacaaaggttggtcagcattatttacaattggtacattgatacaaaagaaggcatacaagttatccaggtcgctttttttttatggctgacaggtctatgcattgcgttacgctttaacaaccagagctttcgagcctctgtggctggcgacaagtcacaagatcttcaggcagatgggggggtgtgtgcagtcaaggggctaggagagagggctgagtgggggtgtgcaaaacagaagtacccaaaggatattcccccaataatgctttataggctggtccagttgaactccatccaaacaaactgaaagaaaaccttttatttgcattccatttttcaagctgtgagttt

SEQ ID NO: 42506 - DNA, 1210 bp, Bovine  19866880929879
  misc_feature (1)..(1): n is a, c, g, or t
nttttaaaggtattttgaagattaactagtactgtcaaataattttaagtctatggatgaaagactggataaaagtataaggtattagcataaagatgtgcattgcattttgccatatttattggggatattcgttgctattggcaaccttgacttcaaggtaagaaatccctgagcatctgctgaaattaaaaaaggcatttttatttggactgtactcacaaattgatttgagaaaaaaaaaaaaactggctccaaaagagtgatgcttaagcttgtaagaatggtggtgctctgcaatgggatttgggcagaagttcttaaaggaggtaatcccgtagacactgcaactcacatgcaatttatggttaaatgtgcaccttgaacctggttgctttcatttacatttgaaatattgttttcaacaaggttgacttaaaaaaaggaaaaactagctggtgattcagattcagacctggcctctctggcaatttgttgtatcataaggcaaccaacatttgtccagtaacaaagaataaaattaaggtcacagaactacagaattcaagattgttacggaagggtattaacatcaagcgtccagctcttcatgttacagaaagccaaaatttaactcctagtcgctgaaccttcccagggtgagccaccccttctggtcagatggctgctggggaagaagcccagccaggaagaatggcccggccgtctgatgggggtggtcatggccctccctcagtgtgtcagaggaaatagagtccctgaagttctagaaagcagtagttttcaagctcatcaagttctcagaacctccttagtcccaacccaatagtgatgaagcagggctgggagtccagtcttcactttagtccccagccctggtccttctcttaatcagactctgaatcctgggggacatagttgcccaaaggcttccatgttgtcaagtgtaaaccagggcagaatgctctcgggttaattcttgtccaccctttctcccctcacagggtgaagaaagtaggtacgtatgatgttagttacctttgtttgctgctcttgttgtttttttgctggctctgttgtactcttgggttggccaaaaagttcaatcaggttctttctctaacatcttgtggaaaaaaccaaacgaacttttcagccaatctaatatataaaagcactccaacttagt

SEQ ID NO: 42507 - DNA, 1030 bp, Bovine  19866880939023
  misc_feature (1)..(1): n is a, c, g, or t
ngtcttagaagtgcctatgtgtcagatacaaaattacagtgtttttctgtactttggcctttggtctttccccacaaaccttgggtggagtgtgggtgaaggttaatagggaacagttttgtatcctcagatcagggagtgcatctccaccagtttgagtcacttgtggtggggtttgcactgagcacctgcagcccatcctttgtgctagggtgaaggaagggccccaggaatctgcctgttgatagcaggcctcctgaacgggttgcaaggtgtgcctggagactccactttgacccttcgcaggcacctgtgccttcaccagctccaggcacaccagctggaaacccacagctgggtttaacagacagcctaactgaatgtagcaataacaccaacacctctcttttgttgagctcttcctctgtagatgccgtgctctgcccctcacatacgttacatacgtttcaaccttctaacaaactggtcatgttggggacaaaatgtcattttgcagatgaaggtgaaggaacttgaaccaaacctgtatattcaaagcctttatgcctaacccagcactatacttcttccttgggtaattctccatgctctctgggggttagttaggaaaagatggacagaaaaacaaaacaaaaatgaagacagatcagctatcctggtcctccctcctggagaggagccccgttaatctccaggatttgttcctgtgctttcctccgcagctgggatctttgtggctaccttccatttaccgagtcctttacttcagtcacctcatttgctcatcacagctggcttttgctgaatgcaggaagtggcatggtgtcctttttattatagatgaggaaatgaggctatctttttgaactcttgtaggtaaccccaaatgtatgtttttgaaacaagctttttcttttttcttttctttcctagaagaacacaaacagaacgggcaggataaggactcttccataacaagactctgaagccaattccaaaccaatgcctg

SEQ ID NO: 42508 - DNA, 841 bp, Bovine  19866880985394
  misc_feature (1)..(1): n is a, c, g, or t
nagccctggctctgccccggaagtttacactaggaagcctctagaacagcaggcacaaaccccatggaaacaggctgtgcatctagatcgaaagcagcatttaagccaggaagacagagctctgtgagccctagacatcctgggaggggcaggctgtgctgggcgctggagggagcctcatttcgccaggaattgaggacccagagccgcaggccctttgagaaagcatcctcttaaaactgctctccctggcatttgtgacagggaggctggtcacaggcctgcgggggctggaggagaaggccgcgcggccacgctggggccggtagtgttccaggaaggcaggatctatttttttctgggaagtgagaagcagtttaatggtactatgaaaaagcttccccaggcatgcaggccttaagtaaataaaagcacaaaaatagattttttcagaccgtgtccttccagagcatagtaggatttcctgagaaattggattgagttctccctgactcacctgactgctgagtagaggaattcagagggaaaatgtgtgtttcctgtagccatatctgctgaaatagggccgatggcagggcttacggctctcaactggtgatcttttgaaagacagctgggagtgtctgaatagcaggctggggattggggctgaagcttagttgagccacccctatacctgaacccctactctcaagaatgagaagtagctttatcatagaacttctgccctgcctgcgtgttgtagattggtttcctgcaggtatgcagagcactgggcagccctcaggagaacagggtgtttttccagcggtgatgaggg

SEQ ID NO: 42509 - DNA, 1297 bp, Bovine  19866881012503
  misc_feature (1)..(1): n is a, c, g, or t
nttattttaggactagaaggccatgttcactcaagccagtggcttataggggcctactgtttccactccagaagtggtttaagaaagttagacaaatttgggttttgcctggttttctgtgtatattgtgtttatatccttcaggctaacctttcattcatgacgttttgttccattcatgacatcctttggaagtagacataaaatgatagcagcagacacaccaagaccctgtcctcatcaacatctttttacccaaggaccacaacccctgaggtagcccagtgttcacatctggaaactcggatcatttagtgactgccccagaagtgacatcgccaaggtggtgatgtaggtcgttcccaactttaccccttctctcaagaacagctaccagctgtttgtggacacagaaccactgagaaaatcctaagacgtggaagtgaggctggagcacacccctgtgccagagagcaagacagatgacttcagaaaggtcagaggagtagctgcccacaactgtatgcccctcccccaggccggcagcaccttgaggagaagctgcccctcttcttgcagagggctggaggggcatctaccttctccagtgttgttggtcacttcttgggagcccctacacctgtcttgcctcatggggaccatgggagaatctccagggcttgaccactgggaatctaatcacgcctgcagtaattgaaggtagccataatggaaagggagagggttgacctttttccaaactgcagaaactgaatgtcaagggctgacttccttgcgtgtctctctctcctaaaattcttggaacgatgttgtgccgaggatgggctcccagctaatgctggttggctggctctcttactctttcccatggcagagctcagattggctgcatcagccaaatggacctgggtttggacccagaggcacttgaactaatgatgggcatctagggaagtgcttcctgcaagggagctgaggccgagcaccgttactgttccggtgttagtcttggctgtgcagttgccgctgagtcaagctggaattcactgtggggaaagcttttgtttgtgtatggatgctttatccttgtacctgtggtttcataacataattctgcttgccaattttagggatcgggtgcttaaagaaaaaagtaaaccaagtaaatactctctagggcaggacagagtaacaccaggaaaagataaaagtgactcactgacaggctctttgaacatagaagcagttatcagcaaacctgctctgtgaagctgat

SEQ ID NO: 42510 - DNA, 663 bp, Bovine  19866881047802
  misc_feature (1)..(1): n is a, c, g, or t
nggacccccagggttacctggcccaggtgtccacgtctgtgctactctgatagagcacttaagatgaactagaggggaggggcttaagatgtggctgaggatctgatgttaacttttatttaactttaattcacaacttaaaaataggtacttgattcagttattagaaaatgttttaattaattatatgttggaacaacttgggtacgcaaatctactttataatcactatttattaaaatgcaatctaaatacggatcaagtatttccaatgaaattttagtgtacaaattgagatatgctctaagtgtaaaacacacagggtttttaagattttggggaaaaaaatgaactctctcactgattattgataataatcacagtatattgataatactgtggttatattaggtttaataaaacattgttcaaaattaatttcacttatttcttatcacttttttcagcatggatactagaaaatttcaaattacatgtgtggtacacattatacatgattggatagtgccagtctagacaattctagataaagggttaactgtctccaggaatggaaatcttatgatcctttccaatggtcagatccatttcattcagttcaacaaatatttactgacaagggtactgtgtttgctgagtgtg

SEQ ID NO: 42511 - DNA, 1550 bp, Bovine  19866881052228
  misc_feature (1)..(1): n is a, c, g, or t
ntgagctgtgcagtgtccagttcatctcgctctgttcctccacggtcatgtgcccccaaggagcttctgctgctgttgctgccctgaggtcagctatgttccctgtggcaatgtggcccctatttcacggtctccctgacgttaaacagttattatcccttgtttctcagagttactataaagtatttaatgactgatggcaaaggtggaaccgattttcatagtagtaaaacttccctgctgttcacccacctgattgtttaatggaatcacagatttttgtggagaacattaaaggctttctgattcttaggactagatgctatgaagtatctgtagaaatattttcaggtgaatgcaaatcaagtgttttccaagaaattcttcaaatttaatgttttaaaaggggatccacagaagttgactttttctaaagatgaggctcgctctagttacctgatgtgatttggtgctttttgtaattctaaacttttaaattcccatggcatcattcagtagcattgctccttatatgcatgtaacttaaaacctctatatctacaaatgtgaaattgtagagtgactgacatcatgtcccccagtaagcctaacacagcccatagcagtctttttctagtcatacagcacatcagtgtttcttttcttgcactttttgcatttaagtgcatgttgtacagaataatgtatttcaatttaaacactagaaaaacatttagctcaatgatagcctcatgctttgagaagcacatagacaacaagagctcatatgaagagcttgaagatctactgtcatgtctcattttattccaagtcatagataggcttattgaaaggaatgtttggagcaatcatcacattatcaaaagtattattttctctctaactttaatgtatcatagttgagatgataaaggtagaacgtgtacttatgaatgatgtggctcagttataagaatttgtttttattaactaatcaaaagcatttaactcatttttttgaccaggcttatatggctgaatgtaatgatgaaaattatcatagcaagaagggaaattagagatccagtttatcctccaccattattttctgcatgagaaaagccagtgcctgaaatagtgaagtgatttatctaagagtccagataggattcttgtaaactttcagtgtttataaagttaagaaatttggagtcttggaacattgcacaaggcaattggtttgcctagttatcttctcttaagaaaaccaagaatgattattttaaattatactagtactcttctttaatatctgctcaagccagagcatggaagaagtaatattaaatgccttttgttttatagcacattttcatattcactattaattcttcaagaaatccttacagatgtatactatagatggttctattcccacttcatatataagaaaccagtatgttatggtttaacagtgtcatacctcagttaagtcaaagaggtcctctcaaagccatattttgcagctccatcaactgtgctcatgtatt

SEQ ID NO: 42512 - DNA, 1733 bp, Bovine  19866881113715
  misc_feature (1)..(1): n is a, c, g, or t
ntactgcacagattaagagaacaaaactttagtgttgaatgtataagagtcttacctaaggtggaacagaaattcaaaatataagatggtgctgagccgagcacccattaaaccaaatgttacaaataactctcccttgtattcacacggcacagtaccatcccagttcaagtttatctcacaactgaggactgcttgaaaaacatcaaactggtatctcatcagactgatgtggcaggaactaaggtactccaccagtctaagcatcccaccaactcaaagagaactcagggactgtgatattctcttcttccccgtgtcataaattttctgattctaccctctagttccaaattctgcttgactacccaattacagagaaaatacctcacatctgttcaagaagtatttatcaaactttttttttcttgctaaaatgagtagaatgtgtcttcatgcatggaaccaggtgtttaccagattagagcatacaaataacaacacaaaacaaggcagacactggttcagaaaccctgctaaccttaattacctcaacacagtcatggctcaggaatacagtgacagaagaaaatatccagaaaggcagagacgctctctctggctagtttagtcccaaggaatttggaaagaagtggcctctgaggctgacctatgagggctttggaggcaagggggactctcaggaaggagacccaggcatggcaacaggaaagtctgcttctgctgatacacaaggtccccagagcagaatatgggcagaagtgctagaaagaaaggttgggaccagattttaacacccttgaattaagaatatggagtttatttctagtaggatataaaatgccatgcaaaactaaatctatttttactttagatatatagtagttcttagaactatataccatgatcacgtagaagctttttcaaaagacaaaagcctaggaacaggagattctgactccgcaggtctcaaatgtggcctcggcccatgtcactaggagactgacacacacccatggttaagaatttctgctataagcagtcattaccatatctaacagatgtctactggcaacacatccaagtgtgcttatgactcaaatacaagtgaggaaagcagatacaaacagacacaggcaaagaaaggcagatagaaataagaattcctgatgctccaaaagatttcaggaataggatgctccattctagtaaatgtatgtctctttaaaagtcattacactaatcacagtctgttttaatcatctacttcattcaagtaaaaccaaattttagttaattccatcaaaatataaataaataattaagagttcaaacagaaaagcacagctaacagacttttaacatgactgattattaacatcgtatttttctcccctccttcccttagtaaaaaacaaaaaaacaagaaagtcgaaaataacagacaacaaaacagtaaaaatcaagaaacaagaaagacaacaaactgaatggaagaggtaacaactaggaagaacaaaagctacaacaaaaagtgacagacatcgatcagaaacctccttagaaccagagcatgaaaaccaagggctggggaagcaccaggttgtgggaggtatgctactgaatccgcagagcagctggacacagcaacagctccctctccgctcaccctaaccccagggcgggcaaagactgtaatctggctacagaat

SEQ ID NO: 42513 - DNA, 919 bp, Bovine  19866881324579
  misc_feature (1)..(1): n is a, c, g, or t
ntggcaaacctttgcagcaagttacgtttggcccactttgcgtttggtcacagattgtaatgtggtgagcaggggtatctgtgtatataacctccagccagtcacccatctctgtttccccagcgtggaaatacagtacctaaaatggaacacagtgagtagctaggtcatcccagacagaggcaggtgagtgaagccacagcctgctggaactgggcatcaaacacacatggtcatcataaataaatcatggcctattcatgtttgcgagcctgccataagtaactgtggcctatgggcttcacacggagcaactccagagaccactttctgttgaacgaatgatgggttcaattgagttgtgatttactaactgatatcttataaatgtgtttgactgaaactggaggtgggaggaagtgcaggggtgcagaagaggttggtgggaagtgtggaaagcgttcagccataactaggccatgggagcctggcttatccaaaatgaatggaggaaaaggccattagatgccaaaggatggtttccctcataaaacgcgatgtcaccctggtaggcagctgaaacctgcttggaaagatggaacttgttttgtggatcacacctcagacagttggttttctgtgcctaattgtttcctgaccatctagtgagaggagaatttgtgtttcagaaaaaaaatgacatggaggttaaaaatgcatgcatattcaaggacagctctctagcataatgtttctgctaattaagcactttgattggaaacgaaaccatattctaaagatgtttgcctctaaataccttagtgtgatcttgacatgtgtctttaggatgcacaagggaatgatgtcaagtggccctcttacaagtggcagcttatttgtgcttcagtgtccatgtgtg

SEQ ID NO: 42514 - DNA, 5760 bp, Bovine  19866881324878
  misc_feature (1)..(1): n is a, c, g, or t
ntttaaaaaactgcacacttacattatttttctataattacagctgccttaagtctttatattttttgtaatgcagaccagccaaatttttcttaatttagcttctgaaaaaaagaaaaaacagaagaaagtcatgtttaaaaattattttggaaagttatttccaaaaaaattatataaaggccatcattctttgtgatacttatcttttacatatttctaaagtgctaggttttaaatatttatggtattgtaaattcattagttgacttaagccacattattgaaatttattgggagtacattgggaaacatttgattgttaagccttccatgaatgtaaagtgcagagtcaaaattgtgctcttatgtatacaaacatttaactaactgtaactttctagttggaatgacttaagaattcaaactgttcatcttcttccttagcctgaatggtacttggctcaggttcttctgtggatcgggaaccacactcagtttctggatgagaagattcagccaatattggacaaagtgggctcttcagtaaatgcaagggtaagagattcagtccaaagcatttcagtttcagagttgcaggtgtccatgaataagctgtctttttcattaccttatgcttctgtctttttttagcttgaattttctcggggccttatgatgctgattcttgagaagttagctgctgatattccttgtctgctctatgacgacaatctcttctgtcatttggtggatgaggtgcttttgtttgaaaaagaactacacagcgttcatggctatcctagcacttttgctaattgtatgcatattctatcagaggagacctgttttcagagatggttgactgtggagagaaaatgtaagtgctcatatggccataggctgggggagaggtatctcttattgtgaatacaaaattttaggtgttattcttctccagttctgggtagaaactagagccatctaaatttttcttggttgaggtttattaagttgccttcagagattatcttcttttctccccatcaagcttcagttgttcccacaattgtactctacgtatttctagggtagaatatttaagccagggacttctctggtgctccagtggctaagacttgcgctcccaatacagggggactaggtttgttcctcagggagccagatcccatatgctgcaatgaagagtttgcttgctgcagctcaagatgctgcatgccacaactaaaaagatactgagtgccgcaactaagactggcacagccaaataaataaaaatactaaaaaaaaaaatttaagccagtagagttaactgttttatggattctacatatagtatttctgctcttatggaatcattctggatgtggcttttctagtcagtgaagatatttggaagattctgggtaggtgtggcgggcagaggtaaaagatcttacttaaccttaaaatagagcatgttatatatagtgcaactagtaggagggtgtacatttacttttttacagaaaaatgatcattcctaagaaattatgagttgaaagattaggaattacaatctgtagctacttgtttgacatagtctttctcgtgtgccagttgcgcttcaaaaaatggactcaatgctctcatcagaagctgcctggatatcccaatataaggatatcactgatgtggatgagatgaaagttccagactgtgcagaaacttttatgacactactcttggttataactggcaagtatagtcttaaagatataactttgttttttttagaactactgactcttagcagacctgtggttatcaagggggaaggggaatggtggagggatggagtccattaggtgataaaccataatgggaaagaatatgaaaaagaatgtatatatgtgtaactgagtcactttgctatatagcagaaattaaatacaaattgtgaatcaactctacttcaataaaattttaaaaagtaagtaaaagtactgactcttcactcagtacttttgaagtagtttgacaaaataccatatagtgattattgtaatatcttcaaattcaatttctattttggtcaaaactctagcacagtattttagcttttggattttttgtaatttaagaccttaaacattagtttacatgagggaaaattcctcatttgttacataaaaacacataagaatttaattttattacctgaattcccttgtctttcagcttttcaagtatcttcagtaaatggtgattgacccaaattttaaatattattttcttcactttgatttatcactgtttatagaacaatataaagtaactttaaggagaagaatgggggcttccctggtggttcaaatggtaaaaagtctgcctgcaatgcaggagacctgggttcagtccctgggtcgggaagatcccctggagaaggcacagtcggaatagtaacaggaacgtctatagtccaagaatgttctggctggagggtggcccagctgtctctagccctggttggcctgttcctgtccatgttgcccctggggcactgcagacctgctggttctccaggcgctactgagctgtcactgccgtggtccttctgtgccttgtccatttcttgggcctgtgcggtaaccagaagaggtgtcattccagcccagtcagtaaataattcataagaaaaatatgaaaaacactacaatacaaaaatatttagcaaaactgatttaaaaatcttttattatggaaattttctcatatatatatataaaagcagcataacgaaccctcaggttatctgttcctaaagtttaaaactattgcttttctattatgtattttcccccaccccccaaaatacagatttttttcctgaagtattttaaagagcattttagacatcttatcttttcacctgtaaatctttaattatgtgtttcttttaacctatcctacttcctccttccttttttaaaaaatgtcatttgttgaagaagtggaataatttttgtatatgattttctcatatacctttaaaaaaaattgagtcataacttttaaactgaagcacagttgatttacaacattgtgttagaggcataacttatatacagtgaaacgcataggtcatcagtatatagatcaatgagttttgacaaataccagtacttgtgaaacacatatccttagggagtttagaaatggatccatacttgaatggttggttgatttttgacaaaggcaccaaagctgctgctgctactgctgctaagtcgcttcagtcgtgtccgactctgtgcgaccccatagacggcagcccaccaggctcccccattcctgggattctccaggcaagaacactggagtgcgttgccattcccttctccaaggcatgaaagggaaaagtgaaagtgaagtcgctcggtcgtgtccgactcctagcgaccccatggactgcagccctccaggctcctccgtccatgggattttccaggcaagagtactggagtgggggtgccgttgccttctccaggcaccaaagctagccaataggaaaaccctataccataaactttgacatgctgtgtgtgctaagtcacttcagtcatgtccaactctttgcgaccctatggactgtagccggccaggctcctctgtcttggaattctccgggcaagctggagtgggtttctatgccctcctcaagaggatcttcccaacccagggattgaacccgtgtctcttacatctcctgcattggcaggtaagttctttaccactagcgccacctgggaaggcaataaaccttcatatgtcttgttaattttctccacagacaggtataaaaatcttcccacagcttccagaaagttgcagttcctggagttacagaaggacttagtggatgattttaggatacgattaactcaggtgatgaaagaagagactagagcttcccttggctttcggtactgtgcaattcttaatgccgtgaactatatctcagcagtgctagcagactgggctgacaatgttgtaagttaatcttttatgttaagtaatatattagtaatttgaacagttttaccttttgaaatgttgaatctgtagcaagcagaaataacacacgttagacagaatcaaaactgggccaaacttaggaggtatgattacagtacatgtttttctcatctaagtctcgtatagttaaatcatgctgatattttaatcattggaaaagaaagccatcctttcatgaaattgtagtttataaagtaaatcttccctctgtagattttaaacttgggaaatacattaaatggtaattgccatctcagaaaaagctaagcttgtataatgacgtcaaaatcaataaaattcagaactttaaggaaaatcaaagaataacatttggtacctcttaaaagtgaaagtgttagtcactcagtcatgcccgactctttgtgaccctgtagactgcagcccgccaggctcctctaatccatggaattctccaggcaagaatactggagtgggttgccattcccttctccaggggatcttcctgacctggggatcaaacccagtctcctgcattgtaggtggattctttattgtctgagccaccaggaaagtccctattgagtgccttcaaacatgacagattatgaagagtcataaaaatagaaacatttttaacctaaatatttcatacattaaaatattgtttaatattttgtttttttgaaacatactcaagagtaaatagaatggtaaaatgaactcctaatatgcctctcacccatcttctagtaccaattttgtttcatttaagcctttcttctaccgcttatacagaattattttgaagtagacctcagatatatttcatggtaaatatttccatatgtacctctaaaagataagaatccctttttaaaaaagcagcgtggtatctggggatcctagttcctcaaccagggattgaccctacactttctgcattggaagtatggcatttcaaccactagaccatcgaggaagtccccaatatactatgaatttataacaaaatattatactatactgctagcatatcatatagaaaaaaatgtattcctttactgtgagagaaaaaaaaaatgaaagtctttatcttaaatccaggataatcagccaaaaaacaggaaacaaatatactaataatagatgtaaacaaatagctgataaacacaatcataatttattttaatctgggccttttggctgggacttagtaattatttaaagacttttttacagaaatgttaactgaaatacatgtgtatgatatcattctgctgagcaaggaaaataattatttcctaaaatgaatattagtggaatgtaatgatcaatgcatttgtctttataaagtcacctagtcagaatacattcattcattatgtacttttatgtgtcatgttcctaattttagtaggtgctttattcactcacccccaccaacccccacagtgctccattttctgcttagctttttcataaaacagtcattcttgcttcttgtgccaatgctttaataagagactcattcaggggcacatttttagcttcagtgaaatatttgtggaacatcattaactactttactcagtgctgtagtcgattaacggagatgaactggccatcatccctgtccttagaaaattaataatcgatatgaattaacggttccttcgtcaa

SEQ ID NO: 42515 - DNA, 679 bp, Bovine  19866881327362
  misc_feature (1)..(1): n is a, c, g, or t
ngaaagaacaaacatgtatctgttgatactgccgtggtgcagcaccaggcctggagacattctccagtgagcgattgtattttttttttttttgcttttgctttttttttttttgtaacatggctttgtaaataaaataatttatatgtttgtaaatcaatgtctttgggttttcataaaatgtaaatttagggtattgctttttattcttctgggtgtatgtgtcctcaccagacgagccttcctgctagaacccacatttaaggtgtagaagagagttcattcaacagatatttatggagcatcccttttgtggctgcctctgagctaggcactctgctcagtgatgagaaacagatacagacccagatgctttctgaaggcacccaggtagggcagacggtacataaatacatgatggaatgcctaattactgattgtggcaaatggtagaaagattcgagttctatgatagagaataacaggagaaaccaatgtaaaatggattgaggggggggggtttgcaatcagggagttgcctgtgagaaagtgagctgaaagacggtgtcagggagataatcccaggcagagctgggccacagtgggaaaagtctggtagattcttgaagactaaggaagacagaacagggaaaggggtgggcagagcaaggaaaggatg

SEQ ID NO: 42516 - DNA, 2329 bp, Bovine  19866881359383
  misc_feature (1)..(1): n is a, c, g, or t
ntttattttcaaacttaccattggagtcagggttgaacgatttacaaaaaacgttatacctaacagaaaaagacttggtccgataggctcttcttaacccacctacccccctctcctaccctgtcagtcaagttttctacgtggggcgctcttggagtctctgctgctgctgcggctaagtcgcttcagtcgtgtccgactctgtgcgactccatagacggcagtccaccaaggctcccccgtccctgggattctccaggcaagaacactggagtgggttgccattgccttctccaatgcatgaaagtgaaaagtgaaagggaagtcgctcagtcgggtccgaccctcagcgaccccatggactgcagcctaccaggctcctccgtccatgggattttccaggcgagagtactggagtggggtaccattgccttctccgcttggagtctctacagaaggctaattgctactacccatttgagagtcgcctaggtaacacctaccttctggcatccagttatcggagccccgaagaaatgatctttttggcttccctagtatcttggaagttcttggagatgaaatgctggcctttggagtgtatggtaaggggacttacatcatgtacccctaatacggaagaaaggaatctagcacaatggaatctcaatataccagcttccaagtatttacctatgtatactgattttccaagcacttatctatgagtcagcaggttcctcgccattgaagttactcaagtgttactgaccttctttctaagaagctaacgctttctcatttgagacctatttacctccttgtttgtttcccagagaatgcagagagcatatttcaatttcccggaccacagagacaatcttattcttttgattgtgacttccattcttcaatccctgcacagtgccttgtatcagtggatacctagtgaatgagtgcagattcctcttaccaaacaagaaggcttcagagatgctccttagagcagaatcagtggaaggtgaccatacattagtacccagtactcctgagaccactgtaaggaatacctcaggtcctcctgctccccacccccttttaaaaaattttctggcacccagttatgggattcccatggtagtgatctccgtactggcttccttgctactcttctcgttgtattctctttagtttggtttctaaacttttacttccactctgttgaggtttgggggcttgccctggagttgggttgtggctagtagtgctatctggcttgggcttcatattcataaagattcagattagactctcatgttatttccaaatcagatacacactgacaagtcagaatgatgctcactttgcagctttatttgttcatgtaaataaaaaatatactgtaatgtagtaagccagtttggcttttctgtattcccctccccaatttttggaaggtttcagcaactggaattgacatggccctgtctcagcctctgagaagtttaactttctatttcctctcttctgccttttttttttttttgctttctcttctgcttatggttcatgcccactaatggaaggcatggttgtttctcttcaggaagccattgctgctaagagaatgtgccttgagtattaagttctctcttgcttggccatgtgccactaacttttaaaagagagatcacagaagaatagtatctggtcacttatcagaactcatttatatactctgactgggcaaaaccaagggggagtgagctactgctgttaccctcggtgatgcatagtccagcactgcttctgccagtcacctgagttcacaggagctcctgcttccctaaggaggagctgggagtggctggcagagcaagtccaatctgattaggcaaccagagagttgtgaattttttgaatgctcaagaaacaagagtgtttaaacagcatctcactgaaggtacaactgttcaaaatctgagaagaatgttcagataactgtttaacattgactataacattggtcatattctgatttgttcttggagtctgaggaaagacccagaagttctgggcacaacacactctactctctaccaggttcattaaggaaaataacacttgtaaagcaaaacttccccgtctgaggtactattgttgagatttacctatggtagtatatgacattgggatttaaggatgtacaagaggtcaggaggaagctgtgtttagggaaatcttatcattggctaactgtaacattggcagttagagtcaatggcagtacagagtcctgatcattttattggtaagatgagacttataa

SEQ ID NO: 42517 - DNA, 1293 bp, Bovine  19866881412706
  misc_feature (1)..(1): n is a, c, g, or t
ntgctggagatcaagaaagaggctttaatagaatttgacttacaccatgcatcttaattaagaagcaaattagaattgctggatgggtacactttgaaaaagaaaaggcacacaaaatgattatcagtcactgagcccactgaaaacatctagcctatggctgagagcttcgatggatgatgggtttgcttgtttccaaataagcaaaatcactgccttgcagaaagggtccaaggaggccccctcactggagcccacgttgggataaggaaggcctccgtagcctccgttccaggggaggaagctggccacctgggtcgctgacaccaaaggtgatgaggtggctcaggaagtgtggggacattccttcttctccctcaggggatgcagctgctctctgacactactctgttttagtacacagggcagtactcatctgaggctgtcgctcaatacatgcctcttccttctagtaactaatcaaaatcgtagtgaaagaatccagaggaatgttgtgaaaggggcaagagaattggagtcagagccaatctgagttttgctgctacttgactgtgtggccttgggctggtccctcaagttctttggtccgtatgtccactctgtctctcagggatgtggggctacactgcagtggccattaaacatttccagttgttcaattgttcaaggagatgcacaggacccaaacgagaatgcttccacatccacagttgattacagaaaatggagaaggtattagcagttacattaaagtaaggatgtgtgtcccagctgaatgctacctcatagcaagaggacgggagaggcccagagccagcaggctcctgctatcttctttccctaaggccatagctaagtgtacttgctcagaccagaaaccaccaactacatcactgataccttggaaacagtgaatccaaattagagtctctgctggaactgtttgtattgaatatttcactggtcctgtaggcaccatcctgttacataactagccccaacagcagagccctctgatgggctcaccaagaccagggggcaaatcgtcaatctcaccctcatcaatgaacattgcttttaggcttggggcagactatccccaacctctagggacccatggttacaatgcagtgctattagtcagcaggctccatgccttgaacgagagttagttgtgtgcaggaactttggcaaagccactcagactaattccagtcctactggaattcactctcatgggtaccatataagaacatgcatatgctcagtata

SEQ ID NO: 42518 - DNA, 679 bp, Bovine  19866881555622
  misc_feature (1)..(1): n is a, c, g, or t
ngggggtggtggaggactcctctccgggtctgaaaggatgagacgagatgagtaagctttgctttggttcttgaactagattccctttcctccttgcaggagggtggaatgcaaacatttcagcaccctcaagtcatccctgagctgagagtgcagccgacttagctctctgaatgccaaatgggctaaactagggctcagacatgcctgcagacaatgaagggcatgaaagacacgctggttttgcaggggaggagttttatctgtcctcacggctggctggttctcccttctccaagattcattcacagatcatttctttgatcaatttgttcatgaaattatttcagcaaccccctcagcccttgttgttgttgctagcccttgcccctttcctgactttgaaacaggatcccggatgttatttataggcctttgccagtgagaagggcactcagtggtggagcacacagctcccaaacctcagacttcaccccaagaccacgtgctttctaggcatggggtgggacctcaagccccacgtaaggggaaactgcaacagcaattttaagtaagataccaagttactgacagttctgtctttgatcagtgtctcaatcactgagataaagctacactgccaccactttctagttaaggtattctcaaagcactcatc

SEQ ID NO: 42519 - DNA, 1031 bp, Bovine  19866880717999
  misc_feature (1)..(1): n is a, c, g, or t
ncaggtggattctttacaactgagccccctagaaagctctgagtttatggtacattattataaagagcttgaaagcaaagttcccataattagacctttatctgcatatcaaaatgcagttgttgtcatttacagtgttttatgggcttcaaactaaattgcaaaaatcagtacattctttcaatgccatcattattactcatgtactcttggaatcttctgtttaaatttctccagtagtcttagctgttcagctagtcaatgctacactctaatgttcatatgatgctgtatgcatgaaggataattagatcagatttctgaggttatttttagccttttcaaagaagttgggaatgcaataaatttactccatgctgttatttacggggaaacgacttgtatttgatgatagtttactcggatggtatttggagaaaattggcaacgttttaacattttttaaaaaaatcaatgggcttctgtttctggcacttgcttccaaaaaaaacaccatgactgctgctgcacataataaattcatcacaccatgatccagcgccaagtcaacttagggaaaaaaatagcctgggctctgggtcagagccatgcattctggaaatgatggacttctgaatcttaaacttgaagtctctttataggaatggtgaacaccatatggcctaaagtccaaggaaaatggatagagaagtacatctggctcttttggcatctgctaccatattgtagccatgattttaaaagacgcttactccttggaaggaaagttgtgaccaatctatatagcatattaaaaagcagagacattactttgccaacaaaggtccatctagtcaaggctatggttttccctgtggtcatgtatggctgtgagagttggactgtgaagaaagctgagtgcagaagaattgatgcttttgaactgtggtattggagaagactcttgagagtcccttggactgcaaggagatccaaccagttcattctaaaggagatcagtcctgggtgtt

SEQ ID NO: 42520 - DNA, 1301 bp, Bovine  19866880975589
  misc_feature (1)..(1): n is a, c, g, or t
ncagccccagttaatcccagaagtagaactagctggggcccagatgttctttcctttacacccattaactatccagtgtatgtatgctttatcctattgtgttccatgggcctgtttcataagtctttctatggggcagtgactgggataccaatatggagatgacttacttctttgaaacaagacagaagattttgctattccaatcagccaagacacactgctccagggggaatgaatagcaagtgcaaacagtatgcagcagaaagatttaaggcaagtaagggttgtagccaggtaaaaccaccacagacatggagttcaatacagagttcccttcattgcatgaagaaatagcaagtctttcaaagagatttgcagtggttggcaatccttggcctgtccaacatttctctttgcagtgccattcattcattgaaagaaacaaggggtttcagcctgtgactgcataactaaaccctcttctttgccaagtgattagagagcagtgtggaactgcttactttaaacgccttaatagagtgaaatcagggatgtcattcctctttgtaaaatgctgatatccatagagagatgtaaatctaatattttgacatattgaaattaacagctacaatggttattcactggttatttgcatatgactatttcatgtcctgggacctttttaaaagcttaaagtatctcctggggaaaattggaagctcaaggaagtggaattcaggaaatagatgagttctcccctgtatttcagtgatttttactatagaatgagataatttacttatagaaaatgtttttggatttactattaattaatttgtgctttcatttattttcatttcacagtttttctccaaaggaatttaagcagcttccaggatcaaattcattagaagataacaaataaaatagttgaggaattagggtctaaagaaaaatgaagctgacaaaataaaataaagcatgcctgggggcaaaggggcttccatggtggttcagacagtaaggaatcgcctgcaatgtaggagacctgggttcaattcctgggttaggaagatcccctggagaagtgaatggctacccactccagtattcttgcctgaagaatgcaagcctggtggttacagtccatagggctgcaaagagttggacacgactgagtgactaacacatggggcaatcccccaattgcttactattatacattaaatcaaattgaaatgcaaatgtttttcagctccttataatcatgacaaaataatatatagtcagtacga

SEQ ID NO: 42521 - DNA, 813 bp, Bovine  19866881148275
  misc_feature (1)..(1): n is a, c, g, or t
nctaattagctatgaggaggtactgatatggggctcacagtctatataaggagaaaagatatattgaagatacacatggcaatgagaaaaacaagtaaaaaagcaatgcatcagactagctacctaagcaatgtgaacacattctttagggcacttagggtgacatgcagccattaattggctagttggctttcacatggtgtcaattaatctttaaaaccattaaagcctagcatggcactagaggaaagcaatcacagaaatctttcaaactgggaaacaaagattattctactaattagtatcttctctttgctgaaagcaactgaaatctatgttggcataagtgtgcaatttttagcaatcctgcaagggtcttctttcaattgtttctatattttattttaatatttttctctcatttgatctcttcttaaacatgttttgctttgtttagttttgtttctagtacaacatgtggcatttttttttttgtctgctaataagaaatgtaatgattgctgggggatcttattgaaaagtatatagatactagaaatgcaagatcaatccagtcaatcctaaaggaaatcaaccctgaatattcaatgaaagaactgatgctgaagctccaatactttggccacctgatgtgaagagccaactcattggaaaagaccctgatactggaaaaaactgaaggccaaaggagaaggcagaagatgagatggttagagagcatcactaactcaatggacaggattgaccaaactacgggagatggtgagggacaaggaagccggaatgctacag

SEQ ID NO: 42522 - DNA, 926 bp, Bovine  19866881607276
  misc_feature (1)..(1): n is a, c, g, or t
ntggacatgaagaatgaactagtaactaacaaagctatatgttgattaaaacagcatgtggttaatttttaaagattgctgatctttattaaggatggtgaggctaaaaaatcaaatatttttggctaacatatctattgaccagagaggcagtgataaatactctggtcattaaaatgctatttcagtcttgttaccacaaaccttgactgcatgaaacatagttatagaagtaaaattcaaaaatctattaggtctctgaagctctctgtgtcttgtatctacagaggggagctgagaagtcacattataatttgggaataataacatacaaagatgtatgttatttgaatattgtttctatgttcagaatcatttcagtcaactcagtgcctcccattgcccttcatccatcctaaagtcacattgtgtacttctctgagctctccaaataggcaccctcttgttgccaagcaaccacagattttctacaagtgcctgtgccatgtgtacttaaaccgcagttggccttttttctccttcaacttttcaaagtttagaaaaataaatatatgacagtcaggtagagctgtggatattgtaaaggactgtactgggaagtcaaacaattaaaaacagatacacacacatatatacacatatccccttttaaaaagcttttataaatatattagcaattatatatgtaataatgtatatgtctgcctttttaaaaagcctttataaataatttaaaaatcaattcaaacaggtgaagaaaaactatttctttttcctaagatagtaggtattttgtattttatacaaaatatttttttggatagatattttgtattttatatccaatagcaagtaagtcgatagctattcctgtgattttctataaagcattatagagcttcatt

SEQ ID NO: 42523 - DNA, 1566 bp, Bovine  19866880389647
  misc_feature (1)..(1): n is a, c, g, or t
nctgccctgctttggcttcaccgacgtcccctcaaacatgaagtacctggcaagtacttgctgaatgactaaatcctttcagtatttctatcgctaaagtagaacgttctttcatctgactctcaggttcaaaagtacactggaaaaaattatatatcaaagcattcattcctggtaacacagatttatcttttctaaaacttgcaatcactgaaccaaacttcagtggcttcaccaacaagaaaaaaaggtgtaagcgcacaaagaagggtctgttacataaccacccgaacactgctagctccattcaactttaggcacaggatttatcattttatggcaatttagtagtataaatactgccaacacatttcttccccaagaaagagatattgaaagtggcccaacttaccctaaaacttgccagattacatttaacaagttgaagtgaaactgaatttttcaagttcctgcagcagatactcaaataccatttgttaatttgaattttatttagaataactctatgcaagtcacagtaaatctaaaaactattcatgctgaaaagcttagaaccctaacagagtatgtgattaacaggatctcttacggaaacaatactggtttccgtaagagaaaagaagtggatcttaaatttttacactagagtttaagaaatgataaactgaactattgcataaaagtaatagatcaattattattctgctctctatttcacctgggttctcattagaaccaacatgctctaacttgtgaaagacttacattcaaattagaggaaaaaagaagaaatcaacctcatatctaagggagacagcaaaagacactttaactggttaactctgcaggcttttcagtgattctaagaaatcagtttcctctgagaaaggtaactgtgaaaaacatttcaaaattgctttaaaactatgggctgtaaaactaagtggaaacattccatttcagctgcctaagacattgacattgttgggctcctgttcttggcatcccccaaacccactgacccaatattggctaagtctgctttctaacacctttagcagcatcagtatgaacatgcttttaaaatgattacatcttaagtcctgcctaattttattactgtgaaaaaacacgaccactggcctgcaaccacaaattaattctactagagtctattttcctgaacaaaaatgaaacaaagctcacgttctgtttctatacatgccattctttttaaccaaaaatactgctgttaagaagtctggagtataagcgaagtttccgagctctttctgacatgggcagcctctatgttttgaccacatggcgtaatgaatgccccatacactcatgtgaccactgttgccagtctcactctcccataaaaatggggtagagaaatgtaaaagatattactgaaagtccaaatgcaacaccacatctgctgccaagccctttttaaaaaagattttctaaaataaaaaagaaatgtagaggaaaagtgatccgtttgaggagaaaatagattagacatagggggagaag

SEQ ID NO: 42524 - DNA, 650 bp, Bovine  19866880420507
  misc_feature (1)..(1): n is a, c, g, or t
nctctaagagtccattgactagctgatttgaaatcaacattaacttaaatacactcaaatatctgagttctaaacttagaatcttttacttaaagtaatatagaaaactagaaaagatatgctttcaacaaacatattcagcagttttgtgcatgtgaatggaaactgtgttaagtttatattttaacgttgtaacaaaaacaaatgttgtttcacattttgctataaagtgattctaattatgtaaaaccctagtgtgtgcatgctaagtgaggtcagtcctgtcccacattctgtgtgaccctatagactatagcctgccaggctcctctgtccatgggattctccaggcaagaatactggagtgggtcgccatgtcctcctccagggatcttcctgacccaggaatcgaacctgtgtctctgacatctcctgctttggcaggcgggttctttaccaccagcaccaccggggaagcataaaaccctagaagtccatatataatgttcgagtgcagaatggccaataccagtaataaatcagtcgtgaatgtcatcattattcagaaatcagtgaccatacttatctgtgaaataatcaatactattacaatacttaatgactgaaaaatcataagaaaaaactccaat

SEQ ID NO: 42525 - DNA, 1263 bp, Bovine  19866880545104
  misc_feature (1)..(1): n is a, c, g, or t
nactgagtctgtatgtttgggttcctgagacgtagctgaggtctatcactaccgtatcatttacaccagctttaactgatggtgccacactaacggtaacttttacttatcttttgagttctctgcagagcctagtagatcctggactgctatatgcttatggtctggtaaagattatcatttatttaatccagtacattgtgaattttcagtatgttctggtgacagaatatactttgtacaatttttaagggataaaagtgataccaaaatttctaactgaagataagaaactcttctcaaagaacattatttatctctccttttatttcctggcctgaccaacagcaatgtttcatgaataaagaaaggaatttagttactaccagctatctaaaaattaagttaataaaattaaatgttattttaaaatatttcagagttagcatccaaataaataggttgtctcgataattataaaccagtagtaacttcaggaggctgaaggtataagccaagccaagatatgagaaaagtctatagctatagatatttagtctatagctaccacttcataaaactatgggaaattgtggcaattgatattgtttctatagcgaatgcaatatacaatatctagaaaatattttatatagtgaattttatatcatttcatccattttcccaacaagaagagagaaatataccaactgtgtaggtggtatacttctttttcattaccataagtaaatgaaataaacagactctcttagactagactatataatatatagaattcatgcttgctatcttacaaggagttatttgtatgtgaaatcttgtggacttgagattgaaaatgtgtgatttacaagcaaagaaaaaacagctttaaatcttagtgccctgcatttcaaatttctggctgatttataagccttttaaatcccatgctattaagaaattcaaaatttatatggctatatatatttaactaatattaactcctcagccagccagcctgtggcattttgcatgcttttcttcattttttccgtctgtattttttctcatctagctttttcagaaatgttattcctatttctgtcacactgtcgccttttagtctgtcttgcaggaatgtaacatcagccgccaaatgaacctaggaaagaaaaaaaaaaaaacaggcttatatcattcagctttttaagaaaactcaaatttttctatttttcagttgataaccccataaagagctca

SEQ ID NO: 42526 - DNA, 1130 bp, Bovine  19866880721901
  misc_feature (1)..(1): n is a, c, g, or t
ncaagggattttccaggcaagaatactggagtgggttgccatttccttctgcaggggatcttcccaacctatggattgaaccttagtcttttgcatcttctgccttctttaccccaggagtgggttattgcgtttgcaaactctccctctttttttttttcctgaccaattctcattcatccctcaggtcttaccttgcttgttcctctctccctgaaggctttcctgactttctagaagacatcaggtcttcctgctcagagcctttagtatcagctttcattattctcgttattttctctaaggctctaaactctgtttgtgggaggtgggaagatgagctattgccttgggctctgaaacttcgtgtagtgcctgtgcataataaacactcataaatgttggttgagtaaatgaataattaaatagtgattgcttatctataaatctcaggtcttttattgaaataagaagcacctcttttctttgactttttctctctgagttacttttttttcaacctaccaagaaaatctactgagtttcctcattttagggataggctattttgcattttttttttttcaatgaattgtgcatgcctcaatttctggttatactcatagtcataataacataatttccaggctcctagaaattagtggcttcattcggtccctaagggaaaaatatttagggagttatagactgatttgaatattctttgtaaggtagaatgaatacctaaagggtatgtatatatgttatttttagatatcacttcagtgagattcacaatcagttcctggcttggtattcattgcgactgaactgaactgaactgaactgaaactatactgtggttaatttaaagtaaaggaatcactggcctgagcttttaatggatggaaaccaaaacccaatttacaaaattaatgttgtgggaccagagttataatttcagtttttatgttgaacatatacaacttcaaattattatgtgtatgaaatatttttcagtttgcgcatgctaaaagtttgactttttttactgaatattaggattgtcactattaccttctaaaacattaccaaacaaaataattgtcttttttttactagctttctta

SEQ ID NO: 42527 - DNA, 1958 bp, Bovine  19866880760569
  misc_feature (1)..(1): n is a, c, g, or t
nactggaacccgaaggcctggggatttccacgggctcccttactgggcgacgtctggctctacggactccttcacgcagcaggtagtattgcagtggatctggccacaggtcctctttgataatttcagcaatcctgtcagactctggaaggctgtggtctgaaaaccaggtgaagaaattgcacacgacctcttggttcctgcgaatgaaggactggggttcatggccccggcgccatatgattggagtggaaagagaccctactcggccagaggctctgacctcatattctttgacaatcagctggtttcgaaaatacgggtttctccgaaagaagaacttgaacttgcagcctgttcgcgggtgtctgagctccttcacctccaaattagttatgcatcttaacatctctgcatcttggcctctaatcatgggagacaactggggggtggttccgaaaggcagtgacccagaagcccgggatattctgaatgatgtagttcctccgctccaggtagtgtcgacgcatccacccgaatttatgctctagttgttgaaaggcccggtcagcctgagcgttcacagcatccagttccagctggattgcctccagcgggttcatgcggagatccatacgcaggggccggtgccccgcctcctccaccactctgttctccacaatttctatttcttcaccgactggcctctcctccacctccattccctgctccactccctcctcctccttcgctccttccttccccaccacctcctcatccactgcgaccgagaagacggggccctcttcagtcttcacttcctcagccttcgcctccgccatcaagtcagaccccaacttctccgcgccacaagtttctagcggcttctcccgactcaagccctgcggctctccgggctgacggccatttcccaggctgtcgtctgttgccagggacacagacgccgtttccaggctctccgtaggaggcggagccggctctagcctcgcttcgggcactacgtatccgccatccccaccggctcggatctggaacgtaccggcacagcctggatctgagggagcagttgagggcgcgctttcctcctctggaagctggggtggtgggagcgcgacggcctcgaaatacccctcacccgtctccgccatcacctgtgacgcctctgttttcaggcaccgggaagggtcaggagctccggcggcacagtcggatgtggtgaggctgtgggcttcaaggagaggggtcctctcgcccccgtctcggccgctcatgtcggcagcacccagataaaccgaaggccagtgtctgttttcctctcagaagccgcgctcgacgaaaaccggtcgctctcaccactcactctctgatctcgcgagtgactccgtgaggatgacgtcagggcagtagatctcgaagtgacgcgagaactcgcggctcctgggatggctttaccaggcttcctacggcccgagtgtttctgttagctttatttttacgaatttaatccggtggattggtaatttgatttacgtaaatatgtggctcgcaagcagaggctgaagcagggagaccccccgcccccctcccttcctggcagtgcatctggaagtacctccagattgttcgctggggtaattgtaaggatcccagtactacactgccttctgttgtctgaaaacatgtttttatggttttgtaggcaagcgggtaaatctactccctgttattccatgatgggcaggagcaaaattctctttaatttttaactaaattaatagcaaattgtttcccttttctcgggtagtgagtgaaaatattctggcctgtaacatctctgggagaaaaagctactgaacgactttttaccacaaaagtcatgcatactgttccttgctagccttacttcggagaaggcaatggcaccccactccagtact

SEQ ID NO: 42528 - DNA, 2022 bp, Bovine  19866880792139
  misc_feature (1)..(1): n is a, c, g, or t
ntgcgctcttcctgcttctctgatctcctactgctgcctgcaactggatgcaacgcccacccccttaggctgccccctgctggatgaacattttctagaccttgttaggtccactttctagtttttggtaaacaagaatcttcagaattggtggtagacccaggtttcctgccagcatgtaaaagacctttctatttctcctctgggctttgctggtggctcagatggtaaagaatccgcctacaatgcgggagacctgggtttgatccctggatttggaagatcccctggagaagggaacggttacccactccagtatttctcctctaaaagaactcaattcctcaccatcactcaggaaccctacttttaccgtcaggcaagtggttgaggggataagttagactcatttacatggcaaggataatgatggtgtccttgacaagtatcaggttttctcagcctcaaccagtaaaaccatacaaaggttagatactttcatttgtctcccttcttcatcctgaacatgatgaagagccagcagtgccagggcaaacagtttctcttctctttctccctctctttcttatatctgtcctatctctttttttaaaaatggtagctcagaaacatctgcagaagcaggcttttgcggtttaacttgtgcgcgtgcttagtcgcttcagtcgtgtctgactctctgcgaccccatggaccatggcctgccaggttcctctgtccatgggattctccaggcaagaatactggagtgggctgccatttccctctccaaatctgacctgagacaagccaaaatgaccaccacaaggaggcagtttaacttgggtctttactatttcaagaggcagagagatggtcctgtaaggagactaccagagcccttactcctctctgccgtcttcccagccatcacccatcctagcaatacccagacagttggaagaaaggtagatgtatatggaataaatggatgggagaactgaagagactggggcgactgcccgccctaagaaagaaaactgaacagacgcccagaggcagaaatgacccagggaaaatatgggcctagaatgaaaactggattgactgagagcctgcaaggaagggtatcttctcttgtcagtggtgatggaaggagaaatatttttctcaggattgggatgggagaactgaaggtagttgaaatactaactatgttgctgaaagatgggttctttaaagaaattcaaacaatgcaattatgtggaagattaatactatgtccttaatttcactagtatttagtaaaacctattactttctctgtttctgtttactgggaagatgcggctgtataggttttctttggctttcagttgagaacatttgaaaggatgctaatctctttcttgtacaatatggaaatttttgtgaatattcatgatgattttcaacttgtttctgttaaaactgtatcttttagaagtaaaattgaataacttggtcttgccagactctgaagactttggaaatgattgtctttatggaaaaataacacacaaaaatttgtggctctgactgtcttcacaatttatcctggtaacaacttaattattgatatatctctctctctgaatggcagaaatacttgggaggtttctctgtaaaattggaagtgtaccactggcatatttttctttccttatttgcatgttggtaaaataaaagcatgtcagtataaaaaaaataaactaaaaagaaaatagcaagggtggaaaaatacacagaaaaatcagaatgcatgaacactactcttggaagagtagcttggtacaaatactttagaaaattgattggcagcatctatgcacaccctctgatccagctctgggaacacacccaacagaaatacatacatatatattcacaaagacatgcatggaagtgtttataacagcacagttctaatagagggaactgcccccagaatccatcaacagcagaaaaagtaagttttaaaat

SEQ ID NO: 42529 - DNA, 1833 bp, Bovine  19866880903020
  misc_feature (1)..(1): n is a, c, g, or t
nacaattacagcactgaatatggatttgaagcatttgacttctgctgcttctgcacatgttatttttctttaacagacactgatcacctgataagttaaatttaaaacaaggttttagacacgtaagcagtgaggttacgtagctcatgttaggtaacaagatactataaaattaagaagtccctgctctctgagagccagtgatcccaatgaggcaggcaggatatacagataataatagcaaaagttctagttcttatgcttagagccataattcttaatcctaattgtacattgaaattacttggggagctttaaaaaaatatatcagtgtcacggctccagcctggaccaattaaatcagaatctttggggtaagacacagatacagagatagaagtcaaacactgttcatgtaaattttatagattatggttttaaatacctttacccttcatttctcaattctcgttgtccttttccaagcattatgtttagtacatagatactcaatctagatattctagatttatttacaaatattaaaagcaaaccatttagggcccatatagggtccataaacagaaaatctgttttaacgttaaatttcagtctcatcttttgccttctataaacaaacaaaaaaattagaacattttttaatctattgtttatctcattcatccttcaaaaactatttcagtatctcttggccaaaagaaatttatatagtatatgtgtatttcagaaaattgtatcatcccttactgcaaatacatttaaacagttcatggctgaacattttagctgttcactggcctgctcttctataacctacaaaggttgtaaatatttcagtctctcctaaattatgttctgcagtggaaatgataacagaccttaattggaggctgatggtggagctgatagcattccagaatctctgatcctcccgcacggcagcttagagaacacgacccacacgtcacaccaacactggcgatatagttaacaaggaaaatgcttacttattccatgatgatagaaatcgtgatgtggcacaattgtctattaagctaaaaaagcatttttaatattcaagttgtacttatttttttttaccacgagaggtccctcaatcctgaattacagtggttgcgtgcaggccattttctctgcccgaaggactgtcgcagcacttcgctgttcttcccgtaactgcattaataccgaatttttaatataggagagtgaaacctttattctttagaactagctttttaaattttttacttttaatcccctctggatacagaaaatatcagcatctaaggatagaagaggagtgtaaaggccaggaaaatgagttacataaaatggcaatgaaatcgaattcttttgaggttaagtgaaaacacaggctgctttgtgagtggagaacaaacaggaccattcctttctttccaccttaggtctcagtctcagttccctgtcttgtctagtcagtgtcaatctctcagtataaaaatagaataaacatgattatttttatcaataggggtatagaaaggaaggtactttagataggatgacattaataggacatgaataatagaatttttgtcataggttatatgttacaaatcattactttgactttaaataaacataaatgttcctgtgtctgcctctccacttatttaagtattcattcattgaatgattgctcaatgtcaaacagaaaatcagactccctgcctttagggaaataatttaataagcagttattattccagcataatatgtttaacataaattcctctggtttaatag

SEQ ID NO: 42530 - DNA, 2675 bp, Bovine  19866880917391
  misc_feature (1)..(1): n is a, c, g, or t
ntttgcctgtgtatcgtgtgtgtgtgtgtgtgtgtgtgtatgtgtatacagacataaacatagatatatgtactacataataaaatgttcattttactttatagagtaaaacatctgaaatataatttatcagtagtaatgttaagaaaaggcaggcataatatgattacttaccaaaaaacaccacttgctattatgggcagtgatatttgcaattaagttgaacacaactaaattatgactttaattaaaaggcattttctaagatggcaccaacatgtttaaaatttaatacattttatgtgagatactggaattgttaacatagaattttctttctgcaccgtttgcactttttaaaaagcaaaacatctctaaccaatatcaaaatgctccctaatccatagacatttcattgcataataaattgaaggagcacttttttcccaaccaactattacttgcccttccttgggatatacgattgtatttatatccatggctaatagtaatagaattcctgacattctcttgtggccactatgtccacattaattttaaatgaaaactaaatggaggctggggggactgataatgaaacacacagcctttggccattggtcagcatccgattagaatgagtcagcaggtcttagaaagtttgggagcgatagtggtatctcagcggttagtgaaaggtgggtttgggtctgaattctgggccaggcagagagatacagggccacagtgccaatgacatccttctccaattctgtctcccctacaagtcttattacctgcaaacaactaatttgttaaggtgagaagctgtcttttttctaaaagaagtctgaaacacagcacacaggattatttgtgatcttacattgtccagacctctgaggtttaacaaagcgacaatggccttgcttatctttgctgctggtagacgacagggtaaatacgtgagtgtttgagcatctaccatctttacaaactgttctagaaaccatggagatagagaagaagcatgaaacagaagcaataaaagtatgttgcttcggctcaaggagtgtatcacctagtttgaaaagcacgtttttacctacactgaaagagtaactcataaatgtaaatgagtctttgaatatgtaagttcaacatgaaggatacacacaaggtcaacatgaaagggtacacttcttccctgacgaagctgctgctgttcgcattgttttttgaattgccttcagaatgaatttagaaggcatgcagaaatatttaccaagttataagtccatggtataactcaggttaatcagccatatgattcagaaatttcttccagtgattctggccacttccaagtattgaagctgcccttaatgaacatattaacatattaaattgccccagctatggcctttcacataaagtgatatcctttctgtaaaggcagttctgctatttgtgtgatacttcagttctaaaaattctagtatatttattttaaaaattaaattatgttgctgcagagacctaccttatattctcaagagtagatagcaggcttcaaagcaatcacaaagtactattataaaagtgttgcacattccatgggacctatgtgttcaatgtaatggagatgtatcacagtgagttctcagttcagcagacacaagttaaaaaatagatatgccctcctgcaattgcttcaaacacctctgaactaatttcctttggttccctctcctctctccaagcaatgtcttcgcatggacttcatcatggctcaggtgactagtttcccccaatcacagttaccatagattatccattctcccttattttatctcatttctgatcagccaccaattcctgtcggctttatcttttaaatatttctcacctccatgccctatcctctatttgctaaacctctgccctgattcaagccatcactgacagagacaaacaggactctctagcaaaaagccccaggagctccttctaaactgcatgatactgggcccactgggcctgtccccccacaacccgctttgagcagtaagaagggctgcacctgaattctattatacttctgacaggtcctatggtttccttttccacaaaagaggagctacaatttcccacagtgccaaagcccagaggagctgggctttccaaaccgccctgcaaacagctgatatccaaaatcaggctaagaggcttgtgcaagtttcctgatgagagggactggctgtggggaaaactgggtcttgctctagtgggcagggtcatgctcagtaaacctttaatccaatttgctgatgggtgggcctgtgctccctccctgttaggtgtttggcttgaggcgacccattcccagaaaggcaaaccagtcctggagcccatgggctgtatggcagagctaaagaggacttatgccaacatgcgcctcccaggactgctcctgctgccggtgcccatgtctgcacagcagaccacggccaacgcacccctccgaaggagaccctcaagcactggcaggcaggtctggctcagtctcctttccccaggctcctggtgcacacaaggtttcatctgtgccctccacgagtctctgtttccccaagtcccatggaagttctgtaatcaaatcccactgtccttca

SEQ ID NO: 42531 - DNA, 1348 bp, Bovine  19866880921206
  misc_feature (1)..(1): n is a, c, g, or t
nttaaaagcgtttatatatcccatcttacttcccataggctgatccaggtgaaggtaccatggtatatagtctaggtcctctcaatctaggcagatacacttggtcaacatcatgatgaggagagtggctagaaagctggtgtaagtgagtaaagtgagctgattgcaactcagatttctgcatctcatttttttctcagagtgaactgcatcgatttcaaggatcgtcaaccacttttttagggaagtctaaaagctaatctgtgaagtattaaaattgtccttttctaggaaggaaaaagacatgtctgcttgacttgctatgtaattctgcaaaattgggttggcaaaaaaaaaacctgaataaacttttttggccaacccaatacattaatagcatgtggcctacaggaaacaggaagctaaaaaggatctttcacaatcacggttctatggaatgatccaggaaaccctccctatctgttcaggatgtatttgagtgatctctcaaagagggaaacaaatgaagggtgtactgtacttgtgggaggtggaagacagctctcaactagggattaaacgaaagcttaacatttctatgccagagcctctttttggcaaactagtaaagcctcagcttctttctcaatatgttttaaaactcctaacatataatacataggggtaccaggaaatgtattattttgaaatataatgatcagtacagatatttttaaaaactgtgatatatgtgctcctttattaagatattaaaattcaaaatgtaatggctaggatagtaactatggtaatttgtaagtagtgatgaatatatataatattttgagatgtatacagtaactgtatgataggaaaatatctgtgacaaagacacaggttctcagattgctatagttggttatccagatacatgatttagaagagacgctaaaatttcaggcacagtgaaaatttagatgtaatacttctctcatacaaaccccacagacatagattaagaaaacttaagttctgagagactactttttctagattgtgtttctcttctaggactttatatcaggttggccaataggatcatttccatttccataacggaaaaccccgaacgaacctttcagcccacccaatactaaagacctgatcatgttagagaggcctcctctgcccactctgtcagtgttactcctcagcccacagcatttcattcaccttcttcatgtctttgtcctcctggcatttaagtacgtctgtctgtgtgtgggtttctcaggtggcgcagtggtaaagaacacacctgtcagtgcaggagaagccagagacgtag

SEQ ID NO: 42532 - DNA, 1257 bp, Bovine  19866880963735
  misc_feature (1)..(1): n is a, c, g, or t
nacccagcaatctgtgtttaattatagtatgactcacaccaaagtttaagaaccactggctagactataacctccagacattggtttaattgatctggggatacagatgaacattgacatctttaatatgtcccaggaaaatgcagccaaaattgagaataactgatctatacctgttgtttgaatttacagtcaaaaacaccaagtctagtaagattaaattattattccaaactatcagattttatgctattttcctaatttcccaaacaaggagatagacatgatgtcttctgagacctcgcagccataatgggacctggatgatagaagaagccaactgtttgagcctccagtgttaatcattagggtttagttttttttttccctccctaatgttttcttcattttcctccctaatgtctacttcacttttcattcactttaagtcgtgtattctcagtggggcaaaaattggttcttggtgtaaaaaaaatcttaatgcagtggattatggttctccatatctttattctacacaataaaatcttattccttagtatttctctcattagggagaaatgtaatttaaagctaaatttattaattaaatatattttttcttctagggcaaggggcagtggtaatgaaaaaagaggttgaaaaaagttatttttaaaaggttttatagatgtattgcagtccaggattattgtgttctatgtgctatgtgtagtcatattaatagcggtttgttgcaagatgtttggacccagataatgtttacagtataaattcctggctactctttatgctgtaatttcactctgtccatcatggacagaatcagaaaacactggtcaccatcattttacttggtttgtagccaagagtttaacatgttgatagatgcaatgaaaagataaatattttgttaaatttttaaatgctcaaataatccccaatatattgtgggattgagtatctcagggtaggtaaacagttactgaatttttttctctcaaagttagtagctttcttcagtatctgttaataaatgttaatgtctttgaaatttatttccaaaatctcattggaatataataaagagcatgcacaatcaagcttagggctcaaggaaagatgctgttttcatgtatactttcatggatacctttgatttcttttaaaaataaagctatttttccttatgcatgtttattttgtcaatggcaaagaataatatatctttaaata

SEQ ID NO: 42533 - DNA, 757 bp, Bovine  19866881007827
  misc_feature (1)..(1): n is a, c, g, or t
naaactggaaatttgcccttgaataatgtttcctgtaaatcatcgaggtttgtgggggtttgttgttgctggtaactgctgggtctgattgggagttggtttaggagccagggtggctgcaatagaggaaaagctggtgtttcccccagttaactcaagtaaaaagtattctttccataaagggatcattaagggaaaggaaagtccctggttccttgtcagtgtggaggaaacaaaagctacagtggaacaggccctatcttccctcagtcagagttcctcaattgagggataaaggtcaccaatgcgcctgcttctggaaaggggtgggcatggggaggtcggcggcctgtgtgcttggatctgccacaattagttgggttgaaataagaaagcgaaagctcaagacaccctgagaaaccctcttcccttttttggaaggtgctacttggcggggcacgggcaaacgccagatctcccaaatcatttcaggagctgggcggcgaagaggcagaagcagccgagccttgtccacggctccctagggtaggagacccatggagaagtttcgggaggtgttgaatttgcacctcaaacaccgtaacgctctgggctactgcctggtgagcctgctgacggcgggcggggagcgcatcttctccaccacggtgttccagtgcccgtgcagcgtcgcctggaacctgccctacggtctggtcttcctgctggtgccggcgctggcgctcttcctcctggg

SEQ ID NO: 42534 - DNA, 1165 bp, Bovine  19866881021721
  misc_feature (1)..(1): n is a, c, g, or t
nggaggggttactgccacttctttctctaagggaataagacctaactgttgcttgttcatcatcttaactctgagtagttcaaattttacctgttgattaaaaaaaatttttttaagtgactaaatcactgttttgttgtgtttacctaaggtgttaggctgggtcctgatagcagttgttatcatcctcctcctgatttgtacatcaatcactcgatgcctgtctccagttagttacctgcagctgaaattttggaaaatctatttgcaacaggagcaacagattcttaaaagtcaagccacagaacatgcaacgcaactggcgaaagaaaatatcaaatgtttctttgagtgctcacatccacaggaatacaacactccaagcattaaagactggcagcagatttcatcactatatactttcaatccaaaggagcagtactacagcactttgcacaaatacgtgaacaaaaaacagaagaatcaaagtagcacatcttctgaagaagatgcaatggttcctgttcttggctttgtagattcatctgatatgaacagcactacagacttatgaccttgttaatgaatgagaaaagaaagctcttctgaattattgattcctttaaaaaaaataaatgtgggtattgtttatgactcctctgtttggtcttccaagttatggaaacatagaatattaaataaaatagaaatttagaattttatctttttattattttatttaaaaagtaagcaaggttaaatggttcactcagtgtgacagttcagttcagatcagtctctcagtggtgtccaactctttgcaaccccatgaaccacagcatgccagacctccctgtccatcaccaactccgagaggttacccagactcatgtccattgagttggtgatgccatccaaccatctcatcttctgttgtccccttctcctcttgccctcagtctttcccagcatcagggtcttttcgaatgagtcagctctttgcatcagctggccaaagtactggagtttcagcttcagcatcagtccttccagatcactcaggactgatcttctttaggatggactggttggatctccttgcagtccaagggactctcaagagtcttctccaacatcacagttcaaaagcatcaattcttcggcg

SEQ ID NO: 42535 - DNA, 4555 bp, Bovine  19866881218579
  misc_feature (1)..(1): n is a, c, g, or t
nttcagttcagttcagtcgtgtctgaacctcagatatgcagatgacaccacccttatggaagaaagtgaagaggatctaaaaagcctcttgatgaaagtgagagtggagagtgaaaaagttggcttaaatttccctgtggtccaggtaattttcacgtcctttccccttccctccccttcccttccctttggctcagcatccctcttggcttgtagtaattaaccctgtcacttttccccgctcccctattatggtaaggacaaaaagataataataatgctgatcaatgtattctcttagttttccctcctttccatttcccccaccacaacctttgtcccatgcatcatcaccatttggactatggaaatgttttactgctacctttaatcttaatagcttctgcttccacatcacacacaaggagccaggcactgtggctacaagctttatgtgcatcacctcagtctctctcccacttgctcaccaccaccgctagattaatcatcagaaaacatgacctggtacatctcaccagtacatacacataaaaaagttttaagggttccctttgctcatggagtaaaaccttttttaactcacctccatgtggccactagtcatttcttcagccttattttccctatattaattctgctccagctagacacatcctcttcccactattggtggtagcatcacttaaaatctgcctccctagcattccttcagtgctcagccactactcctctggtttggcaagacgcacacaaaagctagtgctgcacagtattactttttattttgagattagtccctgtgttcacctgaggctgcagacctccctggcataaagactgagtctgataacaccagatatgcttttgagagcagttcaaataaatacttgctgatgaagcagttaacacattgtatttcagtgtgggcattttatatagtcttttgatttatactgaatgttggacttaatgcctgtgtttcacgtaatctttcatttgttcttgccaaagagtgtggagggcaaagcatttaaggaagaagccttatctgctctgggccagttgcagcacagattcgcatgttaattggcctcagaccacagatttcaatctaaccactcttctgccaaagggaacagttctgcgtgaatgtagagaccaaaaatgagactgacttttctgtcctccaaaacacagggatatcagggctgcacacaggaaaagcgtgtgtgttaaagtgacaatgtcacatccagtatctgaagtagaacttgcagtcacagaaaaaccaggaaattccttgtatgggtcatttgataaagctttgttgttgctattgttcacctttgtagtcatcatgaaaggggacttttgaaagaattttctcagggaggaagtaaggttaactaactggtactttccccactgaggagggtacagcaccacgtgtttatgagagcatctgattgtaacctgaatccacttccctgagtctagtcatcaaaagtacacaattcctcacaaaaagtttaggaagaatacaaccaagtttagacaagcattcagtctcaaggcactgtttttgcatcccaaccatttcaacagtgtaaaaggaaataaaagtcaatattgttaaaataaaaaacaaaatgtgtacatatatgatggtatttccaatcatcaagcctgaaatgaaagtgtaaaatttaacctatgtactctgtttttgtacatttgtgataatgcttgtcctagaaactagcagaatatggattagagttgaaagcgttaaacattaaatagtttctatctttgtcacatccaaagaaagtaaactgattttgtaattcctggggaaatgctttacttcacaaatcaccacacatgttcattcacatttctttcttacatgaataagctttgaggtactaaggtttctttttaatggttatatgggtcactaatttcagagtgacttagtttcctacccttcaaaaatagttaccttccttcatgaatcattttctttctcactccaagacagaaagctaaaaggaactttttaattcactttatagaattttaatttccagtgtcatgaatgatatttatctcaacccactttgtttaaagcattgagtattctttaaaaagctacaaaataactttttctttgagaaccatcttcatgagaaaaaacaagaccaaaggtttgggtcgaatcagtgggtggtcgctgtgtgtgcctgctctggatgggttcataaagccatgttttggatttggcaggccagtctggattttctggataaaagtttctcatacaaagaggaaaaaagaaggagcatttatatcctttttataaatatcagagattatattcaaaatattttgtgattgatacagcacaggtacccattattagaatagacaccagcaaaaccagaggctgatgtttaactttcaaacatggtatttatcattttaacactaaatgatgcactgtgtcatccctcactttcattgaattctttatcccatataaaagataggaaacatctttaaagtatctttaccttctcattaccatacagggtaatactgatataattttctacatgctgaaatatatcagttatatttgcttcataagtatatgaagaacagatgacaaagcaaaagaggaaaagaagagtacatttcttttcctttgagaatcttagagtatcaagggagggacaaaagatcattttaactgagtaataactcaaagagaaaatgatcaaacaaaaagaacatttcatcaccgaggtgtactgtcagagatgtgaacaactaacagtgagtcaatgatggaaaccttcttaaagaaaacacactttgagtacaggttggaaaagatgagaaatccaaagaaatgaagggcaaggacatgtgcacagctgaagaaccagcaaggtgtctgtgagcagggtggtttggctggccacagtgagcgggggagggaccattaaaggaagaaacaagaaaaccagttctctgatgtttacaggtaattgcaggtggaaaccactaactcaatgggagaagcagatcatcagcaaaattttaaaagttcattgggagggtaagatattccacttaagattttaaatgggagatagtattaagtttgaggcacaccagcaaaaatgacagaaaatttcgatttgtactttaaaaatgatttaacgaacaaatttaagagatgacaatatggagtgtgggaacaagaaagagttcttctgtgggaggaatacaggagagttgatcagaaatttagaggcgcaaagaaatttttatgtgggtccacgagtaaatctttgaaattcactgtaaatgtgttttaatgagtatatgcatttttctgggacatgaatccatcatttctttaaattatcaatgatgcctatgacagaaaatactcatcttcctcagtaagtttaagtggtttttttcaggttcacacaagaactggtgacaaagttataactacagtctaccagcataaaatttatccactcattcatttttcactcaacagcgacaaggattcatgcaaacacctactctgtgcatgcacagttcaggctggtagaattacagctgagaatgcaaggaacacgaaatcctgcctctgtggatcttgcatactaatggggaaggacagcaacaaacaaatacaggagtaattatacattgtgttcaaaggcgatatgtgcaaaagagaaagagaaagaagcaaaggaaggaagagggagattgcatttttagaatcactcttagtaggcagcagtatgtggcaggtggaattccagagggttttgtcttgtgttcctaaactcaaagtaatcaaaataaatagagatgtggagaaaaactgaactgcatctttgagaggagtaaacgagtaaggatcataatctactctaggactgaagccaatatccagatttttcaactgcaatttggccaagatctgttagaagattttttttctaattaaagaacaaacaatgcccatccacttcacacatgtttttcagtgacgtttatgaaaatgcaaaacaccaggagctacaagtatcctccaagggtttcctgggaagcaatggctctttagccaaagaaaagtgagcaaactgtttaatgggaagagtattgttttatgaaaaataactgtacataggatagaaatcctatttctgattatagtagaataaataaagtaggattcgttcatagatatctcttaaagccatataaaattaaactatttaaataaaattatctttcacatttggcaaatatacaatgaagaacaaaatctctgtctaatcttaacccatacatggcacaaagacacacacatatgtgtggaaatggatgtgtaaatacgtgtgtgggtgggggggcatgcatctgcagctagcattaatcaggtgtgcactaattgcactgccattttagggattaaataaacagggttcccagg

SEQ ID NO: 42536 - DNA, 1628 bp, Bovine  19866881260440
  misc_feature (1)..(1): n is a, c, g, or t
nactgatttttaaattgtgataattatctcccattagaggctcagcaagatctatttctctgttctttttcattgatttgtcttttttactgtttagctgtattttacgggttttttttttttaatgtttgcttatttttttatgtttagctctgtttcagcaatgtaagccaacttgaaagcttttgtagaagtaaacacattcacaaatgaaatgatatacaatcaaataaaatggcatatctgccaaacataagaaagaatttctaattaaatgaattgcccaacactgggacaggctggttctctggggtttctgggaggtttaatgctccacttagaaagttaaaattgtaagggatttcttgggaaaagcaatattactctagacagcttttgcaaattctactagtctatcaaaaaaaggaaaacatgatacgtgaatggcaagaaactttacatatgactgagtctaaatccctcttttactgatgaacctagagtttcaaaatcaactgctagtagtttgcagggctggaatccacgtctagtcatctagggtgccctgttaatgacagtagaaataggagaaacctttaacaattatttcctgtttcctgttttgtttctctttttttcaagaaattgactgatttcttaggagaatgtttgaggacttttagaataccacctttatcttccctatcaaactcaccccaaactctcaggaagccttctctgtgatggagaactcaagccctgaatccctcttctccttctttgcaccccgtctcagtaaatagtagacatgttaaacagaatgaacatgaaagtcatggagaaatgtaatgaaagataattgaaatactttgaaatgaatttttacctccttgggaaaatacaaaggaccttctcatgtattaactaattgattttcatagcagaatactgtctctttccatttttcattgttttcacatatgcaagacaacttttggtcatttgctcattattccttcacatttccaaaagcagagagctctcattctccatacccaatgaggacccttgatataagatgtgttcctgctgtttagttcagacaagtattaggtgaagtgtacacaggtctgttcagatttggcttcatttgtcatagctggtggcaaacacagctctggtcatgttcaagtaaacacgtcacataaagacaagccatctcctagtcataggctgcttttggaaggctggccaaccatcttcctaatgcctgtgactagttcaggtatgaatcaggtgaacaaccatggatactcaccatgattcatcactatccccagaaaaagagttcaaagtacatgtttcagtgcaaggggggcgtcaacacctccatcttcctgtgcaaaagggagtactctttacgcacaaacataaaaccaattggatttttattgagcacccgccttaagcaagcactgtgctaagtgcctttttatgtcgtattttatttaattttcataccaaccctaagggatgtggatatttcttcattgttttacagagcagaaaacaaagtagagggagattaagtaaatttcccctggatacaaagcaggtaaattttcatt

SEQ ID NO: 42537 - DNA, 954 bp, Bovine  19866881312962
  misc_feature (1)..(1): n is a, c, g, or t
nctttttattctcctgtaggatctttcgaagatggtttggctgccttggagatttggagatctgatgccacgatgaggactcacacacggggggctcccagtgtgtttttcatatgtttgttttgcttcgtgtcagcctgcgtcactgacgagaatccagaagtcatgatccccttcaccaatgccaactatgacagccacccaatgctgtacttctctagagcggaggtggccgagctccagctgagggccgccagctcccacgagcacattgccgcccggctcactgaggcggtgaacaccatgctgtccagccccttggagtacctccctccttgggatcccaaggaatacagcgcccgctggaatgagatttacggcaacaacctgggggccttagcaatgttctgtgtgctgtatcctgagaacatggaagcccgagatatggccaaagactacatggagaggatggcagctcagcctagttggtagatttttgtctttttcttcttactgtattaactctgtgatttaaggaatgaattcatagggacatgaaatctcagaagccagattttcatatactgtgtatgtgtgtgtgattgagggggaaagattgcttgttatttatgttgtcagtggcttctgaatggtctctagtttcaaagacctagtaacttccaagtttaaagttagaagaaaaatatttatagatacaatctaaccaaagaaaaagtaatttgctgccttgagtaaacagtatcatcttgattgttgagatttctttcccccttgtttaacacacttgtattactatcatcaggtcttaggttctcaccgacccccaagtgattaaaaccttttgccagcaagagatttcctccaattaagatttctttccattttaggacacttaggagcttgaagagctaaaagtaaatgtgataggattaa

SEQ ID NO: 42538 - DNA, 1182 bp, Bovine  19866881588734
  misc_feature (1)..(1): n is a, c, g, or t
ntctctgcttctatggataagactaaatttttctacagtaaatctaaaagccacatgaacaaaaacaacaaaatttatgtatctaatactaacaagctggtaatagaacactgatatcagactgctaagtcgcttcagtagtgtccgactctgtgtgaccccatagacggcagcccaccaggctccaccgtccctgggattctccaggcaagaacactggagtgggttgccatttccttctgcaatgcatgaaagtgaaaagtgaaagtgaagtcgctcagtcgtgtccaactcttagcgaccccatggactgcagcctatcaggctcctccgtccatgggattttccaggcaagagtactggagtggggtgccattgccttctccggatatcagactaagacattctaacttaggagcgcacctgaggagctttttcaaaatacagttgctgaaccaccattatcttaatgaatcccaaatacagaaggaacggtgttgtgtccctcaggactgtgggagtgtggaaagaaggttgagaaccacctacagtgtttatacaccataagggtgggggctgtacatcattcatccagctcttttaccaccatacttgacatgtagaaggtactcaagaaatacttggtgaattaatgataacctgggaagtgaaaatgaacatgtaagcttaatagcagctaaatgctagtgtgcaaaaaacatcttcatatttgatactgaaaaaaccattttggttgctgagtttaaagagcatgactttctgttctttaagtagaataggttttcattataaagccacagtctagtcactttcaacagctacaggtaaactcctagaataaaaatagttttaaatacacaattgggtggggtgaagctagaaaatattctgattctacaatctgttttggacaagacagtgctttttatgtgactaacaaagcaaacagtagtcagattccctgtactgaaataaacacactatttgccaaaagggttgaacgtacaaggcttattcaataaagacacatttcccaaaattaaatgggaatatagaatgacaaatacccacatatatttacatatcccccaaagaagacatatgaccacttggtatgggattttgtctctaataattacaaaatggagccaagcccactgt

SEQ ID NO: 42539 - DNA, 915 bp, Bovine  19866881787212
  misc_feature (1)..(1): n is a, c, g, or t
nactactacagtactgaattttgcccgcaaaaatgctcaaagagaaaatgaaatggttttatactttctaagacaagctataagtaaattctagtttatctagcagtgtaacagttggatatcttctgatcggtacttgttacagttttaatggattttcttaatgatgacattggacgacaaaaatcctattttcagaattttttattcttacattattttcagaacaatctaatgctgagtatgaaagtgaaagtcgctcagtcatgtccaactctttgtgactccatggactatacagtccatggaattctccaggccagaatactggagtaggtagcctttcccttctccaggggatcttcccaactcaggaatcgaacccaggtctcctgcactgcaggtggattctttaccagatgagtcaccagggaagcccaagaatactgaagtgggtagcctatcccttcttcagcagatccttagtataattaagtgtatttcttttttggcattctgaatcttttaaaaagtggtagcttatgtattttaagttttccactgtattgttttccagaattggaataccaattccctacctatactgggagtaagactttcttgtatgtattcattaattcagctatgtattgagcagctataaacctagaaactatattaggcatgaggctacaaggtaaaatttctcccttagtccaaagcaatttatttaacttattgtacctggccccaaagaaaattagcaatcttttttgttttcaaaatttttcgtaatcaaagatttttctagaagagtttcaaaaactagctgtgactttctcagcaatagctttaaacatgaaaacactattttctggcataactgactaaaagcataaagcatgtaaagaaaat

SEQ ID NO: 42540 - DNA, 832 bp, Bovine  19866880403446
  misc_feature (1)..(1): n is a, c, g, or t
ntactaaattcaaagggtagagtatgggattaatttaacttttgtgagagagaccttttctgtaaagcaagattctgccagtggcaagtttgaaaatgcagcccaaaggggcttaaccattatagggaattgattaactcaagtaattgaaaaggctgggggtggtataccttcaagcttggctgggtgccagaggatggagcaatgaaatggctacactcttcagtctcttctcagtcctgctttctcctcaggtgattgccgttgtcaggcaagctgtgctacataagagcgaattgggtcaacagcagtttcacaggcttttcaacccaagtggaaacccagggaaaacagcagcttatctttcccaacagttttatgcaagtccccagaatactgttggtccacaggcattccccactgtggtcagtatgacgtgacctctgttagccaggactgggccaccagtgagtggatccaggagtcagtagtttcagccttgtctgatccctaggctgaatgggaaagtgctctctgcccaaaggaaaagtaggtgctgctaccagtggatgagactaaaggcaaaatcagcaaaggaccaacttttcttttcgttttaaaaaattttagtcatttatttatttttggcttgtgctgggtctttgttgctgcagcgagtggagctgctcttcattgaggcgcacaggcttcactgcactggcttctcttattgccgagcactgactcagtaattgtggcgcacaggctttgccccaggcatgggagtcttctgtgaccagagatcaaacctgtgtaccctacagtggcaggt

SEQ ID NO: 42541 - DNA, 1749 bp, Bovine  19866880516676
  misc_feature (1)..(1): n is a, c, g, or t
ntggaaatggcatcttagagaaatccagaacttgttatcaaggagttcatgattttcaggggtctagttttccactgtggcatttgcacaggtttaaggaaaggctgagaatctcattttctattctcttctcggtcccgtggtaaggcgagttttcattattgggagtggattgactgctaaactaaattagcaattatgatgggtacaattaactgataaagaatttattatcacttaaagtaccttaagaattaaatctgatatttatttaaccttactcggtatagcacagtgggctgaaagggatacaaagaaataatgaaagtcgcatccaacacttggctcatctgtatctgtcactccacaagacacttcatggacattataatttttaaactgtgacccaggtctctcaggttgcaaagtctattttctttcctctacactacgctctggtgcttgcccttagcaaagttataaatccagtgggagagacaaggctactacatacacataaagcaataagagaataaatagaatttagttctgtggccttgattttaataccaaaacaaacaaacaagcatcaataacaaaaataatacaactggtttgggctaagtggcagaacagaagtataggtctccatgtcttcagcatcatgaaggccagattagcctacaccctttcttactgtgtgaccttgaactctgatgctcagtttcttcatctgcctcatgacattaacatctactgcacttgagaattaaagctacatgtaaaacaccttgcataatgtttgccccaaagtagaacctctgtgttattcaattcaatgggcattttctgcctcatgttaaacaaccctcacaatttttgacagtaatactggtgccagctctcttgaaacatcctcattccttgtgacctgagatttcagtcttatagttttcctcctatctctgtggatacttcttgattttttttcaggacccagtgctggatcttagcctgcttctttgatcactgtaccttctttgtatagactctcatggatatacacgtgtatattctgacaacttcaaaggtatttcagacttcaaactgtcttttgagtcccaaactggattatgtaacaccctattcaatacctccactgactatctacttgaccagttcccaagaggaccatgtccatacccgaacgtcctatatcataccaacttccccatgcaactgataaacctactcatatcatacttctaaatacgtcagtgattttcattgctcttagaataaaaatcttgccttttcctgcatagccacattgtaatttgccttggatttctccagcttcatttcatgccattctctatcacattcaataatcttcagatagactatcctttgttaagatcttcaaatacccaagctccttcctgagtcagatgttttgcacctactgtctatctctttgcctggtaaattctttgtgaaatttcaaattacagcttaaatttttcagagaaacctccaggaactccaggctatgcagattaaacttggttcttttgctacatgctattatagaataatgtgtttctccttcctagaacttacagcattcattatatgtatatatacgagagatctcttcctctccttacaaagtcccaatcctattggattacggcccactcttacgtcctcatttaatcttgattacttaatcttgacttccctggt

SEQ ID NO: 42542 - DNA, 1188 bp, Bovine  19866880536921
  misc_feature (1)..(1): n is a, c, g, or t
nggagataactccccagacatgttccatttctctagagttgaaacacaccccatttgcctaaagcagtgtaactactctggctttgccatggactctgcattgccctccttcctctcaagggttgacaaggcatgatttaaaaatcaacaaagtaagtgttttaagtttaaaatacaattatatcacactaacctttcttcttgccaacatctagcaaatagtattaagatggtgtgatcagttagggagactaaaaaaatccacttgacatttgaccctgactatgtatataccagaaactgtctgaatactgatgtttttcattactcaattgcaacactacaatatattttctcttccactgtactcattactttctcaaatacacacaatcggttttatctactcaagtcttttctgcaacttctttgtttctaaataatcttgtaggtacacatgaccttgaaatctcacttattcttcataacctattatgtagccaagaactcaatttaatcctatctaagctttaattgaatagtttaaaatactattctcctgtgaggcaagcaattcatttaaaaataaatacagcctttcttatatcataatcctggccctgcagttgttgaatatttgaggaatctaacgacaacctttagtttatcactgtgattatcataatttcactactaataattacctaccgactttaaaaaatgatctgaagaagaatgatatggtagatgaaatgagcttgaattacatgtactttatgcttttccccagatttatcagaatgattttataaccttgggaaagtcactgaacctctcaatgtttctattctgatctctttaaaataaagataataacttcatcttatcatctacttcagtgatgaaggtgtaaagactcataatcataaaaagcacatcaggctttacgaaagccagactcagtgtaagtataaagtatttttgagaaagagcacatgaagagtttgcaaacacaaagtttttataacgtgttttggaaaaaaaaaatacataaagggaataaatcatacctcgatactcattttctgaggtgaactcctgtatccactgtatcccctgcattattagttcaagtgaaggacctgacaaaattttaatgtcactgcagttagcattcagctatggctt

SEQ ID NO: 42543 - DNA, 936 bp, Bovine  19866880640990
  misc_feature (1)..(1): n is a, c, g, or t
nttatactttcttttcagaaataatcatagctacttctgatataaaggcaatttaatgttctgctaaagttctgagattattaacccattttcctaatgtctttattataatagctatcattctgatcatcccacttgtaacattattgtttcttaagatttctaatgcatcttaattagacatatggtttcctaagttaaccacttttgaggcaatttcatgaagattatattactcagaacccttattttaaatcatatattaggtaaatatctgaaaatactgagtaagtgaacagggttacaatttttatttgtattttgttttacaaataaaattgtgagtagttagctagaacatgccggagaaggcaattgcaccccactccaatactcttgcctggaaaatcccatggatggaggagcctggtaggctgcagtccatggggtcacaaagagttggacacaactgagcgactttactatcaggcattggagaaggaaatggcagcccactccagtgttcttacctggagaatctcagggacagtagagcctggtgggctgccgtctatggggtcacacagagtcagacacgactgaagtgacttagcaggagcagcagcagctagaacacgcagtaggtttgttttctgttatatcctaatggcaagcagatgacaggaaggtgtaacattttttcagggtaaatagcattgaatatgcttggagagggggttagttgcttagagagtacatagttgaaatcaaatatttttctaacttctgaaggtttcagtgattcctattaataatccaaatatatttttgaaatagaaagctctattattgtttactctagttctaggtaaatgggcttaaagttttaacagtttttacttttaaaagtatattctgtcatctccagatctttca

SEQ ID NO: 42544 - DNA, 1490 bp, Bovine  19866880677724
  misc_feature (1)..(1): n is a, c, g, or t
ntagggaagtagacaggaaaaagaaggcaggcaatagagagtaagttatcaagcaagttacaactgtgagctgctggaaggtaattccattgaggaaatctgggagtctgtgccgaccataccttagaattacctgaagagaaggttgagtattcttcattggttgaagcttgcttctagagaatttaactcctatcacttttgcctagccttaataagcaagcctattgggttatcaagcctggagtgggtgggggtggggatcaaatctccattaagaagcaacacattcacagcatgcagccttcatcttagaggtgagcactgagaagctgtggatgggattcgacaagcactgcttcctgatcagctggggcccttcacttatgcacatgtgagaggtacttaatctattactaagaaatagatgtttctgatcaagggaagaaaccacctgaggctatctcctgtcaccaataactttccattgagagttcaaagcagggcctcctgagagaccccgaggcatcatttaaaatggatgagaccttgctattcagataaaagctctcttctttatcctcagtcacctaactatctgggcttcccaggtggcactagtggtaaagaacctgcccaccggtgcaggagacatgaaagacatgggtctgatccctgggtcgggaagatcccctggaggagggcatggcaacccacttcagtattcttgcctggagaatcccacggacagaggagcctggcgggctgcagtccacggggttgcaaagagtcagacacgaccgaagtgactttgcacgcacgcctatctggtaatatccattccacaaatctgacgaggtgaactctacactttctttacaagcagtctattgatcattcttggttcaacagttaacagtatgagaattcacagtctcaccattttttccagactcctttctcactaccatgactggagaggcatatgggctctgaagcagtaatgatcatgttaaccaacagctcttttaaatgatccctcaggtcattaatctcccacaaagcagtcctcctagattgttcccaaaatgcccttgagtcatttaacaagatgctgtgttgctccccttgggcacatcccacgatccaggcctgtagggattggcttcaattttcacctcaacctctcctgctcagatgctgaggatacctcagagcgcaagaagactgggctcaggctatgggtgcttctaagacaaggccaaggaggtgggaacaaggagttgcaagggttttggggaaagaacatctggccactcatgcttacagaaacctccatgccacagacttgatcctgaggacatagagctatatctgcaacagtatgtaccaccaaagcctaggttaggccacagctactagttttacacttagtcccataagcttctgaaagttgttgcatttgccttctcctttgggaaaaaatcgtt

SEQ ID NO: 42545 - DNA, 2731 bp, Bovine  19866880688055
  misc_feature (1)..(1): n is a, c, g, or t
nggtaaagagttgtaaaagaaaaagcggcaccttgaggagtgagaatctaatgaagagcaaatctcagatgtaaagaaaacacaagtagaatgccactgacataactgaaagcctggaggaagagtctgggaacctggctgaaacagaggctgaataaaagaggagaaggaggtcatactagttgagcagactaggtgctgggtctgaaagctgagtttgagaaattaacattctttacttctgatcacaagtaatttaagaggagctgtggagaaggccatggcaacccactccagtactcttgcctggagaatcccagggatggtggagcgtggtgggctgccgtctatggggtcactaagagtcggacacaactgagcgacttcattttcactttcactttgatgcattggagaaggaaatggcaacccactccaatgttcttgcctggagaatcccagggacagtggagcctgatgggctgcctctgggctgccagagtcggacacgactgaagcgtcttagcagcagcagcagcagtggcccagctcaggaaaggagcagctgtgacctaggatctatataatcaaatatcgatcactccttcttagcctccgagccctacttgttcctctgagtgaagtttctctgggcagaatctgacatgctgtttttaataaggaaagagatttttttgttttaccactgggtacagtatgaccataccagctcagcttagtaggaaatccaggtttgctctattggcaaacttgtgcctataactggggctgactgcttttgttgagtcagcccctcacgtgcactttggtggactttttcctcttcggtgctagcaatattccagtttcaatgttaagaaacaaaaggcaaccaagtataaaatacaaaacttctatttttataattctaagatatttacagaaatgattaagaactaatgaaagctttacaaataatgtgtatttaattacagcgtaccatttattatttattttctttgtaagaatggtgagatggggaaagagtctaagcctgtttacacacaaatataatcctaaacaattggaggaagcgtgttggttaccccttgggccagctaccctgaattctgcgaaacacagaatgcaccgctgtgtaaattagaaaaaggctccctctacaggccgactcctttgtgctgcagcaatttcctcactcaggtggctctgttaatgagcatctttacctcatggaggtagagctggtcaaatgcaatatgcaagctgcctttcctcttagagaagatcaaaaaaattcttagcatgctgcataatgattttcctcttggcatggataataggtgaaaagcctaaagagcacgctattttctgtagaatcacattgcttttgctataattaactttattcaaataaattgcaaattgaactactataacttggctctgatcaacaaatattcatctatattatgtatttatccatttatataagagatgggaaatagattcatacaatggaggggggaaaaaaactggattgttttgcctgagagtataaagatttttcttgaatatcttgccagaagctgccagaggttttctatcttctctgagtacagaacaaaagaaaactagcttgcactatataggtatttcaactctgaaaagaatttcctaccaaaaagaataataaaaaattagttgacaagagaattttcattccaagctagctagagctttacaagtaagagtaaagattttatttccctgcatttaaaattcagttttccctttcctttggaaacataaggataatttatagataataatcagcatttttcactgcaagaaaagttaataaaggtacatagaatagacttcatatattcattttttgttgtgggagaattgatttttacatgagtaaatacccctgtttttctagaagagttaagggcaaatataaggtagtctggaaaagaagtcaacagggtaaataacttcatatagctaatttttgccatcataatcctataacccaaaacactattacatgggaatagttggttagttgagcaaaaagaagagtgaacgtggacaacgtagctaccttttgcaagcatagggcttagaagataggaaaactggactcctaaacagctgtgtgacatcaggcaatttatgttcagtctctgatactagtttctcatccatacaattacatgatgacattagttactaaagttacttccagccctaatattttgggtaggaaattcttgcactctttacctttaagacatcagaattctcaagttttagtgcacgtggaactcatctgggaacttgctgaaagtgcatattccacccacaggcattctggaccccttgtccagacattctgattcagtaggtagattcctaagaatctttttcatatactttctccgtggtaagactgcaggaagaccaagaaatacgttcaggaaacatttggataaaattaactttctgaataacaggagacatgtctgactagactttgtacattgcataactagcagtgcatacatgctaagttgcttcagtcatgtccaattctttgtgacactatggactgtagcccaccaggctcctctgtccatgggattctccaggcaagaatactggagagggttgccatttccttctccaggggatcttgcagagt

SEQ ID NO: 42546 - DNA, 1009 bp, Bovine  19866880752663
  misc_feature (1)..(1): n is a, c, g, or t
ntgagtttctgtctacatgatctccagcccaaactagaaagtgaacaatccagttaatgagccaatttttgtgtatgggatgcaaaacattggtttgattcatattacttttaaattaaccagctgtttaggtaacgtggtgcaaaacaactggcatcccaaaccatccattacttcttccaattaaattgtattgccttataactgttagcaaaagatcgttcactcatttgttcatgctttgtttactggttaaacacttagtgagcaccagttgtttctcagagcagggtactgcgcttagtaataaaggaaatgcagagatgagagagactctacctctgcctttgaagagcttccgatttcaaaggggactaatacaacaaaacaaatattgataaataaaagacagaatgtgatgttttgtgcactgatttaaaaaattattgggtgcttacaacccacagggattctctttttgaggaaagagctcttgatacaaccctgatgtagcagattcaggtctgagccctgtcactaactggctttggcatttgcttagtcacagcttttctggaacataatatccccatctaggaaaggatatgttgtgttcaatgtttgttagtgctttttcccatgaatactattctaagtttcaatattttaagttggaaaagaacatgaatcagggtacatttcaaagggtagaggaaactttgattaaaaatgtagaaatacggatgttcttgaaaacacaagaatggatcttaattgatgcagatgagttaggcacactctctttaaaaaaaaaaaaaaagatttatttatttatttttggctgcactgggcttcctctagttgtggtgactgggggctactctttgttaagggtcttgggcttcattaattacagcacacaggctcagtagttgtggtttgagggctttagtgccccagcttagtagttttggtgcatgggcttagctgctccacagcatgtgtggga

SEQ ID NO: 42547 - DNA, 1719 bp, Bovine  19866880853348
  misc_feature (1)..(1): n is a, c, g, or t
ncttttcactttcatgcattggagaaggaaatggcaacccactccagtgttcttgcctggagaatcccagggacgggggagcctgatgggctgccatctatggggttgcacagagtcagacacgactgaagtgacttagcatagcatagcatagatatatgtagtgttttgcttacagagaaaattacactgaagacaacacatagtctggctggagatcttatcttttttctttatttctaatgtcagttctacaacttaataattatattcacccatccatccatgcttatgctcagtcatgttcaactctttgtgaccctttggactgtagcctgccaaggctcctctgtctttgggattttctaggcaagaatacttgagtggattgccatttcctcttccaggggatcttccccacccagggatggaacccatggtcctgcattgcaggtggattctttacccctgagccattagggaagcctaattacattcatatttatgcttaatttttcatgatttaacaatagtaaacatcttgaaatgcttataatttcattaaatataaactgagttgaagatggtatatcacatttacaaaataaaactataatatgttgtagaatatgtttttttaaaaataaactgaactttgaaacttaaggatttaaattttttgagtgctatttatatttttatgtttatatgtttttgtggagtagcattttcaattaccaaatttcagttgccaaatggttatttttaagttttttattcctttagcaatactagattatagtagctttaagtatttggacacagtcaaattatcagtataatttggataagaaataatggatgaatataaatttaatcacttcatttaaaaatgcagataacatgagtgaattcatctaaatttattcccataaaagcatcactatttttccaaatgccatctaattcaacatggttatcttttgtcatttacagaaaagtgaactacaacatagccaaaataaaatataactgtgattcatttccatatgtggttagtggctaatggcaaaattttgaaggtaactcatcttcaatgcattatattagttattagaaaattaagaaggatctaaaactatcattattctttaagatggcatatttttcttctcaaagcagaaattagcagaaagatcccaggcaaaacatggttcatagaagagagagtttatgcttctgagaaagtcaatattaaactgattttaaataaatttctttaaagagtggtagtataatatactttaggattctacaatggaaaaatgagattgcatttctgtggaataagtggtgatttttccaacttaatctagggctctctgtcctcaaataaattgttccacggatgacataaagtaagtcgtttgggcctttctacacagggtttttcaaatcaagcttttgtgaaagaatattactacaaggaattttactgaaccagaaagtgtaaatgaaggatcattgatgaaatgtgttgagaggagggaaaaatgggaaatgctgccgaactaaaatgaactttgttttgtctccagggcagtcctgacttaatgaaatgcagctatgagtagaataaatcagcctttgcatagagagttgacagtgaaagcacttaaaaagaaaccacaatgtccccaagatagaatctggatgtgt

SEQ ID NO: 42548 - DNA, 1074 bp, Bovine  19866880871477
  misc_feature (1)..(1): n is a, c, g, or t
ncctccctgcagagggaattggtttgggcatgaacccatgagcagtttaatgtcattcagctgatgccttgtgttatccttgagctaactaaactctgccatcagaagcagtgttgctgcttgggggctgaggattgggggtttcaagagatagtattctattaaacttgacattaactcctcctctgcttatctgcaaaccaaatgatttctcaggactccctcccttcctcttttcttccctctcttctttcctgccgttctctctcttttccttctttacttgctcatgtagtctgtaaatttttatcccactgttgctgggccctgtgctagatgataaaggtgtagggataaaaagtatggtcttttttcttgtaaagctcatacaggaagaacatacaaacagtcgtaattcagcttgataactgttcagatagtattgtgcaatgaagagaaagaggagtgatacatctaaagaggaaagaaggcatggatgatggtgaggggagacattttgaatggagtcttgaagcatagccatgtgtgcatttgttttgaggggagatactattgcatcttcagaagttctgaaaaaaaaaaaaaagttctgaggcaagaaagggtcacgagtaggagagtttgatcgaagtctgaacattttgtttctgttccaaatggcggaagagaagtagaaccttaaccctacttgtgccacttacctgctaaactagagtatatccatccttctctcctattctttcacatcttctcttcaattgaaatttcatcaaggaacacctcctacacacacacacacacacacatacacacacaagtcacaggaccttgtcttaatctatttgcactactcagaaaaaaaaaaagtaactttcttgttgttgtagagtgtctatgtgctattatccatttttactagtcaggctgctgctaagaacaggacagagtcattagggtaagttccagtggtttggaagggctatagggtacacagaaaagagtgcatagtatgaggttgcgaaggtggacagaggtcatatctcctcgtactta

SEQ ID NO: 42549 - DNA, 2620 bp, Bovine  19866881031892
  misc_feature (1)..(1): n is a, c, g, or t
ntcagatcccataactattttgtaaccaaaatttaatatcttccacatttgtccttaagaatttatctctagcccgacttagaggtccactttattcctcactttgtatcccatgcttacctgtactgttttcaaaacatcacataatgctgtacctgtctattttcttgactgattgccactgatctgtaagtccctgagaaaaagatacttattcttcaccattatgtcctcagtgtaagtagcttacgcttagtaggtgctcaataaatatctgttgcatgaatgagtgaattgcttcaacttctgttttacaagagaaacagaatattgctaaatgattcattccattatctttcaagtagaaagctacaagcgtgcatgtatatgtgctcagtcatgtctgactctttgcaaccccatggacagtagctcaccaggctccttgttcatgggcattttccaggcaagactactagaataagttgctatttcctcctccagaggtagaaagctaaataatcccaaatgatccatgatgtataactaaatatactgattaaaatctcttaaagtataattatatatttacttttctttaatatacacaatgaaaataacaactgctagcaatttctaattagtttctcttttttcaaatccatattaacttaggattcaaaaatcagtgtgatacatttatataagctaaacatataattgtacagcatagtgttcagctatacacagtgtacagcatggctctgaataagtcctcactagtgtcagcatgacagtagtaataccaatggaccagtttatggtgatggcgataaagaatgtgtatcaacaatgttatatataagtcatttgaaagacatgtatccaagataatactataaagaaagagagataaaaatttggacatctatctatttcaagatataggaaaagcataatcacatgtcttttttccaagtaattgttgttggcattattcttacactaagcatgataatagcaaattattgcattaggaaagagaatgtgaattacagtcgcataattttacgatactccatagggcatagaataattctctcttaacgtccaaaaatgcaagcaaacaatattgacatcgaaatgctttttgacaaaaacagccattacagagaaaaagagattaaaaaaggtttttatactctcaactcctcaaaccattttacaaatatttataaaatgtcaccaatagagggcttacctgaggtcaagtgaaagaggccctaaaccatcaaaagctatttccaatgtccagctgggagatctaaaacagagagtaacaaagacagtttatgacaaagctgacacacagtattctggaaggagtgaaatcaattgtgacatttttcatttatttgtaaatgcttctttggcagtacactccctcaaaacgacagttgcttcttacagaagaggggaggtgatggtaaaatacaggaatcctgacagttgctttaatgagattctgctttagggctattctaacacttttcccaacaaggagcctgcccttcattttcaatatcataactcagtaatttggaaaatgttatctctgtgaaaactaaacccagtcagtccttattagctattggttcagttgattttcctcttgtctttcaattagaagaaaacattctaaagcaagtatctaaataaatatcagccatacagaccaattatgtcttttattaaaaaagtactcttttatcaaaaacagtaatatggtgtgtgattgaacaactcaagacacactttccagtaactcaatatttgtttgaaaatatcacagagtacaatataagatatattttaaagactttactttctatgttttaacaagttcctctggaaaaggaaattattgcaaaggtagtttcactagtcttaaaaatttgagcaactccaaattaagcagtctaaagattccacttcatgtattcattcaattttcctttgatcatatattaactgtttggtgcaaagtaactgtcctcaacccatttctttaaaaaatgtaaattatactgtgcaaggaaaatacaatctaacacagggtagcccagtatctatcacctattagtcaaccaatagatatttactgaactgataagctgcacaaaatcaaatctttgtgcatagcaaaacacattttggcatttcactgcattatgggttcaaattctagatcacagagaaatgaactaaataagaaacctcagagacataacaaactttctgggttccaatttgcttttctatgaaatagagttggtactatttactgcatgtgatttctgtaatgattaaataaatgttggggcaggaataaagcacctagcacaagttcttggctcataatatgttgttaataaacaatagttattataattacaaggttttactttgaccagaacaaataacatctttctcaaatataacaacaaaagtagcaacaataaataagtggaaggagggaaccatggctgtaagaattctaagataaaacctttagttctatctcttccctctgtgaaactcaactctctcatcacaaaaa

SEQ ID NO: 42550 - DNA, 820 bp, Bovine  19866881064358
  misc_feature (1)..(1): n is a, c, g, or t
ncaagagtactggagtggggtgccattgccttctccgaagccctgaattcctctcttaagaaaactaagttattgaaaataaagcccttgaagatttaacattgattctgtcatattctcctttcagaatacagttagcctgaggttaaagctaaatattatatctttacaattttcagaaagaaaatggagatgtttagaattctgttgctactacttcagcacttctttataattagtcagttgttgttgttgtttggtcaaccagtggtgtccaactctggaccccatggactgcaagtgccaggcctccctgtccctaaccatcccctggagtctgcccaagttcatgttcattattttacatgtacaccatgtacaatgagtctgcacaactctccaaatacaataataaattaaaattttaactttcagttcagttcagtcgctcagtcatgtctgactctttgcgaccccatgaatcgcagcatgccaggcctttagttaacattaaaaaagccaagtaactgtatttttgttactgcaaataatattgtaatgtttatattagttgccatttttttcctcttccattatggtttatttataggatactgaagatagttccctgtgctatgcagtaggaccttgttgtctgttcatcctatatataatagtctcatctgctgatcctgaactcccactccatcccccctccccaacccttggcaactacacgtctgttctctatgagtctgtttctgtttcatagataaattcatttatgtcacttttagagtccacattaagtgatatcata

SEQ ID NO: 42551 - DNA, 1676 bp, Bovine  19866881187440
  misc_feature (1)..(1): n is a, c, g, or t
ntgggctggcttatcacctgtcaccgctgggggagccctatgtccttcaattggtctctctctctcactggttccatggagcctttttaaactcagaatgcaaatccctttgctgatgacaggatgtgtagagggaggtacagggaatcaaagggaggagtctagagtctgccctcagctcaactactaaccagatccccaaacgtggacaaggcacaatttaacaggaattactaaagaacactgcaatgcaattgaaagtgaattgaaaatctagtacaattggatttctaatctctgtactgccaaaacttcacctctgggattttcatgaatctcctctgtgtcacagttttctcctctgaaaattaagaagatttgaatatttaagaggaaggcataaaaccactaggttctgtggggtaaaggtctgcaagagtgaaaggaatggaaggagaagggttgtcacattgggaagctggagtaggaaagataaaagcaccattttatttggagccagtgatgagcgtagaaatacttttcttttactgtcctcgagtatattcattggcaaacactgcccttctgttagatttccacggttttctgtgacctacatttgctgtgatgttttactgactccttcatttgaattagctgcttttttacaggcctccaaatgccattatgaatcaccgaagctcacgccatctatcacagttataaggcatataaaagatgacaatcatcagtcaaatagcttcactcctcctgaaacaaaattttctcagtgcaaaataaatactttccctcctgctaggttagctaaaatttatactcctggtatgcaaatagtcctcaaagtttcagagtaaagaaagtgttcagtatgttggttcagtcacaggcaggagatatcattttaaatgggagtttttgttttgagacttatgcacaggcttctgaaagtatcacacttttattagtgggacaacaaggcgtgttcatatgcttaactatatctcaaaaaaacctgcttttagtttatgtcttgagcattccagaaccttacatgataacattaaatccaaccataatttgtttcttaggccaagaaagaaacattataacaatctctttagttgctcagtcatgtctgactctttgtgatcccatggactgtggcctgccaggctctttttttcatgggattctccaggcaagaatagtggaatgggttggtattccctcctccaggagatcttcccaacccaaggatcaaatcccagtctcctgcattgcaggcagattctttaaataggaaaatataaattttatgttttattataaataaatacatgatagtataaaatcagtgaatttttacctagaagaaatccaagatatgttcactgttaagtcaaatgatgatttgagattcaaggttcaggtcatttagccagggaaaactcctaattaataatagctggacctgaaatcagagaaggcaatggcaccccactccagtactcttgcctggaaaatcccatggacggaggagcctggtaggctgcagtccacagggttgctgagtcggacacgactgaagtgacttagcagcagcagactttgatttgagctccctgtcaattccatcagattctaacactttaaac

SEQ ID NO: 42552 - DNA, 672 bp, Bovine  19866881235704
  misc_feature (1)..(1): n is a, c, g, or t
nctgctgagtattaattatatgttactgaaaataaatttaaaggaatataggcaaaagaataggaagtaggaaagaatgtaaatgtagctattggatcatggcaatttgttatatattttcaaactagctggggacagtgttgtaagattgtatttatttatttatgcatctgtaagtaatggggaagtacctatcatttagaaataattactctcaccctgaaacttctataggcaatgtatggcttctgtaaaattgtccaggatatattatgtcacttttgattggaatctatatgactgaaactgaatagaaaaacagtgcattcataaatgatgcattttcctaaggtctatttttaaaaaattagaaaaacagtgcaaacgtgggaagacacccatactccttaaacaaattggagaatagctgatgtttgtcactgacaaaattaaaaattcattgttcagtttagtagcttgaaagcctgttatgtcacgttcttcactgaatgacacacattcttctgtagaagtgttcttctgctaaatgcacaccagaatgttggtaattggggcatgcaaatttgttctgcaactaagaacaagaggaggatttagaagctattttaatgtggtagtacatttatgtttaaagtacaataatattcatct

SEQ ID NO: 42553 - DNA, 2352 bp, Bovine  19866880450438
  misc_feature (1)..(1): n is a, c, g, or t
nccaatccctcccagcatcagagttttttccaatgagtcaactcttcacatgaggtggccaaagtactggagtttcagctttagcatcattccttccaatgaaatcccagggctgatctccttcagaatggactggttggatctctttgcagtccaagggactctcaagagtcttctccaacaccacagttcaaaagcatcaattctttcacactcagccttcttcacagtccaactctcacatccatacatgaccactggaaaaaccatagccttgactagacgaacctttgttggcaaagtaatgtctccgcttttgaaattagcttgcactatttcaagcaaatgacaatattatatgataataaagtagtgaactccttaatttagacatgtgcattaagacaattcctgttggagacccaagtgattgtcattagccaccttagcatcacagcaggttacacaaattattattatacttaattagcattctgacaagctgaggaattctttacctgcatttagagattacatgcagaaggatgatctgaaggcatttcctgccttaaaaacaccaaagcaaatcaaagaaatcagatccaatcatatttttattatcaagtacttgcagatcattaaaccaaatgacagaggaagaaataccaattataaatgttgtttttaggtgacatttgatttttcatgtaaggaaattattataatcagaatgatataattcaacaaaactattttactgtgatataatgctaatactatcattgttcacctccttttcttaataaaggaaatggtataaaatataacatcatttaatatttagagaatcatttaaatactatttaattctactcccattgcaatacatgttaaaaattagttttgaattattgactatcatattaaaatttctaacaaaaataagtttcagtggcagaagaatgtatagatttatgtacctgaaaatgtttctgtgctaaaatagaatgctttcagacagaaagactaaataagaaatggttgttattgttcaatcactaagtcttgtctgactctttgtgatgcctgtcctccattatttcccagagtttgctcaaattcacgtctattgagttggtgatgctaacaaaccatctcatcctatgttgcaccctgctccttttgccttcaatccttccagcatcagggtctgttccaatcagtcggctcttcgcatcagatggccaaagtaatggagcttccaccttggcatcagctgttctcatgaatattcaaggttgatttcctttaggattgactggtttgatctccttgactctcaagagtcttctccagcaccacaattcaaaatcatcaattcttctacactcagccttctttatggtccaactctcacatccatacatgactactagaaaaaccatagttttgtttatatgaaactttgctgacaaattgatatctctgctttttaatacactctctaggtttgtcatagcttttcttccagggaggaaatgtcttctaatttcatggctgcagtccacagtggtttttggagcctgagaacagaaaatctgtcagtgtttccactttttccccttctattttccctgaaatgatgggaccagatgccatgatcttattctttttttaaggttaagctttaagccatcctttgaactctcctctttcaccctcatcaagaggctctttagttcctcttcactttctgccgtaaggatggtatcatttgcatgtctgaggttgttgatatttctcctggcaatcttgattccagtttgtgattctttcagcctggcatttcacatgatgtactctgcaaataaattaaataaaaatggtaagaatatgaaaacaaatttaatgtaacactaaataaaattaatttcattatttgaaatattcaaaaaatgaggctatttgttagtgatgatttactaatgatatttaggagaactttatcacacttagctagtttcttggtagaaaatctctaatgtaatgaaaagagtaaaactgcatgagaatatattcatttcaaaagtttctcattatgtgtccatacagtaagtatagttttagttcccataaaaatatcatttcaaatatgaatggttcccagataaactacaggaataataaatagataagcctataaaaggccttcccttttgtttcagcagtaaagaatctgcctgcaatgcaggagacctgggttcgatccctgggtaaggaagatcctctggaagacggtatggcaatccactcatagtactcttgcctagaggatctcaaggtcaatggagc

SEQ ID NO: 42554 - DNA, 1687 bp, Bovine  19866880635458
  misc_feature (1)..(1): n is a, c, g, or t
naactgaagcgacttagcacgcatgcaagcactcatgcataaatatgcttgtatgtgtttttgagtaatgtgttacatgaaaaatattttaaggtaattaacagtaaaacaagagttcaagttatagttctactaaaattaatttttcttaatattggaaatataaattattgccttattttttattcactactactgtttaactgtttcctggtggttccactgaaagaatccacataccaatgcaggagacacaagagatgctggttcaatccctgggtcagggagatcactgaaggaggaaatggcaacccactccagaattcttgcctgggaaatctcatgtagcctagtgggctacagtccagagggtcacaagcagtcaacatgacagagcaacggaacatgcacatgggcactgtttagctacttgtgtacatgtgcttttacagacaacctaatactcttaattaaaagtgggagagaaggcaagatagagggacagatacacacaggacctattttccttttgactttacagtgcggcaatggagaaaatgaacagattaaaaattgtttgagattaatattaacagcatatacgcacacatgccaaataaacttactgcaggagggcagatagctgaagctagggcactgacggtgtctgtgaagtcccctgcaaagaaaggcatgcagacagcaggaagaagccaatttctcttagaagaaagtatttggatttagttgaagccaggaaaacacttgctttagtattttcctcaaccagtaattaggggacaggataaggcagtaagtttaaggaaaagagatgaaaagggcctttgtaagtttagatgaaaagaatgaggattaaaataagagagggagacttgagtaaatgaatatattgaaagcgtttttttgagaaaaaaagtttaaccttatttatgtgtaaggtgcattgagtatgaattcactagtgtctggaaagagcaagaaaatgactgcagtaaacaaagtgtgaggatgagagctctgaaaaaggagagagagtgtggatataaaacttttcagagaagcaaatagcaaagcttgagatataaaatggagatagttttaggggatcagtgagtctaggaactgaaagcaaaatgttgtatgtatgtgcatatattcccatatacatatttctatgggatgaagatcaatggatttttatcaggctctcagagggattcaaccctttactattgaatataaagagcagaagtcaaaaaaggaaacactagagaaagctgttaacattgaaagtaaagtatggaaaagtatgaattaggggtgaagttaattgagtttatctttgacatcttatatgtcattaaatcctttggtaaactaactaaggaaaagaagtgggggcaactctgagaatatatgaaaatttcataatataatagatacattattttagctattgttatatattaaaagcttcactatttcaatttaatcatattcacagtagcatcataaatatccttttttttatcataagcttttatattcaccccacctatttaaatgacctttttaaacaaggctttgcatatggaatttatttttataaatacatagtatttgagtaactagcaaattttggtgtaaatgggggagataatggagt

SEQ ID NO: 42555 - DNA, 1646 bp, Bovine  19866880675159
  misc_feature (1)..(1): n is a, c, g, or t
ntaaatggtcccaactagaattcaagttaacgtttcattaacctcacttataatacctaaaggaggcatccacatttaaattcagggggaaattagtctaactaagctctcctgaatatactaatcttgaagcagccacagtcacactgagcactgatacagcattccaagttcctttatgacatatacacactttatacatgcacacttagcaggaatgaaaaaactaaattacattactctctcaaaggaaatctttagtgatatcttaagatattgtcttctaatattgaatcaagtattttctaaaaaaagaaaaaaaaaacatttccttcatttattcattcaattatttggcaatttatttcatctttagtccttaatttactcattctttacttaacaagtgccttaaaaagcacttacttcaggtaaagcacaattctgaacccagtaggagacccaaagaaaaataagacttgtgatcccacctttatggggtctgctgtctagcagagaatataagactacagaccacaacaaggtcaaaagaatatgatgagacaggttatcagtgaggagaaggaagtgggagggagaatataggggtaagggattaagaggtacacactatcaggtataaaataagctgtgaagatattttgtacaacacatggaatatagccaatattttataataatgacaagtggagtgtaacctttaaaaattgagaatcactatatagtacatccggagaaggcaatggcaccccactccagtactcttgcctggaaaatcccatggacggaggagcctgataaggctgcagtccatggggtcgctaagagtcagacacgactgagcgacttcactttgacttttcactttcatgcactggagaaggaaatggcaacccactccagtattcttgcctggagaatcccagggatgggggagcctggttggctgccgtctatggggtagcacagagtcagacaccactgaagcgacttagcagcagcagcagcagcatatagtacatctctaacttatatatcaaccatactttaaaaaaaaaaaggaaaacaaattaaaaaatagaaagtaatgagttttaaaaactgagttcctactatgcaactagcactgttatgcatactgtgatgccataaaacagaattttatcaaacacatagttcaaagagatttctaccatccaaaaggcagagttaagaacaaggtcactcaaatcacactgcttaggtttacatcttggcttggtcattacttccactatttccttaggcaaaccatttggcatctcattgcttcacccttatgtataaaaggggaatgataagaaggatgcctaccttacaggtttgttgtgagaattaaattacttaagaaatgccaggcactaagaattgtgtctgatatgtcgtcaatgttgtaagtaagtattatcttctttaattttgatatatcacagaagttttccaaaaggacagacagtagagctaaaaggcagcaaagctgtagtttttttttttcttttaagtgaactcttatttctattagcgagactaattcagcgcttcacaaacattaaatgtttagtgccaactagtgaggatatctgtag

SEQ ID NO: 42556 - DNA, 738 bp, Bovine  19866880867202
  misc_feature (1)..(1): n is a, c, g, or t
nattatttaatatgtcctttatatttatatttggcataatggttggaaataagtctataaatatttgtgaagaaggaacacagtaattaaaccatcacagtttattctctgaaagcacaggcataatggcacgaaagaccagattccatgttccttcaagtcatgtaatttggaactaaatgaaaattggagctttagtttcttgattgcctaactagagaaatggatgcttcatatatcttttagatcctatctttcaaatatcagatgtctgaagcaagtttttggcatcacagttaatttatgattgacatttttaatgagtgtctgaatgccaatattttgtgttgttgataaaacgatccatatgctttacatttcagacactcaggcagctgaattgacattctgttgtgaaatgttaagttcctaatatgattccaaatccaggcagtaggctaacccatttccataaggaacttagaatatgctcaaggttttcttgttttcatctgagactagggattttgaaggacctagaatgtgcaaagacaaatgttgctatagattaatcttaattaagaatgacaaatgctctgtagaagaattaacaacattatttgtaagcataagaggttgaggcagtagtgttatattggaagagctcaggaaaccctcaccagcacttcaacaaaaacttattgcttaggtgtcaactgtccatatcaggacttcagg

SEQ ID NO: 42557 - DNA, 1765 bp, Bovine  19866880934916
  misc_feature (1)..(1): n is a, c, g, or t
ncatcaatatttcagcactcagctttctttatagttcaattctcacatccaaggcatgactatttgtaaaaccatagctttgactagatggacctttgttggtaaagtaatgtctctgctttttaatgtgctatctaggttggtcatagcttttcttccaaggagcaaccatcttttaatttcatggctgcagttaccatctgcagtgcttttggagcccccaaaaataaagtcttttcctatttcccttgtttccccatctatggggaccagatgccatgatcctagttttctgcatgttgagttttaagtcaaaattttcactctcttctttcactttcatcaagaggctctttagttcttcttcaatttctgccataagggtgatgtcatctgcatatctgaggttactgatattactcccggcaatctcgattccagcttgagttcatccatcctggagttttgcatgatgtactttgcatataagttaaatagcagggtgacaatatacaaccttgtacaacaatatacaacatatacaatatacaacctctatgcactaccgagttttaaaatatactaccaagttttaaaatgtggattatatatcttcacatctgcatttaattttgtttgcttttcttagatcacagtccgtttcttttttgccttgtattaaaaaatgtattttttatttttaaatctttactatgctttaaattattttaacatcttttcaataggatttgaagtaaagtacatcaatttgcatttttatttattctagataagttatgctcctgttagataagtagtttccaagatgtgcttttcctaccatctgttccaataactgggggggaaatgtttaatggctaatgatgtacatgtgctagtatctctttaagatactctatcattttgatgggctcagtggtgctaacataatcatctagcaaatgaaatttaattttgaaatctaagagtgatagggacaaaatctgcaaagcttgaagaaatattttgggcttgaattgcacacattattccaaattttctttgtctattttttaaaaatttcatttgataccagttgtataatctagtagactaaaattgagattatcttcttgaaaagtgagttatgttaatgcatttgtaggtcatatattattttcagagtatttgagcaacttcagtaagtctataacacctcttgtggaagaaatcagaacatattacatatgttgtttacattgcagttctcaaacattttgaccccctaaaccaataaaaaatgttggatagtttattattaccattagagtgtagaataatttttattaaaaatcagatcatctagttaaaatgaatattccaaggtaaatttgaaaaataagatttcaaattcatataattagtaacaccaacttaaaactataaatatgaaggataaaatactatttttctttgtttttggtctatatgtttaaaattttaaaatgatattagaaacaaaaacctaataagattgttgttgttcggttgctcagttatgtcccgactctatgctaccccatggactgcagcacgtcaggcttccctgtctctcactatctctctgagttttctgaaactcatgttcattgagtcagtgatgccatccaaccatctcatcctccatctcccccttctcctcctgccctcaatttttcccagcatcaaggtcttttcctggaatcagctcttcgcatcaggggcc

SEQ ID NO: 42558 - DNA, 1471 bp, Bovine  19866880935743
  misc_feature (1)..(1): n is a, c, g, or t
ntgctttatgtttgctctactgcaaaaacaatgattaaacaacagatgttcataccccagaaatataaactatcaatgtttgcagaatatttatttttagaaaaagaatagtaagcagttacctgctactatgacatatagatattctattcaccttatatttcatttgttttggagaaaaaagctggcgttacttttattttccttttctgaagtattgggcttcgccttttgatatctttgagtttaactgaaaaacttatttaaatgtccattgtattagtcctataagaatttattggaatgaaaaagctttacagtgtttatagtattgtaaacatattttatattcagttgtgtcttcatattaactatatttcctctgtaaaataaattgtgaatgttgaatacttcctgctacaaagaaacggatcaattaaacacatttccatctccctctctttctttccttctccagcagaattctgtgtattaagattctattaaaacaaaaacccagaatcagtaggaaatgtgtatatgcatatagttgtgtgtgtgtgtgagagagagagagagagagaagattaaggaggttcatacatccaaaatctacagggcaggccaatagactgaatagactgactatccaggcaaaagttcatgttgtaatctatagtccaaaaagtagtctggaggtagaattcctttttcttttaagtatttgtcttttctcttaaggcctgctgattgaatgaggtctatccatattatggaaggtaatctactttaaagtctactgattaaacacatctaaaaaatttttgtacagcaacatctagtctggtatttgatcaaaacgctaatgtactatgacctaagccaggtttcacatgaaatttaccatcttcctgagaaattttataataattttacataatttgactgctctaaataaactgaaacaaagcaaagcaatgaaaatatgaacacaaacacacacacacaattatatgatgattggtgatgttttcagcttactagtagtataaattctatctagtcacaggaaactatttctcatatggaagtgagaaactcagtaaatatctttcagttaaagtttgttgcgccctgatgctcaagctatcttaatgaagatattccttatcattgttttcattaaaaagataaatcaagctttaacattctattatttttacaactcacattcaagtgctagtttcttataaaaacataatttttattaatcaacatttttctcatgaaatgttgattgagacatatttcctttatgtttcaaataaaaacaaaaatactgaatgcaaaatatattacttattattgaactggtaaaatgaggacaataaatttgataatactctttttgtttctctcctaagtaaaataactagtattttgtcctatatgacactaaagatggtatcct

SEQ ID NO: 42559 - DNA, 1749 bp, Bovine  19866880954524
  misc_feature (1)..(1): n is a, c, g, or t
ntttgagttaatcctggagttggttatggacagggaagccttacgtgttgtggttcatggggtggcaaagagtcggacatgactgcgactgaactgaatggaactgaatttacacacatgcataaacacacatatgagtgcttgtaaagtagatgaaatctaaataacacctgtgtactatttgcaatttactggatttaatttgtaattaaagttaagcaagctatcatcactgaggaaactgtgggaggagtactcaagactactctgtgctattcttttcaatgtcttgtgaatctatcactacttttatatacaaaggtaaagagaaaaagaccatatttgattttacataaagtcaaaagaaaataaaatctttccatgaatgtttcaaacactataaaatatactaattataatcacaaatggtttcaaccaattaatggttttaactggactttttagcagagatagcttatttaaattctgtcttaaaattacataaacatcctacatataattagcatcacatcctttctttttactttctaaagtaacaagttgttcttgttcacacatgattaatatattttcctttttcagctgaacgttatcttcatggatagtcaatcatgcattctagcccaatgagcatgaagtttatgacaatataataaacctttagaaactaagttactttcatgtaagtaattatatatatacagatagaaaaatgaaagtgaaggtcattcagtcatgttggactctttgcgaccccatgaactttacagaccatggaattctccaggccacaatactggagtgggtagcctttcccttctccaggggatcttcccaactcagggatcaaacccaggtctccctcattgcagctggattctttaccagctgagccacaagggaagcccaaattcttttggccaggctgtgctgcacctgggatcttagtttcccaaccagggattgaactggcaccccctgcagtggaagtaaagagtcttaaccactggaccaccaatatagacaggaagaggaaagaaaaacactacaatgctgaaaatagccatgtttcattgcttaagggtaagtacgttctatacttgaataaaatgttcctcagagaaatgactgatgagtatacttaattcatatgataaatgttttcaataaacacatctaagaaaggaaaataaaacaataaatgaatgatatatgtatctgtttcatttctacgagactagtatcatttcattttttcttttacaaattaatattatttgaaattcaacatgggaaatgcattataatactgaataaattttaatgtattataattaaaatatattataatattgtttaaacttaaaatgtattatactattgaataaaatcagcagaaaataactgagcagtcatgcgtgccttcctttattcccttttccttttcactctaaatacatacataatatgcacacataattatacacatattaataacttgcaaaataggattatctcatttctctctgatgttccaaaactatagacattatatcttaaaatgtgtataaaacagttctccgtatgatacatttacagataaaaataagaataaagttaataaaacagaaaaagaaaaccagtgtctttctcaagcccaagaaaggttgaagtttcctcaattctaaaacgttactgaaaaaaacgagtaaagaaaccattgtccag

SEQ ID NO: 42560 - DNA, 1343 bp, Bovine  19866881055947
  misc_feature (1)..(1): n is a, c, g, or t
naagtcgcttcagttgtgtccattctgtgtgaccccatagacggcagcccatcaggcacctctgtccctgggattctctaggcaagaatactggagtgggttgccatttccttcttcatattatagtatattactaattaaatatattcaatattaactgccttatttaacatttattaacacatttatttttcatgtaaattcctttcatataaacaccaaatcattattatgaagaacacagctcttactttggttttgagctatgtagttgtagatgacatattcagaagtgaaaattttaaaaatcttttgcctgcagagagaaatggacagcaacatattttatttcctttttttgttacttttactacacacacacacacacacacacacaaatagaaatactatttctatttgcagagatagaaatgccagaatgagtagaaagtagagtcctgctgtcactgagagtacttgaatctctaattctgaatgagttatctgagggttgctggtaaataaaggaaaattcttgtcaatctttacttaatttgatgcacttacttatttatatctctggagagaaactctctcaaaacagtgggccaataacatctataattaaaatactacacttaaagttttgctttcatttaagtcagacagatttattcttttaagtttcatatgaacacattaacatgaaatatatgcaacaaaatctgtgtaaggtgaatatatatatgagtttgagttttaaaaaaaatttgtcttggatctctatcatttctcaataattttttccatttttatgtggaaataaatcattgttcgttcacatttgagtatggtgaagtgtagtgacattccatctaaatgtaattctgatactagtaagaatcaaacttgtgatatgaaatatgtgagaatacattctaaagatgcccataacccagattcatcttcaaacaattaaatggctatgaaacaggaaaaagaattgcagtggaaaccaggaaaaaaaaaacaacaacaaaacttgtatatatgtgtcaaaatataaagacatttctgccatcaaagtaaaggtaaaaatggatgaatgaaaggaaaaatgatgaacgatgaacatgacccaccacgctacgctaagtcacttcagtcgtgtccgactctgtgtgaccccatagacagtagcctaccaggctcccccgtccctgggattctccaggcaagaacactggagtgggttgccatttcctcctccaatgcatgaaagtgaaaagtgaaagtaaaatcactcagtcgtgtccgactcttagcgaccccatggactgaag

SEQ ID NO: 42561 - DNA, 1308 bp, Bovine  19866881194337
  misc_feature (1)..(1): n is a, c, g, or t
naattatagtacaagccaattctgtcagaggatgttatagagataatgagataatgtcttttaagtgctttccggatgaaagaagataacttttcccatcctcagtaaagaggagacccatgatcactaacacttcacattgctaaatgtaacttctttagaaaagtgatgctattaaaataatgacacataaagctcctcctttacctactgtaacgaaggcatggatctgcggctgaaatcggtgagcttctctaaaaatatcaactattttctctaagtttaacaggcacattcaagggcatttacttcaaagctggctgtagacatgaagcattccaaaacataacaaattttatatcagtaagaagttcctctagatagtatacaaatgtgaataatgaaagtcatactcttcaatgttaattaaaacaagacctggtataaaacctagacggttttttaaattgtcatttccttccactgtccaattagaagttaatacctataacatatttaactcatctatcctctgagtgaccacattacagtgacacaaatatttttaattgattcaaccaaagtgaaacattatggtattaaactggactgtgaccctctatctgccatgcttttctttaaatctgataaataatttattagccatattgtcaatgagagatattagagggacgtttccttttcttttttctttcctctggactcagttatctctaaaggcagcacagtttctggaaatttacctaaatatggagaagttaaattcttaaaaaattataaatgcccaagaaattataaatgcccctagcaattatgaaaaatttaaaactccagaagaataaattgtaaatagtaataataaacatagcagaaattgtgaatgacaaaacagacaacttcttggttgattacaaaaggttcttgaaagtttcatgcaaatgaaattactattttcagtaataaattttgtctcagtcacaaaatattgatggccatatgccagagtccagctccagcagccagggaatcagcctgaaggggtgggcagtgtcggcgggcgatgatgcagtctctgactcttagtatggaactatatcggtggacgatgatgtagtctctgactcatagtatggaactacatgtttatttcaagcttcaggttctcttttacactttgacaaaagcattaggtgagaggtttcacggttttagttccccccatccagattcactgtacctaaatagtgatgcttttgaactgtggtgtggagaagattcttgagagtc

SEQ ID NO: 42562 - DNA, 1121 bp, Bovine  19866881370909
  misc_feature (1)..(1): n is a, c, g, or t
natagcatattggacatctatggtgccttcttttgggtccttatattccaactattccctttttaaaacaggacagtgaatctacttcttgcccattatataatttgtgacaaaaatttttaatgcactactagtttgaagctgagcttgatgctataatttaaaaggcacatggtttaaagagaaacaaaattgaattcaaatcctggtgcattcttttgctaggtacatggctgggcaaataacttacaagtttcaaactcctcactctaaaaagtagatagtgagcacagatgttcagagtttgtggaaaggattagaatttggtgtatatggtgcacttaatgcagtgcctgacaaaaactgaatgtgtactaatatatcttattgttgttattattattagaactctccttctgttagggtgtttcaaattatctgatcacttctacattaagagtcctacaaagccatggaaatttattatgtcgtgctatagtattattttatatttggggacataatagataattaatgtctcctggatatttccaacgttgcagcttcagagttatccagaatattttgtcgaaagttgttttctgtaaatcaggctatgctaaagagcatagtttaatcgtaagcacatggtgaacgtgggcacatggaaaactgtctcatttgcgtctttccatctgccaaatcatacagaatctactaaaacagtgaagtggagaatgagccaactctgagatatattggagaaatgcaaaaacagaaataaccagtagtatagcacaatctcttgcaaagagtgacatttccaagtctgggctaaatttcatcagttccttaagatgcaagccaggaagtaattagtatgtgactctttatttggcctacttagggtttctctcaactttcagctatgaaagttagacttcccttaaacctcaaagggtttggttttctggtaaattagggtacatatgaaagtgtatgagcaatagaatttgaaagaataatattagtgatcttagaagttttcctaggccatgaggtgagtagagtaatagaagctgaggtcaccaaaacaagttccccagactgcacacttggga

SEQ ID NO: 42563 - DNA, 1626 bp, Bovine  19866881511198
  misc_feature (1)..(1): n is a, c, g, or t
ncctgtgcctgagtcttacttccctactgttctccccactggggcataaattctcaaatgtatctagagtccttgctattataaagtcctcctccctcctgtaggtcagcgaagagggaaaggttacaagttcagaaaatactgctgaaccaagcagcttatgcattcacctgtaaacttacaggcacacagatatattttctcaatatcccgtagtagtttcaggtcatgcgtctgtgctgagatgataacactaaggcccagtgaatgccacattactgtgatgtacaggtttctttttaagccaacaacaagattacacttaattatggcctcattgaagccaagttagatgtgcaataggcaaaaatagaagtaggtagaagagttagaggaggtgggatgtatcataaagaaaatgcatatctgtgcctttcctgcacatttcctgtacaatatgtgaaaacaatttggaattttgattccatgaatacatcccacattcttttcatttctttgaccaatatgtactatgtttcttaggcaagatgtgtattgctaaaatggcatcaggaatttcattattgagtttagatttaaggaattgaaatatgatgtcatagaactaagtgataattcaatgcaaccaggataacttaatagcttctctgagcatgtggtgaacactttaggcaacagcagtctcttttcacatatatgaacttggtttttgaaaaaaataagggtgtaaagtaggcaaacagaataaaaccaaatgtatccaagttgcctaccaaatccacccagctgaaggttgaagttacatgtaaactttaaagttctttgcattgttgcttacccagtgaggcacttgtaaaactaacagtgcaaatgattgcaatattcagtacaatttctgacacaattatttggagcttcagacccaggacagttttgagcttctcaaactaacaactctgcgatcagtgtaatatttgtcaccttctagaattctgataggtaccataattttgtagtactgataaatatgctatgctttatatcaatataaaaaacaaatatcaattacagttacttgggaaagtttatgagaactcatgaaagcttttcatccattttaacagtctccactgaaggactcagcaaatcttatcctttctttatgagcatatagctttgcctaggaaaatcaagtaatcaggtactattcaagcgaaatcatctagttagaaaaatgccaatgtaaaggttttgttgatgtttgctttccagtttcttggctgatcagggtatatttataacggaaaatcttttgagcaaactataattgtattattcaaaatgtagatctagagcagatttatcagctgtttttcagtgtacaccctgcgtagtacaatggaattataggttttaaaaaggagtgcttcaaaatacagtgttgattttctccccttgcagtgcaggtccacacttttcttggagtgtgtggggtgtgttcagctggttctccacaccttggtcacagtctcactgaccttcgttgcttggttacaaaatcctctttgtgatttgtgagatgcttgtcttgatggagagcaatgg

SEQ ID NO: 42564 - DNA, 867 bp, Bovine  19866881814720
  misc_feature (1)..(1): n is a, c, g, or t
ntggagaatcccagggacaggggagcctggtgggctgccgtctacggggtcgcacagagttggacacgactgaagcgacttagcagcagcagcagcaagaaccaagttagaagatcacagggaaaggcattttgtctttcaaatttttttttaaaaagctattgttaacaacattttgtggtatcatctctgcatgccttgcagaacactgacaagccctaggacatcctcgaagtcagtttatgcctcagccagatctgatagcctcttatttttcctaagtgaaaatacaaattgtaactataaataattgctttttaaataaacatgcctaaatctactccatcaaagcacagctgttctttaaaatggataacttgggaaagggtatatttattctattaccaaaaaatttggaaaaccttctttcattgtttttccctgaaaatatgtaagtcatgcaaaaacaaaaatcaatcttagaaatattaatagcacagactatttgggggctaaaaacagcacagcccaattccatcacttacatttttcatgagtctgggttccaaataagatccatcttttttctcaaatgaaatctaaatttaaagtataaaagtccaacactactggatgactcaataaaatataccacaaactataaagctacttcccaagagtctttccagaatgcctaataagttgggactatcactggattgggcctataaactctagagcgactactaggaacaggcttggaagtcagccatccctattttttcagttgcactttataaattataagtgtacattaaatgttagaattccttacttttttcttgtgttaaaatgcatgcgtgccaa

SEQ ID NO: 42565 - DNA, 1174 bp, Bovine  19866880151132
  misc_feature (1)..(1): n is a, c, g, or t
nctaatgaggtggatgaaactggagcctattatacagagtgaagtaatccataaggaaaaacaccaatacagtatactaacgcatatatatggaatttagaaagatggtaacgataaccctgtatacgagacagcaaaagagacagtgatgtatagaacagtcttatggactctgtgggagagggagagggtgggaagatttgggagaatggcattgaaacatgtgaaacgtcatgtatgaaacgagatgccagtccaggttcaatgcacgatgctggatgcttggggctggtgcactgggacgacccatagggatggtgtggggaggcaggagggaggagggttcatgatggggaacacatgtatactaattaaataattttctattaaagaaaaaaaaaaaaagaatgtagtgtcccagaaaccaagtgaaaaaagtatttctagaagaaaaacacagagcagtccaataaaatgtgggctgaaaactgtcaatgagatttggtaacaccatacttattacctgtctcttccaactagaacatagttggaagagacttccgagaggtcagggacttgtttgctttgattattgctgtaacctcagtttttagaactgcacctggcaatgtagtatgtgctcgataaataactgttgaagagtgaataataaaccaaataaaccaaagtattaataattattaaaacatgttaaattcttaagagtagaattgctaagtaaaagcaaaattgaaagtctttcaatgtgaaaggctattattaattttttcagtccatcaaaaaagactgcattaatcccatttaaagcccatcaaatactcctttgttatcagtgggaaacctcaaaggatagcttgagccagcttctaagatgaactaatcagtttatttttagttccctcctacttctatcactacacttgaaacacactttatttccctttcaacacccatctcaagcttcagcttagataggattgtgtacactgaactgtcaattagtttcctcctctccaccctaaggatgtagctaaatatcaagatattagttcagtatgacttaggcctcatggagaagtatccacattaaagaaagaaatcatcaagatgaaaactttaaagacctagaaaaacaaagtataatagaatgaca

SEQ ID NO: 42566 - DNA, 1665 bp, Bovine  19866880354902
  misc_feature (1)..(1): n is a, c, g, or t
nctgtaaggattggaaatcatgtgaataatttaaagtactggatgatagatggcaggtagagacttactgctttcctggtcactgaaaaccataacgggagagttatatccttctccactgagaaccacgccccctccccagggaatcacaggattgctgtaaaatgtttggaggaatttcaaatactagattataggtaacctcatggagattagagggaggtttgaagggaagttaagaactgctattaaaaaaaaaaaaaaatactatagccttttgcacagagtatacagaggacaacaaatcaggagcaaggatggcagagagaagaagccaggaaaggctctacaggggtgtgttagtcttggaggaggaacagaagttgaataagaggctgagaccaagaagcattccagacgtgaagaacagtgctcccaaaccacagaggtctgttactcacagcattcctattagaagttgtgagatatggctgagggcatggatcttagaagaacacaagattatttactccttagacaaggttaggccaacatgttccaaaaaggtagcatgtgttcatcaaggtaaacaactgatcagaggtcaagtgagaacaatacaagccctgactaacaagatagtactgtctgtgatacacgtccaataagcttcctcctgcggggatgggctcctgagaaggcaatggcaccccactccagtactcttgcctggaaaatcccatggatggaggagcctggtaggctgcagtccatgaggtcactaagagtcggacgcgactgagcgactttacttcgacttttcactttcacgcattggagaaggaaatggcaacccactccagtattcttgcctggagaatcccagggacaggggagcctggtgggctgctgtctatggggtcgcatagagtcggacacgactgaagcgacttagcagcagcagcagcagcagcagggatgggcaagagccccagatgggaaggaggctcttcttgatctagccaaagcacctctcttaactcatccatcaaaattagataagaaaaccaaagggaacatgtatctaagtcaagcagaaggaagccagtttctaatttcaaatgcacactaagtaaatatacttcacaaggaattctgccttgtgtttgagcctggcacagtatgcacggctgaggctgttggaacgaaagaaaacaagttctgtggccaaggtatttatcatactgaacaacagtgtttccctctaatgcctcaaaactctcatagtcatcatgatgccccatgaatcacgcagttcttgctgtcacatcgcagacaacagaccactccagaggcaaaggatgttttgagtttcgttgctttaactcattggaaaacataatggtaaatgatttctttcttaagaaggtattctaggcttgctaaattctttaatttattttccaaaatgttaatctgaaaacagcatattatgtggagccagtgtctcccttacttttgctgtaatctagggttggcctggagaaggcaatggcaccccactccagtactcttgcctggaaaatcccgtggatggaaaagcctggtaggctgccgtccatggggtcgctaagagtgggacacaactgagcgacttcactttca

SEQ ID NO: 42567 - DNA, 1433 bp, Bovine  19866880503266
  misc_feature (1)..(1): n is a, c, g, or t
nttaactaagaaagtgctattcagcagcctttaaagaagcccctggaagatttctaccaaagaccacaaaacatgttcatgggtcttttctgcctggatgccacccaacacacacctcatctcaaagagcaacatccttggtgtccactgtccctcttctctctcaccctgcccataaggaagctctcttctccccagattctttgcctctgtctagggagtctttcctcctgaggaaagtgtggccttgagactggagtatcaaggggaagacaaccagagtgtatggaggattaccactggccaggcactgaactagatgatttctctactttttgtactaaatctgttaaattatcctgcagtgtaaatcctgttttagaaatgagaagtctaaaattcagagagactaagggatctgtttgctgccatacagctggtaaaaccctcagctaacttcctctgtactccagtcagtttttccactcagggtagagtccccagaacaacaggaccttgctaatcctcacagctattcatgacaatctcatggctcaagcatggaaaccaaaggaaatggagagtggcagctggtgtttcaagcctaggtgctaacacttgccattagctgccaaacaaaacagaactgatcagagagtccagaataaccagagggtttaggaaagccatcaggaatgaggaggtttcaaacctctttcgttccttggatgtccttgaaagagtttagaaatattgctgtgaagacctggctgtgttttctgaacaggcagatctggaagctaagtggaggttaaggtgtgcttaagaacatgatcatttccttttcaaggagagctgtggtctgaagaagaagaactcacctgctgcattctgtgatccaacaggagaagcagacttgaactgccatctgtccgttgctatgggaacaatttcctacacatttacagaaacactcaggtctgggtaaatgctgccattgtcaacgcatgtccttcagctggctcatttggagaaagaatggcaaagtgatcgcgtgacacaaagatagagcctgaagctttctttcaccacttgaaaactaattgatagcctcatttttctaatcataggggtccctgcagggtctgccctgcagtacattcaaactttccccttgggcttgtttcctcggtgagcactggttggtgagggaggtgctgctggttcaagtcaaggaatgcatactggtgactctcatcctaggagccttggttcagtacaagcacaaaggagctatggatgaggagtggtgtatgcccatacttagtcacaccacacacacccacacacacacacacacacagcccagtataattattttatgctctaccatgttcccttcccagaggtcacatcacattggtcagcagaat

SEQ ID NO: 42568 - DNA, 1918 bp, Bovine  19866880659791
  misc_feature (1)..(1): n is a, c, g, or t
ncttggaggctcgaagtccaaggtgaagatgcaggcaggtttgctttccctgagacccgagacctctccttttcttgcaggagactgtcttcactcctcacataatctttcctctgtgtgggtgcacgtgtgagtctgaatttcctcatcttctaaagatgcccatcctattggattaggacacatcttaacatctcatgttaattactgctttaaaaaccctgtctccaaatacagtccaaacatggttctgaagtatgggggttagggcttcagcatgtgaattttaggggtatgcaatccagcccataacatctacatatctttctgtaaaaatacacactttccccaaattaggaaccacaacaaaattactatttaataatctgctttttaaagcctttaataatatgtgctatctctacggcaatagttactgattaggttctgattcaggattcatggtctgagtagatgcattagcctcccactccctcctaagactgaattaataaaaatagtcatggttactgggtgcttattatgtgccaggcactgttctgactactttgtgtgtattcaattattcaactctcacaactctgggagatgggcattattatctccatttttcagatgctgaggggtgaagagtcagtgctgtctcgattgaggaatcgagaggatttttctttcctgcagggagagcctggagtcagttaatagaagcaaggaaggaccagagaggagaaggcgccaaggtggctcccctatgtttaggacatctggcgtccacaccctccagcgtgagtggtcccgtccccctgcaggtatgtgcacatcctgattcccactccagtccctgggtgcctttatttccagcacccagcaatgcacctcatgcacaataagcctgtataaatatttgttcaaataaatatccactaagatgagcatcctgaaaggctctcttatagaatcattcttatgtttttaaaggttttaaaaacattttaagacttcctagagatagagggcaagggttctcacttcagagagacccatttctggccacagttgaatatatcacatttttcttagtaggagaaagaaagtaaagaagggcagaaaattcccctgtcctgtctggaaaaaaaaaaaaaaaaaagctttggctaaaggtaagaacatgagtctgatttcactttaccatctgcaaagcatgttcaagcagtggaggttccaggcctgaaatggagatatttcctcagctggtatgaatgacggtgctttcgctttctctcatcaccatctaactccattccagacaccacaagatcatcatcagcctggatctctccttccagcccagataatttcataaactcctcccatcacagagcatcccgggatgcatgtccagcctgagcacaagctgagacgccttctcctcttctctgtcccagctctctgcactaagtgggaagtgaagtccctcagtcgtgtccaactctttgcgactccatggactgtagcctaccaggctcctccctccatgggattctctgggcaagagtactggagtgggtggccatttccttctccaggggatcttcccgacccagggatcgaatctgggactcctgcatttcaggcagaagctttaacctctgagccaccagggaaatcctacagaaaggtcacgtccaccaggaagccctctcagacccactctcccagcttctctcactcagtcctttctttgccccctgagtccacagatgtctggatccctggatgaaggagttgattgttagcattcctgctcccctgagcacaggcacacagaagtcccgcatctgtcaccagccctgaggaacctatattgtcaaaaacttgaagctcactgctcctgagt

SEQ ID NO: 42569 - DNA, 2293 bp, Bovine  19866880675265
  misc_feature (1)..(1): n is a, c, g, or t
nttttaattaacaaaagacttgtttgtccctatatttttattatttaagcacaaatccttgcatatagaagatgcttaatatttattagatagacagatggaggaatggataaatggatggatggactggacagatgggaatgtgaagagaagtgtaacatataaaccaataattactatgccatgtaaatattgagaaatgggccctggatatatgaagtggaaagttcttgctatgactggttttgacataacatttttcacatagaattattttgttttatcaaccaacaccacaaaatagattcacttctattcagttgattaattcttattttttcttttatttctcttcactacagtataatctgtcttctgacctacatgatattataatagaaaaatccattttctgtcacctttgctttttatagctcctctcttaatccaaaagggtaatatgaaataaagcttacactcaacactgcagaagaggaaagcaggtgataagttgcttgcctctaggttattaatcagctgtcctctagggcataatgttatgaagctgcgccatgtaataaacagaggcaaaaagaataatctccattttctgactctgaagtgcaggcatgtgctataaaactaaattgacatctgttagcaggcttgtcacatgaatggttttttcctgcagaatctggaataaattagatcttaaaataaaacttggaacagagaggctgctttacataattccttctaatgttgtgctgtgaacctatcgcactgattttaaagagaagttcttataagaaatgtttcattatcattttaattgcaaaaatgttgaatgccactccatgctaggaaatttgtgttttttaaaaaggtccttatgtttttaactaaaaagtggcaaatgaaaatttccttttctaatatttcacagctgaaaaagaaatcagctaacctccaactaaaagtgtgaccacctttccccaagcacttggagccggcttcatgggtggtttattatgcatgggcacctcagaggctgacatagctgtgctcctgaggcagaaatcaccaacctgggtgtgacctcacagatttgttcaggaatctctccctcagaggattcattaatatgatagcaacttcttggggctctcttactgtcaaaaggcattaagcattttttaacacacataaagtaacttgccaagctgcctgacctagtgaatctgagctgcatagtgccaaatgtagtaacattcctctgtcgacctactgttaggaaaggagtcatgaaaaaggaaacttttaatgggcacctggagcttagagcctccctcgcctccctcaggattcacttagctctcattccccaaaggttgtcaaaatggcaagattctcagacaaatgtgccaaccttggtacacagcaacaaagaaaaacaaatgccggctctctggaggctaatttcctccatatgtgaaatcttcctctttggtaataataacaggtccctcggaaagtcttgaaggagcgagagtcagtcacaatgctctataaaataaagtcccaaagctggctccaagaatacccctcattcatctctatcaccagcatcagtttatttgctggacagtcttctcaaatggcagagatctgtaccactcaccctacaataaggaagactaaggcacagaggccacagagacttagtgaggagccagggagtggccccaaaagctgacggccaggatctggacccccttcctgtttaaagcatcctatgcatagcaggggatgagcgatttgcaaatggaagctgagcttctgaagtcctctctatccatggaggcttctcaaatggtgatcttcataccacctggggaagaatggggtggggttggttaaaaatacagatttcctgagctccatgccagactagctaaatcagaatctctgagcttggtcctgggtctgacatctgagtcaaggtcccttaagaagactggattctctgtggcatgttactgttacttttggtttgttttctggtgttctgaaatctgagaacctgtaattacacaggtgagagtgggtctccagattccagagcactgttcacacacaatctttccagtcatggcttttggccaagggaaaccaaaggagagaacatctaaggaaacaaaaactgtagctcaatccggattcactgagtggtttgaaaatcattaagaagagtcaagacttttgtttcacagcaaatctcaccattata

SEQ ID NO: 42570 - DNA, 1622 bp, Bovine  19866880693103
  misc_feature (1)..(1): n is a, c, g, or t
nagaaaagcttggaaaagattatatactgtttgtttccatttatatgaaattctagaaaaggcaaaatttgtctgtatatgatggtaaacaaagtggttgctaagggccaggcactgactataaagggtgatgaggagactttagagggtgataaaaatgttctatatttttattgtagtggtttttatgtacatatttataaaaactcatcaaactctgtacttaaaatgggtgccttttattgtattagactataaataaaatgttgatgtttaaaatatgtatgtaatttgaatacatattacatgatcatacatatataatatatatatgtataaaaatacatatataatatatatatgtattaaaaatcggtgaattctgaaaataacatacctcaagcagcattaagatttttgagatacataggtatagctgtagaaatagatgttgatgaacaatgtgcttagttttcagagtaacttgtgcttatattggttttctcaaatattctttgcaggtagttgactatgataaagtgattcaaccacgttttgataaagcccttgaaatgttaaccagaaacactatagctgaggccactgaagcagccattaaagttgtcaaagaacggcttctcttagaactacaagctaaaaatggtgaactatttttttaatgtgtgttttaacagtagttaagcctggctccctgagggcacagtcttggtttgtcttgatatccctggcatcttgcacactgcagcctcagaataagtggttggagaaatgaatacacataaacccaaatcatacactgagaaaaagattccaactctgtggatttctaaggaaaggaatcataaagagttttcaaacttaaatttcttttcttttatggatctgcttcctgggcagaatttacccctttatttacaccaggggcaatgacaacaacgacactttgtctgactcatggagtttgtgttattgctgctgctgttgttgttctaggcctctgcgtcagccttgattgtaagtcagtgtttttatttggggaatattattttcagattcaaaatgttataaatgaaaaagtcatcgatgaggagacagaagcacaagaggttaaatggcttcctgaaattcatccagatggtggcatagctaagacttgaacatcctctatttgtccgaatctgctattaggatttcactaactttttacatacactggaaagctccccatcatttcctatgctggaaactatttaaagatcaaggaaattacttcttacatggcaatattgagcttttgctaggaaagaacacaggttttgcctaataaatctgcctctcttctttctcattaacctataatcaagtaagaaagtacaacctggtgcctgagagattacaaaaagcaaccacaaaaagaccagcattgaaataatatgccatccaaatgatcatggatcagtggtaaagaatccgcctggaatgcaggaaacacaggtgacacagcttcagtccctgcgtttggaagatcccctgggataggaaacggcaacaaactccagtattcttgcctgggtaatcccatggacagaggaaactagtgg

SEQ ID NO: 42571 - DNA, 1300 bp, Bovine  19866880736126
  misc_feature (1)..(1): n is a, c, g, or t
natacatttcctaaatttatctaattttactttttattctccctttgcaatgtcatgtatttaattacttgtcagaggatttcttctcattttttttaacttctgtctgcaaggatgggtaggctacaattttgcatgatctacctgaaagataaaatattttttagaaacggaagaaacaactgttggttatttgattattatgctaaaaactgtttacatctcattatttaaaaataaatgattcgttaccaaaaataagtgttttatttttcttttttgtaatcctccctttctagcttttcttattttagattgttggcataaccctcttggtaaaacgaatttgcacataggcattgcagaggcagttgttttaaggtacagtaattgttttatggcacttggaagtggcccacgtataacttgatgatgtagaatcagttgcttgttaggaaatgaccatgcagtttataaaatggacaccttgccttggtttccttatatgtaaatggaaaagtccatttatgccaccagctggtatgcataaattaagtaaatatgttttcatgatgcttttaaatattttaaaatacttattcacatattttagctggtgaatggtgaaaatacttcagtgtaaaatacagtgaaaaatgtcattaggattttctgtggcatgttagaatggctgatttacattgaattttgctttgaaacatggctctaaattgaatgtttctcatccatcatatttttaataattgcaaatttaaaaagtaatagttaatacatatatgtagttttcagtataggtttagttaatattgatgaaaagttacatgatttggtaataaaaagtagagtattgaataaagtttgtgaaaaagaaaatctccggaaaacatttagacctttttcattgaaaaacttgcagaagacacaattcaaaatacgttttcaatttgtaatacattgatgtttgtagtgtaatgtaatacattgactttgtaatacattgaaaatacattgatcatttgtaaggtatgatatggagctactttattcaggtttgtaaataaccatatatatgttcagagagtgtatcaatataataccatatttaattacacatatctctttattgtcagaataaggtattgccaagtacttgattttcattattacaatatctagtagcttttgatttcctttttggaggggtaattcaattaattttcatagcaaaaactgctattaaagtatattattacttttaccaaaacaatacttttaatta

SEQ ID NO: 42572 - DNA, 1735 bp, Bovine  19866880740692
  misc_feature (1)..(1): n is a, c, g, or t
nctgcccacccctgcagcttccacctccctctggggttctgtgaggtgtaaatttctgagacttatggggacacgtcttgacttcataccttaaacatcagcagcagcagtagacacccaaccattttcataccccatcagtaaaacatctgtgcacttgtgccccccaatatatacacatttaactatatgtaagtcacagtactatagcagtatattgtatacttcataaagcacaaaatatggaaagtgttaaattataaattgtaggattctgtaatatatgtttaatatttagtacatattatatagggttccctggtggctcagatggtaaagaatccgcctgcaatgcaggagacccagatttgatccctggttgggaaggatcccctggagaacggaatggcaacccactctagttttcttgcctggagaatgctaaggccagaggagcctggtgggctgcagtccatggggtcgcagagtcagacatgactgagaaactttcacttcactttacttcacatattatataatatatgttgttatatgttctacattaagaattccaccttaaggatacattttgtgtgtgtgtgtgagagagagagagagatagagttttacctcactctttaacagtttttatattttgtgtgtataatctatatttacacactaatatattctatgccagggatttttttgtggttcacgtgaaggtacacccctcctctggagacctcttaaccacaggatccaggccaagccccttgggagccgtcctggctctccacagacggacttgtcaccttctccatgctttcccaggtctcatcctcactcagacaggtctccctgctactccctttgatcccaacacatgctttggagtcagaacacctgaggttaactacagatggctgcttaccagctgtgtgaccatggacagtgaatgtaatctctctgggcctcagttcttacctataaaatcaggacaaaagcacaaacttctctggcgattgtgaggacagaaagaggtaatacctagaagggggcctggcccagacacagaggtcaatgactgatgactatcaccatcattttgccaagggactcactaccgcctccagttactatttattctgatccatcctgcccttctgagagctccttcccttcaagggctacctttcctgaccactccagccctccatactctctctgctctgggatccaccccccccccccaaccactttctgccctcagaatgcgcatctgcagattgccaattaactatttctgactactctcacttccccacccagctcccacactctgggagggcaggggccacaggctcctgtttctgggtgctcaccacaggtggcactcaggcaaagcagatgaagtggacacgtgccctcacactgcttggctctgaaggcttcctgtgccaccccctcctggcattttaccaccctttgtcccttcactgaaatcacaagtttgcatctgttggcctgtgaaatcccacaggctcctgcagaagaggccactctaaccagacactccagcagattctgccaagctaggatcagcatctcatcacgtttccatcacaacacagtgagaaacatgtgactggcccttagcaacggtctctcaagaaagctacccctatagagagctcattaagttaactgaacacacgtgaggcagaaatctaaa

SEQ ID NO: 42573 - DNA, 3466 bp, Bovine  19866880742764
  misc_feature (1)..(1): n is a, c, g, or t
ntggtaggcgggttcttcactagtgctaccattagatgcacataaatttaaaattgttatatacccctttgtgaattcagccttgaatcattatgaagtgatcctttttccatttaagtctattttattgaccctaatacaaccaataccattttcttttgcttggaatttgcctgatataccattatgaaagtagtaagtcaaaaaattaaataatggaaaaaaaaaacctccacaatttattattatactagcataaaactaagatgcacctagaaatgtctgtggggattcctaggtggtgcagtggtaaagaatccacctgccaatgcaagagatgcatgcagtacaggttcaatccctgggtcaggaagatcccctggagtaggaaacagcaacccactgttccacagaggagcctgatgggctacagtccacggggtcaccaagagttggacaccactgagtgactgagcacacacacagaaatctctgcaacaaaactgttcaagatattgatgcaggaaattatacactttcaaagaaattaaaaatctaaagaagacctaaatgaatgaatagatagaacactgtcttcaaactgatctatcattcaattcaatctcaaacaatatcccactttggatgttagcagaacttacaagttaattataaatcatatgtagaattacaggggacaagaaaagccaagacattcttgaataacaaaaaatggatagaggtgagagggtagaacaacctaccaagatcaaagccatattattaaaaatattcataccatacacaaaacttaattccgtggatttatggcttaaatgtaaaagcaaaaatatagtgctttcgaaagacaaaataggagcatatttttatggctttggtaaaagaatttatccaacaaggaaaatctgtggcttattatttctccataacaagacacaaatttgcaacatacataattaacacaggataatatccagaatatataaagatctcctacacattagaaggaaaagacaacccaatagtaacttcaaaaataaaaacactaataagatatatgaactctcattagtgttcagtgatatggattaaaaaacattgcataagttcatactttgccaaaatgtttactattagtcacaacttgacaattacagatgaatgtatttgtatgcgtcacatctttcccctggatatttttccaccattaaatttactaggtataagcttttcaaaataaagcttattaacaaacaagtgatcatcaatatcccttactctcagacactagagcactggggcggtttagccccagccctatctctgatggacctctgatactttattcaatcttttctcctggattattttacttgtaacatgaagtgattgaactgagttctacagatgtccccacactcccacccgttcggtatacattgaatctcaatgttcgtactttttcaagactttgttttccacttattctttcattcctttactcaccttctctctctctcataattttgtatatgaggcattgaaaacatgaaaacaaatatacacaacaacctcaggtctctagggtctggtccagaggaaaaaaaaaattaacaaatcacagcaatgtggcaaatgctgtatatacaactgaagtgtgggaagggggtttgaggtagacggaggaggaaacatgcgctgagactgaacaacagcagagttttggggggtgggaaagaagggaggcatgaggcaagggatttccaggcacagaggctgctgctgctgctaagtcgcttcagttgtgtccgactctgtgcgaccccagagacggcagcccacccagggctcccgtccctgggattctccaggcaaggcacagaagctagtgtgagcaaaatcttgagggggataaaagacaataggtttgagggctttgtggagaggtcatcatgggagaatggcaggcctcatatgttattaatacataaggaacttagaaattactgggcaggcaatagagtgtctttggcaaggaagtgatatgataacactggaatttagaaactcattctgagcgcattgtgaagtgaaactcgggatatggagctgggagacaagaaagaaggaagtagaaagtccagttagaaagttattataattgtcttgaagaaaaattataaaattataagaatctgaacagtggtagcagaaaaggaaaaagagatgtgataaataacataggcactattgagtaatggttcctattcattaccaggacctattacccaatagtaggaattcagagagaaagaaaagtcaagaatgacacttgagagaagtgaggaagatataaagtaggctgcatcagtaaaaatagagaagtagaaattgatttgagagacattaatgaaacagacatgttagaaccatttgattgataagcttcaggggctgaggaagaaggaaaaggaagacctctctgttctaatatgtaggttatagaatcattaattcaaatgggaaaaacaggtaaagcagatcctgaggcaaagaaaatgcttatattttaacacattggattggaggtgactgtgagccatcctgggagagaggttaatagttctgaagctagcaaggagtttagaatggataaagatagtgtgcctggcacatgacttatgagataattactaatgttatctcctactttacagatgagaaaaaagttagacatggaacacttaaataatttatccaaggtcacaattcgggtaactcatggaggtaagatttgaattctggcagtcttgataccagagtctgtacgaaccatttcagtattcacctgtgagtcatcagaagtactgcaggttgaaggcctggagagtatgagggatgcaaaacggactaagagtctcaggaaacatcaatattgaaagggagggcaaaagaacaggaaagagaaggctgagaatagacccatggaagccagagggagagaaagtttccaagaactatttaatactgtcacttgatgcacataatcaagacaacagaacttgacaactggaagcccagtgacattactcagagagagtaagtttcccaagaggctagggcaaggctgcattgagttgaggagaaagtgagataaagtgggagagctccaaaaagctgagtttcgagaagaatgaagactcaggaggctgttggaggactctaagtttgaggtgtttgttttgttataaaaatagaaggattctaagtattctttcatacttgatgtctctttaaaaagtaaaatccacaaatagctcactaaaaacctgtaagagacttaagttatagcacctgacttgggaacatcataattagaaagaagtttttgcacactgcctcccctcaccacatcctgagcttcctgatccacccccattaggct

SEQ ID NO: 42574 - DNA, 2033 bp, Bovine  19866880803899
  misc_feature (1)..(1): n is a, c, g, or t
ngggaatttgggctttaagcatcccgctgcattcatggctttaattagagcagttgcaataccctgcaggtagggaacgaattatgtgtaatttgagtctgttttcttttcttgtggcaaatagatagaggctattctttgcttcaaatagcctcctcaggattgaggatggagcttaaaaagatagttaaatgagcacttgctgctgctgctaagtcacttcaagttgtatccgactctgtgcgaccccatagactacaagcccaccaggctccctcatccctgggattctccaggcaagaacactggagtgggttgccatttccttctccaatgcatgaaagtgaaaagtgaaagtgaagttgctcagtcgtgtccaactcttagcaaccccatggactgcagcctaccaggctcccccatccctgggattctccaggcaagaacactggagtgggttgccatttccttctccaatgcatgaaagtgaaaagtgaaagtgaagttgctcagtcgtgtccaactcttagcaaccccatgggctgcagcctaccaggctcccctgtccatgggattttccaggcaagagtactagagtgggcacttagctctacagaaaagaaacacaaaatacatttgaataggaaaaatttaaaactattgattggtttagtgccaggtaggtgatggatacatgggtttcattatgcaattctatttttatatgcttgacattttctgtttaaaaatagttgaaagaaggagacacctagttgttcttggtccatctctgcttccgttgctcagaattggccaaattctactcaggaccctgggccacctacccggggaactccagagaccacagttaccactatagtcaagattctggggccccgagtaggcaaagaggaggacactcttctctgggtgagtgtcctcttccctttttgatattaaacttgatcaaaacctaaccatctaggggagatgaggaaaaaaaaaactggttaagaatttgtaagaaatatatgaaattgtgccctgggcatctgttttatagaatttttttaaaaggccttttaaatagtggttggtgactgatatatctgactgtatttagaaagtgttagagaaataagagtgacttgagtagatagcttcatccagattttgggcaaaatatgtatttggtggttcagttgtggtgacatcttaactctttcaagccggtggtgggggggaacctctcagagactgaatttgcatatttcacattacagaaaagttctacagacactgaaatttcaaaataagaaacaaactatatgtcaaatgtaaataattttctacaatcctactctttcttcactttagtgcagttatttgggaattagctatgaaaaggggggctttccttacattttattttcataactactcaaaaccaaaataggttaaaagtggatttgcagcttaaactcaggacactctgcctttaatttcattgttaccaaaataaaaatgatttttgaaggagagatagctgtcgtcttctaatatctaaacagagaaacccatgtgagcgaacctgttccagatatccaggcaaaggcaggctggtgagagacattggttccttcaatggggggaagtttgtaaggaagcttctgattccagtatttctgtggtgacctacgaataccaaatccgttaaatggatgatcacaaatgtcttcattgtgtctacacaggaagataggtacacaaggcaactaaaagataatgttcattactcatttttcttgagtggagaaaatgatacagaagcaggaagactgaggctcctagaaattcatgaccaccaacttcacctggggccctagccctgctcaccgcttctcagtgttcttgcttttaacagcacctatatgaaactttctttatatacttttatcctcacacttttattttgaattgacaagatacttcaattccgcacataacttcttcgtgaaaagtgaaagtgaaag

SEQ ID NO: 42575 - DNA, 2292 bp, Bovine  19866880807113
  misc_feature (1)..(1): n is a, c, g, or t
natgaatcttaatagtaattcagatatcagttctgctccagaaaacaaaatcttgaattcaaaattgttgggcctcttaatcagagaaaattcacagtgaagactgctaacattgaagttaccgagtgccgttaattcatggggtcttatggcccagatcacctgaactcccctgagtatttcacttagaatatatatacctctgaaggctaagaaggaacagtataagaatgtgaatagagagggaagccgataccatctggatggacagtgattcacatggaattttttcccctttcttcagtgacttcatgcctaagaccgttggtattgatccaagtccatttactgtacgtaagccagatgaaaccggaaaatcggtattggggtaagatttacatgtagaataaaattttaaagattcacataaaaataatatagcactttcacccaaaactaataacttcaagtcatatagtttacagcatagtatgtacactgcatccacgggtgtgctaagtcacttcagtcatgtctgactctttgtgatcccatggactgtagcccgccaggctcctccatccatgggattctccaggcacgaatactggagtgggttgccatttcctcctctagggaatctttctgacccagggatagaacctgcatctcttacgtctcctgcattggtaggtggattctttaccactagcacgacctgggaagcccactgcatctatacagatagcttatttataaaactgggattattaaagcatggttgacacttaagtagaatttatgggaatttcagcaacacagtacattttacttaaattagatgttccgtagatggcataaagttaggtagcagatgttatgtatgtcctttaataactccatatcctctgtttcccgcaacataaaagacttaggtaaaaatgtgtatttgttgtgtttatttttgctggcacccggagaaaacattaaagcaaatgctcagacagaggacttaatagatcttctgtgtactccgttaacattgtgtgggggatggctgttattttattgtatacagcagtatgaggaagagaacaaaccacgtttaaatctttatgctttgagactgaaatgaaatgtgtcctagtctgcgcatctctgttactgccgctgacctgagtgatcccagtgatgagaattctcctaggccctggccagaccgtggattttgagtcctaattgtatttgggagtgtgtacagggtcttaattggattctaactacatgtgtgatttatacaatgagatatatactgatattactatttcccagatacaccacttatgtggcttaaatatgtgtcctggaccaggtgctatgaggaatttaaaagaaggaacggcctcaggacatttagaatttaaagtgttcctgggacaaatacataaatgaccatttatattagtgtatagttctgaaatgtatcaactttaatttttagtttcatgaagtcagaaatgaatttattttctctaatatctaacccatggttagatagtattacatatttcttttctagaaaatgtagaatatttcaagtcccttgcagataattttttcaagtaagaatattaaatatattaaatatttttcataaaatccaaaaatattaccatacatttttttaattaagaaaaaaacagtattctgactactgtcaaatttggcaatgaaataaaagcaaataatgtatatttttttctgtttcccctcatccactctctattattagaagacatcatcagcaaacatagttatttactaataaattgttttaaaacagtttaaaatcttagtttatgttcatcagttgctcattacttcggtacaagtaatcagctgccactgtgattgataaaaattcataggaaggccagaaacacacatggatttggctattgaccctttcttgatgcttctacaagttataggtaatttcactaatatctcagatataacagtcttctactgtactataaattttgaaaatcctgatttcagttaccaaaagggaagacacagtagccaagtggtagaaaggcttttctgcacactgcaagcacatacttgcttattttctgaattcatagcaaagcttaaattcatagaagggtcagtacatgtacatgataaactattaaacttttcccttcagcacaacttgaatccagacgctagcttctcacagtcattttcttaacacttctccaggactaaggctttgggacagag

SEQ ID NO: 42576 - DNA, 1333 bp, Bovine  19866880816252
  misc_feature (1)..(1): n is a, c, g, or t
nttgcctcagacgtcttgattctgtctaccatggtacatttttagatgagttcattacttagagaacttataataacagattacttttttaacactaaagggaaaagttaaaatcaaatagcagtagaaaactaaatcactgacacttgtaattatcatggaaagtcatttgtataagtaaaagctttataataatagaatgtcgtttcgtggttttccttcctccaggaagtttcatgaaagtttaaatatataatttcaagaacatcgcttttgtttcagagattattcttctaaaagtacttttaaaagttactattctgatatgttatttttaatttttagggatatccctgtggatttcaagtatatagcagaacccagtatgcactcaatgcctgcagtgactttgtctccaaatggtgagttagtagttacagtgtttttaaatgagcttctaagacactgtgtgatttttgttttcaaaagagccttggccattccctcctgggggaggtctgtcacagtgccatacttgtatattagaaataatcactgattttcatgtatgagtcacctcacccattctcttgtttttttttaaaaaggtaaaaataaaagaaacaatgatttgcaacattgcccaagcatctaaggatttccatctgagaatcagggttttgggtttgtttttttttaataattcttccaacagaatcatgttcagcaactcatttagtgatttactgtgagctctttttcttttggggaataggtaattttgttctggttccttatatgagaacaccttagcaattcaccataaaagattttctcagacaaaaattaaaaagataagtctgcttaatactgttttctattcagtaactcatggccttttaagtacgagtactccagatatactgatataattttatatgaggatattaaagtggaggacctgatgtttgggcagcatggtcatcaaagccactgttagctcatgtagcttgctgtgagaatagagcaaggaagagggagcaagagtttgctcttccagtcgaagcatctaccataggcaaatcggtggacaattgtcaagtgtcctgtgatttttatgagaagagcaacctcacagggtgctgttctgataatcaccatattgtatacagtcacatttgtgcacctacatttcatacagtgtatttttaaaccatctgtcatcaatactgtgcccatcttgaacaaggccacttacttagtctgactatgaacattgttagggtcatcctttataatgtctataacatataggatacaaagatacttcagt

SEQ ID NO: 42577 - DNA, 1723 bp, Bovine  19866880830777
  misc_feature (1)..(1): n is a, c, g, or t
ncctctccccttgctttacaggggccatttattaaaaatacataaacacagacaaaaaataaatatatacaggtatttatattgatatatgattatatgatatgaccatataatgataacagatgatgtacagtgatagatgcaaatacatgagtctatttatagactttattctcttctactggtctatccttataccaatatcatggcttttctaatggttattataaaaagtgttgatatccaagaaatcaagcccttctgccttattgtttttatttaagataatctttactattcttggccttttgtatttctatataaattttagaattagattggctgctcacacatcggacattcaagaggcagaaatggctttattggccttggtaagtggaagcctatttcatgggattcatttctgccaccacagccactctgttcacacgccctcatgcaaattttcttaaccttagtatagcagacctccatctgagcatttaaatgtctttagaactctgtgactctaataaacagatcttcagtcagctactcagttgtatctgctcttccacagttagaaataagggcctttttgtaaactaccaaactaatatcttacccatagactttaatggcttattaacagccctcagtttctcatccttcctgtgtagagcatcatagcagcttgacagtaaccaaccaatcccactgtctttttagatgttgttctccccagttcattgagatgcctgaatcatcacacaggcaagggcaatcacctctccagcaaaacccaccaaatggttttttcaggtcaccactggtaaaatctttagcagtttggccactgccctgtgccagggactatccatgccccacgtaccactagaatgacattcctctttgcctaccaggtaatgaataagccagtcaacaactccatcctgtcacttgtgttcttagttcagtcccgtcacctatgttagtttagagtcctctgagatctgtatgccaagaaaggagtagatgtactagatacttgttgaggagaatgcctgtgaaggagaaaggggagagaggccagagaaaggatgtgaagagcctttggttggtaaaaggaaaggagggaaaaggatgattggctgaaaagtatcttgaactgcagtgctattctaagcaagttttggccaggcctatggggactccttacaccaaagttaccttgttagaggaatgggccagtattactaaccacactgtgctgaatcgttggcgaaaggtaagtgaaagatcgttagtgaaaggtaagcttggactttgcaagaacatggtagtagatctagaagggtagcagctggggccatagccaactatgcacagattgctttcttgcctttgtcaaataaattgaatgagtgtatggtgggcgggggctctgtttctaggctctgtactatttcattggtttaattgtgtgtcctctgccagtgccacacagctttgattactggtactttttgtaattcttggagtcaggtactgtaaaccctccaacttgttctttttcaggattgttttatatattctaggtcctttctattcccatgtgaatttaagcataaacttgtcagtttgcataaaatgtttttcctgaaaattctgattagaattgctttgaatctctagctcagaattgacaacagtattgattcct

SEQ ID NO: 42578 - DNA, 1789 bp, Bovine  19866880919726
  misc_feature (1)..(1): n is a, c, g, or t
nactgttgttgtgggtttgtttgttatttggctgtaccactgggcatgcaggatcttagttccccgaccagagattgaactcgtgccccctgaattgggagcacagagtcttaatcactggggaagttggaacttcacccgggaaagtttccaagaaagcattttgaaagaaagaaaacaagcattgttgagaatttaagatatttcattcaaaattaacatttgttttggtacatatatacaatgaaatattagttagccactaagaaaatgaaataatgccatttgtagcaacatggacggacctagagattatcacagctaagtgaagtcagagaaagacaaataaataatatcacttatatgtggaatccaaaaaaatatgataacaatgaacttatttacaaaacagaaaaagagtcacagatgtaaaaaaaaaaccacggttaccaagggaaaaagcggggaagggataaattgggagattaggattgacatatacacactactatatataaaataaataactaataaggacctactgtaaacccaggaaactctactcgatactctgtaatgacctatatgggaaaagaatctaaaaaagagtggaaatacatatatatatatatatatacacatatatatatatatgtaactgattcactttgctgtacagcaggaattaatacaatattgtaaatcaactatattccaataaaaatatttagagattatgcaggtaaaaaattaacatctgttttaatatattaaaaggctaataaagatctacatattggttataaaatttaagttaaatctgcatatattctatatcttgaaatcataaagttaggttttatccaaatctatttgttaaaaagagcacagattttttctataaaatagaaagtttgttttcataattctaaagattgttggcgtgcagccttgaaactataaatatttgttactataaattttgttaaatgcagaaaaattaatgcttcggtaaaggtgaaaacaggcttccctggtgacttagacagtaaagaatctaccttcaatgcaggagaactgggtgcaatctctgggttgggaagatcccctggaggagggcatggcagcccactccagtatgcttgctggagaatccccatggacagaggagccgggcgggctacagtccatggggttgcagagtcagacaccactgagcaactaagcacagcacaaaggtgaaaactatgtttgccatggggtttgatcccacaaagccttgcagagactgaccttctgctcataattgacctgatctagttttactcattcagtctatacagcaatgctgtgtagatcctcttaaaagtaacagaattcctcatcataggaattcactttataaatacactccaacatactttagaatgtagtacacagttttcgtcttcagcatatattacagcagaagcactcttaatctgtctgtgcaacaccagcttgtcagatgaactgacagtattttctctacctgtgcactcctgctgctaccactttagtcatatttttaccaggagtcattgatttgttcccaaaccagtttatgtcagttgtacaagctactgaaattacatcatttcgttaaaatttaggtaaaatgatgaaatctgtacacagaaagaaaacgggttctcttttctatagaaaccaagttgagaaaaagctaggtgctatttttaaatactgttgcgttaagcatgggtgaagtaactgtaaaaaagaataacag

SEQ ID NO: 42579 - DNA, 4213 bp, Bovine  19866880936415
  misc_feature (1)..(1): n is a, c, g, or t
ntagaaggagtctgtttaccttttaaagaaaccaccaaacttttccccagagtgtttgtactattttacactcctgccatcaatacaagaacattccaatggttctgcatccttgcaatacttgatatgctctgacctttaattttgattaaatgattacactattccaagttcacagctttgttcccaatgccatcaacttaagttcttgatacttcttgcagtagtcacttacctggcactcctccttcagataaattgagagtgtcagatgggaactttgtgaacttcctcccaccatctataaacttagctctatcagttccacttattcccaccttgactcctgtcagagcagaggagtcatgtctccacctcctcccatctaaatccctctctctctctcacaccacattttggaccccattctcctgtgaagacttattctgggagctttctctgctagcttccatctttccagttacaggatatcagtcttatattcagttcttgcccatctttaaaaaacaaaacaaagattatctcgtgaccttatcttccctcaagctaccaccctatttttcacctttgatttaaagttaaatatactgaaaaaaattagaaaattcccattgcctccacaacttactgcagtctagcttttaacctgctttctgtttaagttgctctcacttagatcaccaatgaccaccatgttcctaaatctagcacattccaaactttctcttacttgaactgtgggcagcctttccatagctgatcacttcctttttttttttttttctggttatgcccgtcctctggcttgtgtgatcttagttccccagccagggattgaaccccaggcactgcatagtacaaggacagggtcctaacttctggactgccggggagttcccagtcgcttccttcttaaaacatttttcctcttggttttcccagggtatcccctcaattctcctccttagtcttcttttctcctttgctttccttcactgtacccccatatgttattgtgtcaagactgtaactttggccttttctcaatccctcccgtggctttattctgatgtctgactagcttagttggtaaagaatctgcctgcaatgcaggagacttggtttgattcctgggtcagcaagatctgctgaagaagggaatggctacccactccagtattcttgggcttccctggtgacttagttggtaaagaatctgcctgcaatgcaggagacctggtttgatccctgggttggcccctgaagaaaggaatggctacccactccagtattctggcctggagaaatccatggactttgtagtccatggggtccatgaagtcggacatgactgagtggctttcactttcattttcctgtggcttcacttacaccttaaggtcaatgattatcgaaattctgtctccattcatgccattcttgccagctccaaatccacagggctgcctgcctccacttggatatttccacaaatcccaacatttaatatgtagaaaacttgattcagtgccctctttctcaaatctgcctttcctgctatgttcccatcatagtgtatccaccctttgagcatccttgactccaaactgttgcttaattcttacaatcactcacttagtcagagacactcttctttgagacctcttggatccatccccttctatgtacctcctttgccttcttagctgatgttaacatcacctctcacctggattgctataactgatctccaaaatagtctcttggccaccagcctttcccacctgcagtccattcccaacactgctctttgtaatctggctcttgcctacttctccagacttatctcctattacttcctctctagattctagatcttaaacactccagctgtgctgaatggcctgcattgctctgaatgggccatacttttgtgcttcctgttgtcctcttggtctggaacattccccttcaatgtcctttgccttgaaaatgctttttgttcttcttgactctgcccagtattgcctttctagtggatttccatagcatttccctgaccttcatatgggatccctactctctatgtatgcctttattattgcgcttttcattagtactgttctcagagctgtggctgttaccttacatggcaaaagagactttgcagatgtgattaaatcaagaatcttgagatggggaggttattctggattatctgggtgagtcctaaatataatcacaaatgtccttataaaagggaggtagaaggagatttgaccataaaaggaggcagtgtaaccactaaagcaagataatacactgatggttttgaggataaaagaaggggccacaggccaaaaaagcaactctaaaagctgaaaaagttaaggaaacagactcttcccctagaagctctaaagaaagtgtagtcctacttaaatcttggtttcagaccagtgaaatatagtgcagacttctggtcttcataactgtaagagaataaatatgcattgttttaagctaccaaggttgtggtcatttgctacaacatcaataagaaactaataccttgggccaagtgaggccctgccctgggcctcatgctgcagagacctctgctctatgcccattccagctgtgggggtgaagagtctgtgtcctcacttctaggccaggcgccatgtaccccaagactcccaaattccttactaaagaaattcttcctcaagacctatttattgagcctaaatgcctcttcccaaagttggttcttttgagacagactatactgccagtgggctcatgctctgatttgaaggatagtcaaaggagcaattatttgtgggatgaaccactgtatagacaatagactgaagggcacaagaactgaggctaggagaccaaagagaaggctgccacagtaattcaggtaagagatgacgatagagatggtagagatggtgaaaagtggctagagtctagatatattttaaacataaaggcaacaggcatccgtgttggatgggcggtatgaaaaatagggaagggtgtgattccaaggtttctgctctgaacaactagaaggatgacgttgtcattaatttagatggtaaagaagggagaaacagtgcttcttgagatcaagattagtggctttatttaaatgtattaaatttagatgcctattacttattcaaagtgggtaaaggtgttgggatgttgaatcttgctttttgcaaagactatatgcttccagaaattagcttaaagtcttaaaatagagattattaatagatgcatcaaataaacatatgacattccttcatagaaatgtttcaagacatactcacagttttgtatccttacatcgtcagataggtgaagatgcagcccattgacaatacacagcctgacaagctgtgtaagccaggaatattaacagcctgggtgtttagtgtcttcttgttcttagctctttcaaacatttagggcagatattgaatattaataccaagtggattgaagtcagatccatggtctgtcttactatcttagtcttgaactttcttaatctgctgattgcaaaaatgtttttctgagattttaacatgtataataatttgactttgttccaccttgaaattatgttgttttccctaccacatgtttggaaagtttatagccagagcttttgttatttcagtccgcttaaatgcatcctggatactaatagggcctgagagagtgtctgatgttgctgaatagtctataaaggttgttcattagaaaatgttaatttgatgaatgagcaataatgctgatcttcctggatctcaattcatagacactataaaacaataaacctataaatcttagtgtgttttgtagtgttaaaaaggtcacagctctgttgcaagatattggagactagattgtttatacattttctcttgtgcattctataatcaatacccattcccctcattctcctgaagtttttcttgtcaagttcaccaatgatagtcacattacaaaatcaatagccattgtttttaatcctcattttacttactctctcagcagggtttgaccaattgactactccctcctgaaacaccttttctcctttattttgggtcactgtgttctgctagtgtgatggttaattttatgtgtcaatttgactgga

SEQ ID NO: 42580 - DNA, 3487 bp, Bovine  19866880950930
  misc_feature (1)..(1): n is a, c, g, or t
ncttgaggagtcaagaaaggctaacctggaggggacatttgactcaggacttggtattgcttaggagttcacgttcttttgtccctctggatgttctcaaatgttccatcctgggcacccctaacgcaaccttgcacttggcatttcacatctgctctcagcctccattgcttctcttttacctgttgaagaatctttcttaaatcttagcttccacttcagacaatagaattgataactggagcctcaaatggaaaggtttggaatgcatagactcaaagggcctctggagggcaagttcacatctgcttcctttaggaggctgctgtagtgattcctgctggagacagtggtgacttagagtggtttaagtggaggtgtgggaagtggtccaacattggatatattttgcaggaagatgagaaaggagtagtttttgttgttttgtgttttcgggggagtagatggaaatcaggagttttgttttaaacatcttgagtttgagttatcctttggatatccatatggaaatgtcacataggcagttggacataggagtctgaaactggaggaaatgtccaggctgaaaataaagacgtgggaatcctccgtgtacaagtggctctttcaaagctgtgagactacaggagatcatctgggcagtgagggttgctcacaaagacagagatgcaagtctgagccctgggactcagttttaaaagtaaattttaaagtaatttaaattaaatttagtaaattaaatttaatttaaattttaattaaatttaatttaagttttaattaaattaagttttaaaagtaatttaaaagtaaattaaaagaaaaaaaagtacattaaaaaaaaaggaaatatttgcatagaaccttacatgttgtaagcattcaatagtggtcgctttaattttcactaatctgtcccaagtctttagcctcagccgttccctaaatatcatttgttataacttctttccactcctttggtttatgctgattcttttacccccatcctatgattcatgccctttccatcactgaacattcaggtcaaggacggtggcccagaaaccttttttcatcattcctacttccttgctaatctttgaccagtttgggagacaacataaatgcgttctgatttgcgagttgctttgtatgtgttgtgacctaataatctattttagattgaatgttttgtctgtgcagttgttcatgatggaaaggatcacatttcctagtgacccttagtaaatgtttattcccaagacatcaataagtaaaaaataagaatcttattatttcaacctattatgtgtaattgtaaatgtctttggttaaaaatatataagaaataattgagtgaacatagaaattaaaataactattttttaagtattgttttaggttttatttagcctcttaaagaaaaaaatttccctggattttctcccccctagctagttagttattttcatattttcagggtatacagtattactttcccaaattcctagatagtgggaatcttgaatttgtttcatttttccattatttcacagtcaaattaaaatgttcctccaaagtggaaagagcagctatctagtctgttctcccagtttagggaacagagtggaatgtcccctatctctccagggataagtcttgttcctttttagcctcgcattgagataaggtgaaatataaactgaatgcacagttaattaatataataaatttagaagtaatgtgttaaattccttgaatcctattttatttaaattttgtttgttggggataatgataaacaatattattttaggttcttggatactttgccgtaggcatctaccagattggtgaaggagaaaaagttccattctattttgaggatggctttctgggtgaatgaaaacctgtatgaaataattgggttgccaagtgtttcttgtcaatgtgcttcctttgcaggtgttagaggcacaaaaattcagcaattatattgccactttaatcatagcttatgcttctcttaaagcaaataatctgttataaaaaagagaaatgtgtagtccccatgtaattcttttcctcttttcttatcctcttctttcaccaagctatacaagaaatagttctaaatattaaaccctctttcacatcagaggttccaatcttacagcattatgaaatgagggcagatgatacatggtggataaacactgccctgtgggattaggactcccctagaatccatacatttttctatattacagaaactttaagcatacaaatatcactatgattcttttttattcttttactttctctctgttttctgtgtttctttctggtttctctttcttagatatttactatgattacatggcttaagttcttctggaggacataaatagaggactaatgatggtctccttgattatacttttttctacaatcttgggtagatgtttcttttacaagtagggaatctacctgaaaagcagcaaaatatatggctcatatgcccaggagaagtactgttgacaaaaaaattaatcagtagtcaatctgagaaagaaatggaaaattttacttgaaccaaactgagtattataactcaggagacaatctctcagagacctttgagaactgctccaaagaggtaaagggggaggccagtataagcgattctctagaaatggtagtgcagtcaagcacacagcttgatggagagttactgtgattcataagtaacagatatctttaaaggttttagcacttttctaagtatgggttcatgaattttctcctgaaaatatctatctgaaggcctatcttttcttagagcacagaatgccttatcctgattttgtcctgagttccagggtattgtaggtcagtgaatgtagtggctaatgacttgattcttatagaactggatagtagacaacagtctctgttttacagtcccctcccttttggtcttaattttgaccaaggtttgagaggcatttcacgaccaacttgtcccaaggcgctaggaatgctcattcctaggtcaatcagggatttcattgataggctgctcagtgccctgttactgcacttggccctgttaacaatagtcaaaagcctctggaccatctgttttactagtcagttatggtctaggatgtctcttgttgcgtcttcttatatctaaagttacactgttataatctttgatcttataggacaatatatttggtcaattgtttaagcttgcctaatcatcattaattttattggaggctccatcacacatttggtagtataagaaataataatcttgtgaaataggtagaatacaaataatatagctagtaacattaataaagtcctaagtgagtatttaaggtaagaatttccattaagggaggcccagttctctccaggtcaccgacccagtctgttctgtagcagtgctctc

SEQ ID NO: 42581 - DNA, 1116 bp, Bovine  19866881046201
  misc_feature (1)..(1): n is a, c, g, or t
ntgaatttgagtgaactccaggagttggtgatggacagggaggcctggcgtgctgcgattcatggggtcacaaagagtcagacacgactgagcgactgaactgaactgaagcaaacaagtcacctgagaagattctcaatcctgagtaataatacaatcaacataaacacccataatccaaagcattcttttttagggcataagaaatattttcttccagttttcaattaaagcattgttaggttttgaatcaaatgttggcccttaaaaccaatccatttcttttcccagtagaattgaactgttcctatctgctctttacaaagttgattttgaatagtgaatatttaaatgaaaataagaaactaccttttatatgtaataatctgaaattttacaccagaacgactttatctaatggctttgaaatataagaaaagcaaaaaggaacttgaagaatttcccccaaaacagctttcccagttttgttttactcagttatatgctttaaatgaaattattccagggtgtaaaatattaagcaaaacatacaggcagtttggagcaagaaaataggaccaagctgagatctttaatttgcatgtagaactatacaattatttttatgacctactttcatgcatttttaatatgatgtaaaataaactctactgtcacaacttcccattctttctccaatcttgcaacatagctggtgggctccaagaaaaaaagagctctgttctaatcaactggctaaacaattcatttcctaatctttagcctcctagtttaattcatggcagaaccagcttccctcttgagtcttcttacctcaggcaatgtttatgtagcaaatatatatattgtgcctactgtgtaccaccaaaaatattctggaaataactccagaaagaatgaagggaaggagccaaagcaaaaacaacacccagttgtggatgtgactggtgatagaagcaaggtccgatgctgtaaagagcaatattgcataggaacctggaacgttaggtccctgagtcaaggcaaatgtggaagtggtcaaacaggagatggcaagagtgaacatcgacattctaggaatcagcgaactaaaat

SEQ ID NO: 42582 - DNA, 848 bp, Bovine  19866881169585
  misc_feature (1)..(1): n is a, c, g, or t
nttttcccctcaaatgggaaatactaagtagataaagatagcagaactaaattttaatttctgtcactgtgtataaagctatagtaataaaaaattatggcactaccagaaaaaaatgacatagaccaatcaaacagaacaaagagcccagagataaactcacacatatacagtcaactaatatttgataagggagccaaaaatattgttattttgcatcttaaggaaatatatttgaaaagagaatttccagggggagactgtgttatactactttttatgttttagttacttatagtataatatatacctttttagaaggatttaagatggtctgaaaaaatctgggctctatttagataaatacttaaaggaaagtatatttggatatagacagaaataatttttcatttctaatttccaaaataaatctcactatattttatagagctttaaaattaatattactgtttatctgtatttcaggaaaatatttatataatagactgtatttagagaataaacaagaaattgactctaagattttagaaagattattagatgaactactaaaggaaagaaaagaggaagaagcagcaaggtaatctgcctggcacaataaatgatattaattaaccttttacaactgttaaaaatctacttatgatttatatttataaaatgcctttaacatcaaaacaggcctactaacaagatccaattctaattctaagaaaaatagtaatttcataaatattcccagaatctctaaagtatatagctgtgggatattttcacagtcccaaatcagacattctaaaccaaatgtttactttcaaaagacattg

SEQ ID NO: 42583 - DNA, 2766 bp, Bovine  19866881230927
  misc_feature (1)..(1): n is a, c, g, or t
natttaacccttagatttatcttaaagattgtagatcaagtgtgtaaagcaattagcagattaattcacattccttataatagaatgcctggcatgggaagaattacccaactctgatcttaatattgtagttttgtagcaaattgtgtaaaattttttgtacagaaaggtcagtgtaagataagatgtcttgtaaatcaagattttaagtacattaaagtgttttaaaatttaaaaaaagccctgcataattgatagtattttagcaagagattaagcaaatatgggaaacattgtgttctaaacttgattttctagtaaaattctataaggaggctgggtgtggaaggggagatgaagagctggtgagagagccctgtggtctctggagagaaccattccatcaggacccatcaatcctctaggcagaaataatagagaatttgttagtccaacagactaagctaaagagtgtcatcagcaaactgacaggatgaatgaaggctatctgcaaatttctaagtcaggaaactgactctgtggggccaagttgggcatactggctgctggtcaccaggaagggctggttcatcttaccttggtgctctccagacttaggcactacctagtcctacatcccatggcagagaggactattaattaacagagcccaaaagccaactagagaatgtatgcagctgccattgttggttttttaatggctcaacttctttgtcctgtgaagaatcacttgagaggccctcgggattagggaaattcagggtgactgggcagtcactgtcctggtattaaagtgaaataaaacttttgtgagtccacagtagccctcagtaagatctcttgtatgcaaagttgaatttcaggaaggaggtaactcaatttgctagaaagtcccaggactttctctgcaggggggatgggggggtttggtgggatggggttgtgggtgggggtggaatacccgacactccagaatctgctccccaccataacaggaattaggagaactgatacggacttgattaaggaccagtggtagggaagggcaaggaggttcctgatagaaaacaactttgcgtgactcagcaagattttaagtcaatgacctgagctcaagagcagggctttaggttttatgggcttttactactgggtggtttccctgagggcttctctggtggctcagaatctgcctgcaatgcaggagacccgggttaaatccctgggtcaggaagattccctggagaaaggaatggcaatccactccagtattcttgcctgggaaatcccatggacagaggagcctggcgggttacagcccatggggtcgcaaaaaactctgacacgactgagagactaacacacttactttctactggatgtgagctggggaagtcatggttgagtagaggagtgtaaactgaagaccagctcaagcacagggctctcctgtccaaacgcagcattaagggaggggcgctgctacctgtgcagagactggaccggtgagagactgtctccattggaccagtaccatctggggaaggggaaggccacaccttcatcactccatcgggcagtgagaagttctcctgggctgtagaagtcacatgggtctcctatagactgtgtaaacctggagactttgggacaactcaggagttgctgcagggagtgaagttggcctgtgagtgtttaagctgaattttagcctgaccgaaaattaaattattaatatgcaaccatatcggtgcccagactttgagaagcagatcacacaccctttacaagagctttaaactctgtttaaggtattttaattaattccaatgagtaatttcttaaagatttaactccctcccactctctcccatccctatggcccccacttaccctgcggtattacatacacttcccatcagagataattctaaggcctgaatagccagttcatcaggtgccgtcattcctttatgaagatgccaatttagcataagtgccagctctgtgtctggttggttgtttaatacataacgcaaagcatctcctatcgacaaacgctttaagccatattcacttgaaatctttttggcaactgaaaaacattaaaattttaaacttattctgtttcacaaaccccatctgttaaccttggtttcagattctagttaactgacaacaacagcaaggttaatcttcacatttctcaaagaaatttcaaaaattaaaatagctacattttattgaattaatgggcttctctggtggtggctcagacggtaaagaatctgcctgcaatgttggagacccgagttcaatccctgggtcgcgaagatcccctggagaagggaacggttacccactccagtattcttgactagagaattccatgaacagaagagcctggtgggctacagtccatggagttgcaaagagtcggacatggctgagcaaacaacactttcacttcacttcattgaattaatactattcaaaggtcagtcattattagcacttcaggtatgtggctgacagatctggttaatgagccaactgtgttaggtttttccataaccaaaccatttaagtgttttttccttctgtacaaggtagcaaaaaatttgagagctttataaggcatcctgtgtgtactattaatatttggtctttttatatccaaaataacaattcaatgttcttgtgtcattgggttaacccatttccctatctatacacttatgactt

SEQ ID NO: 42584 - DNA, 2184 bp, Bovine  19866881247538
  misc_feature (1)..(1): n is a, c, g, or t
ncatggctgtcttgagaggctaactaactccactttcagttaagggtctgggtctgtgttttccttgagagttgggtaaagggaaaggctctataatggtcatataatcttcatcacccaccacattagttttctgaatttctacttagaacatttgtgccagaaaagacaggcgctcaattaggctacaaatgtcacaatttctagtaattaccatcgtgcacaaataatggaaaacgctcaacaatgggtctgatttgaaacattaactttcaaaaatgctcacaaatgaatcatttaatctacaatcaactttcattatttttttctcctagagatagaaaatagataattactgagaagagaattggggaaactttccacgcacataatttgtgttcagaaacatagaaacaaacatttctctggaatgtacgaaatgatttcatatacaatatgctatcatcgtagaaagccttccaaaatggattcagtgcaagaaatcctggttgaaaacatctgtgatttaaggcatgtcaaacttgaaatatgcatgtatgggcatgtgggtgtaccgtgtgtgctccccataatagagtccctgtgcatctcactctgtgcgtggcccacgtgttaagtgggcatgaaatgattattaacaaaaccccaagctgctgtaccacggagagtgtctgatagagcaatgcaaaaaaaaaaaaaaaaaggagcacagagtcagcaactgctatgcactggggaagacttggtaactatagcaacttgctttagaagttgctcttcccctgccagaaatcaggtgggccctgtcagccctcccactgtcacactgcagggagagagcagccattcaggagaggtggcaggctagcccacaaagggcacacagaggaaagcagacctccttaagttccggcaccacatgggtctgtgaagcagcagattaggaacaagaataagtgcaactgaggaaggtggacataaagagagggttttgaactcctgcaaacagaatgggaattctctgtcatgaatacatccacccagctgtgactattctgatgaaaactggcacatgattacagaaaagatcagcacacactcaagaactggacccaggcagggtcagggtatttctgtcagtctcttggataaaatctcacaattccacagagaggagggactagagttaacaccagaaccccaccacgtatcagatttttgtagttgcgataattttttgggggggattaactttggaaggaatgatgctaaagctgaaactccagtactttggccacctcatgcgaagaattgactcattggaaaagactctgatgctgggagggattgggggcaggaggagaaggggacgacagaggatgagatggctggatggcatcactgactcgatggacgtgagtctcagtgaactctgggagttggtgatggacagggaggcctggcgtgctgcgattcatggggtcacaaagagtcggacacgactgagcgactgaaatgaacttttagtaaactgcagatagttgaacacacagcggggtgagctcatttcttctcatcaattacagttgtcattaaaaagcctggagccaaagaagctccttggacatggtgagacaaaggtttccccactgggagccccagtgaccttttgtaatctggtctctgaagtgggtagaagggaggcctctctcacatggaatgggcttggtgagcttaatgttacagggattcaggcttggtttaccctcctcaccacagcactggacacaggtgatccctgcctgtcctgaaccatggcctccatttgactggagaactcactcctgttctcctgccacctcactggttgcttgctcccactccctcctctctgcaggatcttccttctctctcccaactctaggtgatctaagccttggaaggtccccctcctcttaattttttatgtgatcttatttagtgtcagggttctcactgtatctgcaactcaagactgacatagtcaccaccatctcaatgtgaccatgttggatgtcgatctaacaggcaccacactcatgccatgccccagaccatcttctcgtagcagatggctggttctcccatcaaagtacatcccaaaaggaatgctcctcagcccat

SEQ ID NO: 42585 - DNA, 1929 bp, Bovine  19866881283587
  misc_feature (1)..(1): n is a, c, g, or t
naccaacatgcctgctaggactgtggcctcctcagtggcctgagttctctgcttttgcccttgatctttcctagtcttttctccacatgacagccagaatcttttaaaaacacacatcagatcctactactaccttgctcaagaccctccagtgtcttctggccactgaatagaagctggagctcctgccagtggcttttgggcccacgtgatcgggtgcatccctcggctccaactgcctcttgaccaccttcccctttgctcactctgcttctaacacactggttttctttgctgcttcactcattacctcagcgcctcacacttgctgccactactgtctagatcactgtaatagcgcattccctctctccaagtttccactctctccttagagacaacttccctgcctattttacttaataacattagcccccacatccattctatccctttatcctgctttacttttctttgccacactaatcattacctatattatcatagaaatccatcttcctcaggaagatgtgagatttataaaaacagggactttttgttcactgcttttcccccaggactcaaaacagtgcccagcacatggtgggcggtcagtaaatatttgtaaatgagtgaataaacacacacatgaagaaaataaccatactttgtgtaacacgctggctgtgacatgtagtggttcaacagtttttaaactgcttttgactttgttgctaaataatttggttcctgtaacaaatcaggttgtaaagtaagtccttctgttggaaaattaaccacctctggggtcaaaaacatagtgttctcccatgtctcagatttaaaatggatttcagaaatctagttaacagaagagcctggacagaattagaatataggattctggatctagaagggacttctctctccaaaggagatatatactctcctcctctaagagcaaatatcaacagttctcaccctggtcctgtgagctcccttgctccaagcttgttcaccaagtcatcttccaaatacaggtgcctgtcctagaagaacccctcttctagcttctaaaaagtttcctccatgtcattacagaagttttagtagtacccacaatgtactgggtattagctatttgccacacacttggcattcacttgtttactcctcaaagcaatctggtgacttggtgttgttagtagtctcatttcataaatgaggaaaccatagcacaacaaggctaaaggacatgtccaaggttacaaagctggtgagacatggagccaggattcaaccctgaggttcttacctcagcgtccatgctcttgatcacctgcaggctctcttcttagcaggctactcacctggttcaaattgggtgacttggctaaggtcactcacagcaggcaatggacaaatggggaggggggagggtccaagtctttgttccttgttctctccagttggcttgaaagatttcagtgagatgtaactgcctctgcagagtgggtagcaaggaagtttcatggtggaactagtctcaactactagctgctaatttaaggccaattgtctcacacgccccataaaagagggtcagatttaaagcgtctgtaactttattcagtttaagtgacaaagtacaccttttgtatttgaaatgtattttcctttttaatcctttctcttcaagatattcagtactggcaacttaaaaagtacctttaacacgttttttttctgttgttcctactgaattttgcttattttaaacctggtacagactgtacctgctatgttccttaattctgccacattcaaagactgactactgtgtgcacccctgatgggagtcttggtgcttaaatactattgctaggactcaccctcatgtcccaatccctaagcacataaggtaaattt

SEQ ID NO: 42586 - DNA, 1413 bp, Bovine  19866881287455
  misc_feature (1)..(1): n is a, c, g, or t
ngctaggactgtgagaatgagtaggatgtagcctgggaatgcagtgggttctagggggctatttgttgttgttgagttactaagttgtgtccaacttttgtgaccccatggactgtagccggctcagtccatggctcttctgttcctgtgatttcccagacaagaatactggagtggattgccatttccttctttagaggatcttcctgatccagggattgaagccatgtgtcttgcgcctcctgcattggcaggcagattccttaccactgaaccaccagggaagctctaaggggctgaggttcctgcagtttcaggttgacataaagacagtggaatgttttactccaaggttgatatgatccaggaccataggatcactgcaaactgtctttggatgttttaccaatgtcacaaagttcttatacaggtcacatttctaagtccacatttattgtttggatcatctccaagcccaaaatgaacatccatagagcaactcactgagtacatgtttcatggagacttaggcttagtccatggtcaggggaagaatttgaaatgcatagaaatctcctctctagcaaaaaggatacaaattggcagacttcctagggtggtagttagcccaggctcttctctgagaacttctcagggatattagcaaaggactagtgtctctatccccgattaccaccagctacaatgagcaccaggcttccgttgaaggagcaggatgaggctgggcgaggaccccatggggccattgattccctcatcattatggtcaaggcaattgttaactatgagagccaaagacccattagtgataatgcagtcaaaatggaaactcaaaatggctcaaatccaagacaagagcagaatctgtgaattaagagattgagtcatcctttataagcctaggaaaaatatatcaatttatagattgtcacctcagtacctgagagggagttcagagaaacagaaaaaggaagaatttgaagaagttggaagttggcttgtattctgctaggtcattattattattactaactgttgcttttattatattactatgagccaggcattgtccaagcattttataagcattaactcattttatctgaccactctatgagcacctcattgatatggccaggatgggactgcccattccttcaaatctctccttgatttctcccctttataatataattctttcaggaccagtaactacaggcatcatgtgatgtaaggagtaacttagtcattagcttctagtgaatgcctgaaaatctatcatgagacactagataaagatattgacataggttatgtgcaaatccatctgtaagggataactttgcatttttttaaagtgctgttaaatatcaattatgtataaggcactat

SEQ ID NO: 42587 - DNA, 625 bp, Bovine  19866881777696
  misc_feature (1)..(1): n is a, c, g, or t
natctttgtaatttttttggctccaaagcttctgaatatgtccatactcattcaaaggtaggagtctaagtgccaattaccaggctaaacatacaaggttacaggaatttatgaattagtgacacccatatattttagctaacaacagtggaatgaatacagagtttcactcttagaaaggctctaggcttcaaaaatctagtgtgactgagaaacattcagaggctggatttgaggttttagcacagaaaagctgtagtgaagttgttaacttcaaccccataatacaggattaattcctctggggctcattgaatcatagcaatatagtgattatagtcctctcagccttgcttagaaaagtagaaagaaagaaagatattgcctatatggacagggactcattatgtgcttaaagggcacagaactaacaatgtagagaaatatactgaagaacttaaaaaaaaaagcgccaaatataactgtcttaatttgttcttgtcttttatctggcatttagacaatctgaacaattctcatacaattacatatataaaagtgatttgtacagtcagtgttgctatttgttagtagtagtttatatcatcatatatgaatacgggaa

SEQ ID NO: 42588 - DNA, 953 bp, Bovine  19866882240291
  misc_feature (1)..(1): n is a, c, g, or t
naaattaatgcatttttagtcctgaatacatattgaccaattttttttatactggcttagaagtgacgatgttagtcccattacaagtattttctgacttgatggttattactgttatcagtggaaagatttagagttaccaactgtggcagccattagtgctgttcaccaagtgcttctgtctgtctgccttctaggagccttatagaattgtacttcctggcttccttctgaagagtgggagcatgtgactagcactggccaatgagctgtcatcataagtgatgaatgttgcttcctgatcagagcctttaattgctaaggcaggagccccaaagctctcacccacccagctacaggcttgatcaccttcaagactgtggctgcttcatcagcttaggcccctgggtactgaacagaacccttgctgatattcaatccacatatagtatgagagaaaaataaacctttgctttttaagctgctaagatttggaggttctttctatcctgcaacataactgaatctttcctaacagatgaaccaacaagatgtcaaaggcacacgttacacttacacaaatgtccagctgtctttgtaaacggcagtcaaccaacatcaacaccattctatctcacatctatcatatctgacagaggagcaaaaatccctctctcacctggataagtaggaggaataagcattccagctgccacatcactcgtggtctcaggagtgaatttgtctgaaatgactgtaatggagcatcctgggaccattttggaaatgcacacagcagtagaaagccccatcacgccagcccccacaactgcaatccgtactgtatccatgggcctgtgaggaggcaaagtatgagctgcaaaaccttgttttaagaattagtccatccttgggaattccctgattgtccagtggttagaacttcatatttt

SEQ ID NO: 42589 - DNA, 3358 bp, Bovine  19866880498039
  misc_feature (1)..(1): n is a, c, g, or t
naacaactcttggggtactgggtgagtaaccatgataagaccctcggcttaatgaaccaaggaacaacaatcttgaaaagggccctgcccttcctccctaactgaccatttagtagactctcaatgtttttctctactttcttttttcaatagaccctcaatcttttaatttctttcatttctaaagctgtcttgccattatgacctattcataatgatatagatttgacagaaaatgataatttttaaaaaaagactcttttttttgccattattatggtttctacatttattgatatatataacaactgtttattaagcccctacttttatgccagcctgtcctttgcaaactaggagtatagaggtgaacaaggcaaagatcccactcacgtggggcctgtgtctaatggggaagataggaaataaaatgcaaattagatacagcgccagacagggtcaggcatatgaaggaaatacaaccatctctgtggaggaggtatctgagcagactacatgttggatcatgaataggatcatatagagagctggggaaatgtgttcaaggcagaaggcatattgtgggtataactcagggcacaaaagaacttgatgagttctctgtagaacaagatcatggtaattgtcacatcatatcatgattatttgcttacttactatctgcctaagtaggatgttaggacatacttattcatttttattgtcagtagctagcaagagtttggaatctggttggcacccaacacccaacatctactaacaaatgaatgagtcaccacaaagttttctggctataaaaaggtgaataatcttacctagcactgtgtgtttactgatgtacactgcatttccaacatttatttttttttagtaatttttgttgaacatggttaaagtgatgatgaatgtgtccatgttcatcagcattctgatgatgattttgttatatattttcatttattggagaaacttgatattaaattcactttatttagagatattattaagaaccatattatgatcatttaagttttctaattaaaaattgtccagagtttacattctaggagtactttaatattcaaatgatcctgtgaaaatgaatcttaatgtctgatcaattttttattgtggtattcaaaactgaaatattaaagtactttggtattaaatatcataaaatgaactataacattaaatatggatattctgaaatcgtgtattttaaaatttcagtactcaattttgacttcattagtgtatttgtaagtgccagtacgctctagaacaatgataaaagaaatttagagaatctgaaaacttaccatgttttactgtactgtttgggattttggaattaattgagtttggcctattttctgtgctgatagcttccatgtggaaacaccaaatatcagtatttctggagcatcatcactaaaaagcaaaaataaaaatctatcagaagtggacagatctccatgagataaaatttattgattagtaacagacttaaatctttgtttcattctgcttttgtcttcgtgatactaagacaggcggccttgtcaaatagctaacgatacacacaagtctatggttttggttttaagtcaatttaattattttccttctgttttctaagctgttttggcaaacgcacagtgaagtcgttgctgtacaagcctcccatattttcacaaagcctgacagcatagacatctgtaaccatccttcccatggaaagctttttcttctagaacaaggaccccccaaaaaagagtctgcttcaaattcccatcctcatgtctttttactcccttagctgagactgacaataaggagaggacaaactgcaaggatgacgtttctatctaaacagatttacatcttaaaggagagagcctcatttaaaatagtaattctattgtctattttttccttaagctttctctttcctattaaaaaaaaaaaaaatgaatagccatcaataagactgagtttcagggaaaaactgttactatagaaggccagccagatgaccaagactcaaatggtttttagaaaccctttatatagatcttgtggtaacaggctccttagggagcatctcaattagagataagttctgttactgtacttaagtccaacattgtttccacgcatctacatgaagagccttatgctcccgaattcctctgggccttggactttatttttatctattctacatggaagacttattgttattatttttttttacaagcttccactgctagtaattattttagtggttttatagataaagatgcaggaacacaattctctttatagattaaaaattaccttttcatattccgaaatcactggagagattgatttgtataccttggttttttttttttttggtatttaactgtggtctagctgctcaggattcatgaaaacaaaacaaaatgttgtcatccttgatagtaatttgaaaggaaaatttcacattcatgttacattcttacagaaccaaataagccaataagcaaaaagtcataaaataagcttaataaaccttcatattaaggcaaagttaacatttgtcacttggcaactggataaaaattcaactcacaagacagaatttgggctgcaatcaatgcttatgaaaaccacgtgcagtttgtgcaagccctgctggatttggcagctctgggagtcagctgtgattcctgagcataataaatgcattggtttgaattctcctgtctgttgtatggggagggttgtctagagctcattcagattcaagatgcactttaagatagaattacaagggggaactgaaggaaagaaaaaaaaacctctcatttgaaatgcttttattggaggatggccctacgaggtgattgttcctctggacatatgtcattttcagaaatgaaaataacattgcctactttggttaagattccacccacagaaactgctccatccttatcagactcagcttcagcagcggatgaaatcttagtcctttatggaacgggaatcatctggtgtcctattgctaaaatagtctagagattactcacttacttctctgcaattatagccatctgatcctttgatattgtggaagggtgagataatgacatgactgtaacacaaatccatattgaagagcccagtgtttaaaattccctgggttcacacaccggaggtttacttgtgagctgatgatacttgtgagctgatggcacatcacagataatcatcaaatatggttatcaacttagtatctggacaaagaataaaacaggaaataacattctattactaactc

SEQ ID NO: 42590 - DNA, 1521 bp, Bovine  19866881145207
  misc_feature (1)..(1): n is a, c, g, or t
ngacccccatggactgcagcctaccggctcctctgtcctgggattttccggcaagagtactggagtggggtgccattgccttcttcatttactcactagaggccagtatcttttctcccgctttgtgactgccagacatgtctccagaatctgccaaatgtctcctgatcactcccagtttagaaccactcatctgaaatgatagtgtttgtcatccaagaaatttaaaactttgaaattttggtagactgaattcacacattggaattccccattttttaaaaaacccactgaatctaaatatgaagctatccataagattatttttgctcttaggtaacagattaaaaattgtatagaagcaggttaattcaaacaattttaaatgctgctgtaaaaggtaagggatctttgtcaaaaattaattcttaagctgacagcatctgggacagtttcactaaggacattgacatataataggtagagataaatgaggaaaggatattcctcacggaatagaggtacagatgagaaagtctcaaggtttctttataaagcactaattagtttaacaggaagataggactttttctttggggaggtgatttctgattggctgtgaaaactagcatagacctgccagcaagttctccctctcagtgttaaaactaggataagactttaagaccagatgatagcagattgagttggccttgagttaaggtaagaccatatttttattcatatgaaaaatattttagagaaccctaagtaagaaatttctgcctgttctctggctcaggattctataataactgtaattgtgctgatactgttttttcagttgttcttgattcttttcattgttttctgtctgtatctctctaggagactgaggatggcattattgcttatgatgattgtggggtgaaattgactattgcttttcaagccaaggatgtggaaggatctacttctcctcaaataggagacaaggcaagataattcttcttactagagaaaggagagggagggagagttaaaggttatcatcttaatcttaaatcctgaaaacatggtttctttaaattttatcaagttgtgctccaattcttttgtgcttacaagtttaatatatatatgaacatcttcctatttaaaagcagtttattcaattagaatagggtctagcaagcttttgttaaaagctttttgaagagttagtgtttaagcattagatatgtcaaaagaattaccttatttaaaataaataatattggtaagaaagttaaaacatcaaagtaaaatcataccaaaggtttttacattgtggttaatttttattgtacttggttggaatgtctggttttctaattgacttcctttaaagaaagtgagatctgtaaggaatacacactggagagcaacaacttgatccttgtgaaaaatggaatgagaaatagaagtaatagttctgggggaaatctgttccatcaaattatttatacagactatttaagt

SEQ ID NO: 42591 - DNA, 1917 bp, Bovine  19866880395207
  misc_feature (1)..(1): n is a, c, g, or t
nccagccacagtggtccccgccagccatgcaggatacagacagcggaggtggtggcaatggccaggatagtgccagtgggaatcgacttctgggcatcccgcaggtccccagagcggttagaaccagccatgatccctgtgaacagaggagcagttaggacaggagccatgggagagcagacggagataggacaccagcctcagagtcatgaacccaggagtctagtcctggcccactgactcgtgtgagagcttgggcgtgttacttggctactccgggatttaattccctcacctgtccagtgggaggtgaactggatcctgcttatgtaatggggctattggactaagaaattccccacatcatgattgactttctccctacccatccactcccaggcagagtcttccctctctgagctcccctttacctgtgactgaggggaagtagatgccaaccagcagggtgaagtaggaggtcatatcgctgaagacatagggatggtccatgtcgatgggggtaccatctgccaggcccaccgagggcatcccacgcctttccacaatcacccccttggtcaggtaggagctccatagattctctgtgggggaaacatgactctcagatatcagggtgccagagctctggggccaggaggcagggtggacaaaaagaagggtcaaaatcaaccagctcttatttccaccaacatttcctaagctcctgctttggaccagggactttgcacatgaatcagatcgagtccttgccctaaaatggtccaatctactgaaggacatatacaacaaagacctatctcagactgattcaatatgtcccaaactggtctcgccacccactcacggcaaacggctcctttcctctaccccttatcttggtaaaaggcaccaccatcaatacagatcagcttgacattgctcacaaccattccctttccccgtctctgtttcaaaaccatctccaactcctatccattattcctcctaaatatttctcaaatacaccccttctcatctttctagtgtttctccactctggcgctattaacttgtagttataactatgataagaacaggcaattctttgtatgtatgtgggggagggggagctgtcccctcacattgtagggtatttagccacatcccagcctctacacaccagaaaccagtaataatccttcagttttgacaaccaaaaatgtctctagatgttgccacctgtctcctgggaggggggcgggggcagcgcaaaacaggcctgatggagaacgagtttgctggcatccaccactctcagtaagaaaaccatcatatctcaccaggactcagcatcagccgccccctaaactccctgactcagtcctctccctgctatgagcccatccacattagcagccggagtgaaccttcagaaacaacaaactgaccatgtccgcctcttactcagaaccctttggcagctcctcatcaccctcagagcactgtccaaactcttcagcatggcttccagggctgaccacagtctggctcatgtcagtctctccatcatttcttgcccctccttcccttgcactttatgccctagtcataccaaattactcgtggttggaagggcacaatatgctcttctgtgtctgcctgcttttaggcaagctgttcttctgcctgtgattcccttattccccttgtatagctgaaagtctcttatttgctcttcaaaacccttctcagatgaagccaggaagcctagtcttaccaccttatacacatgaccactccctcccttgagagaacactgttcattgaaggcacgtctacacatgtcataatttatttgctattacatctgcctctgctattagactccttgaggccaagaactgtgacttatttatg

SEQ ID NO: 42592 - DNA, 1422 bp, Bovine  19866880417829
  misc_feature (1)..(1): n is a, c, g, or t
nccccgatcggctgatcccccgagtccgccagtcagaatgaatgactgtacctttgtgttaattgtggagcccaagccgcacgcggaatgctaatagggccaagtgggagggggcaggtgccagtctcgcctggatgctgggcaggaaaggaccctacctctggctgtcctcctcaacagccagcagcaggatctggctaacatattcatctgagctccaccctcctctgctcgaggaagccccatggttcccatggaccagggccaggtctggactcctgtggctgccacacaggacctttcacatctcgtcctgtccatcactccagcctccttggttgcattcccacaccatgaaccttgtaccgctcaaactcctattcacttattcattcattccttcaacatttactgagccctctgaagggtgcagggggatgaagctgtgaacaagacagacatggtccctcatctcatggctttaccatcaagcagaaaaaacagacattggcaggctctggagccaggctgcctgggtccatatcccagtttggcactttactatctgtttgatcttttaaaaaaatgttttttattggagtatagttgatttacaatgttgtgttcgtttctgctatgcagcaaaatgaaccagttatacgtacatctatacccccttttttaaagatatctgtgtgatcttacagcacaaataacctcttctgggcctcagtttcctcctctgtagaatgggaacaagaagagtagctacctcagagggttgtttgagcaattagttgactaaaaacatgtgaaaacatgtaatacagcatcatttactactgagcatgaagttctcaataattgttagctattattatcatttcaactcaggatagcattacaacaaatgacaatgggacttccctagtggtccagcggttgagactctgctcttccccttcagggggtgggagttcgatccctgattgaggccaaaaaaaccccaccaaaaaatgatgatgatgatgaaataaagttatgggggagcaagcagggcatcaaacgaggggactggtccagtcaggggctggggaagggttccctgaggatgtctgattttctcagacaggagagctgagtgggtgttaactgaagcagtggaggtggggagggagagggcagagaagtggagggaacagcaggggtaaaggccctgaggctggatggaacgcggagtcgaaaaatcggaaaggcagcaggaggctggcatcaggagtgatggggaagcagggctgaaaggggcctggagaagcgggcagggggccacaccatgcggggcctcgtgggtcttgttaaattgtaaattctgtcctgagagtaaggaagggggaagttgttgaaagcttctgaaacagagga

SEQ ID NO: 42593 - DNA, 1452 bp, Bovine  19866880429526
  misc_feature (1)..(1): n is a, c, g, or t
ncggccgggtgcccagcaggcatggaacgcacacagcagtgggataactgtggtttggagaactgagtgggaggtgacagtcgtgtcagaggctgtgagcagccgcggctgctcaccaccgagctggagctaattatacacgcacccagggctgaccgtgggcgcggagtagaggcagaggggtacagctcagccgtactgctggtagggacccgtgggaggtggtatttgtcactgcacctgcagatcggagccgggccctgcgccagggcctcactcgtgctgcctcccttttacacgcacagcaactccgatgtaggttttaaatgggttccctgaccgtgcagctagtgatgggcagagcaaaactccggcctgtgcctgattgattctaaagtcaatgctttaaccgtcttgtctcagggatccttacaaccccctgagggatgggtattttgttgtcccgtttacagatgctcaacgaagagaggaaataatgaaactgatactcagcaaagagactaaataaggactctcatttatatggcacttcacactctgcaaagcatctgaaaggcagttttacatatgttgtttcatttgatcctcaaaacatcttggaattgaagatgacctttattagtccccttttactggtgaatacaatgatgctcatggaggttgtggcttagtaatagctaacgtagctacagcccttgcagaagtcatcagcaaactttccataaacatccagatagtaaatgcttttggctatacagcctctgtcaaaactattcaactgtgctgttggactgtgaaagcagccacagacgatatgtaaaccagtgagggtggctgtgttccaatgcaactttatttacaaaaaataggtgttgacctgtggctgtacttcgcccacgccttgcctaccaaagcttttagtagaccatcgctttgtgaggtcttcacagaagactgttattattcaggctgtcctttttaattattaatgaattactgtagacgttatcatcctcatcgttttacaaaggagaaactgaaggtgtagcaaggttaaggattatatttgaggtcaactcaggaactagaatgcagagttccaaagaatagcaagaagagataagaaagccttcctcagcaatcaatgcaaagaaatagaggaaaacaacagaatgggaaagactagagatctcttcaagaaaattagagataccaagggaacatttcatgcaaagatgggctcgataaaggacagaaatggtatggacctaacagaagcagaagatattaagaagagatggcaagaatacacagaagaactgtacaaaaaagatcttcacgacccagataatcacaatgggtgtgatcactcacctagggccagacatcttggaatgccgatgtcaagtgggccttaggaagcatcactat

SEQ ID NO: 42594 - DNA, 1142 bp, Bovine  19866880430726
  misc_feature (1)..(1): n is a, c, g, or t
ntttagaatcttagacttaaaaggcaccattacacgtgctttagttccacagtctcgcctcgcaggtgagaggaaaatcgagacttgggtgaaagggacacgtcatcacccagacactcggcgacggagctgtgaccaggtcccgagtcctctggctctgaacccaggtgctttcttcagcagggaccggcatcccagcccagcactcttcctcttgcacctacacggtctgctgattttaaaaagaagaaaccaggggcttccctggaggtccagtggttaagactctgtgcttcactgaaggtgacgtgagttcgatccctggtccgggaactaagatcccatatgcctcactctggccaaaaagttaaaacaaagaagaagaaactaaattaaataacaaatggtcttagaggccatgttgtgcatttccacatgtatgaagtatttatattaatacaaaaggctgcaggacaatccatggtgatacaagtcagaaagaagttgcctcttggagggctggtgggtgaggggctgaccagaaagaggtaggagggaaatttggggggtgtgaaatgtttggtgtcttattttaggtaggtggttacaggaaggtgtgtgtgtgtgtttctgttttttgtgtatgtatatatatgtgtgtatttacatatgtatacacacatatatacataagctctgcattgtattttatgtaatttgtatctaaattaaaatggtatgacaaggatacccttagagaaggataagggtgtcctggggatccagagattcatggtaccatgcctgctttgctctgtcacctgagcagagcatctccaccaggacttgggcccgtttcttttcagaggtttgttgtgtgtctaggcacatagaaatcacatgtgagaagttccgcctggagctgcagaagctgtgaaagctctcagagccatgaggccagcccacttcacctttaggcctaattcagttgcagcgagcagaaattcaagccagctcagtggggggtgggggcgcagggggcgcgctggccaaagtcagctccacgtctgtccccttcaccgcttttatgctgggtgagctcgggtagcttagcgcactgagctgcacttctgtcaccttca

SEQ ID NO: 42595 - DNA, 1625 bp, Bovine  19866880444089
  misc_feature (1)..(1): n is a, c, g, or t
ncctggagtaactgtgtgaggggtaggtgctcggctttttacgccctttaagatacataaaaaggctgtgagtactgcctggcagacagtgcctagtgcctattttttgttgttcgggtgttgctgatgctacgtagacacccttatgtggactaccgctaccttacaggtgagagaacccgagtgcagagaggttggtcaataagcccaaagtcacagagcagcagttactggagctgggacccctcccagaacacaggcgcagcccctgggttccacggtgccactccctgagccccactggccaagccccagctccagctcatggtgagcgcacacaaggcaggtgggcccgggaggcagtaccctctcgctgctggcacagctcccggtagtgctgccggagcttcaggatgagctgggagcggagcagctccacctcggggtgtggaggcagcacctccgaaggcccccggtgcttgatgaccgcgttggtctgaatgtccagatcccagtacaccctgggggcacagacagagcaatgaggaggcggacgccctgcctgcttccctctccgctccccacacacacacagtcctgggcaggccagccatccaggatgcgcagcagcaaggactcactctgtgggtcggaggagagctgcctgctgtttatcttcaggggacgtgccccagatcttcagcgttggggttcctgggatgctgggggagctggggactgacgggcccgtgggcgtcatggggatttcaatctggagtaagaatcaaaggtctgaggtcaggggagctggccgggctgcaccagtgcgagccccacctcctgactgactgccgaagcccagcgcacaggggccctgccagctgcctgcccgccccagtccgctgacactcaccttgggcttcttcacgccgttgccgctgggctgctcttccgagagctgccgctttcggggcttgttctcagccaggggggtttccaccaagcttgagtcttggggcaggggggtcgcattcagccctaaagggtccgactggtggagggagaccagcagagttgcaaccagggccggcggcttaagagcccccgtactcgagtcctggccccctcccgcccctactcctactgcttggagaagagcacaggggctggggtgcaggacgaacactgggctccgctcctgcaactgtgcaccccaggccagggccttctcctccctggtgggccgtgctgagccctacctcgcctctgaaagcatgatttaaggggtcaacgcaggtgaccagtttaaaacgccgcctggcatgagaaccagaatggggggattccctggcggcccagtggctagaactctgtgctttcactgctgagggcgaggctttgatctccagtcagggaactaaagatcctgcatgctgaacagcacggccagaaaaaaccagaacgacaggaataaaggggaaacttaagaaacacttggaactcctgtggtgatactgagagtatgagtgtgacggcggacagggtgcaagtcctgctctgcctcttactgctttgaggtcttgggccagtcccttcccctctctgagcctcagtgtgttcatctg

SEQ ID NO: 42596 - DNA, 1486 bp, Bovine  19866880452222
  misc_feature (1)..(1): n is a, c, g, or t
naggcacagtaaaccttaatttgccccaaacgtataccaagtggcagagtcaggattcaaactcaggcagactggctctagagtccaggtttctagtagttacactctaaagcctcttgtcatccattccactcagcaccatttacccgtccctctaatggtatattcattaatccacccatatattcattaatgtatttattcactcactcattcatgcctatgtgcatgtattcattcatctctatgttccttttttaacttcttccccctctctattcacccaggtaattaattaatcaacttattcattaattcacccattcattcacccagtcccgggcttgaggagggaatgagttgcctcaccttcaaagagcatcaccctctgctttgtccttcctcccacaactgttgattaaactaggtcattggacagggaagccctaggctggcagcaggaagagggcctgcctctcttttcttggccttgcacctgagctcagagctcatactttcctcccttgcccctctcccccattccacccctgcctgcccacagcatgagagcgacatctccgcttacacctacgagaagaccttggtgatggagcagcgttcccagatcctcaaacaaatgcatttaaccaagaatgagcgggagcgggaggtgaggttgccctagctgggctcggagtgtctcaagctgctgccagctctggggctgcacagatttgggatggcccactcctggtcactggcattgctgcctcctggcactggttccccagcagcaagggtgcacgctgcagctgcctgtctccagcctcccagctgagatgcagaggggctttggcgagggtgacagatctactctcgacgtgacttctggggcccaagggagaagagtggaagttaaatgtgtatggatgatgattcctcaggggtgtgggctgccagtgtgggggacaaggtatcatgtgatagacccttagagagtgagtaatgagtggatatttcaggatacagctgatgatgagaactggggcaaacctcctagggtgtggatggtgggttctcaggggtaatggtgctgagttctcatggggtaaggctggctgtaaggtctctcccgtgtgggtaacgtgggcccaccagccctctggtatttggatgaaagccccaccccagtgagtggggtccttagggctggggacagaagagctctcagaagtgggtgacagtacaattgtaagaagtggcatgtgcactgaccagtcagaactggccctgaggtagagctcagctgggccaggtgtcaaccctttggtcgctggagagtgggaaggccaggggtactggagaggagttggagtggccatatcagtggggcaatagctatttggtgtggaagcatcgcagtattttaacaactggtacaggtcccgaaagtgcacatccggctttgggggtagctctttgcagg

SEQ ID NO: 42597 - DNA, 1412 bp, Bovine  19866880473247
  misc_feature (1)..(1): n is a, c, g, or t
ncagctgcctgcaaggagaggccataaatcctgagccctgggtggtaggagggagggaacccgtgtgtggggtggtaaagggggcagctaagtggaattgaatcgtgtttaaggaggaggcccacgccttcccccgggcctgtaatttactgcgaggttgacaagatgaaagcggaattttcagtggcataatcgctgggacctcagggagccgcgggagatgagccgcgaggcaggcagtggcagccaaggctttaagcgagatctggggcgctgatcccgctgtgatcacagtgcggggcggcagaccggggggcacagggctctgagcagggccggccgcgccggctaagcccggggctcaggccacgtcttgtccgctgtcatctccagagccgaggtcaggccccgatttttcagccaattttatgtagcggaacgtaccgcccaggacagctgtgacagtggctgccaacagcactcagctgagcaccttctccagcattgccctcagccaaagggagctgtccagctcaaggtcatgcccactggaggggagcacaactcatgtccaatatctgataggtgcatggattcaaaggtgggaccccttggctcaacttggagcatcccaactctggagcgcccatggaagcagctgtggcctctgttgagacagcctcacaattcaagctctccctctgctcagccttgcctctctcacccctttcctgtgttcccttcagctctccccagtaaacctcccgcaggcacatctctaccctggagcctatttccagggaaccagacttaaggctttccctcatcagtgggcttgttgtaaaacagcttttgcgtgtagtgttggaagagcatcacagagcctccttttcctgatggggagactgaggcccaaagaagcaggaaacttactcaagaacatttggtgttaggggcaaaagctgggacaccagactcccagcccagtagcccaactcctccattttatagatgggaagactgaggcccagggagttacaaggtacaggggagagtgggggcatggaggcagtgtgctagggtgaaagctcacagctttgtagctggatcctagccacacggttttgagcagaaccaccccttcttaagtgcttctatttttcatcagtaactagaaagaccagttcccgtctcaggaggatagggtgaggctcgcttaagtaacaataagagctggcactggctgtgtttggatgagtccttcacacacattttgatgaaccactgtgaaaacatgtcgctcacagtaggtacatgatgcttagttacacaacaccctgaccacctggtccaggggctccaagatcagcttcagaatctgagagtgggctgtgccagacctaggacagact

SEQ ID NO: 42598 - DNA, 1216 bp, Bovine  19866880477133
  misc_feature (1)..(1): n is a, c, g, or t
ncgcgctcgggcccaggtgtttgatcctggctctcaggagtagatggtgatgacctcgcggccgccgccgcggaccagcatcacccggtccaggcgctcggtgagaacctcgaggaattccatgtctgagcgcccgtcaaggagaaagaccgtcccctttcctccccccatggaatcaggctcccgttaggcgccagcggaacgccgggctcgcgtccctgtccgaggtgctgattctgaagccgacccggctcagcccttcctccccagggctaggaactaagacccctgacgtccgcctccctccttcctcccaattttaagcccaggatacagttttcgtcaccgttgcggttgcggggaggcccaggcatgttgagcaaaacaagcttggcatcctgggatttcttgacaatgacctcgttcagccgcacggcggtgtgcatgcgccgcacgttggactggttcctgcgggaggaagccagggaggaggagggcagtaaggctaggagagaggggggacttggatccagtcgccccttccagcacctcccccgcccccagcaccgggctgctgggatctgctccttacaagccagggaccaccaaccctagaccactccaagctgggctaccccagaggtcaggggcgcgagttgagggttcatagcagagtgagaaaagtagggaacctggccaacctaggagagagtttaaaaattctgaagcacttacaagttctcccactcccttcaggaaacataagagaagcaaggagaggaagaaaaaggagaagggtcagaaaaagcaggagaagctgaggacttgagccaccatcaacaccttgcgtgcagacgactcctgttctcccagccccccagccttcacctttccactgcctgcacctgcgcgttctgacccttagcaatcaagcccaacctgagtcctcagacagagcaaccaaggagaggtctgggctgggccttctgactaccaggccaggaccccttccactcatttgctctccacggggagcaaagaccctgtaggctcaccccagaccttagcccttagcccccagacccgtacggcttcatgctggaagaagtccttgatgccctcagaggagacaggactggggcccttgttcttctctgccaccgacttgtccttggtccaggtgagatgcactttttctgggatctgcctcgccctt

SEQ ID NO: 42599 - DNA, 1069 bp, Bovine  19866880490988
  misc_feature (1)..(1): n is a, c, g, or t
ncgcagtcaaccacaagccactcaccttttctccctgagcctgctcaccggtcgcctggatcccccaagggggcaagagctggcccaggaaaggctgcctgcagaggacagatgtgctgggcgtgttgagagcctcaagtgacccgggcctgtgtctcagatctaagtggaagcctcggcctttgctcagtagatgccttgcccttgcttttgccgtcttcatgagggctcacgcggccttgcctggggccgatctgctgctgctgctgctctgacacctctggtctccaaggccactaggtcctcttgcccacgcatttgcctgggcagagggtcgtggctccctgcaagctcacagtctctcatcctggcaagtcagagacacgcaggccgagtcccaccctctgccgagaggaggcctgggcccagactgtggtgcggtcactagagtccgctgctctcccctccacatttatatcacgtccttgcttggagagaaaactcccacctaacctgaacagccgcccttcccgtttgtgctccttcagccttccagacctcgggaggtttgccttccctgccccgcctccgccagcgctgtggtctctgccattggccatgatttcagggagctggccggggccctcggaggcccccgctgtgcccatgaggcttccctggtgctgcagcactcgtaaaccacacgcacgggcaccgtggcattcagtattggtagcctagcatggtggggactgcccaatgaagagtgtactgtatattttctttactataggccatacttctacagacatgtatatatatttatataagatctacctatcctagggtggaatgttggagggaaaataaaatgggaggccaaaaaaacaaaacaaaccaaaagtcaacacttgcagttgcaagccacgattgtaacctgagagtggccaggagcttcctgtcagtaaccatgttttcaataaatactctttcatgtacacaccggttcccattaacagctgtttctctgtacttgctccctgccccggggaactttcaccttgacaag

SEQ ID NO: 42600 - DNA, 556 bp, Bovine  19866880528862
  misc_feature (1)..(1): n is a, c, g, or t
nctcccccttgagccctttcttgtgtccctccttcagtcggatgggactgcggactcggagcactccagctaccctcctttccatgctttttaaggaaagtacctgttgagtccccccaaggtcaacaacgaggtccaatcctccaccatgttgtctggggacagtgaattatatgcctcgagacatctgggtgccggaccagtctgcctggccctgaccccgatcctccaaaaccagggggccttctatcccctgactgaggccaactggagtctgtccaaccgggcggtggagccccagctgcaggaggaagagcggatggtgtacgtggccttctctgagttcttctttgactctgccatggagagctacttccgggcaggagccctgaagctctcgctggtgggggacaaggtaagcccgggatctgtttgtgaggtgggggcctgtgatgggccttctgccttacccccaattcccctgtgcaggtgcctcatgacctggatatggtgttgagggcctcctactttgggagcatcgtcctcatggtgagtg

SEQ ID NO: 42601 - DNA, 2480 bp, Bovine  19866880544411
  misc_feature (1)..(1): n is a, c, g, or t
nccttcctgtggctcctggaagatgtaccgagactttgttatactcacagggcctgtgctgagaaggtgggactgggctcccagaatccattgtggccaaagtgggattggattgtcagtgagacctgcggtagcgccagccaggcccgccaagccccatccctaagtctcttgactgcttcttgagccctccctcttcttgggatttaaaaaaaaaaatgttcatttcatttgccttatattctcttacatttactagtgtgccttctgtttacaaatctgcaggcgagcctatttgtcagatgaactcagtgtggagaggagagacttctagttttgtccttctagaagaagaggcagtgtcacttccagaaactgaactgaaaaaccaataaatgatatctcagctgatctagattgtacctgtcattggcttgggacattgagaacttcctgatggctggagacacttaggcaggagtgcagtgaccatgtgtcaaggatattctcatggggactgagcagagagattaaattacgagacttggaggtcctttccgtgtccctgagtctctgcgtgtgtacagggacaaagtgtacgtcaggggaacagcacatggcgagcacacgaggtcccaggatcaggaagaccctctgctcctcacactcagcccttccatgccgaaacccttgtttctaaaaacaagggattaagttcttaggtttaaggaaacacaattgagtggatgctgtcatttgaaatcgagttatgcattatccatgcccgggactccctggcaccctggccaacacagcagacaccactgtcacctgggggcggctgtccagaagtgggcagcacacctaagcagggagagtcctgggcgggggccgggcatctgaaacctaagccttcagccctcgcgggcttcctcaccgcctcgccctctctggctctagatcgcggggtacgtgagccagcccatggtggacgtgtccatcctgcagaggtccctggccatcctggagagcatggtcttgaacagtcagagcctgtaccagaagatcgcggaggagatcaccgtggggcagctcatctcgcacctccaggtgtaagtgtggccctgccacgccttctgcccggcccgccccccagccctctgccctcctcccgccgcacctgtattcccaggtgctgggccgcttgtcactcgtcacctcttccctgctactcactgccagaattcctcccataattcagagctggtcacgtcacgctcctgcctgacaccctctgtaactctcttcacctcttaggatagcatgaaactgtcccagtccctctctgtatcactatggtgccagacagaattagatgctttctcttctatgagcgcaggagtccctgtttgtatctatgacgatcatatttacatgaaatactgtattttttattatctgtctcccgttttaaacgttgagttgggaacagggaccagttttgtatcccttgttttaagtagaagctctgttagtatttgtcgaatgaactcttgctgaactagcagcgtgcagttgagggtagccagaagtgtcttgcagagcatgtgttccaattcaggctctactgcagacgaggtctctgccctcggcaagctaactcttctggcttcagtttccgcacctctgcgctggggttaatccctcccacctctcaggcttgggaggatcaaaggagagaaaaagtctagtgtagagacctcacaggataggtattcattcaggagaggtttttttgttgttggtcattgtttttttggttttgtttgttttttaagtttatcccatcctaagacatttaacggatagtaaacaagatctaaagacagatgaacccttaggaggctgttctcccttcccccttcttttttcttccctttctgccattccacataatttaaggggcctggacttgccaaaagcaaggatgctgatactgctgacaccttcctacctgctgcccccttccagcatgtgggttgttgactgaatacccttccggttcccggggaagcgagaattcccagactcggttgtttttagcagccttttcttcactcagctatgctctcagcccaaaccttcccacgagcccaagtgaaaaaaaaaagcacaagaaaatttgcaactctgatttctttctccttgtcacttctctaggggattcttcagcctctgttttcatgccccaaaagccaaaaaggttgattgaagtgaggggacatgatcaaccccagatgggagagttctgattttcctgacctcagagttacctctgtttctttgtttctgaattggaatgacccaatcacctccttagggaggagagaggagctaggcgtttcttagggggtcagtctgtgaatattttcaacccattgctgtccctggaagtcatgtccgctgctgctgggctgagg

SEQ ID NO: 42602 - DNA, 1979 bp, Bovine  19866880552354
  misc_feature (1)..(1): n is a, c, g, or t
ntgtccgtgtgtctttaaattcaccttctcgcttgtttctcttgttctctgtcactctgcacatctctctccggacatctctggctctttcccgtctctccatctgtcgccgtgtcccttgctttcctcctgtctccacctcgcatgtggtttctctctttctctgtttcggtctcgcccctgactgccgggcccaggccatccgtctgcgggtgcaccccctgtacttgatgatccccggtaccgtcggctgctcctacgccttcatgctcccagtctcaacgccccccaactcaatcgccttcgcctctggacacttgctggtcaaagatatggtgagtgcaggcgtattccagcagaggccccgaggagtgggcggatcaggggcgggcaaggaaccggggcaggactcccaccttcccctccccccaattcctgaacaggtcattctgagtgggaccagcaaacccctgggagggcccagcccccgactagcaaacactctgggatgattgcttaggtgatttcaggaagcgctgacttggccactgctttccaaagtttgccttggagatgagggccttcccctctctctgccccccaccttgtcttctgacttgtttggccaagcgctctgggccgggcagcatctctaggggagacggagcagcggaccacaccagagacataggggtgcacgtcagtgcccggtcacctggagaggagacagaagccgaggacggtggtgtgggatcccagcttttagcaaggctctcctccaagctgagcctcttcctccgcctgcttcctactgcccttccccctccactggccgcctcggatgatcgcaccgagcagttcaggggctgcagaccctaaactggttctatagagaagagggatctgcccgactagttcttagctgatggtagggtctccagggacggagaccccagcaggacaaagggagagaaaacaacagtgagcggcaggaagacagagcagagaggcagcagggacccggggagacagacattcattcattcgctggttcattcactgtacaagtgtgctgagcacgtccgtgttccaggcgcggaggtggtgccgggtaggggagacacacacctgcctccaaggagacaggaaatgcaaagcaggggggatgtttaacgatcaaagcaggttgttttcaagttgtgtgatgctgggtcagccaactgctctgagcctcattttccccttctataaaatgggaataataataagaacaaccctaaaagggttgctttcagggtaaatgacatagctctgtgacaactgcatggcacaaggcctggctcctagaaaccactgaacgaaaggggatgttatcagctcctcgagggtcagcctaggtgtgtaaagatggaagcatcttgggtatcaaccgtcctgggtttgcgctccccctccacctctccccagatgtgccatctggcgtgaaagactttctgactctcagtttccccatctgtataatgggcctcgagtagaaccctgcctcactctgggctcccttgcaggtgcggacgggactcctgatgaacctgatgggcgtcctgctgctcagcttggccatgaatacttgggcacagaccatcttccagctgggcaccttcccagagtgggccgacctccacttagccaacgtcacagcactgccatccagcttggctaacggcacatataggaccctctgagcccctctcaggaactctctttgggctgggccctcccaggggtttcacccatcctctgctgctgggaccccacaggctgatcaagcaattcttctctgtgatccagtacacagcaagcaagggtgacttccagcggtccactcgggtccacagtctcgttatctaggataccttctcgtttcccacacagttcagggagccacttcctcccagttctgctgcctgagaaacaagctc

SEQ ID NO: 42603 - DNA, 795 bp, Bovine  19866880553123
  misc_feature (1)..(1): n is a, c, g, or t
nattagctgctggttgctatggccaacgttgtcatcttactaccgtgaagtggaagcgaggtgtctgaggccccattccttagggagaccatgcagaggtcctgcactgaccccagttaggtttgacacagtccagcaggccagggtcctggccaagtggccacagaggagggaatgacgtaggccaccctccctgagctcgtacagccccgtggggtggggggctagggcgtccctttcagcaccaggttggatgcagggaccaacctacagcataaagcttccggagactaattctcttcatttttcagttcctgttgcagacattaaggccattgtcactgggaaggattgtccccacatgaaagagaaaagtgctctaaaacagaacaaggtgagtggagaggcggccctgagtccgagctgctgttccagtgatcctgggcgtagtcagtggtggctgctttctggatgcatggcctcccattctctgtctctttaaactgaccctgaatgtttcattaagaacaatctgaacagacaccaaagtagatagaaccctcatataggccttgcccagcctcatccaccatggcagtgtccacatccacttgtccctcttcacttactactttgaagaaaatctcaagtgttatttcatcttacctgtaaacatttagattgtatctctgaattataaggactctatttaacataattataataccgttttcacatctaaaaggaaataaaaagttgttatttagaatcaaatattccactgatagttgattt

SEQ ID NO: 42604 - DNA, 2459 bp, Bovine  19866880572554
  misc_feature (1)..(1): n is a, c, g, or t
naaaaaaggaggctcttgtgaagcactttgtgcaaggcctcccagtaaggacttggttgagctgagattcaaacccaagttggtctgaatctagaacctgagctttttaaaaattatatttatttggctgtgccagcatttgggtgcagcatgcgagatcttcactcttctttgcagcatgcaggatctttagtcacagcatgtgggatctttagcagcagcatgcaaacttgtagttgtggcttgtggcatctagttccctgaccagggatcgaacccggcccccctgcattgggagcgtgaagtcctagccacagaaccaccagggaagtcccagaccctgaactcttaatagcaggctttcccagccaggggaacgtcaggacacagaaattccagtgaaggaggccctggaaccagtcactggaaccagtggaaggagccctgggctgggaaccaggggacctgggctgacatctccacttggccccagattcactgtgcgatactttacttctctgagttcaatggcaaaatggagataataatagagcctacctttaataagcgagtgtattgcagagctatttagaaaagcagtgcccggcacatagtgctgagcaaaggcagccatccttgtggatgaacacacaccagcctcccaaaactattggggtagcatatgcctgctccacggtctcaagactgtcagttctgaaagcatcatgtgcaaggccctcatgtttcaggtggggaaactgagacccgggaggcagggccgggacacagccccggggctcctggaggcctccctgctctggccagggggacggttctctttccggtctcctttcgccctgtgtgtctgcttctgtccatccaggcctccttccaggaggaggccagctggaaggctgaccctggcagccctcttttttccagcagctggcaggaacctgcctaaataaatgcaaagagaccccccctctggaagctgctcttgccgcgtccccatccaaatgttaattttgccagggccttgataaatcttcctgtcgcctccacccacctgagacatagatttcatcttattgagaggtgacacttctgccctttggtaccagctatcaatttcaggcggcgcccagagtggagagagatgaagaaccaggttctgctaaaccgccttcagccaccccatcctttccttaaacccccatggggccagcccacctgagacattgtcacctacccttccagaagaagtactgggaccccaccactattgcgtggctgtcagcaattccatgctcacctgcctgactttcaactgccaacacctgaacctcttttttttttttttaaagatatgtgttttgttcatatttttaatatttatttatctggctgcaccaagtcttggggcatgtgagatatttgtctgtgggctgcgaactcttggttgcagaatgtgggacctagttccctgaacagggatcaaatccgggccccctgcattgagagggaggagtcttagccactggaccaccagggaaatccccttttttcaggccttcagagctagtttgctgcccagatggcagactggaagagctatgggataacgtccacagagtagctctgaattactgactctttggagctggagtttaggtacctcagctctctcgctctttgtggggatggatactcaagtgtccacctgctggctcccagaattccctaatggaggtaagctccagttgcccgcagtggtaaaaggcttggtcatcaccccctcattggctctttcccttctcccctgtcacttcccaccctcctgctcctgcttcctgggatgacctaccccagtcaactacttgaccttgaatccttttcttcgggtctctttccacaggaacccaaactaagatgctcatgaaacctttcttagcagctcaagatgtgaagcactgtagttagcaatggagatataggagaagtctgacatttattgaatgcctactatgtgcagggactgtgtgtttcttactcctggatcaatctttgatgctaactgaatgacatctctggaaagctctgtctcaattttacagatgaggaaacagatgctcagagaggtgaagtcacttgcctaaggtcacagagccagcaaatgagagtcagtatccaaactcaggcagcccactctcttactcactagagagagacatgaaaaggagccagggtctgtgtgatcaacaactcagttgggagaaattctcccaggggtggggcaggcagcctcctgcaaggtgctgaagacatcataatcagtcagttcagttcagtcgctcagtcgtgtccgactctttgtgaccccatgaatcgcagcacgccaggcctccctgtccatcaccaactcccagagttcactcaaactcacgtccatcaagtca

SEQ ID NO: 42605 - DNA, 3955 bp, Bovine  19866880645803
  misc_feature (1)..(1): n is a, c, g, or t
nctggggacctttctgaggcccacaagccccaacagtccgccacccctcgggccacgagcacccacagaaacccacttgcacaggtcccagcggggcagctgctcaggaatgtggagcgccttccgcacgtgagggtcgttgaggtagttggaggcggccgtggtgttggtgcagggggggtccaggtgcaccttctccccagaacgcagcagcgtctgggaggggggcacagagggtcaggatcttggcttccctgtcccgctgtccctccccgtccctgctgggaggaagcctgggcccttgcacacctgatgccacacccgcttgagtggcaggcgggtgaagatgttgcccagatcctggaccacgacagtgtccttctcatgcctgcaagtgcaatggggggaaatgggtgcctgggcccccagatagggctggggttggcaaacaggatgcctggcagggcctaccttacgtggctgggcacccccccagcacatggagcatagaggttgtagatgttgaggccggagctggccacgatgtgggacacttcctgaagctgcaatgacaccccccaagctgccatgctttacagaatcctggcctcccaccacctccccaccagcgccccaagactttttttttctttctttgggcctgttatgtgacacgtgggatcttagttccccgacggaccagggatcaaacccgcacgctctgtcttgggagtaaggagtcttaaccattggaccaccagggaagtcccacatcccaagatttattgctcttctacttggcctggtcattatccttcccccacctcccccagggaaactgagcctcagtggaaggaatctgctagtcctgggtccaaatccttgtgcctctccttcctagcactgtgacttccacatgcttggcctcagtttccttatctggaaaatgtggataatacgatctccctcgaaagggacttctggaggaggaacaatctgcatggccatcactgagcacagccatggcacatcagacgctggatgagggaaacgccctttcccctcacagggagaccacaggcagtggtgtgggaccgcacccacactccaaagcatctgccttcaggcgggagaaacaggctaatcccttagtcaggaagatctcctggagaaggaaacggcacccccccccccccattcttgcctggagaatcccatggacagaggaggctggtgggctacagtccatggggtcacagagtcggacacaaccgactaaccaacaccaagcaggctataaaatgaagggggtgggggatggcaggatgggggctgtcgggggtggcgcagggcgggggcagaaccgcacattggccacgcattctggctctttgttgtcgtggaagttacatttgttttgagagcaacagtgcgtctgcagggaagaccagagcctgtaagagatgaatgataattgcttaggcccatggtgggccagagaaggcaagtatcccaccttctcaacttccccatcagggcttggacccaaaggacctgtttcctggggacaaagatatttatcagagagcgtggtatgtagctcccaaacctggctgccctggggccatcctgccagccgtccttcatttctttacgttctgatctttacatgaaagatcctttcatctttccacaccaaaatccttctagcaaccccatctcacccacctcccccgccccccaacttctgctcataaaccagggcaggacccgagatagcatgcgcctggaggacagacctgagacccccatgacccgccacgcccagggattgcccagtggtcctctcccatacctgttccccagaaggccatggtagtaggcgaaatagaccagggagttgtcattctgctcataggaagagagtccattgcccaccgccagcccctgtgaaacacccagggccttcagctcatctggacgtgggccagaagagcctcctttgacctccacccaaaccttcagcagtctggaagctgaaacccagggtggtttgagggagtggttgggcgggggaggccactcagtgtaaagaatggagctggcagcttgatgagtgagcttccggtcaggggaggcacgtagcccagaggggccagcgagtgcaaggggtgtcatgaaggaagagttggacggaggagctgatcttctgctcgtagagcaggggaggcaggacctgggatatcacatgcctggaggagacctgccgcaggggaatgcccaagaagtgggtggagagcggacctatttgaccttgctaatcacaagtctaggcctccctcctctcctgcagcctccctgcacctgaagattcatgctggggtcctgcatgaccagcactgccagagttgggatgtagatgccggcatagctctcgcccgtcaggaaaagctcattgcccttgtattctgggaacaggcagaagaaatctttaagggcttcaaaattgctctgggcgacctggagatggcaggatagagggaatcagaaagtggtggtgcttgagctacaatctcagagataatgacacccacccaccctgtttgtgcaagagcctgtgacttgtccgagaccacaccccagagctggtgacagagccacaaatggactccaagaccatgctctttttctccttgcatcatgccaaccagggagactgagacacgtgggtggacactggactcacctccgtgtcattggtggcataagacttgtcatcggagtaagagaagcccactccagctggggactcgaggtataacacgttggcaatctagaggggaagtggaaatgggttgagggggctgttcccttccccatccaactgctgagacacccacccaggacccaaaggggcggcgataccaggttccaggagtaggggttgtactccagtgtgacaccatctggctggatctgtggaggaaagagatggctaaattcccagagtcagctgggtggtgggtggagtgggggaaggtcatcctgctgggtattgcacaaccaggcaaaaccccctgaggtatgaaactgtcaagtcaggggtatggatgaagaaaccgaggctcaggaaagggacacattttttggaagaccacaaagtccttttctccctcttcccgggccttttcctttgggaactgtcccctccctgcccctgaccagggggtgaccccgctgctctccactcaccaggaaggggccgtgctctgtcaggaggccgtcaagggagctacagcctggccctccattgagccacagaaccacaggactgctcttcggatccttctgggactccacaaacctgggggccagtcaggctagggtgggtgctggtgcgggggactgggtgcagctcagtcttccagccttccctactcctggatttcctcagggatttttttttttcttcttcttcttcttaatctcagtttgacggcagagcatgcgagttcttagtcccccaaccagggatggaaacccagtcccctgcagctggaagcactggagccttaaccagagaacccccaggtaagtccgatccctcaggggtcttaaagacacccccccccacacacacaccatcatctcccctcacggtgggcattgcagtgcccccctcccaaccccgtccgggaagaaaaggctgcagaccagtagtggaggcgcttggagccggagcctttgaggtagcccggagtactggcggaaagaaggctgcttggccagcccgggcaggaagcagatctcgtcctggtcgggggccccttcgcccccgggcgcgcaggcgagcagcagcagctgcagcaggaggagaaccggcggccacagcgcggctcggaacatctgcggcaggaagcgggtgccggctgttgcctcgcccgctcggtgctcg

SEQ ID NO: 42606 - DNA, 3343 bp, Bovine  19866880662739
  misc_feature (1)..(1): n is a, c, g, or t
ncatttagaacccagcaggagatttccatctctggctccttaggctcttgctttgggcccagagtttttctgggcagagccgaggctattgtagaggcactcacacaactaaagaaaataaatgtccacgaatttcttcttcaagaaataaagattttatttgtggacactgaaatttgaatttcatgtcatgttcacgagtcagaatatatatatatatatatatatatatatatatatatatttatttatttattcttttcaaccatttaaaaaatgtgaaagccattattctgagttcagggactgtacagaaatagccagccagctgggtttgacccagagactctaattgctaacctttgccctggactgtcacttctggcagctgtgtacccagacgtggtaaaagctcagacagggagagggaagcagcaggatcctgtggtttgtacaatggggctgtcagtctcaggagggccccgccttcaggccactgatcaccaggctccagaccaccgatgccccggccttgcccgccttacctttaaagtcaaaccaccacttgagggacggcttttgtgacgggaagaagaacaagatggtgacaaccgacacgccggtgacagcatcagaaatgaacctacaaggacaaggccccaaagcatgagaccccggcatgtcagcaggccaaggtttggcagctttgcaaatgaggatttgtggaagggaattaggccctctgggaaggggacgttgttggaggccaacgattgtgttctgcactgtgcttggcagggacgcgaaccgcccgtggatgcgaaagctctttatccacagctccctggggtgtttagacttggctggagccaaacaatgtttatcctcccacttcaaggaccctaggaagagggatttgaccaaggaggggagaatctgagagccgcagaaggctggagtctgtggaacccctacgcatcactataaccggggctcctgtgaagccctgagtgtatttgttcagctcctgtttgcactcctcctggggtgggcagcttagcacacaaagatgcaacccagagatgcagctcacaccagcagagcccagatggagcccacctcacagccccttgagacctccctgccaccttccaagaatccacaacgtgtcctgtggggatatcaagcccaccaaagtctcagagacagtcctcaggggcaggtatcttccctttcagataaggaatctgagtctcagagaacagcagcaacttgctcagggccagaccatggtctgtagaagagatgattttgaactcagctatttctggctctgagttcaataaagcacagagccaaatgccaacaaagacgctttcagcccacacatttgggaagaagagtattcaaatggccaagaaactgggaaagatggtcagtatcaatgtaatagagaaacacagatgaaaacacgcgctaatagacaagtaaaccgtgaaaagggtgacaatatctaatggggatgttgagaaacacaggctgttggtgggaaaataaactttctgaagggggagctggcagtacgtttcaaaactttacgtgtgaataccccttgatccagttgttgtacgtctaggaatttatcttcagggaataactaggctcttgtacacagattatgtactgggatgttcattactgataagaacaaaaaaaagaatgggggatttttagtagggacatgtttaaataaattgtgtattatcatatgtataatgaagtactccttgcttatttaaaaaaaagataaaaaataacatcaactgttatgtttgatatggaaatacaacagataccttgtaaactaaaaaaaaaaaaaaaaaggcaagtttttgggacttccctggtggtccagtggttaagaatcacctgcaggggacacgtgttccatcccagtccagaaatatcccacatgccgcggggcaactgagcatccaataggtgctcaataaaagttgattgattgactgaataatagaatgaatgaatgaaccacgtgctcagggttgcacactttgtagtggggggactggcattcgaacccagttttgtctgattccaaaggcagagctcttaccacatgagaacccagatattttatcacccaaacctaagctcttttgagagcaaaagaaggaactggtaacaaccacacaggacgagaggcggaaacctagcctagctctccccagcggcactgcctgcttagctccgggcggcccagccccgaggctcccctgttggactccatcccacaggtcccgagtctcacccaggggtgaagaggctggcccagccagggatgaacttcgggtcccgggagaagaggaggatggcaaacacgcagaaaaggatgaacacggcctgttcggcaaacctgcgacacagagatgagaacaccaaggtgaccctgggctttggcctgacagcagcaagggaaggcctggggcaggggcccactgggtgtggtgggtgtgagtgggcccaggccctgcctctgagagccagaagtagtagttcggtgcctcggcggtcccgagagtgagggcggggtagtgccgggtgtcactggttcctttcctggggcttccatgttcccccagcatccttcctgagcatcaggcctgcctccctgcaaacacttcatatcattcccagggtcctagggacaatccagagggagaaagaaagcgagacacagacagagtcagaaaaacagagagaaaggcaactgacgggaacagagaggtaggcgaaagagaggaacagtcagatatccagaatggggcagctacgcagagcgacaaacatggagagaggggcagacagaggcaaaagagaaaaccccccacatgttggggtaaatatctacccaatgtgcccacttcacagatcaggaagcagggcccagagagggttaatgctttgcccaaggccacacgggaagttagtagcagagtcagaccttgtgtgtgggcctgctgactcctggttattttcactttaacatgcactgaacgaggtcctgggagccactgaggcagggccaggtatcccatgaacaaggagggaaagtgggcaataggcaggaaggtgacacgtccctactccaagtacagcctgaggggtttgctggtcctcagggtatcgaccccagtgccagggcaagaggctgactgtgttagtcatctccctaccttccatctccaggctcccaggcttttggtcctgaaattccctctggactcagtccccgagaggtagctctcctgaaagtctagtg

SEQ ID NO: 42607 - DNA, 1475 bp, Bovine  19866880692134
  misc_feature (1)..(1): n is a, c, g, or t
nccctatcaactccctctttgctcatcacttacaatgccggctcactgcactggcctcaactccgcttccagctgcccaatcagggcagcctaatatagatgaatgatacacaggagacgcaggaaagtggttgcatggaaaggggggtcagaagatagaggggcaggaagcaggtcaagagacaagggacagagaaggcggcatacagagatggggtaagaaagtgggtcagaggctgagaaacaagacacagagatgcagacagatggacagagagaaagtgacaaaaacagaggtacccagatacatagggagaaatgagaatagagctagagagacgagggtcaaagaggcagatatacatacgtatatatatatatcgagagagagacagagacggggacagaaagaggttgccaaggactcacccaggcaggcaacacttgagtgtgtgtgtgtatctcatctatccccctaagaaaggggattcttcttttgtttcaaatcgagtcccattgactcttccatcctctccccacttaaatgggaccctccgtgaagtagtctggtcacctcgtttactcggggcagcaacattctaagtttctgcagtagcatccctcggccagttgcagaaagcaaacatttttggcttatgattccgttctatttggtcacccaagatatacagagcacctactatgtgctagaccccagagggtaggatgccacatttgttacctttgtactcactgacacgtgggcaccgggcctggcagagaggggctgcttgtgtttgctgagggatttgttgatggaaaagacagagaacaaagtgaagccagggcctgtgctcctctctgccacctctctccaccagaaacctcctgccccttttctccccatcctgggtggtgagagccagtgccgttgctaggcaaggagatattgcacatatagatcttcctggactttaattaaaaacatctttagaatgtgtctctgaagaggccagcaattgattcctggcttgggcctgagggctgttgagccacactctctccagcagcaggtgggacagtcagaggctaccagcctgccctgccctccccaaacaggacctctgggagcacactgccccctgccttcctcctgtcctctctgccaccgtcctctcaagcacgggccctggcaatcagatagtatgtcctcccgattttatttctccctcccctctcgggcctcagtttcctcagctgtaaaatgaaggtatctacacttaacccaagagagttcctgggaggatgaaatgagattaggggtgtgaaagggctttgtaagctctaaagtcctgtgcacactaaaactgtttctcatgcccactgaggcaagtagcttaggttctggatccaggatctgggtccagttctggctccagctcttactatggaacctcaggtaagttactttatct

SEQ ID NO: 42608 - DNA, 1228 bp, Bovine  19866880710747
  misc_feature (1)..(1): n is a, c, g, or t
naatcaaatagcccgtgaatgctaactctgtgctgggcactatgccttcttcccgccctcacaacgaccgtgagatgcaaattattagcccggttacccagctgaggaagctgaggctcagaaaggttgaaccttgcccatggtcacacgggaggagcccagtgcagctgagatgcaaactcagatccattttcaatcctcctctgtcggaaagggtctctctgcttcctgtgtctcccaggcaggtgtttcctctttaggggaagggtggagggacatgggcactggctccatcggcgccaggacaccttcaatcagccctgacctgcccctcttaggtacgccatcgaccgcgactcagatttggaccaggtgtttgatatcgatgcggacacgggtgccatcgtcaccggcaaggggctggaccgagagacggccggctggcacaacatcacagtgctggccatggaggcgggtgagccagggggcggggcgaatatggaagggaggggcgatggccaaagggtggggctgtgggcggggcaaagcccagggaggacgggccgaaggctgggggcagggcaaaaagagacggcagagctgaggtgggggcgtggtaggcaaaggctgacccacaggatcacagatgtgggaaggatcccaagccaaaaaggcagggcccaggcttgagtttgactttgttccttcagcttttattgagcacctactatacaccagtcctttttacagaggttggagatatagcccctaacaaggttaaaaaaaaactcctgtctgcatgggctagagctagaccctcaggaaacttcgagaaagggtgttcgcatgtcagctaagtgctaacaagaaactggaaaagaagaaagcagaggaaagggattgggggggaattgtttctcttagggtaggcctctctgcgaaggagacttttcaaaagagagctcgataaagtgagggagtcatgctgccactggagggaagagagttccgaggagagaggacagccagtgcaaaggccctgaggtcatagttggagaaatagcaggaggccagtgtggttggcgaggggcagagtgtctaccctgcaatgggtctttggacttgactccagatgagccgggagtcattgagggtttgagcagaggagggaggttgcccgacatgatacctacggctgctgcattgaaaataggttgtttgggggctg

SEQ ID NO: 42609 - DNA, 1502 bp, Bovine  19866880730115
  misc_feature (1)..(1): n is a, c, g, or t
natacaacagagttgagtgattcctactgactcctggggttgccctggagacagacgttgcaaggcctgactccctcgatgcatgctttgaccctctcaaacacacagcctctcagagcagtgctgtggagggaggggacggactgtggatctggtgacaggaatggattcctcctgtaaccgaccactgacacagaacacagaaagttaacttgcagaattaatgaagacctcagggaaaagcaagagttgggatgaaatgccagcctcacgctgtgttgagtgtgattggtgaactagaatctgtggctggtgtgatctgaccacgctcccatcgcagctgcccagagcttccacctaccagcacaagcgctcaggaaagtcctgctgccggtcacttcattgctggtgcaagtggcagctgtgtggctctcctccttcaggtgtctggtctcccgaggcagagtggaaggtgttggcccagggtgagggatgctcagttcctgactagcagctcagagagggtttttaggggcatgagatctccctggcgtcccagcagttcctcactttctctgtattggagtcaggctgaccttggagaaccctgagatctgggccatgacatgtctcggggatgatcttcaactttcagataaaagaagcaagtctggggaggagctgcactctgatccaaatggggcgctcgaggctcatttgaaagctccaagcacagccacttgaagctcagctggtttgctcagctgcatgtaaaaagaggcacttttatgagactagaggctcctcaaggtcaaaggcctttgggggaggggatccgaggggtccagacactggagagagccttgagtaagtgtgatttcaggtgctgggaaggatgcctcccctccccaccacctcctttttttaaaaaaaaaaaaaaagattgtaatctgatccttgtgctgcagctcaactgcagatgcccaggggagggtcacagtgccttagtaatttaccctcccctgtgaatgagctccagacctatccttggaatctttaccagaacaaagcaggtgggccctggaggatatcaaaggcccagagttagcagttatgaagtgagtgctgaaaagcaggcaatgttagatactgagtttgttctctcatgttggatgtgtgctaagtcgcgtcagtcgtgtccaactctttgcaaccccatggactgtagcccaccaggctcctctgtccatgggattttccaggcaagaatactggagtcggttgccatttcctattccagcggtcttcccaacccagggatagaaaccgcatttcttatgtctcctgcattggcatgcgggttctttaccactagtgccacctgggaaaccctctctcgtgttggtctcacaataattaagcaggatgggtcttatccccattgtacagatgaggaaactgaggcccagcaagccatttgtctaaggtcagtcggcctaggg

SEQ ID NO: 42610 - DNA, 3268 bp, Bovine  19866880810824
  misc_feature (1)..(1): n is a, c, g, or t
nttccgatgttagcactgggcttctctaggagcgaaatagccccaccctatctctctgttgtcactgtggtgcttgctgagaaaggtgccaggggtggggaggtggactctgtgtgtgtgtgtgatgggcagagtgacaggtaccaggcaggcagggagacaaggtggaggggcccgggcaggctgatggatgagcagctgaggcagatggatccaggtcagtgggcagacaagatgatgggcagtgatgggctggacagatccaggggaccacagacataggactgcggcctcacagtggagcccacaggagctaggagctgaaatcctgtattcagggacaacaaggagttcctgggagatgcagccagggtccgagaacaagaggctcctaggaattcttctagcatccaagcggctgctcaggatttagcacatcagagttgaaaggatctttaggtgtggatgggtccaggcctcctctacagatggggaactgagacccaggggaggagggaacgtgctgagggtcctacagggtcttggcagcagactggttcctctgcctctaatttagtccttttttgttttttgtttccattctttgaaatgagcctctcacctgggcttgaaaggaaaagggccaggttggcagagggggaggttgtgacccagaaggggaggggaactgggaggtcagagtgagcctggccgtgaatctgtccttctatccccctcccacgattctctttccgccaccctcctgcgtacttctgaaagcacagacgcaggagccagacggaaagttcctgccgtggctctgtcactagctcgatgacctctgagtcagctcacctgtgcctcagtttcccacctgtacctacctcagagatttgttgaaaggattacacgagtgaatagacgtgcagccctgggacgtccctggtggtcccggtggttaagagtctgccttgcaatgcagagtgcgcaggttcgatccctggtcagggaactaaaattgcacatcagagagaggggggcaactaagcctgcaccccgcagctaccaagctcaggcactcgggagcctgtgctccgcgacgagagaggcccatgcaccacgactggagaggggggaaaaaaactaaagaagcccttcaggagtgcctggcccttaggaagtgctccatgatgttaactgctcatatgccactatctcgcctttaattttcctttgccttctgtatggggtgggtgcacactcacaggcgccccccaagcacgctgtatcctccttgacagcaaagactgtctttctcatcctgtctctcatcttcgcttctcaccaccagggccctcttagccagttgggcacgtacacagtaggtgctgactaaaggtgtctttcaaaagctgattatttatttttggttgcactggatctccgctgctgcccttgggctttctctggttgcagtgcacgggtttctcagtgcggtggcttcgcttctcttctcctggttgcagagctccacggctgcagtagtcaggcctagttgtccggtggcatgtgggatcctcccagacaaggggtctaaccggtgtcccctgcactggcagacagatgcttcactactgggccaccagggcagtcctcagtgaatgcgtcttgacgtggctcgtggactatgtgctgttgaagggattcgggaggcagccttggagctgtgtgttgaggtccaagaaggcagtgtcacaggatggggcagggaggtggtggtgggacagcatgaaggaagcggggaagcttgggggaatgtttgggtgacagctcctcttctgctgtgaccagagcaccaagccaataaagggaggcgtgagagaggctgagaaagggggcgggagtttagcagaattcagaagggtgtgcctctaggcgggggaacgcaggccatagggagctgttgactagagctttaaggatgatcaggctgatggcgttgttttaggatcgacttgaatgaaagagaaaggaagcggtgggcagctggaattgtcccagtgacaagggggtttggggcttgaatgatgctgaggggaacaggggccagggggccaaggtaccagggaaacaggatcaacagggctgttggttatggaagatgagggagacggaagaatgaaaatgtcgaggtctcaggcctgggtgtctgggagaactggggtgccgtcaaccacgttaggggactatacttgggagatatggggaaaggggagatgccagctaagattattcatccatccagcctcccatctaaaccgtccatccatccaccatcccatccatcttcctcctgcccacctgcctccatttaaacattcaactgccaggtccaccccttccttctccttcctccaccctccatccattcgcccgtcatccatcacacaggtacctccactgccattctttccatcttctgctgcccatttgtccacactcgtccatctataatcctccaacttatccattcatccgagctacatttcttgtgagcctacaatgtgccaggctctggtaaaatattttcttaacttgataattaagatagtgattagaaaagccaatgaaagggaccagaattcttttacctgaaaaaaagaaatttgagaggcctccatctgttgctaaagttataggggataccctgaaagaaggtgtgttctattcccaggatagaatagaggacattggctgcacttgcagctggagggattgcggttagcttgcagggaggactaccttagtgatcattacaggtatctgaagtccctccctgatcatgtgtttgggctaaaaggggaaatgaaatctataggggtgacttagagggcgtgagcgtagactgggccattgatggagccgtgggtggagaaggactcaggacttgccttgaagaacggtgtgggagcggaagagaggaggaccaaggtgaagggaacttgcggggaggcagacaaacctgtggctgggatgagccaggacgcagtagggccctttagttctgaaaacagcccctgactcagcctccttcccttcacaagccaacttttctctttgaccccccagctcttacacagccctgtccccttcccaaagcccctgctccccatttagtccttgatcccatccctgagcccctgttccctcttcaagcctttgttcccccaagacccccaatctccacacaaaacccccactctcagag

SEQ ID NO: 42611 - DNA, 2637 bp, Bovine  19866880845890
  misc_feature (1)..(1): n is a, c, g, or t
nctctctctctctgtttccttcctctgctcttgcatcccctctctctaagcagaacgagtgtccccagaaggatggcacagtctgggacggcttccctggcagggcagaggaggtcggagctgcacctggagatgcaggggagtggatgggcgggacggacatctgcagaaccgatgagcaagccctgctcgcagaaaagtctctgaaagtcactgccttttggtggctggaatatttgggtctttcctatgcgacagctgcattgagccagggcttggatgggggagactggcctggggtggtccagccctttctgaggttgtgcccagactgggatccaggcaacaaggccatctgagtaaacgaacagcagccagagatgtgcctacttctcccctaaagaggagccagcaggagcccctgctgaagtgacctgggcagtcatggtgaacgtacaggcagagtggtgggcaaaagatattttgaaggagggttaaaaatgacatggtcccaactagcctaaaaagagaaataagaagtaggaagactgtctggtcctctgatgagctgattaatctccttaaataacttgcagtccaacttcccaaaaggcaaaagaaagttaggttaatctactctaaatgatccgtgagcttctcaggggtggtaatcaatacacacacattcactcctctctctctttctctcctcataagtaattctcagtaattgcaagaaagaggtgtttggggtggaaaatgacattctaaccacagagagaattcccagcaaggggatcaataggccaccagttgggaggcgggttttgcagctcagtaaaggccaggagagggccaccatcacatcacactgggagccgcagggtcatcccgaggtctttctgcctgcaggagctttaattgattggggaaaaggagactgaacgcggagggtgagtgagatctgcaggagaaggaaagatcggctcctcccagagcccgtcactgatgtctttgagagcatgactactgctcagcgccagtgcccaccatggatgccaaaggagcaccatcagtgtccgttaccaatatcctcgggagcacgtcatcagtgcttatcaccaacaccctgcagacaccagcagggcttgcctgcgatgacttggtggcattgcttatcaccaacaccctgcagacgccagcagggctcacctgcgatgacttggtggcgttatcaacgttcgccagcagcactcttgcagatccatcacctgtattctcaggagtacccatccgtatccatccgcgaagcccttgcttggtaccctcgttgatgccctcgagcattaggaatgtgtcgtttttgttcatcactctgtctccactgggcttcccaggtggtgctcgttcgtggcaaagaatccgcctgccagtgcaggaggcataagagatatgggtttgatccctaggtggagaagctcccctggaggagggcatggcaacccactccagtattcttgcctggagaatcccatggacagaggagcctggcgggctgctgtccacagggtcgcaaagagtcggacagggctgaagcgactcagcaggcatgcatgcacgtatctccactaaccacagaacctggcacatcataggaactcaatatcatcatctgaatagatgaataagtgagtgactattcttaggaaggagagcaatgtctttttcctcttcacctccttactgccctatccttaggaccttacccactgcctagccaaggagagagctctgtaactacctgttggatagatgactcagggggttgatgaatggatagatggatgaatgggtgggtgggtagatagtagatgggtggatggatgatgggtgcatggatggaataaagaaaggatgaccctgggagcacagtcattgccatttgtaattccagacatacagccaccaagatcagagttcagcataaagtcatcccaagagagaaggaattactgcctgctgccccacccctggtgggtctgggccctccctgatggcttcacctgattccctccttggctgtggggatgcagatggcaaaggcaggaagaatctctcacctcctgcccctcgtctcccctcttcctctctccaacctgaatacaattttctagactgtccccaggtcctggagggagagctcattacctgcaatctgcccataaaaacatcaatagctgcccgccggctggggagcaaatgaccatctactcagcctgacggcagggtgggcaggaaggctcaggagtgtgcaggctgcggtaggctcagctcagcctctctgaggacaccagctttgtgtagactcagccacgacctctggcaaggcagaccgccccgcacctcccagagggccatgctgggataggaaacgctcagtccacctaccatttattccacacacattcatcccaagccctcaacgggctgctcattattattacgaataacaacatcgacaaccaaggtggggacagcctaggtcctgggcatctcctggcccacctcctgccttgcagccccacccactgtccagcagggctggccaaagctcatctgctgcacaaaccactgcca

SEQ ID NO: 42612 - DNA, 2299 bp, Bovine  19866880886414
  misc_feature (1)..(1): n is a, c, g, or t
ntctctctggaaagtagacacccttcccctgcccctcacccaacccagggtctctgtgcccatcactgccagcaggaccatctgcctctggaggcctctcctgagcccccagcgccccaccctgcaggacagactggtgcagggggcacacctaggcgacattccaaactccctgtcatttcccttctaaggacatcggctgggtcactgctcaggcctgagggagggcgtcccacggctcagatgagggaagtgacattctcatagtcacacaattgggatgagacacctgcagccctcagagggcataacacccttcctggatcacaacctaggaagctgggccactgtcaagtctgccaagagctggggacccagagtagatcaagagcaggaaatgcaggcacctgccaggtaaggagcagggtgagccaggtggaacgagtggtgagctgccacgtggagacccttcgaaaagcgtagcttctactctgctccctgaacagagggttgaagccccttgaaaatgaggcccaacattaccagagtggctagtttttccaaagatgccactcattcccatttttatgtgacagtcccccgatttaaaagctagcattttttaaaaaatgaaagaccatgtgcaggccaatcttggtaggtctgtgggcccgcatgagggccactggatcacaggctctgcaggaaaccccagtggaccggtgcagggagctgtctctctgtttctctgctgcaggggccctgggctggaggccgtagacctgccctgagatgccagctgtgccacttaatgtgctgtgtgaccttgggaaagactctgtccctctctgaactctagtatattctgctatgaagagaatactggttcctacttcttagggttgagaattcaatgtgataatgtatgtacagggtccagtaaacaacatataaactttccaggcctgttcctttcaacctgggctaacagcttggcctgagtgagccccaggcttctcatatcagattgtacaggcctctgcggtgcccactggaccagagccctggcctgggcctcatcacaaaggaaacttcagatccttgtggtggctggaagggagagtcttgggaagacatcatcatttgcttagttctcacactggcatcaaagagctgattggttaaaaaccatgttggtcatctctccagggcctctagtggatgcataaaatctgggaggatgggagcaaaggtagggaaggggcagaagatatttttggctttttttcagcaaacataggcagtcaattctgcctatataagtgctagtctgagttcggagaaggcaatggcaccccactccagtactcttgcctgaaaaatcccacggacagaggagcctggtaggctgcagtccacggggtcgcaaagagtcagacacaactgagcgacttccctttcacttttcactttcatgcattggagaaggaaatggcaacccactctagtgttcttgcctggagaatcacagggacgggggaatctggtgggcttctgtctatggggtcgcacagagtcagacacgactgaagcaatttagcagcagcagcagcagcagtctgagttcaggcccacaatatccggaaggagtctctgaatcatcaaaaatagaatgaactttgttgaggggaatttctgggtagaggattcagagccataagacagaacagaaagaggaagtggtaagtcttcaggtctagaatcataatcagaagtccgtagaatatcagagtcattgagttttacagcttgcgggtatagtatgttgccaccatccatcccgttggcttgagaaggtagagaggtggctagattcttatcaagtcggccatgctagccaagagaaatgatgtgagtcacacacataattaaaagatttctaatagtcatacaaaactgaaattaataaaatattttatccaacctattacatccaaagtattatcctttcaacatgcagtcaatataaaaatgtattgaggacctggatgagatccaccaaaggatccccttgcgttctggcttctgttggtgtgatagtaaattttatgtgtcaatttggttgggccacagtatccagatatttggttaaatattattccaggtctttctgtgaaagtgtttccagatgagattctacatttaaaccaatggagtttgaatagagcagattgctctaccttgtgtggtgggcctcatctaatcagttgaaggcctgcatagaacaaaggactgacat

SEQ ID NO: 42613 - DNA, 1053 bp, Bovine  19866880902101
  misc_feature (1)..(1): n is a, c, g, or t
naaaccttattaaacatgcagcagttttcactggcgagaagacccatcagtgtaatgagtgtggaaaagctttcagacacagctcaaagctcattaggcatcagagaatccacactggagagagaccctatgaatgtaatgagtgtggaaaaggctttggggggagctcagatcttattagacaccagaggattcacactggagagagaccctttgaatgcaaagaatgtgggagagcattcagcctgaactcacatcttaacctgcatcagagaattcataccagggagaaaccctatgaatgtagtgaatgtgggaaaaccttcagagtgagctcacaccttattcgacacttgagaacccacactggagagaaaccctatgaatgcagtgagtgtggaagagccttcagtcagagctcacaccttagtcaacatcagagaattcacaagagggaaaacctattcatgtaaagaacttaaattcataaggaaatagaacaggaaaaatattgagtaaataataaatatcagttgagatgaatgactgaaagaccagtatctctttattttctctctcattttcagcttgctgttctgcatataatctttactgccatgtgtctgcttgctaaagtcaaaccagaagagcaaaatttgggggaggctaataaataagtcaggcttccctggtggctcagtaataaagaacctttctgccagtgcaggagacacaggttcaatctctgggtcaggaagatcccctggagaaggaaatggcaacccattccagtattcttacctgggaaatcccatggatagcggagtgtggtgggcctagtgtacatggggtcgcaaaagggtcaaatacaacttagagacaaaacaataacaaataaattagtttgtctatggcaatgaaaatagaaaaagaggactcttgggaaataaccagaattacagtgtggggggaaagaagattcaggtaaagagagcctgatcattattattaactctagttaatgattctccatgagaaagaggtaggccaagc

SEQ ID NO: 42614 - DNA, 1066 bp, Bovine  19866880917663
  misc_feature (1)..(1): n is a, c, g, or t
ncaatactttggccacctgatgcaaagagctgtctcattggaaaagaccctgatgctgggaaagactaaaggcagaaggagaaggggatgacagaggatgagattgttggatggcatcactgatgtgatggatatgagtttgagtaggctccaggagttggtgatggacagggaagcctgatgtgcagcagcccatgggattacaaagcgtcagacacgactgagcgactgaactgactgactgcacaccctagagcctgtgctctgcaaccagagaagccgtcgcagtgagaagcctgcgcaccgcaactggagagcagcccccactccccgcacctagagaaagcctgcacacggcagcaaagacccagcacagccaaataagtaactaaaattatttttttaaaaaaaccacactggtgcattctcatcccctcatcaccatgtcccccttcccttcattttttgctcgttgggattcatcaatcatggggtcaggacagacacttgaaaatcatcctgctattacattatttcagggaaggctgggggcagaggaagtttattaaatttggaaggtttgcttctctggggaaactctgaaaaagaagggggggaaaaaagaaccctcgactgatgatggaaagctgagctcagagcaggggattacggggatcagcctagatcatctcgctgctttcattaaccccagagtttattttttccctctccgtcttgacaagttcacgggagactgacagccacagccgccggctgccaacccagcctctcttagccgagctgctggtgaagcccctagggaacatggttggggggagacccaggtccttgtcagctctaccagtgtaagtggttgaacagcatcctcccaaattcatgtccacccgcaacttcagaatgtgaccctatttggaataggctctttgcagatttgtaattgttaagggtcttcgaggtgagctcatcccagagctggtgggggggaaccctaaatccaatgactggtgtccttaccagaaggaagagatggacccagagacccagg

SEQ ID NO: 42615 - DNA, 1606 bp, Bovine  19866880938123
  misc_feature (1)..(1): n is a, c, g, or t
nacttacctgttcagcatctccacttggaagtctaaaatgcatttcaaactcatcatgttcaatgagagctcctgacttctatctacccatcacccccctccacacacaaataataataaaagaaaataaatgtaaagctgctcctcttccagcgtttccatttcagtaactgacaactcccatgatcccagccacttctgccaaaagccttcgagtccttcttgacatcactctatctcacaccctacagccaatccatcagcaaatcccgccagctctaccttaaaatagatccagaatctgactattctcatcaccttcactgtttacagcctggtccaagtcaccagcatttctcacctgggttattgcaacagcctcctctctggtctccctgtttctgccagtaaccccctacagactgctctcggttttggtgttaaaacataaatcagatcataacactccttctctccaaattcctttctctgggtaaaatggttcataagacccaacaggatacagccgctggtttcttctgaacgcctcctcccatcaccgtccctcccctacattccagccacacagttctctgaatggaacgggcacattcccacctcagggcctttgcattagctggtcctcttgccggaacacctttgcccctattatctgcagtggttactctctcccttccttcagatgtctgtttaagtgtgagactttccctgacaacctgagagggaacagcccctccactctcaggagcccgaatcctctcgccccgtttgctccttgccccagcccccacagaactcagcactgtctgatacagcgctgatttatcatctgcctccttgccctttaatggaagctcgctaggagctttgtcttttgtgctcaaggctgtatcgccagcacttagaaaggcacttgccatataataggtgctcggtggccatttctccaatgactctggaaatcactgttttgaactagctatctgcttgtttgtctatttctttctctcccccagtagacagtaggcagcaatggattcaattctccactgttttgctagtgtccaatacaaagcctggagagtggatattcattaaatgtttgaataaacagatgaataaataatagaatttccagatgggttgccaggagtggtgcgagggaggggttatgagacagttgcctcctgaagcctctaactctggtagcccttcctgcctctccttggagacctgaggctaccttggaggggaggaggctagagtttgacctaaaaatctccagaggccaaaagggacagagattagtattaggagctggtgcttgaaggatctggaaatgtagatttcctattggagctaacctgggattgactgactgatttctctttcttttgaaatcaaagtatagctgatttacaatgttgtgttagtttctggtgtacagcaaagtgattcagttgtatatgtgtgtgtgtgggggtgtgcacacgcgtgtgcacgcgtgcacttgagtgctaagtcacttcagtagtgtctgactctttgggactctatgtactatagctcaccaggcttcctctgt

SEQ ID NO: 42616 - DNA, 1840 bp, Bovine  19866880950105
  misc_feature (1)..(1): n is a, c, g, or t
ntaggtggggtcagagagagctgggggaagagaagggacttgggatgaacagaaagtaaagtggaaggaaacgcaggtgttggttctgaggcttgaggggttaggcgggtactcaggtccccctgaaaaatcccccaggctgctctgcttcagtctagacctcacctcccctttcaggctattactcctccttccctccctgcattccctgcccagtttttcctcctctatttcattctttatccgcattaaattgaccatgtcaccctctcatccataggcttggatgattcccctttgcccatggaagtgattctccaagtgcgccaggagaacccagggagggggggataaccttaggttatctggagtcccttacacgacccttacaggatctggggtcccttaggaaatttccagttctctactaattccaaggaggacatctccatttaatggtattttgtcctctacttctttatcaaaaggaggtgaggctcagattcagagctatcagcaagaacttaatatcactgatgagttccagccatttccttcttctcaaagcaccaatcctcttgccccccccagctacacgctttcttctttgtatcctcttccctggctgctcctccccagtctctgggattgtcctctgggtctgaccctctaaagctggtgtgccatcgggccccctcttgtctggactctgtccagtcccatggatttcagcactaccagtgagtccccagcacatctctccagactcatagaggaatgtccagctgccttcgtgacatcaccacttgatgtccatctcaacctgaaagtccaaaatggagcttgagttaccccacacctctgccttccttccctcttgctcaccctgttgcgggagatgcttaaccacataggggtttccttggttcctctctctcacccgccccatccaatccatcagctgtacacgatcactttacccgcaaaacatatcctgcagctacagacacttccctctagtcacttcgtgctctggcccaagccatcctcacccctcacctgcatgttacagtcccctctgccctggtcctgttgctcccaccctgcacccctcagtccaccacgcagcagcggaaaggcttttaaaaatggtgatcagatcatctccctccgctgcttaaaagtttcaaagggaattcccttgtgcttacaaaaattcaagccctttgcgctggtttacaaggacccgctttggcctgtttctccctcttcatccccacatgactcacccccttgtccactctgttctggccccaggaagctcagtaccaccttattctgtctgggacactctcatgcttgatctttgcatggtcagtatcttctcttccttttgctgtctgcatgagggtcacctccacagagaggacttccctggccatccaataaccaagtcacttccagacatgaccaaatgggcctcttcaggcacagcagagcatgacacttgtacttgtttcctttctttgctttttttcttttccccatatagctataaatgtcttccctggtggtgcagtggtaaagaatccacctggcaacgcaggagacgcaagagacgtgggttcaatctctaggtcgggaagatcccctggagaaggaaatggcaacccacttcagtattcttgcctggggaatctcatggacagaggagcttggtgggctacagcccatggggttggaaagagtcggacacgactgagcaactcatgcatgcatgcacgcacgtgtataattataaccaagaacttagttagtaaaatgtccaggaggcatcatt

SEQ ID NO: 42617 - DNA, 946 bp, Bovine  19866880959304
  misc_feature (1)..(1): n is a, c, g, or t
ntggcccccagtctccaggcgtgatgaacccaagttgattgcagttgctcccccgccctctgctttcagcgcgcggcgctagtcttggtggtcctgctcatcgccgggggcctcttcatgttcacctacaagtcgacgcagttcaacatcgagggcttcgccttggtgctgggtgcctctttcatcggcggcattcgctggaccctcacccagatgctcctgcagaaggcggaacttggtgagcgagagcccggggcactgggcaggtggaggcaggcagggtgcaggcgggcgggccgggtgggacggctcacacgagtcaactttgtgcaggactccagaatcccatcgacaccatgttccacctgcagccactcatgttcctggggctcttccctctctttgctgtgtttgaaggtatgtggggtcatccaccgaggggggacctcagcacagagctctgatctctgctcggagcccagcgctatggtagctgcagaggttccagagattagtgatggtggtcccgaccctggcagtgcctggtttgggggctggacagacacttaaaccaaggggctagaatctcgcaggataaatgctactgagaaatcccatgtaaaacacaccaggcggtaatgatggtaaatgcacacagccctcaaggtataccagggctgttctgattgttccaaacatatagactcctttaatactcccccaaaaccccacgtgccagtactaggactgcctcatcttgcagataaactgcggcagagagaagtcaagatagccttgctcaaggtcccataggtcatatacaagccagcccctggctctggagtccctctcttaaccgcgatgccccctcttacttggagtagagtcatgaatgactccaggttggggccagaaaggcaagctgaggcttcccaaacagtgcatt

SEQ ID NO: 42618 - DNA, 928 bp, Bovine  19866880987011
  misc_feature (1)..(1): n is a, c, g, or t
ncagggacaagcactgagacagctcccgctttctattcttagcatcggtgggggctggcgggactcgaggaaagctggggcctcaccagctcctccagcttgaagatcagagagaagatgaggatgaagaggacggctgaggacttggtcatcgtgtacctgcaagggaaacgtccccatgatgcactgctggagccagcgacgcggacttactgccaggaaaggagcccactcggtgcccccagggggcgggaaggaggccaggggagacccctgacctccctgtgggccgcaggccccgcgggacacaaaagaccaaagaagggaagccgagtcgtctgggttgacacgcgacctttaatcggaaggaatctctgactcagaggcctctgattatcaccagaaaataaaaaaaaactgagcttcctgagtcctgtgatttacctgctctttagcggagatcaggattaaggagggaagagagaaatggagaaagagggggcagccacacatggctcgctgaagcccagaatctgagataagcaatagctgctccctctgccctccatgcccccttccctgctgcctggcagggacctggcaggaaggtgcagcccccccgccccagcctgctggacagacggccaaagggctcagtactcacagcgagacggtgatgtagaggaagctccagttggacaagcccacatccagcgctgtggccagtgctgtggagacacagggcacccgtgggacaccccgcccgggtaggagccctcctggagctttcttttccacccagcaactgaagggttaactcctggccccacgcccctaaagcggagggggctgctccagcattagggcaacagtccactgtctaaccgcttcccacttgtggatattaggaatgccacgcccccacccc

SEQ ID NO: 42619 - DNA, 656 bp, Bovine  19866881003504
  misc_feature (1)..(1): n is a, c, g, or t
nttggactgtcggggattccctcttataggtttttctttaaaaatataaataaaaaggaaggaggagtcctttgtccgcatgatattagggataacaggttgaacaagcacttggttcagcagctctctactgctgcataatttctcagagtttttaaaacacaaatgtgttttgtgacagagaatggcttgtttctaaagctaagttgcagaacttaccacacacctcttcacattttctccagcgagctccagtgggggaatgcccttctcacagaagggggctaggatcagggctgagactgggtctggtcaatgggagagggtgggtgggcttgggcacgtgatggtctgactcctgcgtctttctcccctaggaaaaagaggccagacccggtgagtctggggctcaggcctgggaagggcgcctgcttgcgggctgcctgcggggtggaggggcgggggcgggaggctcaggcactggctcaccctccctgcttgccttctatgtccacccgtccccttctgccccttcccagaccccaaagctgagctccttcccctgccccgtgtgtggccgtgtctaccccatgcaaaagagactcactcagcacatgaagacacacagcaccgagaagccccacatgtgcgacaag

SEQ ID NO: 42620 - DNA, 1205 bp, Bovine  19866881084065
  misc_feature (1)..(1): n is a, c, g, or t
ncaggaaagcgtagaggatgtggccctgagcgttctccacccggtgcagcaagagattctctgggaagcggacaaacagatcgctcatcttgctgctctggaaactgagccggtccaggtcttggctgctgcccacactgaaggaggccatggaacccacatctaccttaagaaagttcttcatcactttggctatcttggccaggtcagaaggagcgatgtcctcctgctctggcttggcgggtatctggacctcgtctaagcaaaacaatggttcaactggggactttgcagctgtgccaaggtctttgttgaccgcgggctgtgcagacaggagtttcttctgagatttgccggtggcgtctcctctaggaccagtggttttggggtcaatgtgtatatgctgtgtgttgagttcactgatgaacagtctatccagtttctcattgtaccgcaggagcaagtatgctgggcacatgtctgcttctgctgctctcttcctgtttgactgggtccgaatacagacaaatttcacctgcacatatctagggaaggcagaagcaacagtgaaacaggtgctgaccacccagttttctcttacaagtctaggccctgtagggactcacagtgcctgatacatttcctggagaccacagtgtggtataggatatgggaaagaaagattcacgttcacgctccagtcccaaagtagtcaggtctttcttcaagaccccatccaattaaaacacccttcatttgcatctacagaagttctaagctccaactccttttacttactctcattttcccatctgcagttgtcaatctgaggcaaagatatacggggaaatagatgaacagcaacagcagaactagttacctgctgtctaaagtgtctttcattcctgccctcagggagccattgccttctctgtttcctcctccaggcagcaaaaataaaagaggtctcagggttagggtagatctgggcttcctctctaacaggaaagatctgggttcatctttgacttaaagaaaaatgtctacatcctgagagagtgagaaccctgaggctagatgatccccgggattctgctagctttgccgttctaggctgaacgtgcccactcaaaggagactggtaattaaactgaatatctgttctctccctcctttctatactttgaggcccaaattaggtccta

SEQ ID NO: 42621 - DNA, 1528 bp, Bovine  19866881126587
  misc_feature (1)..(1): n is a, c, g, or t
ncctggtggctagacggtaaagaatcgcctgcaatgcgggagatctgggttcgatacctgggttgtaaagatccccgggttgtaaagataccctggcggagggcatggcaacccacttcagtgtccttgcctggagaatccccatggactgaggagcctgtcgggctacaggttgcaaagagtcagaacgactaagcacagccccaaatccttaaaacagtgcctgtccctaccctgtcacactgtaagtggtaactattatttttatctactaggtgtgctagtcgtttcgcaaatctcattgactatctcattcccctgatgtcctcctgccccaacacacacacacacacacacacacacacacacacacacacacacacacacacacacacacacgcgcccacccacccacagagctgtagatgttggtagatgatttcctgggccagcagagggcgctagtctcacacaagcggctggagtcggtccctggccggggctgaccgctgactgctcaccagggtcttcacctcccaccccaggctccgcttccactcacacaaatacaagataagccccagttcctggaagagcgatcttcgcaaatgaagttatcgtgagttatgtgaacccctaacctgcaagagctgaggctagactggctgtctgcctcctgccctttgcttcccacttaaaaaccaagtcaccatgaattttcttaatgatgctttattcgcctgttttagtcatttttctcctctttctgaggcagagagatgtcttaagggaaacggtacaatattgcagaagagatccaggccttgaaattcgacctgtatttgaagactggcttcaccactccaccaattaaccccagacaaatgtctgaacctctcgtacctcagtttcgtcatttgtctaataaaggtaatgagtctgcacctcatgggaacgtgaggatcaagtgagataaatcatgtaaagaccttggcacaaaatctcttttctatccaagcctaacaagtgtttgacaaagagtgaaatgcccaggtgtactgttttcagtgatgagtataaagagaaggtcatgtactttgatgtcagactgacttgggtaccaaacaagctgcatggcaagtttctttgcatcgctaaacctcagtcttccttatctgtaaaatgggcaccctagtgcttcattggcgaaggcaatggcaacccactccagtactcttgcctgaaaagtcacatggacggaggagcctggtaggctgcagtccatgggggtcactgagagtcggacatgactgaacgacttcactttcacttttcactttcatgcattgggagaaggaaatggcaacccactccagtgttcttgcctggagaatcccagggaccggggagcctggtgggccgccatctatggggttgcacagagtcggacacaactgaagagacttagcagcagcatcagtgcttcatagaaagttagccattttagatgagattgtatgcataacag

SEQ ID NO: 42622 - DNA, 545 bp, Bovine  19866881132179
  misc_feature (1)..(1): n is a, c, g, or t
nggcacctgggctctgttggcctcggtgccggtacctggctgtgcgcggaggaccttgaggcgtggggccagtgcgcccctggggctggggaggaagcagcacctgaaggtgctgtccactttcctcagcttggccgtctctcggtaccaggctgttgccccacgagtctgccctcctgggccactgtacttacagaggcggggcagggtgcacctctggccgggcagctcccacctcagtcccaccctcgtgggctctaacaggctcctcttcctgcttcctaaggccttgcctggttccagctgtagcagcacatggacaaagggagtgggccgtggctagactctggtccctttattgagcttgagagaccagtgggtacataccaacaaaaataaatttctctcccgaagcctgcctgcaggctggggcccccagcgtgtcctggctggtgcccatggctgtccgcaaccccagcagcacaggtctggctccccaggagtgacaggatgctggctgctcagtatctggagatcctaggtgg

SEQ ID NO: 42623 - DNA, 1682 bp, Bovine  19866881283214
  misc_feature (1)..(1): n is a, c, g, or t
nttgctcaaactcatgtccattgagtcggtgatgccatccagccatttcatcttcttcaccccttctcctcctgccttcaatctttcccagcatcaaggatcttttccaaggattcagttctttgcatcaggtggccaaagtattggagcttcagcatcagtccttccaatgaatattcaggactgatctcctttagcatggactggttggacctccttgcagtccaagggactctcaagagtcttctccaacaccacagttcgaaagcatcaattcttcggcacttagctttctttgtagtcaaactctcacatccatacatgactactggaaaaattctatcctctgaattcaatcctcaaactcctctatttcacagatgagaaaactgaaacagagagggcaagccagttgcccaaggtcacacagtgaggattccaacccaggggctgtgattcaagaccatattacagtgatggaagaaaatggaacccaacctcctatccctcaaggaagcccttcatcagtgggccactccttgcatacctccagtgatgagtgtctcatcacctaccaagtcagtctgctttgatgatcaagaaagtgatagtcactcagtcatgtccaactctcagtgaccccatggagttagtccatggaattctccaggcaagaatactggagtgagtagtctttcccttctccaggggatcttcccaacccagggatagaacccagctctcccacattgcaggtaggttctttaccagctgagccacaagggaagcccttgctggtcaggttgattggtaaatccctcttttcctgtccctgcaatctgtactcctataacttctccccactggtgacgtagcggagggctgggacccgtcgtggatggtggcataaaagtaaaaagaggactccgaggtcgagtcaacctggattaggagctatgcatcccctcactgatatgaagagccgactcattagaaaagaccctgatgctgggaaagattgagggcaggaggagacagggatgacagaggatgagatggttggatggcatcaccaactcaatggacatgcgtttgagcaggctctgggagatggtgatgggcaggggaagcctgagtccctggggtcgcagagagtcggacatgactgagggactgaacagcaacatcagcctctatgtcctcatgcaggagcccgaatgatggatgaacctgcattgaggggactgagtggcagatgccgcttccatcaccaggcaccctgagatccctgggtatcggggagctgctagggtcatggtgacatctgttgtttatagcccatccctgccatccctggtcatcggtccaggccctgctgtggctcatccctggcccatgcccagactcccctgccccaggctgcccggctgcctgcagctcaggtgaacccagctgcgcctgctccctaatcaggataccaggccccctgccacctccccccacggggccccgagaggctcctagctaattcctcttcctcaatcagccagcgctctcgtggcctctccactgattggccctttgttccctgccaggccagggccacctccagggcccagctctcccaggaccaccctctgggtgccctgccccctcacccccgctctattccttaacctgtg

SEQ ID NO: 42624 - DNA, 1078 bp, Bovine  19866881284490
  misc_feature (1)..(1): n is a, c, g, or t
ntaagctggggctccagggggcttcacccttgcattaagggtgaaccaaaggtaatgtgaatttgagtaaactccaggagttggtgatggacagagaggctgggcgtgctgcagtccatggggtctcaaatagtcggacacaactaagggactgaactgaactgaactgaaaggtaacgcagccttgaatcatgaattggcagcctcatccacactaccagggtattccagggaacctcaaaccctgaattttgtttaaagcaatcccagaatggtagcactgcagccaaatgcaaatcctttttagaagcaaatgccttcatctgaggcataaaattcctcttaaaaaattcttccaaaaaaaaaatttccaagtacaatggccaacacatagtcaaagataaccagacatgccagaaagcaatgctagtaagctaagtaagcactagaggtacagagtgagcaaacaaataccatccccctgcctcacagggcttatagtccagcaaggaagacagacaccaacactcttatcaaggccactaacaacctctgcaatgccgactggactcacttctcctcctcaatttactttgcctctcagcagctttcagcatgttgacctctagttactgttcttggtttccatgacaccagtctgttgaatggcctccagccttactgggagcttctcagtctttctccttccttttcctcctctattttatctctaatgttggtgggcctcagggaccatttctgggtctgctctctatctcaccccaggtgattgcattcatttcctcagcattaaatatcacctacatgctgataaacctcagatttatatcccttctcctcggagtccagactgttccatccaactgtctgcgtacatatctcctctcacatatcttgtgaatgtctcaaaaataacatacctaaataggaactcttgcttcctaccaccaaccttccttcatttactccatcatggtgtcacaccatccagttttaggccaagaatctaagaatcatctagaatccctggtttgaattagggtggtgatggattatg

SEQ ID NO: 42625 - DNA, 1088 bp, Bovine  19866881290318
  misc_feature (1)..(1): n is a, c, g, or t
ncagaaggtgcgcctgctcgctgaaactagagaaagccggcgcaagcgacggaagacccatcacagccaaaaataaagacacaaagacatctttaaaaaaaaaaaatagacttctttaccagtactctggaaagaggtagaagggcctcagtcagggagttgggccagaaacaaaacgactcttggtccttctgttcagagtgtgcaaaatttgcatggtgttctccttcgtgagggagtatcaggactgggtgatgaaggtttaggacagctttcagaggagtcagctgagctcagaggatgggcaggaggcagactccacaatacaggccctatttcgaggtgtctgtaagaggacagtctaggcagaggctagacccagctaaggaaatttaatctccagtcctctccaaagacactgtgcttgctttattctctacttctctccaggttgtcactcttggcctctaaagatgtgctgattgccccataaatcgacaatcacagtttagaatgataatactggttaataataatatagttcttatggactgtctgtattcctccaaaatttctatgttgaaattcaaactccccaatattatgatggtattagaaggtggggcccttgggagatgcgtaggtcataagcgaggagccctctaataaaagagaccccagggagcccctcaccctctctgccatgtatgaacagggaggaaatggccaactctacaccaggaagcaagtcctcaccagacactgaatctgctggtgctatgatcttggtcttccagcctccatcactgtgagaaataaatttgttgtttattagccccctgggtctatggtattgttacagcagtctgaaaagatgaagacaatagtatgacctgaatctgcctcttccttttaaagatgaataacgttaggcaaggtcaagattagaagtcaagttgcccactctcagtgccctgtggtcattccaaatagtcaaaacaagttgcctatttaaagtttcttcctagaaatgtcaaccaagggaatgccatcaatcaaaaagacacacatgcctagagcctcttccc

SEQ ID NO: 42626 - DNA, 927 bp, Bovine  19866881292615
  misc_feature (1)..(1): n is a, c, g, or t
ncccccgcgcgcgtggccatgagcacgtgcacgtgggagcgcgcgcacacatgtacacgcaccttgtggtgccgcagcaggaagggcagcagcatgagcatgccgccgtcgtgcacaatccaccagacgtcgaatgctgccttcagagaagcgctcagggttcccgggaaacatggagacattcttggtgaccagcagggccaggtggccagccgtggtttcccggaccagctctgggggaggccaaggagatggcagacagtaaaacagtgaccctggtcccctccttggcacccagcacccctccccatcccgcctcccgcctcagccttggactgaggagtcagaaaagccccatctgcctgggcctcatttgaaattggggggggggggtggaaacctctctgggcctcagtttccccactggtcaagtggtaataaggatacctgccctttctgattaagaaggcgaccctgcagcgctcacttaatcctcccaactaccttctaactgggatctactgataaagcagcctcagggtttaccagctgccgtgaccttcatctctccatgcatcagtttcacgccactaaaatagagacagccatgcctagccctcacaggcctcctgagagaattcaagacctagagaaagccaccacttgtctggcgcacagaacgcagtgcgtaagtgttagttactgtatgacttattatctgctactaccaaggaatctgatgctcagagagggtgaggcacttgtgaacaatcacacagcaaggaagggccagaggttagatttagacccgggcctcagtggtgacttcaaaactgtaggtcttcccactggcctgcactgtcttccctgcaggggttgtgagcccggcaagagccaagtctgtctccttcacacctgagtccctgg

SEQ ID NO: 42627 - DNA, 1104 bp, Bovine  19866881331280
  misc_feature (1)..(1): n is a, c, g, or t
nagggacatatcccttaatgtctctgctcgggttgcagtaaaaattaactaccctgaatatgtgcatcatcaatgcagctccaagacagagaagggatggaaatgcgacgtgtcacacacttctggggtatccaggcaggctctttaatgactccttggagggccctccactctaggaggacacctccctccagagcctgctggtctcctctgctttggcctgggttgggacccgatgccaggcacaggatgggtgccccaagaggccttgagtgagcagagctgagggtggggcttcacccttgactcccctggttccagtcccccctcaacccacttatgcatcttactagtacatcttgccggaccactcagggtcacctcagttctcaccccagcccagatggcagtgttctactgtctgagtgaaggtgatgggtgagaacttctcccccaagcttgctagagtaaaagctgatgtacagagggcaaaggatgttgctgtgggtctcagtgtctgcctctgagtatcctttacaacagataaactttaatagaatcaggtctgtgggaacttccttctggcctaagccacatattccaagaactgagtagggggaggcagagacctagaagaagtatccaggcccctcgtaggatggaggaactgggatcaggtaagcatgatatgaacagatacagcagacagaacagtgagagacagacaaccaaggaggcaaaatggggagaagataggagggtaggaagagacagactagaagaaagggcaggggaaaggaggaaagcagaggaaaagggggaatgactagaatggatattcacacaatggagtactaggcagcagtgaaaaggaaagacacagaacaaaaatgaatcgtaaaaacaatgctaacaagacacaaaagagtgtatacaggatgagcccatcaatctcaagttaaaaaacctaagactgttggaatgcactaatgagttggtcagctatataaaaggcaagggtctggtcataacaaaagtctgggagaagggaagcagtgggttatagtcaaaaagggacacagtagggagcttctgaagagggga

SEQ ID NO: 42628 - DNA, 937 bp, Bovine  19866881344127
  misc_feature (1)..(1): n is a, c, g, or t
ncttccctggaaggctgtgtgaccttgggcaaatctcatcactccctgagcttcgggtcctcatcattcaaatgggaagatgacagttcgtacctcacaaggttggtacagttgcaaatgaggtcatgtatgtaatgtgcttagaacatggcctggggctttagtaggtgctccactgatggcaggtaggtatcgccaggtcactcttgatggcaggactcccggcagagcctctgtgaagacgtgctgggtgatccggaaccttgtctctgccgtggggacctctgttccttctctccttccccctgtccacaggtgggtgcagaagcagcagccagtggcctgggtctctgggaggagggggctgtgagtcagccccagcccctggtctgggctaggaagtagcccctttcagagcatgacaggcccttgctgcccccttctctgccatttctctcctcttccaggaaaaaagtttgaagttgaatgggtcccgaggtggaatattttccaaatgtcagtgcaatctgtggtacattacagctaaatgcgatcgtcgccgcgctgggctctgaatgtcagcgcaccggccgcgatgcagtgacagaccgcaggctgacaggtggggtcccagccccccacctcctgggaagtcagccctggccggggagggaggcaggccatctctgggctcagcagacgtggaccgtgggcctcggagggacatgccatgggctcgtgaggccgtgtgtgttgtgtgtgcgtgtgcatgagtgggtacacctgttcctgagtttctgtgctacgtacctctctctttttttggctgcactgtgtagcgtgtgggatcttagttccccactcggggattgaacccgtgcctcctgcagtggaagcgcagagtcttaaccactggaccagcagggaagtccctgtg

SEQ ID NO: 42629 - DNA, 752 bp, Bovine  19866881361211
  misc_feature (1)..(1): n is a, c, g, or t
ncgtctggctggataccctgctggcttgtctctgggcctgaggcttgctcttccttttttaaaagaatgatttgcaaatgttagagaggtgttaaagtttttccccaccttactgagactttctccccagcataagcagcgttgataaaggaatatttttctcactatcggagtcagtgttgtttgataccttgtcctcaggctgccccaaattgcctcctgtactgaggccccatgaaataagaaacactgcacgtcatttcctgtggggcgagtgtggacctgacttagggaacaatacaattagtgattattgatggtgggtggcattcacccagggcctgggctcagcaggcaagaacccacaccacctgtaatccccactccctgggaggccaggatgactacgggtgctacatctgactgaagctggaaggacttaggagggtcactcgctagggagcgggaagctgggactccatcccagttccatctaccgcaaagctcaagttaagtgcccgggtacctcagggttatccctccatagaggaaggagatccagagccagcccaccaacaggaacaacagcatgagaggaaaggcgaagatgaaccaggagccgaagttcaccacgtcgcactgcgggaagaaactggagaaaagaagggaggtgagagcccgccagcgtcagccagacggatgggtgcacacatccctacagggaaaaccaaaggaagtggctcggcattcag

SEQ ID NO: 42630 - DNA, 1345 bp, Bovine  19866881376689
  misc_feature (1)..(1): n is a, c, g, or t
ntggttacacttggcagccctcctccaaggcccttgtacccacatggctgaggccactgctggagactgctcctagatggatctcagcggcattaagctatgcctgggctagtttgtagtgactcactgcagagcacccccaagctggcatgtggttctatatttgtaaagttattgggataagaagcaattaaacagtttgtaataaacacagatggtgagcctgctgtgaggtctgccagtggggcctgacaaaatatcaagggctctagaggaagtgggtgtaggaaaaaaggaccaggcaccctcaccccaggaagcccagtgcccccgcgaacatctgctttgtgagatgaagctggagacaccgtgtattttgccaatcttccctgtccctctgttcctgtttcctcttccaactaaagcgtggaataccagaatgtgatggttggcaccatgggagattgatgacaaatcagaaaaaaaaatgtaaggtggcttttattacccccgttttataggttaaaactctaaattttgtgcccagggtaatgcagcaaacttggagaagcagccagtgaaagctgttttccaatcaggactctggctctaaccatcagcttctagttttttccctcacctgcgtgttcagacacctaaggccccaaccaaagtgcctaggacattaataacaggtggaggagctggggtttccggtttgagggacgagtgtggcttcccaggtggcatactggtaaagaatccgcctgccaatgcagtagacagcaagagacactggtttgatccctggattgggaaaatccccaggagtaggaaatggaaacactccagtattgcttagaaagttccatggacaaaggagcctggcaggctacagtccgtggggtcgcagagttaggactcagcacacgcacacatcacaagattggagactctcggtaaggacgtgcagggtgttgccgactgtagccaagcgtttgacctaaagggattcatcccacgtggacgtcttctaggccctttaatggttggcgttttccaaaggcgaccaatctattacaggttcgttaatcaatgacagcctcttctgccaatcgccagtgagaagcccgattccgtcgcccaatagtggtacgctggtagagggtctagcggttgcgcgatgacatagcactctggagtgccccattggctggatcaaacccaagcgagccactgattggttaacgctgccggagggttacaattcaaacgcgggcgggcgggcccgcagccctgcagttggaactgtgagctccgcgtaccgcttttctccgtctcatcg

SEQ ID NO: 42631 - DNA, 674 bp, Bovine  19866881390391
  misc_feature (1)..(1): n is a, c, g, or t
ntttcctccccttttttcttccatcaggaagctccattcggaaatgcagcctcaggtattcgagagagagagaatgatcctgtttatataactccggcagcagccggtgcggctcagcctgggagggggtgggagctgagaatggagtcagtgtggttccaggaaaagaagagactctaaggagatggcttgggctggggcctcaggcctgggagctcccccatcctgccctggggcgacccaaacagggcactagggattggggacagagagtccacctcgctaagtcttgaggagacccaggcctcaggctaggcttagggagtaaattttcatggccccggcgagggttgggtgtaccctccactgcccctggactcctccaagtgcccttaagatggagctcttgactagaggcttttgcttcctagaagcttgtgattcaatataggcctctctagagaaagtctagacttttttttctaaaactaccaaggacaggctctgacctcaactttttcatcagggcaatgggcataattgaattttgtcttttctcccatggaagagtcaagtactaataagaaatttgtctgaaagatggtctgagctctaggtatctgccaaagggaatgtttttctcattgagaatgatgcagagggcggcaggacaa

SEQ ID NO: 42632 - DNA, 810 bp, Bovine  19866881516378
  misc_feature (1)..(1): n is a, c, g, or t
ntcatgggaccatgaaagggctgggagaccagcaggggtttctccaggtaccccagaagggctcagatatgcccaaccaagcatatctccgggattttcagagttccacacttgactcgcttctagtttaaatgtatttttgtagttcctcattctggaggctgggaatcccccaagtacctgacactgtcatccccacccctctggtctccccctaaatttcaagggctgtactttctggcatgaaggcagggcaggaatgacccatgaagtagggggtcggcagcaaggggagagatgctgtggggaagctgctctggccccagcactttcattttcactgtaagcaatggctcttagggagtaaggaggcaggaagggggctcttggaggagaagtggaggaaaagccagtggggatagggtgaaaggtggtctgagcttctcaagagcaaagtcccagttttagctccaggtggagactaggctgtgacaacaatatctgaggttatttactgagagtttcctgtgtgtcaggctctgagccaaatactttacatgcattcttggtctgatttcttccaactcccccattatacagatgagcaaactgagtctcagagagagaaaatggcttgccgcaatccacttagctagatggaacctgctgataaatgtacatctgcctgatttctgagccagcctctcagatggtgagagtttccaagccttggtcctgagctaccgcatgtcagaaggcttgaaactatgacgtgggaactggggattcgacacattttcagaggagggg

SEQ ID NO: 42633 - DNA, 561 bp, Bovine  19866881518918
  misc_feature (1)..(1): n is a, c, g, or t
ntggttaaaacgctgaccccgagcatgtcctgcccactttgagctcttggactgctagggagaggggctggcagcctagcgtgccagtgcaagtgcttcaaccatgaatggtggtgccagcaggagccagtccctccccttcctcctgctttccccagaggaaagggaggcagcccacatccctgaagtccctcggccggtgactgggctcaggaggctggcggggggccgcccagatgtccacaatcttgcgcagcgtggagcagcgctcctccagctctggtccctcactctgcatcagcagatttgcaagctccctgcttaggtcctgaatcatgtcgttccgtcccggctcccctggctggcctgcatctgctgggatcagaatggggtcccggagctccccgcagggcccgaggaggtgctggtacctcttctgccacccggcggcacaccatggcttcgctcacaggcctctggctggtgtgcagcagcgccaggatgtgccggcacggcaaggtggtactgctgctgaaagtagcagctgcagctgcagcccgt

SEQ ID NO: 42634 - DNA, 1223 bp, Bovine  19866881733383
  misc_feature (1)..(1): n is a, c, g, or t
nccaggcggttcagtggtaaagaatccacttgccaacacaggaactgcagaagctgtaggttccatccctgggtcaggaggatcccctggaggaaggcatggcaacccactccagtattcttgcctggaaaatcccatggacagagaaagcctggtgggctgcggtccatagggccgcaaagagtcggaggcgactgagtgcacacgcacacacacgctcagatgtataaataaaggggcttaatggtgctatcatgaaccagacctcaggattcagaagctctcaggagttgagaggtgatgcctttaaactctgtatactcaaattgatgagtatttgtctaatagacataattctcagaggaccaaaatctaaaattggtttagaattcatgccctaggttaatacagaaaataattggcaaagctagaaagaggatttagaggacatcctaatcaatcacagccaaggtgggtaaattgaggcccaaagccaggggaactgacttgtccaaggccacaggcagaggcagaatctgaagtcagaatcccccctccacgtttttttttttttttttaatatttatgtatttatttggctgtgccaggtcttagttgcagcacgcaaactcctagctgtggcacgtgggatccagttccctgaccagggatggaatcccagtcccctgcattgggcccatggagtcctagccactggaccgccagggaagtcccaagttccccaacttctaaagcaacgctggacagaccaaggtcttgccagctggttcagaagtcctagcaggttcctgtccccactggggcccaggaggggtcgctgcccagaggatgggatacctacagccatactccagctggatcaagcgcacgctcttggtggaggcgaagacgtccaccaccgcgtagaggggctgggcggctggcagcccccgggcgctggggcccatgtcctcgccgttgatgacgatatgcatgtcagctgtgccgtccgggcgcgggcagaagagaacgcccaggcggctgcggcgcgcggtcggaggcagcacattcagctcatagagctgatccaagagatggctgtacaaacccggccggctgcggccgaccaggcgatcgcggggaatacgaaactgctcgatgcagagatacggttccaccaggagggctggggggcgactcggggccagggcctctgcctccgg

SEQ ID NO: 42635 - DNA, 1479 bp, Bovine  19866880397167
  misc_feature (1)..(1): n is a, c, g, or t
ntcaggaatactaatcaggaacactaacagcccttctcctgcaccactggcggcggctcagactggtcagagaagttaccaagtcataagtgtaagcgatggcctttgtgttgtgactcttgtgggcaagatgaagagcgtcatgcaaaataagctctgcctcttctggctcatctttcatgatgcagaactgaaaagagaaaacaaaataaaagaaactgaaacacgaaaagaagagagacacgcaccaccagacagaaacaagtacggctacgtgtcccagtacacagagggaagctagtcattgattcctcgaacacttattgaatccctgctgtgcaaaggtatggtgtctgcagtggtgactggagaggggctcccctgcagctccgcatggccacagatatagcacactggctgacagacataggcagcaggatcgtgagcacttttcacgaactcttataacggagctgctggccctacatcctcctccgctctttcctgcaggacaggtgagctcaatcacaaccaatgatacaggctgtgaaggaaagcaagagaaaggaacaaggggtttccttcaaatgggagtcaagacagttaaacagaggtaaagaggaagagaaacagccaactaagtaaggaactgtggggaaaaactgacccagagagcagggaatgaccgaaggtgctacaggctgaagatgacggatcttcaagaaccactcaaacaatgaaagtgaacagatgtgaactgaggatggtgactgttactgccaagtagggaggcaatgggggtaggatcacaggtctcaccagccagggcaaggagtctgggttctaccacaaacgctgtgacgggtcaatcaaggcttgtgggcacgggatgacaccagctgatttacatttaaatgatcgctccagctgctgtcaaacctggatggcagggggcaacagggcagacaagactgcaggctgtagcagcgtggccagggtgactcaggagacacagaagaggcgacaggtttgagaagcattttggatttggtggcaaaatccaaaaattcgttgctggattctcggtatatgggaggtggtagttaggtaccacaagttctcagaatgactatggagcgtccaggcaggaaaacggggcagactacagaaaagaggtactgagggaaggggtcggagagatgcctaagaccacaggttcgtttgggtcagctgaagcctcaaacagagttggcacgcgggccgcacccgccgtgtgtgggcactcgggtggacgcgttgggcatgaggcggtggtcagcccaaaggaggaggcccggtaccccgggaaaaggagaaaacgttcaggaagaggaggcccgccccgctcccctcagcctgtgcgcacttctccccgcgctagcaacctcgcagcccgcagcgccgcctctacctgcgcccgacgcgctgaccccaggactc

SEQ ID NO: 42636 - DNA, 3115 bp, Bovine  19866880407524
  misc_feature (1)..(1): n is a, c, g, or t
ngctcccgcattccctggccgcaaacgcacgggcccagagcgcgtcctcgttgagctgcgccaccggcatctgaatgaccatcgaatacatcggttaggcctcaggactgcccctgctggttcacttgggcggcgtttgtttgcaaaggaccgcactttgaaaaggatttaccttgacttactgttttttaagaattgagagcaggaagccaacttttctcatttcagttaaatctaaagcagtacatgtgcttaaaagatgagacgagccaggtatccgaacatcctctaatcccaaaaagcttggggggaaagccagtctgttgacagctcaaacagtggttgccagaaagggctgtgtgtgaagaggacagtgtgagagtcttgaagggggcgcccctgaggcttggggctcatagagaccactatcacctattcacgtttttcagagccattttctgctatttaaaaatgtttgttcttagacagtcatacactcttcctgagccccctcctccgacgataatttgctttagatcagtattctgagtttacacttgtatgatgatgtaaaaatctagtcacagctgagccatgtaggaagtgatgactacttctcctttactgtaactttttgcttcctctcaaaactgtcatgattgcatttgtttggttgtttacttttctatatgtttattcctagttcaataacttctttatagctcagatggtaaagaatctgtcagcaatgcaggagacccaggtttgatccctgggtcaggaagatcccctagagaaggaaatggcaacccactccagtagtcctgcctggagaattccatggacaggagcctggcaggctacagtccataggggtcacaaagagtcaaacacggctaagtgttagtcacacacatccataattcaacttcaaactcttaccagtgttctaaatcctctactcaagatgctgaggtgttttgtccatttcattttcctctcctagagcttccagggtgctctcctgagatctccccccaccattactatctggggaattcccttaacctactttgggccttaatgtttagtataccgtacaattttctttttctcagtttactgtcttattttatagagcacatattctcctgtcctgagacttaatagtttggctaggtgttactgaattatatgttggaaatatttcctcagacgtcttaaagtattattctactaccttccaacttcttaaacttactttcacagagtcttattttagccctcctgcttcattcccactccagagccatctggtgccaccaatttctggaggagggttttttttgtttttttagggagtgagggtactagagtctgaagtgtaaatcaggatgttgcttggctcacctattactagcttaagtttcagttttctcaggtcttgtaaataattttcaaacatgtcttagctgtgtttctccctgtcctcatccttgagagtttatgcattttagaaaattcttttattattgtttagtggaatattgaggagtaaaatttgatgagtaggttcagttcaccatcatacacataagtctttttggctataagagcctttgaaaaatgtttttgtctctggtcactggtttaacacaattcacttactttccattcctgttttacagttcccgatgagcatctgttatcgtaagtatatatccttttgtatttgggattctttataaactactaatgtgtgtttttaaaggccagttctttcaacatcaactctttttttttagaaaatattcttactaagctaggaacaatagtttattgatgtgattgttaaaaatctgtctcaagtgaataaccagcaccgtacttgacagtacaaggcactcccttattgtgctaagtgccactgtattttgacatcgttctaaaaggtgtagctcttacactagtaacacatggaaagagaaggacatttggcccttgaacaacaactcttacacatgcagtgcttgggggagcctgtttcctgagtgagaggctaagagtatttaagaaagaagatgttctaggtacatacactagaatattatccaaaaattaaattttaaaatatatatttgtgtatatacatatatgtacgtgagcacacacacacgtatatatgtgcatcattctcagaagcacactgaatgggaaaaaaagttgcccaaaaagcccagaatatactgttcatattttaaacttagaaaacatcaccatatgtatatatgtatgtgtgtgtgtgtatgcacatacacgtatgtactatgtatagtaaaatataaaaacattaatatgaaatgcatatggttgccttggggatgaagaaattgaggaagaacaggaagacctctgacatataaagaggcttctttataaacaacatgttaacatttattctgggtggttgattatgtgggattttgctgtattacgtttttttccgaattaaaataaattttcagaagctgctgatggtaatccttcgggtcgagtcagagcggtggctttcagtccatctaacctgaggctcctctccttcccaggctgaaatttgtcttcggctcatcagccgtccaggccttggacctagttgaccgccggtctgtcaccttaatatcctcgcccagcgggaggcgtgtttaccaggtagaaacccggaggtggagtaatctcaaccagatccccttaggacaaacgttttcatgaatctgtatgaaagctggtggacagttgaaaggacttgacccaacttagtgaaatgagagtgtgaatagttagaatcagaaagatgtggccggttaaccccacctgggagcagcatgtggaaccagcaatgatccagagaggctctttgcccaggtctgatagtcacagccaactttccctttctgtcatttgacactacatggatcaccctgttccttgtctcttgcttacaagcaaaagccaaaatgcattttaaggtcctttcacatgtcaaggttcatctaacagaaacgatctgtcagaactgttgttggaagcattcacgaaggccacattgtgctcaatg

SEQ ID NO: 42637 - DNA, 1844 bp, Bovine  19866880938428
  misc_feature (1)..(1): n is a, c, g, or t
nttcttattggtcaaaatggtcaggtgaagacaatttcatgttgttcaaccaacaataacatactggacttaaatacaccctgtggggttcaggttagcaggtacttcctgaggccctcagagcagaaatcatttgggagctgagtgaaatgccttcccagatccccgcattgctcaggaccgacaggagtgtaagacaggcttactagaggacatgatcgttcctcagaggtggggaaaggcagttcgatagtgctggaggcaaaccaacacctcagaggcctgctgagcaagaccgggcttctgaggagacacaaaaatcaaccaaagaagcggaggaagaaactgggaacagcagtattgaaaaccaagggaacagggcatttctggaaggggtaagttgttcactagtgttaacaacagcagggagaaaagagtcgctaagtttagagcgtgaaggcttctgcagagtaaaagcactgatgtcctcagtgggaaccctgagctgaagcaaagccatcttggttgccgagggcttggacttctcgaatctagtaattaagagctgggataactacacaaacaacatgtgacactgggctcatcctttctcctctgggactttcaacctttgttaatcaccatgtcacagatccaaacataactccacctggcagtttctagttggcagggtttactgatggtagaaaccctgggttctgcagggcttccccagagccttggatcgctggatacatgtaaagagaaggggacgagtgaacctggttgatggcgtgagtgtgaaaacagtaggcaaggaaggttccagcccagctgttcagaattctgtccttgtgggcatttatgagcagccctggtgagggtgttgcgtgcagaactactggaggcatggactctggagctggcatccatgagtctgaaccacagccccatcacctcaagagtcactaaacccaagcctcagtgtcctcatttacaaagtggagatgatgccaacatgtggcatggagagtgttgtgaaggtgataggagataatacacattcacgctgacaacagggcctggagcaggcagtggtgcccagaccatctgctgccgctgcctcgaggccagcaccatcctcagttgtgggaggtgcgcttcgaaggtaatccacacagactggtagagcagagaaaggcgcaaacaagtacatacatcgacacaggacagcagggagaggtatgggccgtgggcagctcgtcgaaggaggctggtattggtaccaacactaagtcactggaactgaacacaggtcatggaaacacccagtgtggtcccagaccctcttaagatgatgaattgggatgggtcctaccacagtactcagaaccgaccgaaaggctaactgaatgaaaggtttttagtgaccagcacctgggatggtaggaatgcttagagctggctgcctgcgcacatccacattggaaagacaactacaggagcacgaccttgtctgcagacagctggatggtctacccaagtgaggggtagaccagggggtaaacactggagagccaatccagccccatgtaagacacacacttctgagacccacacttgttcgaagagaaaatgggtagctgcacacgtgctgggtggggctccctcatagaaagcccccaagcagagccaatggaggcctgtgggaggagttcatattacatgtggttggaccggcctgccagagcctcatactcaagggttacgtgagaggcaacatggagctatcattatttatgcacattttattgggagttcatgaaagaaatcccacttaccca

SEQ ID NO: 42638 - DNA, 703 bp, Bovine  19866880954672
  misc_feature (1)..(1): n is a, c, g, or t
nagagcgagatctattctgtttgtgaacaaaatactgtgttcctgacacttagaacagggcctgacccatacctagcatccgcttcctaaatgtttgttgaatgactgaatgaatgcaggcacctccacatgcccagacgacccagggcacaggcacaccggtgagcttctgtgcttggtccctgctacttcagcaagcaaggaggcgcgtgctcctgtgtggacacttgccagcacacacgtgcatatgtgcttacctgtatggagggcagcctgtatgtgcgccctgatgctgacactcggtgagcctgcctgctgagcccaaaaggagtgcccctggggtgcagtgtccagctctgccagtctggctgcacggggctgcccctgcctctcaccttctggatcatgacgctgtagatacccgtgtactggaagccacgcatgtagtagagcaggttcagccagcccagcaccagagagcacacgagcagcggcaggtatcccttgacggccaagaagcgcagcacctgggacagcacggtgagcagtgcctggaccaggctggggggggcaggggtcgggtcagtttcgcgggcctcccctggccggggcagaccccccttgcccctcaaccctggccgcggtctcagagatgagatgtcctctccgtgtccagactggacttgagcatcctgacctccat

SEQ ID NO: 42639 - DNA, 1729 bp, Bovine  19866881007195
  misc_feature (1)..(1): n is a, c, g, or t
ntcttagttttttgaatgttgagttttaagccaacttttttactctgctcttttactttcatcaagaagctctttagttcctcttcactttctgccattagaatggtattatctgcatatgtgaggttattgatatttcttctaacaatcttgatttcagcttgtgattcagccagcccaacatttcacatgatatactttgtatataagctaaataaacaaggtgactgtatataaccttgtcgtactcctttcctaatattgaatcagtcacttgttccatgtaaggttctaactattgcttcttaacccacatataggtttctcaggaggcaggtaaggtggtctggtattcccatctcttaaagaatttaccaatttgttgtgatccacacagtcaaaggctttagcttagtgaatgaaacaaaagtagatgtttttctggaattccttagctttctctgtgatgcagggaatgttggcaatttgatctctggttcctctgccttttctaaaccaagcttgtacatctggaagttctcgtttcatatcctgctgaagcctagctagcatgtgaaatgagcacagttgtccagtagtttgaacattctttggcattgcgcttctttgggattgaaatgaaaactgaccttttccagtcctgtggccactgctgagttttccaaatttgctggcatattgaatgcagcactttaacagcatcatgcttcaggattttaaatagctcagctggaattccatcacctccactagctttgtttattgtagtgcttcctaaggctcacttgacttcacactccaggttgtctggctctaggtgagtaaccacaccatcgtggttatcctggtcattaagaccctttttgcatagttttgtgtactcttgctgctgctttttaatctcttctgcctctgttagtccttactgtttctgtcctttatcatgcccatcctggcatgaaatgttcccttgatattcccaattttcttgaagagatctctagtctttcccattctattgttcgtctctatttctttgcactgttcattgaagaaggccttatctcttatctctctttgctatttgattcccttattattttgctttaaatttatcagaatacgaaagggtttatctatcaaaagatgacttatgctgtttagttattagtcaaaataaatctggttgggttcattagggcctttgggtccttagacccttgttggttaagtgattaccctgtagaatcagcgaagcgttgctcagaagcacgtgttgtctctggtgaataattactggtggggctgacgtgcagcagatgcctgactctccctttctgggtctcttagcaacagcttgaagaggaggccgcgaagcctccagagcccgagaagcctgtgtccccccctcctgtggagcagaagcaccgcagtgttgtccagattatttatgatgaaaaccgggtaagttcacaccattctgtggcagctcagggcttgaagaccactgggctataccttctccagttgtctctgttctgtggtaatgttaactgtattaaaacctgctttctgctataattttttaatgttcttaaattttgaagcttggtgcttttctttacatactgaagaaaagttgatagttgtgtcttaaattatttaatatttcatattcatgttatagggtataaatacttatttttaa

SEQ ID NO: 42640 - DNA, 949 bp, Bovine  19866881024928
  misc_feature (1)..(1): n is a, c, g, or t
nccaagtgctgcaactactgcaccaaaagatcccaaaggacgtaaggaatatcccgaggcagccaaataaataaatattaaaaagaaacttttaaattgtggcttaatgttctggaccatggctatataattaatcacctactgctacgttaggttgctatcaattttttttgctgtaatgaatatcacaacacacagtcaccttggttcctatttttgtggtatatttacagcctctttcaaggagcagaatcagccacaaatacatgccttgttgaggccagcctccctggtcccactcttcttctaaactgacatgtgacttgacgacccagcctccctccagctcccaggataacttgcctatgaagtagcacgggagcagccttccatgttggcacagtcgctccatatcagcttggtccactgcagtctcctcccacggctccttttctaggaaacgttgtcctttgtgccctctgggaggatgggagccctgccctgctcttgccaactggggctggaacgctgccctctaactgtacccagtcacttctttgtgtctttggagaaaaggccctgtgaggagcttcgttttctctctttacagtaagaggatgcttggtcatgttcactttggcacttggcatatggtctgttttggtttctggaaggggccggcttttacagggtctcaagaggagaggggattagttaccaacgggaccccagcagccccagactctctgctttgtggcttccctttcactgatttgtgtgcatttattggaaaacacagagacttccaggaactggtagcaggccaggctcatttatgttgcctagtgggtactggattctatttccttgttcaactcaaatcagtctgttaaggtcttgggcttgttaatgccaggatgacgttgagacgagcagtgggagaaaagat

SEQ ID NO: 42641 - DNA, 1696 bp, Bovine  19866881167647
  misc_feature (1)..(1): n is a, c, g, or t
ntgggcttcaagaggctaattataaaagtcaaaatcctcagcattctggtctctaattcagggtatacttgaattcatagaatggctggataatccgttgtttgcctgttgtgatctttattgcatgtgaaaagacttgattctcctaataagaggacagagaaagttctttgtgctttgaaagaagaaattgtcatcggatttttgtggatttcattaggtcagagtactggtgcttacacagaagatttggatgtgtagggttttgtaacctagacctctatagtagtatagagttggatctgcctctggacagtgtgggctggtcctgtcacacttgctatttcaatctggggttcttcccttatgttggtaactttaacttccataggaaaatcagtcgcctatatgccctatgctgaggccacacgtgctctagagcaggaggcacagatgcacagtaccgcggccaggtcagcgtcaccgtgtaggctctctccgcagcccggtgtgggtgcagtccgttctagtggcccgccaggtaaataccgatcctcctgccgtggctgctggccatccacctacactgctggcaggggtggtttgctcccaggacatgtccctgctatttcagaattcctttcttgtttctctgcatcccatcttcagttgtattcagttgagattcactgggccactgggaggtttgtgttcatacctgtatactgtgacgttgactgcctgttctcctatgagtacatgtactttgtgaaaatcttgagatccaccccctgctaaaaaatattccagtgtctatgagagtcagaatcagtgtttctcaaattatgcaagatgcaaagaggacatataactggctgtcagtcatatctgtatattttctagagttgtaatatcagctgtccctaagaaatacccttcttttcacctcctgtgtgaggttcaaggagtggtgcaaagagagaaaaaatcactaaagattgccatttgcataagctgaacagaaatagtctgaaatggacatcagtctgaaagctctggtttgacagggagttgagtatttcggtgtcacagataccatttgtgacctgagtatggatacagatttaatctaagtgaattcatcttgcacttacaattgaattgtgattgaagaaataaattgggataggtgggaacatcacaaactaggaaattgactatttcgaataatttttttcttccttttaaaagtcctccagcctgctcctcatcaggtgataactaacctccctgaaggggttcggcttccaacaactcggcccactcggccgccgcctcctctcatcccgtcatcgaaaaccacagtggcttctgagaaaccatcgtttttactgggaggctccatctcgcaggtaagagggcttctcttcccaggagattctctgttggttactgttttgtaaagattttccctccctcccatatttatttgtcagagtctaaatgaaaatctatttatgacgagacattgacttaaaaatgcagcagtcgctttgtcttccatggcacatgcaggtttgttcgagttaggtccccaaattgagtgagtgtgtcatgtggccactcagatctctgtctgcttaatcagtggtcagctaatgatcagggagctctgtgcccgaaggacttaaattcc

SEQ ID NO: 42642 - DNA, 1259 bp, Bovine  19866880116101
  misc_feature (1)..(1): n is a, c, g, or t
ngtccgtctagtcaaggctttggtttttcctgtggtcatgtatggatgtgagagttggactgtgaagaaggctgagcgctaaagaattgatgcttctgaactgtggtgttggagaagactcttgggagtcccttggactgcaaggaaatccaaccagtccattctgaaggagatcagccctgggatttctttggaaggaatgatgctaaagctgaaactccagtactttggccacctcatgcgaagagttgactcattggaagactctgatgctgggagggattgggggcaggaggagaagggggcaacaaaggatgagatggctggatggcatcactgactcgatggacgtgagtctgagttaactccagaagttggtgatggacagggaggcctggcgtgctgtgattcatggggtcgcaaagagttggacaccactgagtgactgaactgaactgaactgaatgagatatgcatgctattttctcaagatgtgcttttcttcttaatttgatataaagcagaatgtcagtgtttgagattgaccttagtaaacctcagaaacaaagaaggctggtttgctgtattactatctaggcaggcattcactctgttaaaattattatcatggtataaaatatgtgaataattagaaataataaatggcattcagtaaagtaaatctaaccacaattctgtagagtaagtatagacttagtagtaactcctgctttaatgtatttttttataatgtgaagctcaaagttttattaccattgtacagattggctttccaggtaaagctaggtatcagtcttttaaatgtgcactggatgtaaagtaaaatacttaatttctttgaaaaaatgttataaaaacgttttaatcctgaaaaatgtatttccttcaatatcataatttaatttcttgcagccaaagttcatttccagcattcagcagaattaatcaaacacctaataaaagctggagtgaactatactatgcaggtaagccactttttcagaagaatgtgttgttctaccttagtttcttgtcgtgagatacagaacacagtttttgcatgattccatctcccacccttttatttgtttttgatttttgttcttcttttttctttttttaccaaattgtctttacttccttattacagtgagaatgtagatcatcttgttttacatgtgaattgcataaactctttcaaaatgcttgtttctcagacatttattcattatcattga

SEQ ID NO: 42643 - DNA, 1593 bp, Bovine  19866880832809
  misc_feature (1)..(1): n is a, c, g, or t
ntcccaaggccatttctatacaaattgctgcatcagtcagggagccagcaggacacagatggtatgctgaaattaggataatttgaggagattttatttacaaagtgactaattacaaaggtatgggtgaggagtggggaaaccacaagagatagtgcaagagtgtggagataatagcagtagcaaagtcatcatcattagtcatgagaagacaaagtgggggctccagccagcctgaggtgacatcaattagagagaaccagaggatcaattccttcaactcaatctcacccagcctaatcatctcttcctggcccattttcttcaagtctcagctcagaacatatctcctcaaagattttctttgcctctccaccatctccctcctctgcttaagtacttgctatccaatgattttacagctgagctataagggaagcccaagaatactggagtgggtagcctatcccttctccagtggatcttcctgacccaggaatcaaaccagggtatcctgcattacagacagattctttaccactgaactatcagggaagcccaattttatggcatgtatcagcatttggcattatttaatgtccttcttctcccactacaatcttaccttctagtacaagtccatgactgcaggaatcatgtctagcttattgtttgctgtttcctcaacaatcaaaagagtatctgacatataataaacagtaaaacagtatttggcaagtgatgtgaatgaaaacaatttggaacacattaaaaaaaaaagtattgagaacataggctagtagtagtcattgattggagaagaaaaggtgagttacagaaagtgattaaggagaaaaattcaattagaactgaggaaaagaaagagacaaagatgatgccacaatgtcaaacctgagggaatgaaaccattttaatactcgtatagataacttggaaatggcactctttttggagattatcggtttacttttggaaatgtttaaaggactgtcttcaaaactgatgcttccaagtgaaatgtttgaaaaacatatgaaataacaaagtggttattaagggactgcttcaagagtcaacgatatggaagttatatgaacaacaacaatcacatattatacatgcctcaaacatctgatgttttgtttaaaccaagccatgcaacagtcaaggcatatttacggaaatctttctgtaggtccaatttctcttaatgaaccaccaaatgttttcttataatgtggtataaacaatgtgatttcagaatattttaagatctagcatagctatttaagtattaataaatttaatcattcatttttctgaaccatgttcatctatcaagtcagtaaaattagcaaacaaacaaatgcatatttcgatagatgaaatgaaggaagaagaaaacaaaaggaaggagggatgaaaaagaaaggaggagcaaaaaagccagagaatcttaagtctgaaacacacaccagcatgtcctgggctcctttcacataacatgtcactgaatcctcacacagctcttgatttctcaatttgaagaattttaaattgaggataaggaaa

SEQ ID NO: 42644 - DNA, 1581 bp, Bovine  19866880892809
  misc_feature (1)..(1): n is a, c, g, or t
nccctccatctattgatttatatgttaatccatctaaagacaccctaatagaaacattagaataatgtttgaccaattatctgggcaccctgtgggccagtaaagttgacatatagaattaactatcataaacaatccagggaagtgactgatcaaagaataattttttttttttttttttacttaaggatgtcttacatttaaaggacactatttgaatgccccttacaaatgaaaacacttcttattgagaaagtatatatagcaaatcaagttggtcaggttctactttggggcccttcaagtctctaactctgggcagttaaatgaaatagtctactgtagacatactgccttggtatttaaattatatttgcaaggaaatatacatgtagcatcatagtgcatagaaatagaagaggaaacagttataaaaactaaaatgtagatatgatatgtttatatttatataaaattgaaccctagagtcatagtataataattacaggccaacaaggatacataagtgttattaaagatgtttatctgtgatctctttgtaggggaaaaatgcctcaaccaccaatcactgacaagacagcagtaattttataatctgcttcatagtgggagtaatgaatattatttcttggtgcacaaatatctgcctcttgtcatgtagtttccttacatttcatctcttcattcttgacaagttggaattaagagtcctcagtttcaaagtgattggtgtgaaatgatgttatgataaaacctgctgtgatgccaaggaaaccaaaaccagaagcaaaacataagacattccataacaacacaaatgctcaataccaaaatatttttgaaactcacacacacacagacacattcagaaaatgcatgtcttgccaaatgttgcaaaggatagtaatttttctttcagtaacttctgaaaattctccaaaacttatgtttcctttgaatttccgttggcaagttaaaattttcatccccatatgtaaaggcttatggaccatattggagatctcaatcttcctcccacaaatcagaggttattcattattggaaccccataattgaagggagtgtctcactgtgaataggagtaaggcttgcctttcacttttctgataccacctggatggatgccttcatttttctcaccttccagcaaatatcacctatcccatgttccatttcactccaatgcaaattaaacccatagacagatgagtttagagactccattttgagaaggaaactcaatggaataaaatcacattgcccaacagaaggtaatgaaaaagaagtggtgttgaaaagaaaatcaaatgaatgacttgttgccagaaatgggaataggtattatttcacattcaacatctaattagatcagatgtactttgcacaaccttgtaatgttaaattaacaaaaataagcactttctgaaagtcattggaagattctgatagggcattttcacttaagaattatgatagattctatcacttggggggtgaggggacagcagccaagatgaaggagtagtaagaccctgagtt

SEQ ID NO: 42645 - DNA, 897 bp, Bovine  19866880909248
  misc_feature (1)..(1): n is a, c, g, or t
nttgcctaaaagcagaacataaatttataaagctgtaccactctctcctctctacctggaatgatagaagttaatcattagatacaattctagacccttatcagcccagacatggcaccagaggagactaaataacaaacattgctaattagtgcttttcttgcactatatatataccgcccatatatacacctttccacaatttgccacgggtagaaactcaaagtcctttcccttcctcttaaaacttctctaaaagtttattattcttttgttaaaatgttaacgccgtgtgagttaccatctctgagtacgcccatgtgtatgtacaataaacatgttaataaacttgtttgtttttctcttgttaatcttttatatgtctaatttatggggcactggctaatgaacctaaaaagatattttttgctctacaagagcatcagctgaaactcgactgatcctgtgcagaaggttatgctgctatgcccaaaggtggtgccatggcagcagcactgggacacgtcccataagatgagccattgctgagatttgtcaaccagtgttgtagttgataaaagcccgacactgtcatattcacattagacagtaagtgaccagaagaccatgatttgcttttctatagatctagaaacttcactgtacatttactcagcaattaaaccatcttgggcttcccttgtggcacagctggtaaagaatccacctgcaatgcgggagacctgggtttggtccctgggttgggatgatcccctggagaagggaaaggctacccactccagtattctggcctggagaattccatggactgtagtccatggagtcgaaaagagttggacatgactgagcgactttcactttaaaacatcttaggca

SEQ ID NO: 42646 - DNA, 1509 bp, Bovine  19866880930871
  misc_feature (1)..(1): n is a, c, g, or t
ncagagtgctgaggccacccccggtgaagctgcctggtgtggcatgaactttcattctggaaaataggaatttagaaatatttcaaataaggacaactgctgggttagaaaatggaaactgagcttgtcagcaaccactcaagctgagaaaaaggtcagactggcaggggcagtaaagagcacaggatgaagcatctgcaaggggagggaggaagggaattaacatagacattaaacctgtgattccagagagatgatgagtcctttgttgttaaacctcattcccctctcaaaacgcccttgagatacacatccttatctttattttatacatatggaaagaactcaaaagaaagatcagacttgtcctgagttacagagtaatcctggacagagccaggctgcgaatacagcagtagtctttcctccccgctgtgttgcttctctgtgcattaacagtggaatgtttgtcccagaacttatgctttggtgaattcaggatactagtctcctttgcagtaaaacaaaaggactcaacaaattttaatttatctcagagaagcctaaaatatcattggaataataaacttggaattgttgatttctatcttgtggaaagttcatctgagaataagacaaaaaaagaaaagcagagttaagaaatgaagggcacttttatccaaagtgcaacatttgtgccttgggtttagttagtctagttctaggacattttcagagcatgagctaaatagatctctcttttgcttaattgtatttaagttaaatatctaaaaaaagtcctggctgattacaatcatgtagaaattatgttatttggaattatataaagatgaaaattttttcttcaatttttttttgcaaattatctaaattggtctgaatatacaataaaaacaaaaccacattatgccagttccagattgaataattcattttagtggcataagtttgatgttatgtccatcttctcatccaagctcaaaacttctatttatcccttaagccagaactcaagcgctgtattttattaaaaacatctcttgtttccccataataatatttttctatctgatccctttcataataaactatgatcaggatcagtgtacttcagtaattaaaaaatattctaatttgttaaacgaatatattctcaaagtaaaatatttcaaatgcagaagaccctacaattagttataaactaccacacagcaaaaatcatacctttaactcttaagaaattgtactcttaggagctattttgcatatatatatatatgtatatattagtatttattttttaggtatgtatttatttggctgtgcaggatcttagctgtggcataagggattttttaactgcagaatgtgacacatggtacattggtaaagaatctgcctgccagtgcagaagacacagaagatgtgggttccatccttggtctgggaagatctgcggagaaggaaatggcaactcaccccagtatt

SEQ ID NO: 42647 - DNA, 747 bp, Bovine  19866880938974
  misc_feature (1)..(1): n is a, c, g, or t
ntgattacattataacattttttaatgtatatgtttaaagttcataatccctaataaaaatgttaaaaagactcgactgacataactcaggctatgaaatcagagaactattgttggatattgacttttatcccagttctttcaaagtttgggtctttaatttgtattttccaagtctctaaagcattcctaacattgaagtttcatttccagaagataagtcaagaatcgtcatgactacttaactagctccactaccatcctatgttgacatcaattgctttggataatatatcagagtcctgtgtctggtcctcagacttgaagattcaggaacctagtattgttttctctacaaaagcaacctgtctctcagggaaaagttataaattggaatttctaacttggaagttaaatcattatttttaatcaaacatttatagcatgcctactatgtgtcagagactattcaagcactttggaaataatagccactttttcctttataacaattcatttacagatgagaaatagcagacacaacaatgctatattactttcctatagacatacagcttatcagtagccatagtttagagttgaatccagccaatctggttctaaatctatgcctgcaaccatgctacatttgataatcatcaggaaaaaactaaaagagtcaacctgataatgaaagagttcttgagctcttgttcaagatatgtagaaccatcgtattcaaaacta

SEQ ID NO: 42648 - DNA, 970 bp, Bovine  19866881174448
  misc_feature (1)..(1): n is a, c, g, or t
ntttcttttaattcattcattcattcatttattcatttaccaatactttagtaagtacatgttctatataagagagggcaaatccctttttcctttatatttcaacttgaggatgttaatatttttattccacaaacttttaggactattttgactagttacaacaatgggaaaacacttttagaaatttgatttcagttgaatttccttcacagattcttttatgtcctgaggtgacattttatagtataatttattgtagaaagcaaaaataagcactagcctgttggagctgtccttatgtaagaaatcatttgataaggacacttcctaaataaagagaaacaaaaaaagaaatgaaaacgtcatatactttgccatttgtgttcttaaattattaatctttcattaataggatgggctcaaaacatttgagggaagctgaatcaataaatcaaatgctgttgatttaaaatatcaactgctactgtcaggaaaaattagtttctgtttttctccctcatataaactttttagtttagacttaggtatgaacaacatcaacaaaaaatcacttcataaaatagggaaaatgtgtttaattctataaggttataagatacttgcatgtttttttatactatttttatttacatatattaaaatattgtttattaaatgtattaataattaaatgattatgttattttaattataaccttatgttttactataattgtattccaaatagtttttactatttagaaattttattcattccatcagttttaattattacctcctaccatgtggtttgaagtgtttaaacatttaaaatgtatcaagttcagtcgctcagtccagtcccgactctttgcaaccccatggactgcagtacgccaggcctccctgtccatcaccaactcccaaagtttactcaaacttatgtccattaagtcagtgatgccat

SEQ ID NO: 42649 - DNA, 1172 bp, Bovine  19866881291609
  misc_feature (1)..(1): n is a, c, g, or t
ncaccagcaggagctgtcttgaaaggaatgatgttccccagaggagggatgtacccatgcccatcaaaaggttctccacagactcagattttcaagcaagatacaggatctgtcaaactgtcaggaacccagcatgaaaagagtcaatatgaagccaaatcacagcagcattgtcagagggaagcttgactgcccttattcttttccttgaaaataaacaaaaataaaaacttttgatactattgctttatttcctgattccaagggtgacagtgtttcctcttatgatcgaatgaagttaaaattttatttttaaagggattcctgagtttgtttgatcttcgttgagttttatctcaacgtctgtaatcacatggaccatccctttgtaagctaaaatttgaagacaaaataatgtcatgatgatgactctttgtaaaaagtactcacaagtaatgattacaggaacaaggtaagctgggaactatttccatgtcaagtctcagaggaaaagttaaaaacagaaaacaaaatattgactggtagtgtgcttctaagaatgctccaggtctccaatgcaaacaatgatttcaacagatccctgaatcccaaattctctgccagttttcataggaatacatatttctcatagaacattaccatgaagtttatggtgttttgccccaaatgtctagaattttactaccctgatgcatcagactgtaccacacatagactgagtatgctcttctgcttttctacattcaagtctgactgtgtgtgtccatgtggctcggcttcccctgatgtaaactatgtactgatcaaggctctcaggacctcaaaatcctcaaagctaaaggggaaatgtataaaaagtcaaggtgtttgccaataactctgatccatttataccctcacactaaaaagggaatctcttaacaccgtggcacaggtgtctgctagaagtaccatttaatggctccaacaaagatgcacactcacactttaacagctgagaagcaatgcttaaggaagccacaggcttccactgtatgctggtgatagaaatctcatccaagctcagaaaataaagaacagataaaaataaattcttcaaggacttgagactaaactgaactgggtatctaggtcaggcaccccaatttttt

SEQ ID NO: 42650 - DNA, 1380 bp, Bovine  19866881693925
  misc_feature (1)..(1): n is a, c, g, or t
nttaagttgtttgatattttaaaaacaccttatggtgtttttcctattcaatggctttgcaacaaaaaaatatcccaagatatcacacttttgatgcttttttttttttttttttattctcattctcagaaaagagtacaaactttcctgggataatggactatccattgaagttttgtgttttgaatctttattccattgctattctattcctgaaaaaaaaaaaataaaagtttaaatcatgcaacaacacacagcctgccaaactgccacaagggagctgcttgcggagaacctaacaatagggtacttttgtttcttcctgtaaactttccctctaggcatggtaaatgagacaagctagcaggtcagctttgaagacactcaaagcagacatgtggcaccacacagattacttttctttagtgagacagacatttatcctgcttcttttcttctgtagagaaaggccaccacacaatgaaatttaaacctcatgcaacaagcaggttaaccatctgccctgacacacagatactccctgaggagctatagcagacctcttctaccccaagacttagccatcagctgaattgagaggccaaactgaggcattaacacttttctagctattcagactggtgaccaccaaccccagtgtaattagggaccaatctcgatcttctactgtggtaaagaaatttgggctagttttaagtgggaattgcaaaggtaacctcatagaaactaggacagaatttactttaatttcttgtaactggtgagccacattcactaaagggaataagatgatggagaagaggtaaaagatccatgaaacatgtgattatttgacatcaaactaaaatatgtgaaaagagtcaataagcaggaaaaaacactgaatttagagttacttccatgtctgctacttattattggtaactttagcatggcttccctggtgactcagaggttaaagcgtctgcctgcaatgcgagagaccagggttcaatccctgggtcaggaagataccctggaaaaagaaatggcaacccactctagtattcttgcctggagaatcccatggatggaggagcctggtgggctacagtccatggggtctcaaagagtcagacatgactgagcgatttcattcattcacttagcatggcctggggcttttgtttggtggttagtcaggactcctgaatgatgaaatagaaaatcacctaaaataatttagagaaatagtggatttgttataataataccggatatcttttggagcctaaagcagaatgaaagctggattggcaaaagagctgaaaaaagatttggagttccatcaaaacactgctccctagtggaatttcttca

SEQ ID NO: 42651 - DNA, 1991 bp, Bovine  19866880914404
  misc_feature (1)..(1): n is a, c, g, or t
ntttttgttggtagtaattttaaaaattagttcatttcttccccaagaacttcacgtgtatgtgtgttgtatcttttttccatatcagcactcaatcttagatccttttaacttctttcttttaaaatttctttatcttgtttgtttcttgcatttcttctccttactaaattttagtcaattctattattctttggatactttgtacttagtttttatgtttgatatgacttgatcttttcttttcttgagtttaatcatccctgtttcatctttttgttgaatgtatttttttcacatccaataatccttattaagaacatttatttcagtttaaagtggtatgttacagatttgtttttgatttacgagaagaatttttcttagctgaagtgtgtggttttgcttcagtgtataaagctgttacaggtcttagttgtggcacatgcagtctctgaggcatgtgggatctttagttgtggctctaattccctgaccagggattgatccccggcccccttcattgggagtgtggagtcttagccattggaccaccaaggaagtccctagatttgctttttaaaaaaattcttacagtagctttatatggaattggtttgaatctttttatttctttgcatttaattgaccggtgtcctaattcaaaagcattcttctgtcattttagtgatgtgatgtttcttcaatgaatgttgttactgctgatcatggtggagttgtttttcttttcatctttgtgaaatcctgaattttacccccttttttttctttttcttcacttcccaggaatgctgaaaactagataaaatctagttttatatttttaaataaatgtttaaataaataaacatttatttttcatttacggtttgggtaaggttaccattattctccagacccaaagtctatatacagacttctggaagttattactttagtggtggtggttgttcagttgcctagttgtgtctaactctttgcagcccaatcagctgtggcacactaggtcttcccgtccctcaccattccatctcctgaagtttgcccaagttcctcttcactgcatcagtgatgtcatccagccatcttatcttctgacaccctcttttccttctgccctcagtctttcccatcatcagggactttttcagtaagttggctgttttcatcagatgaccaaaatactggagcctcagcttcagtatcagtccttccaacgtgtattcagggttgtacttgagttggtagcaaagaagaattatcttaatattaatgaactaattaattagttctataaaagttcaactcctttttcatcttagttattttatcttttttttccccctatcttttttttgtctattttatatgagtacttagagaacacacgttcatggttattggttgtttaagcatttacatgctatgcattattcagtcgaggtctctactgtaacagctgtagggagatagtatttgagtctgtctccactgcttaattagtttgttatatttagcaatgtacatcacctctctggagccaccatgtaaaaatgaggttgaggagaacatttacctactagaattactgaatgagatcaacattgtaaagctcttgaaacatttaagtgaatattcattgtttcaaacacttgacacactaaaaaaagccttcctttgtaggtgaaaggtgaaacctgttggtaacatccttgttttctaggttgctggaggagcaaatataagtcagatttcagaagcactgagctgctacaggaatagatcatgttttatgaaggaagccctctacaggctcttcacaggagacgttttcaacgcaaataaccatgcctgctattttaaaggtaactacaactcagaaatgtaatttttaaaactacttattacttgattcaattaaagttgtttaaaatttggaaaactcagcagtggccacaggactggaaaag

SEQ ID NO: 42652 - DNA, 956 bp, Bovine  19866881111813
  misc_feature (1)..(1): n is a, c, g, or t
ntttcttttttttttaattagcaagtctgaactataatgtctagagaagaatatttttgtgataaaattgttaagaaatgcaggaaagtcatcaccataaaaagtcaggaggaaaaagaaagtcatgagagttgttacttttaaggggtaggtgggagcagtgaacgaatcagggcacacgagatttctgggtggtggtgttatcataactcattcagctcgagaggaagaagtctggctgtagagaaaagaatcacatggagagagatacatgaaattgaagaagggttgtgtaggtgtgtgtgtgggtctcacaatggcagaagcaggcaggaatcactggggcagtcattctcgtccctctccccatggtgctctgaggttctcaagcccttccacttctgtgaggcagaaagggcaagggttattctcccgattttatgggtggaaaaactgaggcctgagtgtgtgtgacttgccccaggtcacactgctcatcaagggtagaggctgcccagatcccaggccccagcccaggagtgagcagggcagctggctcacccaacgctgccctgtcccctgcaggaattgctgagattctgatgaacagacccagtgcctgcaatgccctggggaatgtcttcatcagtcaggtgagtaagggcgggcaccagggtgggatggggctgagctgggaggtatctgatctggtctcctctgcagctgctggaagctctggcccagcttcgggaggaccgtcaagtgcgtgtcctgatcttcaggagtggagtgaagggtgtgttctgcgcaggtgggtttccttccttgcccccaacccggggctcagcagggctcccaccagcctgcatttagggaacagttaggttgttttagcacaggactcgggcttcccaggttgccctagggtaaagaacccacttgggatacaggagaca

SEQ ID NO: 42653 - DNA, 681 bp, Bovine  19866881976176
  misc_feature (1)..(1): n is a, c, g, or t
ngggtcttcccaacccagggatcaaacttgcatctcctgtttggcaagtggattctttgccattggcaggtggattctttaccactgagtcacatgggaagtcacttttaaggctcctttaattattattcttttgaatggttctaggtaagacctttttattcagaaagaaattacaccgaaataaattagaatcactttacataactgaaacttggagatttataaatttctgaaatacactcttaccaaaattacaaggaagctataaaagacactgagaaacgtaaaatacactcaatacttaacaatatgatataaaatttcaacttataccacttcatagatatacccaaaatctgtatctgcttcttctaacccagggtcctcctggtagtattttacataaattttacttacatcttctgacaatatgacataaattttcaatttgtatcacttcatggcaacacctgaaatctatatctgcttcctctagcccagggccctcctggtagtattttacataaatcatatcttcaagcttcttctcaatctctgtaaagacaagatctaccataaattaatcaactgcagaactgtttggagcagcctcaatttgatgagttctaaaagaactgtggaaaataatctatttcaatccacggactcacacaggta

SEQ ID NO: 42654 - DNA, 1936 bp, Bovine  19866880356552
  misc_feature (1)..(1): n is a, c, g, or t
ntgatgggaccagatgccatgatcttcggttttctgaatgttgagctttaagccaagtttttcactctcccactttcactttcatcaagaggcttttgagttcctcttcactttctgccataagggtggtgtcatctgcatatctgaggttattgatatttctcccgacaatcttgattccagcttgtgcttcttccatcccagcatttctcatgatgtactctgcatataagttaaataagcagggtgacaatatgcagccttcacgtacttcttttcctatttggaaccagtttattgttccatgtccacttctaactgttgcttcctgacctggatatatgtttctcaagagacaggtcaggtggtctggtattccaatctctttcagaattttccacagtttattgtgatccacacagtcaaaggctttggcatagtcaataaagcagaagtagtttttctggaactctcttgcttttttgatgatccagcagatgttggcaatttgatctttggttcctctgtcttttctaaatccatcttgaacatctggaagttcatggttgacgtattgctcaagcctggcttggagaattttgagcattactacttttgagcgtgtgagatgagtgcaattgtgggtagtttgagcattcttcagcattgcctttctttgggattggaatgaaaactgaccttttccagtcctgtggccactgctgagtttccccaatttgctagcatattgagtgcagcacttttatagcatcatcttccaggatttgaaatagctcaactggaattccatcacctccactagctttgttcatagtgatgcttcctaaggcccacttgacttcacattccaggatgtctggctctggtcccccaattttgctcatattgtaatcactgggggattattaaaaaagcaaaacaagacaaactactactgcctggttttcagacagttttcagaactcctaacattctgatttattagtatggtgtatgacctggccagcaagacttctaaagactttctagggattaaaatgtgcagcaaatttggggaaccctgttagcataaagaaagatggagttccagaatatcatcaggggtgcaattgctctgaagtatacaaacaagacacacagacacacacacacacacaatgttttgagtctgcatgtgctaggttgccatagacagtagctttaaacagccctgcttgaatgagttcaaagaataagactaagcattggacagaacaaggcactgatgataaaccaaatagctatttactatctcatgtctgaatcttagctttcctttgagatgcctgggagcctcagaagcatcagaagtgtcatcctcactatcagtgaatcatctggatgaagaggagctctgcctagaaagtcactgttaaaatagaactcaagcctttaaccaggatgcctggttgaagacattagtataacactgtaaatgtacttaatcttttgatatatctgaattatataattttaaggtatctattcccttgtttttgcctctaaaatactcattatagagtctctctctcctagaaaatatatgtaaaatctatgcaaaggttttatccagctccttctgatttagttatcagaacacacaacatctgctaaaactgaagcccacagtctcagaaatttttctttcactgcactccaagtctgcacatcattagtacaattcagatggaaatcctgtagagatgcggtattgctaacagactgcactttcccagaaaatctgacctcccaaatttgatttatttaacatatttgcattttaatggatttttctgaaatggtaatctcatcaagatgggctgctgtggtttttttgagtaattcacaattttcagctcatttatatgtatttatt

SEQ ID NO: 42655 - DNA, 2355 bp, Bovine  19866880452707
  misc_feature (1)..(1): n is a, c, g, or t
naataagatgaattctcttctagcccaggaatagttttttcctgaaagaatctagagaaaggacaaagtaaaatccttatcatctataaaactgtatgattctctattataacaattacatgtatgtaattgcatgatttgaaatattcaaatggtatgattcctatgcaggaagatatgttcctcacttccccatcagcatttttttagtaatattaaaaaaatcagaattgcacttaatattttcagttcccctgaatgagtcaaactaggtgacaaggggttttgccttttaatctggttgaattctttatatgcaatattaaatcttattagtagacagggcaaactttcaataggcaaactgaacattcatgcacagaagcttaattcagagtcttaagaagaaagtggtcatacaattcatgagtgcaattacacacacagaggtgtacagagaagttaacagagcttgagtccaaagcgctgaagattagaatatgttatactcattagaaagtgttcattcaagtccacagcaagtcagtgagcaaaatactgaatccagtccttgagtgcagaggtcccatggaaaaataagtacttgtttctgaaaagtagttttggattcttaaatttgataaactctaagtccctagtatgtcaatttttgaagctttaagttccatgttaaaaatcttgatttttctatttatcctatatcccatttgtataaactatactttggaattttaaagttacttaaaacaaaattgttatttatttatgacatgaaatttggcaataacttgatacttagtgagatctgccactcaccatttttcctcgaaaaaatacagggagatgcaaaaacagcacttcagataagaaaacaaaaaaagttactactatcaagggctatttgattgaggaatgctaagttaccattaatgagtgaaatatcagtgataaaccaaaatatatttgaacaataaataataaaaataacaataataaccaaaatgatctagtatctagatcccttctggttataatggaaacttgcacagaaggacacacattttgtatttgccttagctttgcaactcaattttaacaccagtgcgcgcgagcgcacatacgtttattgccttaattgaaggtgttcacagtggctgattcccattatccagctgaagagtcttgcgagacaatctttaaaggaccttccctgtgaattttcttgttgaccattctcaatgggttggattcgggacacctacaaaatgtattttatatattatttcagtgtttaagtattgacttacttggataaagcactcgtctatttaaaagccgatgttatattgctggaccaaatgctgagcttaaatactgttccatttctttctttctggatgcttataaatagcttttggcttttaattggaagttatcagcaatcagtttttatgttaaacataaaatgggatctgtgcatatggtatcttgaattcagtgatttgtgtcttcactctattggtaaggaagccgtggggcacagtggatgctgcggtcaggtagtgtgaatggcaagtgtctgaaggtgggctctgtagcaactgacattttcacaagcagtttaatctttcagagatctggctttcttatctgtaaagtggaaataataatacatatttgaatggattttgattaggattaaatgggatgatatgcacaaaggtcctcatctctctacacaaacatattatggttgtccataaaagccagaagcaagacaaaaagtaaaaaagaggaagaaaaagagagagaacaaagaagttttttataattggtcggaattccaggatgctatagtctacaattctaatatccaaacgagctttaaaacccaaatgtttcttttttggtgcaagctcatttggtggtgtttcttaccaccgtcggtgaattccctgtgaggcaatttgtactctgctgtgctgcagaaatatccatctttgattacaaagtgatgctcaagatcctgcttgtgtaacaatacacggtattttctcctaaaatataaaatagttgaatcctgagaaacatctagcactaatgatttaggatacggaaccacagtcctataactaacaattgttacagatacagcctacgttttaccaggggaaggtagatggatgtcatattcccaaatactggccatctttattttgctatttgcttcttccttcattcaccatgtcctctgatgaggcaaaatgaaaaggagaagagagaggaagaaaagcagtcatgtttgaagtgtgtgctctagattcaactccatca

SEQ ID NO: 42656 - DNA, 4056 bp, Bovine  19866880651073
  misc_feature (1)..(1): n is a, c, g, or t
nactgaaagtgtaaatacccagtaaaggacaagaaaaatattaaataatttgcaaatgatataattgcttacctaagcaaaaaaatcaaatgaaattaaaataatcagatgaaaaactgttcaaaacaatgtgagttcatttgtcacaaaatcagtacgcaaacatcaaaagcttattacttaccagcaataagagaaaatgagaaaaaaactgaatcacaacaaaaaatatatagtattaaataataacttcaaaagatatgttttattactatttgaaaaaaaaatgagatgaattgagggacataaaagaaagcttgatcaaatggagagatatattgtaaagataacttttcccaacctgtagatcaaaatcttagaattttttgagaagcctgacaaaaattattgttttattttgaagaataaatgcactaacataaactatgatttttttttttaaagagtagcaaaagtaggtcataagtgttagtttctcagtcatgttcaactctttgcgaccccatagactgtgaagcccaccaatctctggccatgggattctccaggcaagaatacttggagtgggttgccattctcttctccaggggagcttcccaacccaaggatcgaaccctggtctcctgcattgcagacactctttacagtctgagccaccagggaagcccaaaaggaggtcgtagttgtactgtaattaatatgcattacagagctacaggcttccctagtggctcagtggtaaaaaaaaaaaaaaatctgcctgccaatgcaggagtgaaatgaaaaggcactcagtcttgtccaactctttgcgaccccatggactatacagtccatgaaattctccaggccagaatctgggagtgggtagcctttcccttctccagaggatcttctcagcccagggatcgaacccaggtcccccgcattgcaagcggatgctttaccagctgagcccaagggaagacacagattcaatccctgggtcaggaagatcccctggagaaggaaatggcaacctagtccaatactcctgccatggagaaattaaaattagatagacccaggagcctagtgggctacagtccatggggtcacaaagagtcggacattactgagcaactgagtgtgtacgtatgcacacacacacacacacacacacacacacagacaccccttgagatcaagggctgaaagtccttgtcttcaaattcttagcatattataggtgtgcaatggtttttgttaaattaatgactatataattgaattaactgttattgtcagtgtttgaattaaaccaactaattactgtttaaatctaatttttttctttaaaatgtggcacaagtgctatcaattgatatatagtgaatcaagattattttactttgagcccttctaggtatttcttatcagatattaagataattagtgtcattgaatattacttaaaaaatgaatctagatctgtgagtttaaagaaaaagacaaagtttactgctaaagaaaaaccttgggaattgtgtgaccatggactcaacagtgtgataaaataagcaagcagggaaaccaaaacaagtgaacaaaaactactgccatcttgggtttatttgcactgggttagtttttaaggtgcttgtgtaaatattacatctttgacattccttaatatttgtatttgtaaagtgttttgtgatcacagaactaaagtagtgcaaaacaaggaagttcacagataatccagatgcttctaaatcatattccattaattctttggaaattcaaaaaggggcttctagagcatgtatgaggaagtgtggtgagcggattgcatgattctatgttaccaggactggttatttaatttgcaaggtccagtgcaaagtgaaaacgagagatctctgtgaagaaatcatcagcaatgtcaggataacgagtagagcatcaaaaccaagcatggggccctcctgagtgcctgacagcacaggttacacacacaatggaactggccctacctgttatgattcccattttagacagccacttggaaaattacctgaagaacaaatggattacaggggcaggaggagaggctatagaagaggctataggaaaatgatattggtaatccaggcaagctatgatgatggccccaaccacatttgtaggtgtgatgaagagaaggattttatgctgaagttaacacctcttataagagttcaacttttctatttaattttccctatttcaattatatttgtaaattacccccaaactaccatcttaacaccacagaccttcacgaaatgaaaatacccagtaagaaaaactttacaaagaaaatcaattacagaatgagtttaaaagaccatgtctttatgttaaaaatggtccacctgaattagcgagtgtcatcgtcagttagttaaacttaatagcaatgaatatatgagcacactggggccattaggaacccttaagtataagaaatatgtctgattgatgtgcagtggctatctttagtgttctggcaagtgcactgtgatttctggctcgccctaagaaaccaactgtgctggaacactatctaaggccactgccatgtgtgagtcaaaactctgctcctgggaaactacagagacattagccactggaacaaagggtctcaggtaaggcacctggaatctgcagagtcagcactccagttgcgcaccttggttttaccggctgcactggggggccgtggagggggtgtggctcagaaaggacacgtgggaagcattctggattcagactttggctccagcatacactcactgtgtgactttgggcaagttattaaatttctctgagtctgacttttttttccatctttaatttcagaattataatagctcacaattgtgaggactgaacagtatcagctacagaagctacttagcacagtactgggacacatggtaaaagcctgtcacttgttatgcagctattcacacaaataaggtggacctctttttagggaaagtaagaatcaaaagagcattaatttttagggcttttttttgagtgtataagtattgcgaagttgactgctggcccaatacctgggccacagaccagttctggtccatggtctgttagaaaccaggttgcacggaagtgaagcttcatttgctttaacagccactctccatcacttgtattaccacctgggctccacctcgtgtcaggtccgcagcagcaatggattctcacaggagcacaaaccctactgtgaattgtgtatgtgaggggtccaggttgtgcactccttatgaaaatcatgatttccatggcccgccctggtccatggaaaaattatcttccacgaaactggtccctggtgccaaaaaggctggggaccgctgctgtacaggatgctgaggttatgtccatgagcagccacagactgggttggggacagaggtcctttcagccagcatctctgtggatccaactcagctgcgtccacattcttaggcaatgaggacaaagtaggatcatttaagggtgtacaaaagcctccccacccccgatatgtgcatggattcccttcaggcctcatctccaaagatgagattgtgtaaaggttttcctagttgaggttagagtggcgaagaggctctgggggagggcctatggagacttacataaatgccaaggtgtatccccattacttctcttgtctctaataaagtgccagagagagagaatgccaatgcttaatttacttaaggaattagacctatttattcagaagaattgatccagggctttgtataggcacaacctctgagtatcattttcttcatcactataattagagactatagatttattagggagcaagggcaaaacatcttttaaaacttcctagtaacaactaatgagcatctgaaacaggttgtcattatttgaaccaatcaacagacgtttctagattgccttatattcatgctactgctggcactgtgatggctataaaggaatggt

SEQ ID NO: 42657 - DNA, 997 bp, Bovine  19866880912758
  misc_feature (1)..(1): n is a, c, g, or t
natgtcctaattcatctcacccactctcccctttcccccttgctatccatactttttctgtatatctgtttctttctctgctttgtaaataagatcatctataccaattttttggagacggcaaatggcaccccactccagtactgttgcctggaaaatcccatggatggaggagcctggtgggctgcagtccatggggttgctaggaatcagactcgactgagtgacttcactttctcttttcactttcatgcattggagaaggaaatggcaacccactccagtgttcttgcctggagagtcccagggatgggggagcctggtgggctgccatctctggggtcgcacagagtcggattcaactgaagcgacttagcagcagcagcagcagcagcataccaatttttaatgcatgtatatgcattagtgtacagtatttgtttttctctttctgacttacttcactctttaggggggggatacatttttttaaactactgtgattttagccctctattacagcatctgaaaagtatactcaataaagcatttcaaaactgaagtaatgaggcacttgtttatctgtgggatggtcagtttaaacacgcattcaagaactcaggcagtagctttttttaatgtgctactccctcacttgctggaaaattgccatattcacttattatttcaaagtagcacaaacttcattattcaatagtcaagattagagcttgataaagaggagatttttttatattcatatgttattttttctctttctcactctctttcttcaagaaaatgcatataagctaccaattaaattactatgggttggtgaaaagataatttaaccaaatattccctgaagttagacaaaacccattacaacagtacccaagggcacacaaggttattggcattatgggatgattttaatatcatttagtgaaattcttcaatagaagctacaattgataatcaatgaagttatttt

SEQ ID NO: 42658 - DNA, 1404 bp, Bovine  19866880913758
  misc_feature (1)..(1): n is a, c, g, or t
naccattatggaaagcaaaactatcgtgcgatccagtaatcccaattctgagtatttatcaaaagaaactgaaatcagaatcctgaagagatattggcacttccttgttcactacagcactattcacaagtaactggaacacctgtatatccaagataaatggatacacacacacacatgcatacacactggaatactattcagccttaaaggaagaaggaaatcctgcaatgtgctacaacatggatgaaccttcaggacactatgctaaatgaagtatgcaagtcacagaaagacaaatactgatgaatctacttatatgaaggaatggcactacttcctgaatgtgaatttctctggttgcagaaccagaaatgatgacaagtttttgcagcagtggatatatcgttaccttccaggcagctgcatggatcataatacccctattgaataatctactgaacatctttgcactaatttgtgactcacctttagcaagtttacaggccttcattaaaactattcatgtactcattacactgctggttctcttattctgttactaatatcaaattcttttgcttttgttctaaaaatttttattattgacgtttaatatccttaatttttataagccatcttaaatcatttttgaaaaattgcttaaagttgattaaaagggggaagcagtcagcaaaatgtggtggctgtgtacataagtactgagcaagacttctaagttccaaattttgactcctctagttatgagacatgtgactcttgggcaaattacaagacactgttatatctggtttctactgtaaaaatggagatacacagatgtggaaaatgaacttatggttacaggggtaaggggggagagagataaattgggagactgggactgaccatatatacagtattatgtataaaacagctaactaataagtccccactgtatagaacagggagctctactcaatactctgtaatgacttatatggggaaagagtggatatgtatgagtggatctgtatggatatgtatgagtggattcatcttgttgtacagcagaaatacaacattgtaaatcaaatatactccaataaaaaaaaaaaaagacaatagttcctatctcctaaggttgttttgagttttaaacaacatcaataagatacttagaatgatgcatttagaacagtgctaggcacacagcaaatgctcttatggtagctgtgaggaggtttcatgctgtagtttaacatacatagctgggctaacaatctaacatcactctaaataaaccagtgtttctaacatagcatctaacaggatgtttggacataatattttacaatgattactaaaaaaactctttttatcttctttactgcactttctaca

SEQ ID NO: 42659 - DNA, 1483 bp, Bovine  19866880939520
  misc_feature (1)..(1): n is a, c, g, or t
naaaagtaaatataaccgaagacttctccattactctcaaaatagacataacttactcttttcatcactgtaggatttaaactacttaaagtaggaccagaaaagcagaaaattcctatttctacctttcagacttctctagcaagttcagttttggaggaaatttagaatactaaaaagcttagaaagccttgacactctttaaagattttttttaaggcaataacagtggtggaggattcacttactggaaatgaaagtggaggaaatgatcataatattttaggaggcaggattaccagtaacacttaaagaggtctattttctcagttctagcatcagtcttcaaggaatcagtcacacttttcttgttggaagcctcatatatatatttgtaccttgctaaacctggtctgaatgcaggagttaaaaattcctcagaaatccagatttaaacctgtaatgtcgtctgtaaatataaatgtcatggacccaagattgtgtaatgaatgatcctgccatgaaggaaattcagaagaataaaaagatacacatgcctagggcaagaagtcagcaaagagcccttaaccatgatgctgttactgagaataatgaaaacacattaaaaaaatactcatttgtaaatatgtgtatatatagtctagtaaaaacaggcaaacacatatctttctgataaagacatctttttattctacttacttggggcccaggtcagtatcaattggtcagcctgaaaatttcagtagtctctgtttgcatggcagaaattctgcacatgttttatctgattcctaagagtatctaaaaggatcttttatgttaaaagagaggtgaaccttcattgacagactttgtctattccacttctaactgggcctctcttttctcaggatctatcctagccaaatatctcagttacatttaccatgcagtttcctttgtgaaagagcagtaggggaagaaatagttctctgctgtgagttgtatttttcaaataaaatattaaaaattaaattaaaaacattaagtatgatttttgtcccatacattaattctttcttgagggtagaggaataaagaatgcttgctatcctgatgaaagtcagattgccatagtgactagagaatgtttggaaaggcatcacgtggttctgatcggaccgggcctttgggcagataaatgaccccctgcgtccaatgggccatcctgggatctcatcaactttcttatttacaaatcacaatcttctggagacagcctgggatattgagcaggtacacagtctacaacatactctgcctcctccatgtgagcaaggtgctgaagaatagggttggtcaaacattccttcacgtttttctgtaagttggttttagtcgtgcttagttgttttaactaagtctttaatttcatttgaaataattttgctagattttcattgtgacagatgtcatatcagca

SEQ ID NO: 42660 - DNA, 1525 bp, Bovine  19866880966199
  misc_feature (1)..(1): n is a, c, g, or t
ntgaagaagctaatttgtgattcttctttctaacatggtcattacgtggttagacatacagtaattgcttttttgtttttcagtgttagtgattttctgtactataaataactggatgctctctagttgttcataaacaacttccatctggggtccaaaattataatgggcttggcttgatatgtgtttatgaattgccagcatctgaaatctactaaaaagagagattttatctactgacctgtttctagtcacacattcctgaacttccaaataacttcaaaatgccctgttcatttgtatttttataacaaataaatgcatctttatagaaacagtattcattttaaatttattccctacacaataataaggaagccatgagtacatattgttactgcggagggaatttctttacatgcaattcatgagataaaagaattgtgaacacaatgctgcaataaggagattattgtccacttgggttttaaaaaggtttgattttcctatttgtcagaaatctttgagttaaagaaacatttgagagatcagtactgctaatgaatgctcttaaggtgttattcaaaataaaatgctttgttatgaaagccctccaacttttatataaaatcctctctaatcagcttgagtaaactcttcaacatgaaaattacacagaaaagtccatgtgattgcatcatctggatgttaattgaatgcaaaaatgtctcctgtggtctttaacactcaaacatttttcatcctttgtttttttaattttatagctcttcatgaaaaaacagcagcatattgagaaatccaaaaagaaatataggcttctcccgtgttaggaggacagatatgaaatccaggagaggaagaacatttttttttcaccaaagtgaaatacaaagcaatgagatttacctgtttcaagagatataattcactcacataaatgctaaccataaaggagtattgtcatcagataaacagctattcatatgctgtgataacttgtgagacagtgcctaaggtcttattaatgttagttgctgaaaattttcaggttaaagagtaactataccactgaaagctaccatcttcaataaaagtcgtattttctgattccaggattcaatctgtctgcttctttctacatttgtatttctgacacccaaactggtgatcttatttataaagtgcatgatgattagtatcagatcagatcagatcagatcagtcgctcagtcatgtccaactctttgcgaccccatgaatcgcagcacgccaggcctccctgtccatcaccaactcccagagttcactcagactcgtccatcgagtcagtgatgccatccagccatctcatcctctgtcgtacccttctcctcctgcccccaatccctcccagcatcagagtctttttcaatgagtcaactcttcccatgaggtggccaagctagattaatccacatcatcatggatattctggcaactttgctgttttccacacgtcgttttt

SEQ ID NO: 42661 - DNA, 1052 bp, Bovine  19866881008316
  misc_feature (1)..(1): n is a, c, g, or t
nctagcgaccccctggactgcagcccaccaggctcctctgtcctgggattttccaggcaagagtactggagtggggtgccattgccttctccagtctatgtttagaggggggcttttctaggacctaattataccttaggctattgagttcgtccatctctatgttagattgacattattccatgacctttgcagttagaaaattcagattttacatgcatgaaggcaaaattctttattttcagcaaaatattgaagattttgaaggagcacacgtgcccagattcgtaaacaatcctgcttacggcacctagagttctttgtcttcagaacatttgggtgacaggcttttttaaaaattaaaacatcttagaactgcaagcttttgctttctgtttcgtacacatactgataatttcttggtaactggatagtttaaacaggaaggaaatgactaggaagctttctctcagctatcaatagcagatgtataggactataaattgctcttattaaattaacatcataaaagacaaggtcaaatgctgattataaaggccaaatcatcaggaaaatagatacagctacctgttccttactcagcccaggaagcctgattttcagagcaaacagttagtatacatccacagatttttcacgtctcctcgttatataattcagacattctgccaaacccctcactctgcgttatgggtgcttggtcacctcattcagagaataaagatgctattattctgaatttactctgaggagtaatatatgaacacgtttttcaaagggtgaagccgtaacacatgtagatattattgtcattttcacaggtttgcatacatatccaaaataaactgtgtttaaaagacaaattcagaaactaatttttgagatacctttagaaatcatgagtaatgcaactcaacaatttactttctaaatcaaacggctgccattaagttggcattttcttggttgatttgaacaacaaaagaattggttttaatgtataaaaaattctagcagctcaagggaattca

SEQ ID NO: 42662 - DNA, 1558 bp, Bovine  19866881014208
  misc_feature (1)..(1): n is a, c, g, or t
ntgcttctgtaaaacatgtaatcatgttttctcgagcatggatccttcaaagaacaaggtgtaacagagggaactgcacttatagagatactggagaagatatgaaaatgatatgagatgaaacctgtattttattaataggaatttagaaaaatgattgagaaaaagatctctcagggtctaatctacatcctaggaagaaaaattgggaaactttgttaatcctttagttataatagtggctagcatttattgagagcttaatgttattggcactatacttgcatttttatacacatcactcacaataacactgtgaaacaggttctattattactctcattgtacagaagaaaacggaagcaaaggaaggttaaagaagcttgctcaaggtccaagagcaaggaattggtgggtagggatcaaagtcctggcagtctgaccccaagggtttcactgctaagcactaactggtctgctttcttaaagtcactggaatagttggtaaataaactccctgaccatagctctgcaaccaacttaattggataaacttatactgtctccactgactggctgtctttggagaatgatttttcataaaatatgtaatagatggttcacagttaatttaggagagttagctacagatttgcaaagtagaaatgttataaaaggatacattgcacggaagtatcccttcagatgtatggcctactaaaaaggaacaccaagaaggaccaaggattctgacaatgggtacagcacttattgaaacacaggtttgagatcaaagacgatctggagaaagataatgttatttaatatttggataaataatacataataatatttttatctgtggatttggcagtcagagtaacaatgtcaaagagtaatataaacattcatacacctacaaaaataacaatgctgactaccagatctatagataaaaacattattatgtattatttacccaaatatgaaataatatattatctttctaagatcttctttcttaaaggtcttacccaaaataacatataaacttcttaatttccaaatcagtatgattttgtgtgcaaagaatataataacaaatgccacccttgaccaggcaatacatctattcacaagggctactgcatcatttgatagagtaaatattatcagaaagagcacaagtcacaactagcaagctgttattgcaactgctgactgcagagaatgtttctaacagcttctaagggtctggagtcaggccacaaattcttctcacataagtcacacagggcttccagacaccaagtactgtcaaaattgagatgaatggcttctttagcttcaatcactttggcaacaatcactttggcaacaactgagagacagaaaattcaacattggtcagtaagtatttggtattgaccaaatatcatcatctttcctggtgaattatatcttaatagaagaaaagaaaaaaaataaaataaaaggaatataaaagggaatctgtattagaaattagaacctctaaaattaggtaaatgaaggaaaa

SEQ ID NO: 42663 - DNA, 1461 bp, Bovine  19866881053419
  misc_feature (1)..(1): n is a, c, g, or t
ntgtggaaaatatacaatgtaaacctgtgatagtatattaagcatttatttattaaatgaatgttaagttataaactagctacaagtaaattctgtatttcagtttgataatagaatataaaactcagaaaaagaaggctcaagaatatcttacctactagttcagtataagcaatataagcaactaattttcctgtattatttaaatcactaattcttgaaatttgatccacctacatcagaagctttagaaatgccttttaaaagtggcaactcctaaaccttatccttctatctatgaaagcagaatttttaggagacgcttaggaacgtcttttttttttaagtaccagaactttattttcgtgtacagtagaatatgagaaattctggtttagtatgggatataatcaattgaaacaagggtcagtttgctttgtgtaaaaggtcttctattttagtggtagccacggtaagctgttgttgaaatgccaaatatatatgggatgtgataatagacaataaactagggttaatgatgctactaaattagaaagtgccaatcatagtaggtgtattatgaatgtaatgatcttgaagcaatgggatataattagcatttaaattaagttgtaggttagccacattaaggaaaggttagcttgctatgaatttttataaggttatggtgttatttttatcagtttgagcattgactataacctaatttaatgaaaattttggaataatagcattgtcattattaactgagctacatattaattgatgaatactcttgaacacacttgcactggactacaagataaatttgaatgtaaggtatagacatgtagtatttaagtcatgccaatactttacttactatgattaatcaggctgctcacaaagatcatgtttatagggagcatggctatgttttaattgtattttttcctgaaattgtaggttgtatgtgtggtaaataatttcaaaggaagacaaccagaaaatgagcatacacacacggatagcctggcacagctgccaatgataagcattcctcgagtagaaagtcctttggaaaaggtaacatctgtacaggtgattcataatttaaattctaaagtgcgattgttctctagagcaaatgaataattattcttgagagttctttcacattttttattagctaaaataagctcagagtctaatgtggtatttagcaagaacttaatcactgaagagaacatctttgaaaaatgcgtatcacatagaaaacatttcttggaacctctcaggcttaaaagttgagtctgtacatggactgtgctataatttgccatagctttaagataaggaacgttatacagtggtcccacgcatgggcaaaatataagttttacttgagaatgtatacatttttaataatacatattccatttcttccatgcttcatttata

SEQ ID NO: 42664 - DNA, 1538 bp, Bovine  19866881079779
  misc_feature (1)..(1): n is a, c, g, or t
ntataaagattgaataaataggccaaaaaccttattaatatacacccaataagattttctacataaaaaatttcaaatattatataaagaagttatcaaaaattatttttaaaataatttagaagattgctgataaaagataaatatgaaaaagtaaattatatttctgtactccagcacaacaaaagttagaaaagaaaacattttaaatatgtagtaataatttatgataaatacaaacaaaatataaaatactctggaataaacttatgaaaaagtatagaagacctttatggaaaaaaacattctaaaacttttttatcaagagattatcaaagaagacaaaaaaaagtatggtttctaaaaattattctaccttaaatcttctatttagtacctccttcaatttcagattaagtaccagttcctcagacagttcttatcagaatagcatttatgtacagtgtaggtattttttcactgttctctccctctcagtctgctgttcctctccttaacattcattaggacaatcattttatgtatgtttatgcaatttcctgttacaatataagttgtaacatgagccatgttacatgtttgaccattctatccttagtacttactacttagaaatgtgataagtatttgtagaataaattaatgatttcaggaaggtgaaatattagtaacaaatctagtcttgtttcaccactcctttccaaggactgttttattacactgtgaaacaccacagaaacttacaagctgcctgtaccttatcctaaaggtgtgtatcaccaaaatttctgagcaaaataatacaacttgaggataacagctattcttacttaagaatatcttcactttttttctttttaaatagtttctctattattgccttttatggaaaaaaataaccattcaatctatttattcaaatgctaaaaatttctcttcataatcagaatagctgaggaattatcattttgaaagtccttgaaataatatacctaaataaaaaggtttaggttgctactccatcaaaagacaatagaaaattctaaaattcagttctaatctgacagctacctcttcttaacaagtattaattaaattgcaggggagggagaagagggctcttaacaataaaattacattattttctgatttgtgagagaggtaagatgtgtctgaaaaattagatgcttgattatacaatgctgctcaagcattcatgtgattaccacacgtgcgtaccttttttatatactttataatacacacttttctttaaaagtagaaacctctcttcctgaaattcactgccaattttattatccaaatgtaacttgttcagtaaaacacaatgcattttcttaaaatgacaaattaagtcataagaacacccacaaacggagttgacacatcacctttcaagtcagtacctccaacaccattaacatccttcaaataaggaagaatcatgacactggaggcaacagaaagccaattatttaaacagccccattttagga

SEQ ID NO: 42665 - DNA, 755 bp, Bovine  19866881220722
  misc_feature (1)..(1): n is a, c, g, or t
ntggaacttgacatttgagttctttatattgcaaagtttatgctgagatattttctttctaaatacataattcaggacttattttattcaggacttcaataagctagacgcttctagtctctctccacgatatcaaataacctagagatttattaaaagacaagaaaattcttttaacattgagggcttaagtgatcagatatccttattttctttcttattattttttatcactgagattttttttttgttggtgaatttcaaaggcaattgagttgattttcactttttaaaaaaattgggagtatgcataaagtgtgtgtgcatgtgtttctgtatatataaaccaagattttatttttattatatcactgagaggaaagactctaaaatatcattatttaaagctctgccttatttcttccctcagacaacgttcttttttgtttgaaaaataacaacacttagacaaattctgaaggctacatattaactcatatgttcacttgcagtagagtttgagaaatttatctggtgaaaatataaaatgaactcaattctccttgcaaaaaactaaaaccatgaatacaggcttcacattttttttttactaaatcttatcatagaaaatatttgactaattaaactatttagacataattctctgttttttacttctagctcagaaatggctgaatttgccttagcaactccaatggacaacttgcttcaggaatgcagatttattttagaaa

SEQ ID NO: 42666 - DNA, 1784 bp, Bovine  19866881265137
  misc_feature (1)..(1): n is a, c, g, or t
ntgacagcctaatatggctgttgtctggacagccgagaccgtctatgtgaaagtgctattgaaagtaccaagaactatataaatatgagggttattgtctgattttacaaatgcttgataacaaactgattatttgcttgtctgtttctcctacatttttacatgtgtaaatatatggacaaataaaaaatgagggaaaagaccacttaaacagtacccaggccaaacatttttggtattctttactatgcttctaaatatttaatagattattagtagatgcaaacatagaagacactatttcacatttgcatgttaatgaaaaatcatgaattatacattatttgctgtgtggagtagtggaaacagtattcattttttatacccataaaaacttagattgtctcctgaaacacacatcaaatccccttctgtaacagcgccagaaagatctgcaggctttttaaaaccatctccaatgaaattagatagatttgtttgtgctgctttgcaacacgctagtgtgaaagttcattttaaacaaaatagttttaataatgtcattactaatgtatatttggtcatcactaaaaaatggggttttaatatgaatgtttcattttaataaacggcaaaggaagcaagttgccctgagtcagcaggaagtagttatacaccagagaacagcctgattgtgttagattcatccagaacactgaacagcccagagacagtccaagaaaaaacaactggctttattcaaatgattaggcttactgcagctcaatagtgagattcacacattctcctattatttcttgaccttgtgccaaaaactcccacttacagtaataattagaattagcgtttccagtgcatgcctccatcttcccaacaaacagtacaaaaaaaaaaaaaaaaaagtggtgcttacaaactatgcagttaataaaaattttctttactctgattaatacagctccattttcttaactctttaccattatgccaagtatagctaccttctgttgcaaaatcactacaagtgccatgactgcctttgttgatcctacagttttgaaaggaactggtatttcattctttctctaattaaattctaagaaatttcttttttcttttcctggtcagagcacaaaagaaaagctgcctctgactactgtcattctgggccacatgtatttttttgtctggtaatgtggaaaactaaatacttcaaatactggaattagcatcggtacaaattgttgtgcctcctgttttaataagaggcagagtttgtgagaacagtctggaagggcccgtgaaacctgagtagatgtctgtgatacggttttctctacactacctaaccgaactcctctctaggcttcttactacactcagactgtgccaccatgaagggaatggcaagaagggagtcatgtcatatttatgtgtttagtgattcttgtagcactgtggttattaccagtcacagaagcctaacacatacatccaaggaatttacccttagttggcagaatctaatgggaaatcaaatagaaatcacaaggtgtgaaaaacaaacaggataaaaataatcaaaacttaaaaaaaaaaaaagctatatttaatagaataaatctgattgctaagccaagtgaatttcttgtgtgagacagagctcgggactagaatctgaaaacctagactacaccgcacagctctgtcgctaagtatttttactctgtcttgatgagacgtcggcggaggaacttcaggca

SEQ ID NO: 42667 - DNA, 769 bp, Bovine  19866881277499
  misc_feature (1)..(1): n is a, c, g, or t
natttaaactctttattttaaagtctgaaaagactgcaactatgggagatggactactgtccttcagcaaattaatgtctttattttgttctaagtcaaaatatgatgagtaatctacccataaagcatttatatggtgcatataaataggttgctggcaatagaaatagcagccaacaggtttaccctgtcgacagcaatttattaagatgacaaatagataaaagtaacatataaaatgagccataatcctacttcattttcatttcaatggttactccagaagaaatcttacttactcattgtactttaaactactttccctattgaatatttggagtgtttttgatagagaagagtctgcagagtcatcaagtttccctttgaatgacagtggaatgtatctagagagggcaccctttagaaggaaaaattattctgaaaatatacacattataggctcttcatgagcatgacataaaaaaatatagatgccattattgaataatggactcaccgttagtcatcagtaagtcactgttgttaatatattatgtattaatattctacttaatatttgatcatgtacattatttttataggaataactgcaagtgtagacagattgcaagtatagaaagattgaaggcaggaggagaaggggatgacagaggatgagatggttggatggcatcactgactcaatggacatgagtttgagtaaactccaggagttggtgatggacagggaggccctggcgtgcctgca

SEQ ID NO: 42668 - DNA, 797 bp, Bovine  19866881312113
  misc_feature (1)..(1): n is a, c, g, or t
ngatttggcacaactttagttgctctgatataggattcatcaaaaaggagtcatattcataagctattttaactgataaaaagagaaaaataaaagtgttttgtgtgcttgttactttttcccaaggggaaagggaagaaggggagctggtgggataaaaagtcaagggagtggaggccatgtttcttggatgcaggaatcttaaggtttgcctttcagcttcaagattaagcttttttctcacaggggtatgggtttccaaactgggatgcccaggtcccttcatatatatatatatatatatatatatatatatatatatacacatatagtcttctaaacttctgctttttttcaattgggttactgtgttctattttagtacacttctcacttactctataaagagagactgataccagaactaaattaaagaggaaacagtgcctattttcagataaagtgagaaccatcagccttcttgaaaacattatgttttgattgataagactttcttactggctcttttctttcaacttccccttggtagaggacctcataaacctttttctgctttccatcagtttcagtggaaaaagatggtttcacgaagggtgatcctatttctcatctcatcttctcactcttttctgctcctttcaaaatcaaagatgagttcttcccctctggctcctttattcactcacacttctggtggttctcagtcatcaaatgcgtgcgctgattcttcctttcatggggaaaacagaacagaccaaagaagtctttaccttgca

SEQ ID NO: 42669 - DNA, 855 bp, Bovine  19866881324704
  misc_feature (1)..(1): n is a, c, g, or t
natgtatggttatgattacaatgccatcttctcttaaaagaatggctacttaacccagatgaaaggccattcacaagcatgccccaaataagtggacacaactgttttgaagctgttttggctattgacgctaaattatattctcttgcatgttttagattcagaaatatttgaggaaaataacacacagacaaaaaagggaatacaagcttaacaagtttctatattttttaatttcctgaatcatttatctagcaattatttatattagactaaggaggcaaagctgacccatatgtatgtatgtcctcaagtaatctaccagctaatgagaagtaccagtatgcatataaaaaacaacaatgaaatagatgctggagtaaaccatgaaataaataccaatgcaatgggaagagaagggggagagtggcaaaccataaacttaagacaaattgtccatggattcttctttctttctttgtgtagatgatgcaatgggcagaaagtagtcaactgtacaattctaatcaggatatagaatatgctatgaagaatgtcctctgcagttatgcatcacggcagccctagaaaagaaaccatcctttacaaacacctccatgtgggggcttagatctaccacttcttaggcctgtcaataatgctttgggttgcaaaagcttagtgtatgattatgaaagacattattatctcaaaatacaaaaactgacattagacactctttctccttgagaagtctattggcagctctctaattctttgttgtcatggataatctattctttcagaatactgaagaaggtgaaggagagacaatgcaagtaacttaaggaaggg

SEQ ID NO: 42670 - DNA, 880 bp, Bovine  19866881331793
  misc_feature (1)..(1): n is a, c, g, or t
nctagttcctctggcccggcattcttcaggcaagaatactggagtgggttgccatttccttctctaagggatcttcccaacccagggtttgaaccctggtctctggcattgcaggcagattctctaccatctgaaccaccagggaagcccctgagttgcacattgcagaatctgttttcctctgattacaatttccaagtgttcccacttaccaggatgttctttgcaaagatgagattggatacaaacatctactgccctgtgtcagtataggtgaggcagagagccattctgtaatccaatggaaggtataaagtcaggaagagctgggaatgggaacaattgaggaaagagcacaggagggtagactaccccaagggtgctctgtgcatctggtcttgcagcagaacacagcctgttgaagaagagttacagaaaataggtattgtaggaaagtctccatcagggaggcctggggcatgttctgctgttgggcagaacagaactcccaggatctaagagctggtgggcgtggggaagacttgctgctaagttacaagaggtccactgcttggaagacagaggaggactgccagtctcatccataaggccactggggtgctacataggtgaccaaggtaggtcaagcagaaatcaggcacaaagtagaaattgcatttcaggaacaatgcataaatcccattatcaaatgtaggccagaatgttcaacttgaattagcggcagacttgatattgaatcacagagcctgggctataccagtgtagttctctcctgcctgaagtcagggttttcagagatcagagagaccagagaattaaatttgggggataaaggcatcaagaaatatacccaagggcc

SEQ ID NO: 42671 - DNA, 894 bp, Bovine  19866881400073
  misc_feature (1)..(1): n is a, c, g, or t
nttgattctgttatccttacagtgttcctggaaatctgttgaattaggagccagaaataatgaaaaaaacgggagttgagaaattgcaatgttatctttttaaaatatatattgttcaagtgaacagtgttagagcctcaattgatggtggcccagctggtatgtccatatgtctttagcatttcgagattaagaccaagcattcagaataaatataaaggcatctcaaatggtatggatgtgatcccagatgctgtcaccatatgtcttatgaatttcccatttaaaaaataccaggtctgtatcatttagcttatctggtataatacacaagttgatctagcacaaagcgctgaatcacagataaagtaaaatagcgaagagagcttgaaatgttcgtagcactgaaatttcactttcaatcattgcaatttatgttctcaaaggttgaaatttcatgtataataaaactattaatatggaaccatatgctaaaagaattttctaagagagcaaacataatgatttgacatctgagttgttgcagattatgacttaatataagatgcagaaatctcatgttatgtttcttcacttttagtagtgagaagaaaaaatatcctaatttaagatatatttatcaacatcatgtatataattatggccccgcttttgatgatcagatgactttaaaccatagagagccatctgaaatcgtgcagcagcaaacaattcagagtaacagtagtgaaaacattctatcaccaggcccacatggttttattacataaaagaattgagtccattttagccaaattgacttaattttacatgtaatagctccatggttatctgggtcctgttggcattcttcagttcttctgtaggacacaa

SEQ ID NO: 42672 - DNA, 871 bp, Bovine  19866881511942
  misc_feature (1)..(1): n is a, c, g, or t
ntctagcatctgacatttgatggcaagtctttggcattccttgaagaatgtattactcattattggcttgagggctccagtcacatggccatcttctccttgggtgtctttacatcatcttccctctgcacatgtctgtctctgtgtccagatttcccctttttataaggataccagtcatactgggttagaccccaatctaaagacttcatcttacctttacagactacctctgtaaagatgctacttctaaataagatactggggactaggacatcaacatattgttttggggagacaaaatttcacctttaataccaggcgtctgtttttaatactgctcctttgttttaaacctttgagggtttgttgttgttgctgttgttataattttatttatttttggctgtgctgtgtctttgttgctgtgcagcctctaaagttgtggcaagtgggagccactcttctctgcagtgagtgggcttctcattgtgatggcttcttttcctgtggagcacaggctctgggcatatgggtttccgtagttgaagcctgtgggctcagtggttgtggctcttggactctagagcataggctcaatagttgtgatgcatgggcttagttgctctgcagcatgtgagatctcaaaccagggatcaaaaccagcgtcccttgcattgcaaggcagattcttaactagaccaccagggaagcccaaatacttttctttaaaggagccatgtgacttcaaatctcccaacccacaaaagctgtatagaaagcatttttctgagaactgtctcttgtgtgtcctacttttctttacctagcttcccagccatcttctgacagcctcaattgagagttgcct

SEQ ID NO: 42673 - DNA, 1045 bp, Bovine  19866881757875
  misc_feature (1)..(1): n is a, c, g, or t
ntgatgtttcttttccaaatatttcctccactttctttcaaagtgatacaatccacacgcacttatattttaatgaaaatttttctgctacttactatcttccaattcagtaattaagacattatgtctttacttgtccaaaaaattactttccatgcttatagttgtaaatttgtagatggaaaaaagcccagtcatttactaatccattcaagaaagatgaaatttaagccagaaattcatcatgccagaagcctttatgctctcactaaaacagcattctgaaaatcctctgatattaaactaatagttgaccctggaccacatatgaacagaaggactattctgagtgtttagtttctgttgtatctttgtttcaagcactatctagtgcattgaaggacaaccgaataaatgctgattagcattcacaagctgtatccttgacaaaggacccacagctgtcataaccatagtttttcccacatgctccatatcgctgctaaagaaactgtttctcaaagtgttagcaggatttgtgattttgtttagttggatggttttcatttatcatagcacacataacgactttcaggtgtcttcaagtaacatgaagttacaaagatagttcagcagaattttatgcaggcacatttccaaatggatcaataaaagttttgctgacccagcagtggcaggattaattacaccagaagagtaacaatatccgtaatgatcatttatagtcgtgaatggccaaggttctataccacatcttggtgaagcaggcaacattatccccattttaggacaccacagaaattaaaatgacttggccaaggtccctcaattatgaatctacatagtaaagatatgaactcagttctgtagagttctgggtcctcgggcttatccatcatagttaactgccacatttttatgttcttatccttaataattggttaaagacattcttagggaacatgcatattctgaaacttcccttgatattatggatccctgggagttataggtaacaactttt

SEQ ID NO: 42674 - DNA, 858 bp, Bovine  19866881862965
  misc_feature (1)..(1): n is a, c, g, or t
nacttggggacttgctgtatgagcaaccttttaagccctggagtcttcatcaccaaatctgagaaaataacaagagttccacctacctcaaatgtaactgtggaagaccgtgaaaacactcttattattttaatctataaaattgaggtcacaattgctcttctatcttaaaatggtagtttgagaattaaatgagatagtgcgagaaaatatttgaggtgaacaagatgcttttcaactatataatgcaaccattattaaaatgtcctcttcaagggcatcaatatcttttcctcatgactaaaaatgaggtttttctttctacagagattcatggcatgggcatcagtgaaacagttatcactattatatgctctttgattgagtgatacatgctgaatcttcagtgtcaattctctgtgaagcaatggacatgatacaaaaaatgccatcagagtcataaaacccacatgccaaagaagttacctgttggctcagcatcactgatgctttttaaagagttgttaactgtaaaagctgtctccttagagcataaatcattgtaattggagctttggaaatagcaaggtagctagaaggatgaataaagcacagtcggaatgtttcaagcatggcagtttgtgttttctctaaggcctttcttatgagaaattgggaagccagacaatatctatagcaaacataggtcataagaaatccaattccatatcagagggctttttttttttagcagctagaaagatctttcatgaatagatttcaatttgccacaaacataaacaacaaatttggtttgattatatggtatttttcctaagtcagacgaaccctccaatt

SEQ ID NO: 42675 - DNA, 1537 bp, Bovine  19866880387878
  misc_feature (1)..(1): n is a, c, g, or t
naggggcaggaagcgaaggcctccttgaggaggtgacatctgagctgttggaagtcctaggggggcattgcaggtagtgggagcagagagagcaaaggccagagaggaggaacccttgcttctagtgggacaggtagtcaggtaccagataagacatcctcataagcccagttaaggagtttggattttattccaaccgagtggaaggggaccagtgatccaggtgagagacctggttgcagttgatggaagcaatagcttcaagcacctctcgatcttgccttctgtcagggtagttggtttttttttttttttttttttttgagtatgcagtggcctgaacagcaccgagttccacttccccaggtgagctcacttcccaaatcaaaggaggaacaaaagtgatcacactctgcacttgagtacccgctgcaggcggagcaggaaggccccgagggttacaaaagttgatggacaaggagggcagcggagtgctgagctcctggtccagaagatcacagatggtggttcctaggtttggctgcatagactggaggtgctattgttgtttgttgagggttccttgtaaatacagcatggtgcaaaaaggaacctgtaaataatggagcaactctcctggcttgctcaggtttcccaaggaacacagtgacgtatgtgcagcacactgcatcgtttgcctcatgaagaatggaatgaggccctggagtttgtgatctgcaaaaatcttccatccagaaagctggtacaagttctggacaacacttgcagtggagttttattttttcttgctggtgtcaatgatgagttgatcaaaaatgtgcagtttccctagtttttcatcagaccttgcccaatgggagatattgatgtttttgagtgcttgtgataaccaactctaccttctaccttcgtgatctcagttagttcttgcaacaagcaaccaaatgaaagtattatgctctttgcattttacctgctctggcctgtcccagcaacatggccttggatcatgccttgacctctctgtgccagtttgctcatttataaagtagagataataactgatcctaactcataaggcagtggttctcaaagtttggtctgggtacacttaggagtccccaaggttttttagagtccagaaggccaaaactcttttcataataacacaaaggtattatttaccttttacacattcattcctacatgagtatacatgatgttttctcaaggttaacctgacctgggagagtgcagcagagtgaatgcaaaagcagtaggccagtccagctgtcttctattgagccagactttaaggaaatttgccaaaatgtaaaacaatgccaatctcccccttttttttcctttggaaaatattgttactgttcatataagagtttctgttaatgtgtaacaggttgattatagtttttaagtgaattaataagtatctaaattttttctgtgcttaaattcacaatacagtaaacatcaatacaacttaaacaaaaagtct

SEQ ID NO: 42676 - DNA, 1580 bp, Bovine  19866880521357
  misc_feature (1)..(1): n is a, c, g, or t
nagacaaagttaatagatgacagaatgggataagagagttgcagtgtttaacactgacgagggatgaatatttacaagacagcaaacacaaaagaaaaataggcaaaggatataaatagaaaatttaatcggaagaggaaatccaaaaagccatcaaacatatggaaggttgctcagactcattagcaatcagaaaaaagcaaattaaaataatgagataacactgtatgcatattagtttggcaaaaagtgggaggctggaaaatgccaaaggcttggctaggatgggaatgtgaagatagaggagttctttagagcctctggaaagcaatctggccattagaaaaataagaacatgttcagatataaggggatacacatagggatgccttcgaaaacactgttcacaataatagagagttggaagcaagcagaggctctatcactgagtcagtgaccaggtaggtgtgggcattcataacgtacagattagatgcatgcaaagtaactaaatcgtacagtgatgagtgaaaaaaaaaagtgaaaaaaaaacagtgtataatacaatgtacataaaaatacatacatactgtacaataaagcccattttgtatgaatacaaacaagcaagaaaaattagcattaaacacattagtgtgcttgcctatggggaagtggtcagagttaggaatgggaatggagaatgaggataaagggaactatcaaaaaaaaacttgccttctgggagaagcaagctacttaattgggtttagagagaggatcatttgatgtgatgttttcaggctgtcaattaggaaacaacaggcgaggtgtttggatgcgtcacctccctgggctcatcttctccgaggctggaaatagaagccggagcttgggagccttcctcccacagatggggtcagaggtgctggatgttgggcatctaattggacatgctgtgtcagaaagcagagcaggggtttccaaagaaacgctcaggatgtatgtttagcctctgtgacgcattttaaagggaaagcaagaaggaaggcaacactcgcatcctgtgattaagctctgggtgttggctatcagagctgttattttacagttacagctacgtcaaccatcactcagactgtgttcctaaatgcccttgggtgttaacagaatggacatatttccagaaacactctgcaatgccctcagggcttcctgaaaacacagatgccttctttcagacaaatcttaaaagtaaactcttattataatcaacaattctctgttacctattcaaagttgctgaaagactagatcttacatgttctcaccacaaaaaaagaaatgataattatgtgatgtgatagaagggtgtttgttcatgttacggtggcaatctctgaaatagataaatatatcaaatcaacactttaaacttatacagtgtttatctcaattatattgcaataagaaataaataataaaacataaacacacacaaagtaagttcctgactacttatgattttctccttggcaaagtggagcccccatgctctggcacctcattcatgtatgatt

SEQ ID NO: 42677 - DNA, 1765 bp, Bovine  19866880541567
  misc_feature (1)..(1): n is a, c, g, or t
nattggcatctactgagaaaatagcagtgtgtctgtggtcctggagttgctattcccttgatggccaaatgattcgcattaactcaatggaagatatcacttcttgaaactttgaaatccctggcttatatcttattaatgttttcttgttttctgtgagcctttgccatgcatcattgacattgtatatcatgttatttcacttaatagaacaactgactttctttggcaactggggatcaactttaaatcatgcagaccacatgggcagtgtagcatgacaggatccctggggatgaggttccttggtgtctgttgtacaaatactcagcaaagaaatagtaatggggtaataatcagcttgggagctgccagaattcactgttgcttaaaacctctgcatgagggcctgtgtagaaggcaacttgaagaaatggaaagaagctggagtatgggttaggttttgaatcctgaccccttctttaactgatatatgttctcagggaaatcaatcatgtgaactatccaaacttttatttatgatatagtgatattatgtatctcttgtaggattgaaataaagaataaatgataaaatatatgagaaggcacctggattatgttaaatttttattaatttggttcttctttgtaggttactcttgcaggaagctgcatttcttgaggtatattattcttctttccaggccattggatgctcatttgtaaaactttaaagtgcaattgaaagagaatagatatatgtataggaataactgaatcaggctacacatgttgagttatttttaaaatttcaaaaataacatatgaaaaacttttaaaaattaaaataatttgaaagtaaaaagagagagagtgagagagacaggaaatttcccataacttatcatattgtactccacttaccatgggaaaacaattgtaccagtttgggatataatattaaaattttttttccatgtctctcacatagacaaaaacatgcacaagcatacatatggtattatatactacatacaaacatatttgtgggcttacccattggctcagtggtaaagaatcctcctgcaatgcaatagagggaaggatctatccctgggtcaggaagatccccaacccactccagtattcttgcctggagaattccatgggcagaggagccctggcgagctacagtccatagggtcacagagagcaggacatgactgaagcaacttagcacacacaaacacaaacatttatataatttaaaaaaacacacatcaaattttatacatattatttattccctgcactctctatttccagctacactttttttttccagcacatggcttttatcctcaagttcaccctcatgatccaacatagctgctggaattctagccattccattgttaatccagaaaagaagaaagaatgagatagggagaatataaaaacaagttaaaagcttgacccagtcccatttgcattttgtttatacagctctggctacctctcttttcaaggaagaatttatttgggtacatctactccaagtaaaactggtgctcaatcagtaaagaaaaagaagagaatggatattagttgttgttgagttgctcagtcatgtccaactctttgcaaacctgtgaactgcagcacaccagggttccctgtccttcactatctctcagagcttgcttaactgacagccattgagccgatgatgccatccaaccatctcatcttctgtcacacc

SEQ ID NO: 42678 - DNA, 1572 bp, Bovine  19866880609427
  misc_feature (1)..(1): n is a, c, g, or t
nattttattgggaaagggtgccagggcggaggacagtagggtaagggaacccaggagaactgctctgtcactctggcttgcaatctgggttttatggtgatgggattagtttcccagttgtctttagccaatcattctgactcagagtccttcctggtggtgcacgccttgttcagccaagatggctgccagagagaaggattctgggaggcggttggacatgtggtgtcaccttttgacctttcttgaactctaccggttggtggtggcttattagttccttattccttatctggacctcctgtcgtaaaacaactcatgcaaatggttactatggtgcctggccagggtgggctgtttcagtgtgcttccctaacacatatatgtgttaatatatgatatttgtttttctttttctgacttacttcactctgtatgacatactctaggttcaccattcaaaacttgagcaacctattgggtaaagggtaaagagaaaactccatatatttttcagattgccaaaaggcagtagacaaagacagtccccccgacccccaatctaagggtttatgtgttaaagtgtattaattaaggattgtacacaattaagcacctaattgtgttgaaaatgcaattacacacttaggagaattctcactagttacaaagttgtttctgtagtcctataatcattttaattgttccttaatctcccaatgtaaactatttatctgcatcctaatgaattcagtgaaagcttctaattaaatccagtgttgaatatttccacctattgcctaagcctcaaaactaagtcatggcaggattcagaagggcatttacatctcagaaaataagataccattatagaatttatctcagtgtttgtgctcagtgtctagaaatcaagtatccaaaatgccataaaaggaagtatgtgtacttcttaaagctttgttcccttttttaatctttcccaccatcacagagttcagagttaattcaatggaaaaaaatgtccaatatattcttctatatacctttggtgaaatgaaagaatattgggttattacttagagccgactagtgctttcaacaaagtcaaattaaaaagtagagcattgaagaacccgtttttcaaagagggtaaatattgattcatgtgtttatttattcactttttcaaatatcttcttcacatatttagtttctggcaccgttttaagaaaaacactaggaatatagcaatggattttatatcacatgacagaatgagagaaatcattcgctgaaattttggttgtctagggactattgataatctatctggatcttaattaaaattacagggtctttgtgtgataccccagagtttaacaagaaggaaaagtccatcttccagggaagcttccattaattggagatgactccttagttggtgttgatacaggaacactgagtaggatatgaagatggttggcaaaggactaattagattggttagtaaaacagccctatgggataaagatatagatctatgtctagatatacaactttaataaagtcatt

SEQ ID NO: 42679 - DNA, 715 bp, Bovine  19866880751427
  misc_feature (1)..(1): n is a, c, g, or t
nggaaggtgtggagaagcccagggagaggcctgttttcaggcaagacgtacagttgatctcgtttgtctgtgtgctcagtcatgtttgatactttgcgatccatggactgactgtagcccgccagactcctctgtccatgggatttcccaggcaagaaaactggagtggcttgccatttccttgtccaggagatcttcccaactcagggatcgaacttgcatctcctgcattggcaggcggtttctttaccactgagccatctgggaagcccacagttgatcttgaggggttgtgaatggttatgtatcattttccaccctcccctcttttcttaacaggaggccactgaaaaatcagatgatttagtctcttgctcctcatactcatcttttttattatactgttcttattttccatactacagatgatatttttttttttttttaaaaagaaagccttgaattcttatagaaatatctctgcattttctcctttctgcttcaggagtcggtaagatgttaaagaagatcaacaaggccatcgtctccaagaagaataaagacattgtgatggtggccaacgctgtgtttgtgaagaacgactctaagatggaagtgcccttcgtcacgaggaacaaagacgtgttccagtgtgaagtccggaacgcgaacttcgaggacccggcctccgcctgtgcgtccatcaacgcggggt

SEQ ID NO: 42680 - DNA, 725 bp, Bovine  19866880929983
  misc_feature (1)..(1): n is a, c, g, or t
ntgagtgcttttctctatgggaaattgaaagtgtgaaaatgttagtcgctcagtcgtgtctgactttttgggaccccttggactgtagcccaccagctcctctgtccatggaatttttcaggcaagaattctggagtgggtagtcatttcctttttcaggggatctgcccaacccagggactgaacctgggtctcctgaattgctggcagattctttactgcctcagccaccaggaaagtccctatccctacgtgaattactttcttataaatcaggaaaagctggagaaagaaatggggtgtgaaatgtaccagttagaggaagaaagctggacagcagtgggaaaatggaaatgcttctatagatcacaaggtatagttacaggaccctcatcagaaacacaattccctctgaattcagcattccttgttacacatgcagtatgaataaaatactgagcactatttccagaagaatagcctgttataaaaatggcagcagtgaaagaaatggggacagcaggagcagtcatgaaagtaccctaggagtgccataacacatatttttccattaaaagtaaatgcttcacataaaaatgcactgcttcacagtaactactctattttgtagcttctgtgaatcaaacttgggctatcaagtgtataagagtggaaaataatgtgtcttgctaattaccatcttatccaattggcatgcagcctgg

SEQ ID NO: 42681 - DNA, 1867 bp, Bovine  19866880939529
  misc_feature (1)..(1): n is a, c, g, or t
nagatgagttgctggggcttccctggtggtccaatagctaagacttcctcctcccaatgcaaggggcctgagttcaatccctggtcagggaactaggtcccacattccacagttaaagatcccacatgccgcaacaaagatcaaagatcccaagtgctgcggctaagacctggaacagccaaataaatattctaaaagaaagggaagagagagagagatgagttgctggagcaaggaatagcgactttattcagagagccagcagactatgaagatggtggaccagtgtcccaaagaaccatcttgcctgagttagaattcaggcttcttttatactaaaaagggagggagtaaagttgaacatttcctggtttccatcagtctccagaggggatgtgtcaatttcttcctccctgcaatcattcaaaggtgggcctggcctatttcctatgagctaaacaaaagtgtgttagcttagtgttgattacctgggaggcagggttcccagagatgggccagtaggtataatttaagcgtaaaggcaacatccctttagcaattaacttgtaagagaatacagagattctttcctatcgcaaccctgcatctccccattcagcataagagaaagtacttccatagctcttcctcaggctagaatggggagcctgttgcccacgaggttgaggacccccctacttgctgttactgttccgttttgccatatatatgtttgagagatggatcgttctctacttacctggaactttaatcttggggttaaaatttaagatatgactgttcagagtatacatttaaaaacatgtttgtaaacattttttcccactggcattgaatatatcattttgtatcatttataatgatgttccccctgttttctgcttttgtgctaggttcacagccgtagcacagacagatttgaaggagccgctgaaagtccttggcatcactgatatgtttgatccatcaaaggcgaattttgcaaaaataacaagtatgttcaatttagaatttgctcttaaacttgaacagtgtgttataaaccaagtttctgatttgttcaggaagaaaaggtcagcattagggatgtgttgctgtgaaactcttcagggtttcattggatgcctcactgaatgacgctgccgagcctccatcacttatatcagcatgagtcatgcatcccttacatttcccatgtacatttcatgggaaacctacgtgactgcatgcatttaaagaaacatttcatgtattgtttccattacctaaaaatttggctcttaattagatattagtctcttctttttccaaatgcacaatttccccctgtattttccaattttcaagatcaagaatgtttgagctctcaaatggcttaacttccaccaaacaactgcaggtgccagtatgtgcaaataggattttggcatctcaatcccattaatctgaaatataaattcaaaggaggctgattaattgcctttgccacaccatctgggacacagctggtatgatatcccttcatttgccagttacatgtaatttttttccctagagtcatatctcaatgtttggtctttgtctttttaattgatagcacagccagctccttccacagacaagacttaaaccattatttgtgctctattttgtacttttccccctgagtgataagagaatagttcagtaccaacctcagttgccttttagtgaacacctgggtacctgtcgtggggattaacgcgacttcccctggtaaaactgcagctccatggaggttctgagactctcatcctgtgttaaccaaactctcttccctcatccagctgcattagcatcaccatgt

SEQ ID NO: 42682 - DNA, 892 bp, Bovine  19866881045132
  misc_feature (1)..(1): n is a, c, g, or t
ngttaagaattcacctgcaatgcagagaatgtgtgctcaatccctggtcagggaactaagattcctttgtgccacaactactgagcccaagccacaaaagatccccccatgctgtaactaagacccatgcatccaaataaataaataatatatatatatatacatatatttatatatatatattttttttttaaggaaaaacatggagatctcccaagagagtaaagaagagaagaagtcttagaccacagttcctaggcatcattggctaattcaccatccctttctgggtctcagattccctaccagttaaatgggagcaaagtaataatgatacatcctatcccaggctggaggaatctaggagtaacactctttccttttattcattcttgatcgccctctacagtgctggcaagtaagaagatatttttattctatgtcctaacatgttctcaaataggttgaaagactgatgagggctttggagcaaaacaaagaataatccttagaacacagttcattttcctctcattgaatgtggcctgaagataaagctccagaaaagtccttgttccttttcctttcagagtgctcacgatagcagagccagggatgttactaacttcttgatgtaaaccctctgaatctgagtgacattccatggctctaaggagtaaataagcacaaacctctgtattccaaccacataatcatatctgaaaattcagtttcaacaccaggatttacaaaaacccagcagatgcttttgtcagtcaatcaacaagtatttactgtgtccttagggcacgtggtatggatgagactgcttttgtgagcaagcaagtgtgctctctgcttgaaaatagaaattaatcacttgttcgtccaa

SEQ ID NO: 42683 - DNA, 892 bp, Bovine  19866881267140
  misc_feature (1)..(1): n is a, c, g, or t
ntttctattttctggaaacccctccaatagatcaaagggagatgcctgagaggcagcagtcctagggggttggtcttgtcatatttagagaaggcttagaggaaggaaatcggggctagttgttttgttttaatttatttggcctcgtcaggtcttagttgcagcatgcagaatcttctttgcctcacgtgggatcttacgctgtggctcacggactctctagttgtggtgtgcaggctccagagcatggctcagtagttgcactcgggcttagttgctccatggcaggtgggatcttagttccctgactagagattgaacccatgtccattgcaacagaaggcagattctcaaccactggccaccaggaaagtccccaggcacattgttaaaaggatcattcttacttgcagatataaagttgggccctgaagaaatgagtgcccagaccagtcgtgtgtaacatttgtgtaactgatctagcagagagaacagagcagctggagctcttggtgtataaatgctattaaactcttctggccagagaactattaaatcggtcaggataagcggccagaagattgggcaaaaagcaagcgatagttcagtttactgaatctggagaaatatcatcccagtttcaagctcatgatgctcaacaaaaccccaaaccacagtgttctccagcccttgtagaaaactcagttccctactcagaatattaagacagagctagttgccatttcgcaaaattcaacagttccacctatatttactgagtccttgttatgagcaaaatgtggagttaaacatcattcaggaaaaaaaaaatgcaaaatggtaagagaactgagaaaccgatagtatgaaaagaagcttcagaggagaatgt

SEQ ID NO: 42684 - DNA, 763 bp, Bovine  19866881284568
  misc_feature (1)..(1): n is a, c, g, or t
ncaggaataagcagtatacacagggcatttgtgctgagcccatttggggattaagaaaagatgtagaagcttccaaaactgaactgatgatatttcaaattgtaagggtcaaagtgagaactatcccatccatagatcctgataagaactatttggataaaggaggacctaagaatagagtatcattattgtcatcatctccttaggaagtatatatatatatatatatatatatatatataaatatatataaagtacataaatatatttaaattcctataagaattatatacataagcatctatatatataagatttgaaaaagaatagatatatgtatatgtgtaactgaatcacttttctgtacagcagaaattaacacaatattgtaaatcacctatacttcaatgaaaaaaattatagggacttccctggtgatccagtggttaaaactctgtgctttcatgcagggggtccatgatttgatccctggtggaggcactaatatcctgcatgcagcactatgtggccaaaaaaaaagaaaaagaaaaaattacaaaaaaaaaaaaataaataagtgggcctaaatttatgcagcttataaagggcagtgcccatactcctaactattatactctcctgcttctaaaagaatgaagaattacctatattgagtagaaacacaaaaaagcattttgttttatgactaggtttttgagttccacagccaaaacctatgtttgattcatgagtttgcttcatt

SEQ ID NO: 42685 - DNA, 2356 bp, Bovine  19866881285056
  misc_feature (1)..(1): n is a, c, g, or t
ncttgatttttctcctggattatgtcggcaacacacattctgccaagggcctagggcaagttttgaaagaaaacatctttttcaggtgatacaacacaaaaattacaaggagcaataaaacccttcagtcttatttctaaaggcaagtcgacatctactgcagatcattctagaacatgatgacctgacctcctttcctaatttgtgccactggccattaagacatcttagtttaattgcctgtcttaaactgttattaaaaacacactttcattaacaactgttatttaaaactatcaagtcccttagttatgtcacacagaatgatgctgtcttggtttgatcccctaaaagcaatgcagtagtatttttctatatccatcagtaagactaacaaaaatactgctgctatctattttaaaatctatccttaaaatagccctaaagtaacaagacacatgtactgccggttaaaaacaaataaatatctgaatattaaaagacaggctccccatttcctacctcttccccaatcctagtactaagtggccaaaaccttttaaattaaaatgccatttgataacaaaagattttgctaactgttctgggaataacttacaagttaggaatacctgtgcaggaccttgttaatagtcactgctctgggttaccaatttccttctacgaaaaaagttttaactaaaagtcaacctagtttaaaaagctttggagttctcttctgaggtgtctactgaagtgtcacggtatttacaggggctcatcttgggctgcaaatagactgtgtctttcaggaggactgggctgttccacggagcagactgctcgtttcccatcccagtcacgctggtagctgggttttccattagtcatccctaattgcaatgagaaaaagtcaggcggcttgtgcgagtcccatgttaacagcaccatagagacatcttgtcctcagagcacatctgggggacagggaaggatgtggactcccttggttagtatagacactgtacagctcacttggtgacaacagtaaggatccgcccacggcacgctggctgggatgagaaacaactgaagtggaccacacactaagtgcagacatggcactacctggagaggacaggtaccatcaagaggtttgtcagtgactaggggcagagaatgttcacagacgccagtggacgaggaggggctctgggtttctaagacccctgcacccccccaagagagaacgcaagtcctcctccctggacccctgctctgaccacagagatgcgtgggaacccccgagggcccagcaagtctgggaggaggggagtgtgtttgcacttggaattgcttgcagaaacttctaggctttaagtctttcgttcagtgtttttcttctgaaactctcgtgtgctaaattactgtctcggcacacatcagctcactgctcgcgggacgtctcgctggagtaactccactccttggggacccgctatgtcagtccccacggatagttccataaatgcccaaaaacacacgttcacgttttgttctttataaaaatgctgatttgattttagtggctggctgtccatccacctgaaagggactatggagctagagggaagcgttgtgtgtaggggaaggtggccgccgtgaagactcagaccccgctggcccctgcatcagtgtggagagaagctggttgccagactgcagcccaccacgggcgtcatgtcccaaatctgcaagagaaggagggggaggacctggagaggtggcactggctacgtggtcccacaggaggacagacagctggtatactggcccgcaggtcaagacacacagctcagcctcttctttccctataaagcttctggagatttacacagtgacaagacaatgtggttggctagaacacaaaaaaagcttataagcagtatttctctcaacacctgcgaattacatcataataatgtttcactacaatttacttttatttttaataaaaagcccactgggaaaaagtccatttttaaaattatgaaacaaattatgacagttttatggggtttctcaggtggctcagtggtaaaagaatcgacctgccaaagcaggagccacaggagacatgggctcaattcctggcttgggaagatcccttggaggaggaaacggcaccccactccagtattcctgctgggataattccacagacagaggaggctggtgggctacagtccacggggtcacaaaccgttagagacaagtgagcggctgagcactatgcaggcatggcagttttataactcaagaatggcactaaggataaagcgctcacactcagttt

SEQ ID NO: 42686 - DNA, 840 bp, Bovine  19866881358810
  misc_feature (1)..(1): n is a, c, g, or t
ntgcagtccctggttgagtaaccaagatccctgagttgtacggcacaaccaaaaacaaacagaaagaccagaaaaccccccagaaaaccagtcctgcaacttcggctttctgtcatcctttaattaaaattggttttcaaaaccatagccacatttcggggagcaaattttgacactgttaccataaacatttcctttatgttgctaagacgactcatccctcagctctagaaaccatcgggtgagtttaaatggcctctcttctctctgttagtcggacatctctagcaaccttccatgaaggaaaacataacatctcccacatgtccatggatgttgctaggggcctgatggtgacctgcgggaccgaccgcgtggtgaaggtaagctgcctaattgtcccaattagcacctccgtgcagactgctccactgatatgctgtgagtgtgtaaggcagttcagatggacaagctcgccttccctttggatgaactccccatggcgaggtgaaagccctggctaacaaattgcatgtttgtgagtttccatgcccttcccggtggctcagtccagtggggtctccctccactgtctcagtctctccaagtaagctggtgagggtctgccacctctctgtcgctatctgccctgagccggccccagggtcctccctcccactgcctggccttagctgacgtctttctctggtcgctccttccctggctaatggtcctttatcctgggtagaatactccccatttataagaaataaccatactttcctttgttaaatccctgagtgactagcacagaaactgagtgtgagcgctttatcctta

SEQ ID NO: 42687 - DNA, 1477 bp, Bovine  19866881367188
  misc_feature (1)..(1): n is a, c, g, or t
ntattttgccaccaatgacctatgcaattaactgcagggttgaggacttcaccagcttcctgaggtgcatcctgagggtgtggatagaaactatgtgcttgaggaaggaaaactgagattttgaattaggttaagccgattgcattcaccttcatacaaaccaatagccagttacactacagttagctgttcaattaagttacctcacaaggcataaagagatattaaccataaatttttcattctggcttctaatattttttcccaaatcacagaccaagttcaataacttatttttcagtttctaagatttcaggaaacaaggccaactttctccccatttccatcatctgactcacacgccaagcccctgaggaagcaacagcaaacatactggtgtcagcaattacaggctgactcatgcgagaacgtgcacaattaacctattgaacatctctcgggcaggcgtttcatcctccgtaggatcagctgctctgcattcacccagggtaggcgcccagccagcctgccgtgtgttcccacgcatttccgctctgatggctggccagaaacaattcataacctgaccgctagcagcatcagcaacagagctcaaactccaaacattccgtctaagctgaacagatcatttccaggttaccctgctgccacggtgttcatgccatggagggccctgcggggctcctggacacaaggcctttgtatcctgcatttctttgatcataggaaacagccttcattcagcctctagaaccttccctgagttccaatgggcagatccaagcagctgttaattagagaagggagggcgggtaagaccagggagaaacagtcaagagcagccctagggcaaggtcccatttcccacatcaatggatagacacaacaatatctttgagttactctgcagatactgaaaccccctccaggtgggagaagattaaggatggtatgctgcccacaagcctgtagaccccagacctgttggacctgaaggctgacatcatgaactcctacttgtgtgcttggttgctcggttgtgtctctttgcggtcccatggactgtagcccactaggctcctctacccatggaattttcccgtcaagaatactgaagtggagtgtcatttccgactccagaggattttcccgatccagagattgaaccctgtgtctcttggttctcctgcactggcaggtggattcttgaccactcagccacctggggagccatatagattaaccatttgccttgctgaataaggatataaaaatcacttgatctctctaaatttcagtatcttcatttgcaaaacacccaactaacagactgttggtaagaatgtaatgagatacatgatgtaccagggttacaaataagcattcattctctaccattcgggtcctcccaaggtgacgctatggataaagaatctgcctgtcaatgcaggagacg

SEQ ID NO: 42688 - DNA, 487 bp, Bovine  19866881394448
  misc_feature (1)..(1): n is a, c, g, or t
ncaccccaccccccgccccacccccaccattccctcaaacacccaaacagtatgaccttgtatttaaataaaaactacccttagctcccaatgggtgatggtgttttgtctggaagaactactgatgtttctataataaggtaataatggttgctcctctcctatctaacctctatttaaaatacatttcatcacaactcgacttgttacacaacttcacagatgcaaatgctgtttcataagatggttttaaccagaggcaaggagattggttacaatagttcacttagacaattagtttctggggctgttgcattggtctaatttctttctctttttttttagcttataataggcaattgtctttttatttctctttcaagttggctttcaaataaatccagtttcctcttgctgtaacttctgaaacaattcacgctttcccattgtcatcaatactttcccccaagagcttcagagaaaagat

SEQ ID NO: 42689 - DNA, 1486 bp, Bovine  19866881535973
  misc_feature (1)..(1): n is a, c, g, or t
ngggcctagaggatttagatttaagtgaagaagatggtttacttttaattgctgtgaagagtttagccatccaaaaggcagtcatttggggcagtagtaaatttaaaatttaaaaatatattaactattggtaacaacttgccattaacactcagttactctatggccatagcagtttgtggtaaatcaggtgtctacacacaataagataattactgttttaattccaaaacatggatcaaaaggaagaccacaggctggaccacaaagatgtaattctgtgctattttctatcaatccatatgaaacacataacagaaaagcctatatagcacatgatatatctgagtagtcttcccttgtttgattctaaagtgtatgatactattttaagtatctcatgatgtacgttcatttgtagcaaacatttttataaaggctctcatggaagaaagaatttcactacaccagatgtccaacacggaaagagaaaataccatggggcgtttgcctgcggctgacagccttgaccttgccagcactaagatacatagctaccacaggcagcctgatgcaagagcgcactctacatgaaacgaatacagcagcagaatttcagagcggcaatttcttaacatctgagggatccagaggcaccttcgagagtcatataaggattatgaaccctcttcaaacacacacaagaaaatgaaaaaactccttgtagcccttttatgaattccagggtcacaaattcttatattctcttgccaggtctgcaaataacccactactagaagattcattcctttttttccctctttacgcaacaaaaagtcttttctttcacttcaaaaagcaagggagtgaaggaggggtctgtattaatgaggtttagattttctgagatttctatattaaaacacctatggcacaccccagcagagaacagcaattcatttatcacttttaataaaccgtttttaaaagtatttcatttgtttgttttaatgtggaccacttttaaagtcttttctgaatgtgttaccatagtttttctgttttctgttttggggtgttggccaagaggcgtgagggattttagttccccgactagggatcgaacctacaccctctgcattgggaggccaagtcttaaccaccaagtcctaataaaccaattttatacccaagaaaagagagacataaattcttcgattttatgtgaaatatgtaggaatcattcagcctttaggtctcaattagcagttgaggatcagatgcagagctaactgctgagactgggaaggatactgcagacacgaggcccaggaagagaagaagtgcctcccgagcatgttcccgctgcgggtgcacatccaactgacacacttgtcgtggccagtgctgatcacccactcggggccaggctgaagatgatcgccgtcacccggttctgatgagctgcgggagcagagaagaaaca

SEQ ID NO: 42690 - DNA, 1318 bp, Bovine  19866881673251
  misc_feature (1)..(1): n is a, c, g, or t
natgtgcttcttggtcttctaagaacaacttcactgagcatcacctatcccttgactttattattaggagacatgctgcaatgcactctcatagataagagaagcatgccatttgtgtgggaggctgaggatgagggtgtagtcttgcccaatccaggcaaaattcatattgtaaggaacactggctttctctatgcttctcaaaatagctaagcttactcccacctcagagtctttgcacatgctgctccatttgcctgaaattatctcttcccatatctccaaagggctcagtgatttccatcattttggtggatgctcaggtaccaccttctccaggaggctgtccttgatcttcatatgtaaaatgaatcctatctccttttatcatgttacacaatttcattttcttcatagcacttgggaaagcattgttatatatatcctttgtaatcttttgttgatggagaccttttatattatttttagatagctgacttaggctcaaaactgaggacaaatcatttgttacatactcctgaattctaaaaattggcataagaaatcagggccggcccttcccttgggtctatctaaacagctgcaaaaaatggccctgttaacctcaacaaaagggtagggagaatttctagaaaaaaaaaaggggggagccagaaagagagagagaaagcaaagaaccactggctttgagtaaagatgagaggttacttcctccacttctgccacgactctgcccagccaagtgaccctggaatctccaagagatttgtttctggagttggagttggaaagaccacatctgcttcatggagagaagattggctgagctatctggtgggcaggatgaccctggtgtctgagtgcattgagggagttgctgtacaagtttcatgaagattctggggagcctggggtcatgagtaaacaggggagagtttgtgactgcttctcacatagaattatgcaaaggtaggatgctgaagctgaagctccaatactttggccacttgatgcaaagagctgactcattggaaaagaaccggatgctgggaaagattgaaagcaggagtagaagcgtgcaacgaggacgagatggttggagggcttcaccgactcgatagacatgaatttgagcaaactctgggaaatagtgaagaatggggaagcctggtgtgctgcagtccatggggttgcatagagttggacacgattgagcaactgaacaacaaaggatgcttaatggagaagatgggatgccaagagtgagtttggaatgtggtctggtgtacctggagaa

SEQ ID NO: 42691 - DNA, 934 bp, Bovine  19866882226918
  misc_feature (1)..(1): n is a, c, g, or t
nattgatgttctgggcagaacttcttcttgccctcagtttcataggctaaatgctcagctgtctaaacttacctggcttgtgcgcgtgtctaagattaagcttttacttcttcccaaagttctgtagccaggacagtgagtattaatccaaacattactatcggctgataacattcctgatatgaatacatattcatcttcaaacagtcttttacatgaaataactgttagagttatcaggctttgaaatgcttactctctagaaggaagagattctcattatgggaggaacatagtaacatcctattttatttttttgaaagaaatcacactttaaatgttcaggtaaaagaaggaataaagatgtcgcccaaatgtattacacagcatcaatatggacgatcctgctgctgctgctgctgctaagtcacatcagttgtgtccgactctgtgcgaccccatagacggcaacccaccaggctcccatttcttgaataatcttttcatagtagtgaaaagtctctactttaagccattcttgtagggagatcacaaacctataaataaagccattatttcaggtgaaaatgaaagtcactcagtcatgtctgactctttgcaacagtccatggaattctccaggccagaatactggagtgggtagcctttcccttctccaagggatctttccaacccagggattgaacccaggtctcccacatcgcaggcatattttttaccagctgagccacaaggaagcccattattataggtatatccttccaaatgtgggcttctgtttccccatgaacttcttgtttctgacttcaaatctttcctttccagagtgaggaatgtttttgagctttaagtgagatttagtgttgtaaatcggcttcccaaatggcactagggtaaaaaacctgcctgccga

SEQ ID NO: 42692 - DNA, 852 bp, Bovine  19866880492441
  misc_feature (1)..(1): n is a, c, g, or t
ntgtactgactgatccccaggaggtgaaacgacatagttgattcaaaagaaagagaccccatcgaactttcgagtactcctgtttttggtttgttgcttgcacggaacttcaaatatttcatgaagctgatcattctctttggccaacgtcacatccaaagaactgtcaaacaaattaacgtttattactatgactttttaaagctaccttatgacttgatacaaagacttccttttttttttttttttggtcaaaaggaaaaagctcttatgttgggaatgtaaaaagaatttctttaaaggttttccgaaaagatggactcactgcagatttcattcaacttgttttattttatgttgctcctttgcttgaaaaagtcattccttatatagaaggatagaaggataaagaaggtttgcaaagaagatcaattccatgaggctaatgagatctggggtttttatcttcaatttgggttgtcttttccacaggcttttttttttttccccaaaaaaaacactaattcctttgaaggactctattggccctgaaggttgctatcacaaagctaggacagagctaaattattttttctaccacatggaggcattgaacaaccatgtgattttcaaaatttaccaagatttgataagagttgaaaggtttctcaggcaacagcaaaaaggtgggtttgatgtcgacaaatgactggcacttagtatggaagcattcttccccgtttataatttagcatctcctctgaggagcctgttctctaaacacactagctttcagcctcctacacgttgataacataaggacacactgtatttgaacatactggattgcag

SEQ ID NO: 42693 - DNA, 590 bp, Bovine  19866880715810
  misc_feature (1)..(1): n is a, c, g, or t
ntccctgggtgctgccgtcggggttgccacaacaggacttcaaggcatgccccacgcgaaagcagattttaatgtaaaatagatatgtgtacctaaaatggatctctccacaatctgagatagtaataacgttcccaaaacccggaaccccgtatcccttcctctttcaaagagtcttgtagagttgggtgccttctgttttgtgataagaggggacactgctccggtatatgtttaaggtactgactctaactctgtcactcggagaacaaagcggacttttctggaatgaatcatgccttagagaaaaaagtcacatgtgttccttgggaaacttgcaagctcacccccagtcccagagggacagaggataatgatttcgtgttgttggctgtttactccctaggggttctgaaacacgggttttcctttgaaaggaaagatgcctcttttttttttttttccctaaaagccatcacatggctctccatggcatgggtttggccctggcacccaccacaaagacatctgtgtgtcctttggggctgggtgccaggcccagagactgcccagactttctgcccatcttc

SEQ ID NO: 42694 - DNA, 1523 bp, Bovine  19866880810610
  misc_feature (1)..(1): n is a, c, g, or t
ncccggccccacatccgacactggcctcaccgtttctctgtcttgggtccgaagggaacccccttccagctcaccgcacggtcttcctggcctttcctcagcttagccgagcattacttttaaaccctcattctgatctttgttttgtgtttacagaagtagattccttttattcctttccccagacaggcctaatccctttggaattcgagcttttaaagagcacctccttggttatggaaaggcagcccgccaccctgctgcagagaggaaacacgccccaccccttcaccgccccgggcaaaggcaccctggctcccccttccctcagcttccctcccatttcttgttgggttggcaccaagggcaacctggaaaaagaggagggaggggtagggggtgcagggggacagagaggcggaagcaggtggctcaccctggaccctgaggcctgaccgcaccctgctgagggatcgtcatcgaaggaagggacacagtgccaccaccccagccacccagctgccaggaagggggcaggcagccagggcgtggctgccacaacggggagccactgccaccggggccctgccagggcggccccacgcaggaaccaagggcgggagagggcacctgatgacgcctctcactcctcctgcagctgcaggtcccgagggtgctccctgataaacagctgttcacaaagcctctgagttcacttcccggggagaccgagctgggaagcagagaccgttggcacaacaggtgaacgccctaacacccgagaagacagtgcgctacggttgtcctttcaggggacaatgatgaagtcactgttccatgtggagttggagcacacggcatcagtgagttccctcgggcctgcgtgcacgactccatgtccatcatgcagagattaaaagtcctgagaggtggttactctgttcccccattttacagatgaggcgaccgaggaccagggagaacacagtcctcgctcagggcaccgcggctcgtggctacgctgcggctgaccctggaggctcattgcagagtctgtgctcccacaccaggcgcctcctcctcccctgccaatgggctaggttctcctccagggctagtcctcctccagggctagtcctcctccagggctaggttctcctccagggctagtcctcctcctgggctagtcctcctccagggctaggtcctcctcctgggctagtcctcctccggggctagtcctcctccggggctagtcctcctccggggctaggtcctcctccggggctaggttctcctccagggctagtcctcctccggggctagtcctcctcctcccctgccaacgggctaggtcttcctctggggctagggcaggtggtctggtctcggtccctgccggggacaggaaggcaacaaagaaggataggaagatgagacaacggaagagcagagcttgaatagaaatgcaaatctcaaaagacattcttttttttttagttaaaagcgtgtctctcggaggt

SEQ ID NO: 42695 - DNA, 3962 bp, Bovine  19866880926364
  misc_feature (1)..(1): n is a, c, g, or t
naacgatgagttggacaagagcctcaagtatgctttctgttctaggttcctaaactcttttgattttgtttctatggggatttatgctgtttttttcacccacaggtcactgttgattcagatcagctattaaaatcccctatccttttttaatgcattctactgagttattgttgctgttgttcagtcgctcagttgtgtctgactctttgcagccccagggagtgcagtatgccagagttccccgtccttcaccatctcccagagcttgctcaaactcatgtctattgagtcggtgatgccatccaaccatctcgtcctctgtcgtccttttctcctgccttcaatctttcccagaatcagggccttttctaatgagttggctcttcacatcggatggcccaagtattggagcttcagcttcagcatcagtccttccaatgaatgttcaggatgaatttcatttaggattgactggtttgacctccttgcagtccaagggactcgcaaaagtcttctccaataccacagttcaaaaggattagttcttcagtgtttagccttctttatggtccaactctcacatccatagatgactcctggaaatactatacctttgactagaaggacctttgttggcaaagtactgtctctgctttttaatacgctgtctaggttggtcatagcttttcttccaaggagcaagcgtcttttaatttcatggttgcagtcaccattggcagtgattttggagcccgagaaaatagtctgtcactgtttccactgtttccccatctatttaccatgaggtgatggggctggatgccatgatcttagtattttgaatattgagttttaagccaactttttcactctcctctttcactttcatcaagagattctttagttcctcttcactttctgccataagcgtagtgtcatctgcttatctaagcttattaatatttctcctggcaatcttaattccagctcgtgcttcatccatcctggcatttcccatgatgtaagctgaatataagttaaataagcagggtgacaatatacagccttaacatactcctttcccaatttggaaccagtccgttgttccatttcctgttctaactgttgcttcttggtctgcataccagaccaagaagcaaggtttcttgggaggcaggtcagatggtctggtattcccaactctttaagaattttccctagtttgttgtgatccacataaaagctttagcatagtaaataaagcaaaagtaattgtttttctggaactctcttgctttttcgatgatccagtggtgttggcaatttgatctctggttcctctgccttttctaaatccaacttgaacatctgcaagttcttggttcacatactgttgaaacctggcttgcagaattttcagcattactttgctagtgtgtgagatgagtgcaattgtgtagtagtttgaaccttctttggcattgccctcctttgggatcagaatgaaaactgcccttttccagtcctgtggcaactgctgagctctccatatttgctagcatactgagtgaagcactttaacagcacaatcttttaggatttgaaatatctcaactggaattccatcacctccactagctttgttcgtagtgatgcttcctaagttctacctgacttagcactccaagatgtctggctctatgtgagtgattacacatcattgtgattatccaggtcattaagatcttttttgtatagttcttctatgtattcttgtcacctcttcttaatgtcttctgcttctgttaggtccatactatttctgtcctttattgtgcacatctttccatgtaatgttcccttggcatctctaattttcttgaaaaggtctccagtctttcccattctattgttttcctctatttctttgcattgttcattgcaggaaggctttcttatctctccttgatattctttggaactctgctttcagatggatatattttttcttttctcctttgcctttcgcttgtcttcttttctcagctatgtgtatggcctcatcagactaccattttgcttttttgcatttctttttttggggatgattttgatcactacctcctgtacagtgttatgaacctccgtccatagttcttcagacactctttcagatagaatcccttgaatctatttgtcacttccactgtataatagtaagggatttggtttaggtcatacctgaatagcctagtggtttcccctattttcttcaatttaagtctgaattttgcaataagagaaaaaaagattaaaaaaaaaactccaatattttataataattatcaatggagtaaaccctttaaaaattgtgaatcattattgtacacttgtaactcatgtagtattatacaataactacatttcagaaacaagtacataaaagagaaagaaaaagaccgttagagtggtgattaagctctccaggactctggaggcgggggaatggggcgtgtctagcatccctcttcagttcatgcatttctcctgctgctggagatgatgctttgagcagggagggctcaacatttacacgaatgaggggccacaaaagcggggcaggtcaggcaagaggggaagggcctcgggagcacatagtggggtggcctcagccagagtaggtatgagaacgtggtgtgtgggagagagggcgtgcttccggggagcagcccgcgggcgcggccagctgcaggcggacagtgagagaagcacgtctgtgtggacacacggcctggtactaacccacgcctggccagtcctctcatgtgttaaacaggtctgtcatcttctcagaaaaagagcagcatgagtagactcgctctgtttttcccttgttccagtgattttcacagcaatgcctctgcgctcccaggaaaaaagaacggtctcgtagcttcatattatctttaaatgtgcttttgttgcgtgcttatctgcactggcggacgttcagtgtacagaccccacggtgcatgctccatttttaaaatggggaaaccacgtaaggaagttaaatgaggaaagacagaaaaacatcaaaacagagtgcacacagcaaggttaaattgagtcccgttaaccccctgctgacagcaactgatagtgtagaagcggcagcaggaatctgaaacacaggttactgttgggcaatttcagctcatgacagttacagatgaaatatatcggccagtttttcttcctagggtatccctttaaagaacatttaaaaggtaacatcacagatgctacttggtatatatgcagtagaaataacacaagctaaaataatatcttagtctgaagttagaattcaagtgagttttccgcatgcctgtaaaaaagtaaggtataatttatgtgccacaaagtatataaacatgaagttttatttatccatcatataactcagtgacttttcagataggaacaaacccctgtaaacagcaatccgatcaaagttctgaaccttgtcaccgccccaggaagttccatcatgcctctcaaaaccatgtcagtagttattcagaggtttggttcactagttattctcaatttacctccagttctatataaacgaccgttatcagtttcaaaattacaggcttgtagcatgtagccttctcctctccccagtgtgtttccagaacagttctcttccacttttggccttattctctcatattcagctaaatggaaaacagctcttatttcacgggtaagtagataattaaataacaatgacatagtcacccttggttgaaaacttgctctttgagaatatacgtaattgagaaaatctgagaaccaatcgacgacattgaatggaaagtataaaatattcataacactgtacatagggtatacatatttaacagcttaaaacccatcccttagaaata

SEQ ID NO: 42696 - DNA, 2298 bp, Bovine  19866880940525
  misc_feature (1)..(1): n is a, c, g, or t
ncgggtcccgggcccccttttcctcgactccccttccccattccccgcaaggaactggcctgtttctgggcaactggaactgctctagcgggctccccagtttgtgaaacaaactgcgtgtcatctggtgacctgcttcttaccagctctgctgtaaaccctttcgagggaaaacacatgcgtagaaaatcacgaaaatttctaaatgtcacaggtcacgtcttttcctcttaagagattctcgacgtaaacgaatatattaaaggttctgagaattcttgcaagagagaaaaacagttgtttaaatttgtttcaagcacccttcaaccacagagcccctccctgagggggcaaggggtggcatctgttaatatcttaggaaacaggggttctgaggaagccgagagggaggggctcgggaagacggggttggaagcctcaggagtaaggggaccctgcgctctacttacctgttcgcgggtctgtagggtgagtagggagcagtggtacatgcaagggtcctgtggctcatcccttctctccttccctagtgaccaccctcccttggtgggtgcctgggaaaagggatcttggtctaccagtatgccagtcccaagtgggcactcgccatcctgctgctggagaataaactttgaaggggtatttcaggagaactcagggtagcagtctcaggccagaaatttgctctccttaaataggtcagaaacaccaaaggcaagaatcagacagtggggtccctgagcagagccactcactcagctagctcagaggctgacaacaaacagacaagaaaggcccatcaatgctgcaaaccccaaacctttccgtcattttgataaggctcgggcttttgactctgtggcagagtttaccgactccagttaattccagcttcaagtaaacctttagatgttgatactgattaattgtcagcctaatctttattcaaatacatcaatacgtttaaggccaacataaaaaggcaaatatttgccccttgtgcgaaagtaaccagcttttaaataatagactttgctggaatcactagcaaccattctttatctttttctctcacgttccaagcaatctggcctagcaaactatatttaccaagtaattaatttgtttccccttaaaaaaaataaataaatccaaacatgtgtcatttggctgtcttcccagatgaaagcaaagatacttggtatctgagttatatttagtcgctcggttttaatttggcgttgattctgtctcactgtggtttatatttaagtagatgcagagaactgtgatcctgctgacccaactacctaaagaatacaagcgaatgctgctgctgctcacaggtcttgaaggactggaattggagcacgttttcactcattcactcgcttggttttcagtggacaattctgggacctctcctctggagaactggcgtcccactggaatttcctatcctccatgtaataaaactgtcaccaagctcataaatagatgcagattcatgatggttccgatgacccctccctacgtggggctccccgagaatggctcccttccccactccatcccttcctccccagaaccggcccctccccactcccccggtcccctccggcagcgagggtgcagttgggagccctctgggattcagggtttcccatataaggcaccagaccctggtttacttcgtctgaaattcaccaaggatacacgcagagatgcagacgcagtcccagcttcctgggtgcccagcccttggagcagaaggaaaccagtgagtttcatcacgtgggagcgggggagcccttctggggggtcctctttacctgttcctagtccgggcttccctgcccccctcccaccccccagcaccagctcctggcccgcagcagagggcggtgccccagagcaggagcgttccctgcttcacctccaggagccagcaaaacgtctgtaggagcgacatgttccagctgatccttgaggaaaggaaattcctgcagctggaaacagcagagatctgtgggcgggggcgctggagcgagaagccgcctgcctgcctcctagcaggagccggaagaggcctgagagacccgagtcgggtgggcaccagcttccctggggcccacacagggggtcagacttggggggggtcctcctgcgtgtctctgaggttcatgcctctgacatgtcacagacacggcagattgagcttcccctgcccagcacaggaccggggttgctgggggtacagctctgtgccctgggggt

SEQ ID NO: 42697 - DNA, 1498 bp, Bovine  19866881131534
  misc_feature (1)..(1): n is a, c, g, or t
ncgcttcgatcgtgtctgagtctttggtaccccatggactgtagccctctaggctcctctgtccgtaggatttttcaggcaagaatattggagtgggttgccatttcctcctccagggggatcttcctgacccagggattgaaccttcatctcttatgcctcttgcattggcaggtgggttcttgaccacaagcgccgtctgagaagcccatctgagccctaactgttgctaattctgtctgagacattctgtagaaagaacattaacaaccgggattgttgtgggtttctcaaaagcctagaaattcaaccaatctccctcagctagaggaactgggccctcttgtttgatgtgcaaattataatgagtgttcattacaccaaagcaggaatttataagctgccgaagcatatctgagagcgtcaagtgagaagcaacttgaacacacacgcacacttaaagctattccaatgtcttccagaaatagaaacacctatgaaaactcagtttaagatcatgaaaactctttaaaagccctagctggggcattggaagattccacatcttttggatatggcaattatctaacttcttccactgtaatcacaaggaacagggttgagcaggtgaatcacactctttttacagtaacgaccctgtaatcactggaaaagaccccgatgctgggaaagactgaaggcaggaggagaaggggacaacagaggatgagatggttggatggcatcaccgacttgatggagattgagtctgagcaagctctgggagttggtgatggacagggaggcctggcgtgctgccgtccatggggttgcaaagagtcagacacgactgagtgactgaactgaactacagtaatgacaagacggaaattaccatgaaaacttccaatccccaaattccaaagtaccgtcatctgatagaatgtgcttatttttctttccacttgtaattcacagaactcagcttccacgactaggattcaggtgggaaccaaggcccttctaacacagggccagggaggccagttctactgattttccaagagaagctggaaatcctcttttttggggggaggggttgttgataagcattgaaacgttttttgaatttctggagtctagttggttcacagtgctgtgttagtttcaggtgtgcatcagtgactcggccatgcatatagttcatctattctcttttgggttctcttcccaaataggtggaaatgaaatgcgtgcatgattggttttgtctgactctttgtgactctacggactgcagcccaccaggctcctctgtccatgggattctccaggcaagaatattggagtgggctgccatgccctcctccagggagtcttcctgacccagggatcaaacccatgtttcttgcgtctcctacgttagcaggaagattctctaccactgggccaaggtgatcacagggtaaaatcccttgttttcagtgctggcatctaa

SEQ ID NO: 42698 - DNA, 2331 bp, Bovine  19866881136102
  misc_feature (1)..(1): n is a, c, g, or t
nccttacacacacatacacacacccttacacacacatacaccctcacactcacacaccctcacactcacacccacacacccacacatacacacccacacacagacacccttacacacacacatactcaaccctcgtatctcttaataaagaactggatgtctctcctgatgtgctgagcacttcatattatttacctctattaatgatttcctctttgaagctctttatgttttatctgaaaaaataaacatttttgaagaattcagtaaattttaaactgataatttaggaatatatgcaagaatcctcactagatatactctataagggaaatgttggtaagtagatgcaattaaaagaagatccattctactcattttatttgccacaaatagtcattgaggtatattttccacagggctgtatattttgtttggttttctaaacctcagtaagacagtatggtatatgtcagtgcccagaatttgcttactggtcttatacaaaatggggaaaattttaacaggtctagacagttgattgaatcttaaaactgtatattttaaaaaagaatcattcttaaaaacaatcacggtgtgtgtgtatgagtgtactaagttgcttcagtcgtgtccaactctgtgcaaccccatggactgtagccaccagactcctctgtccatggattctccaggcaggaatactggagtgggttgccattccctccttcaagggagtcttcccaacccaggaactgaacccgcatctcttatgtctcctgcattggcaggcatgttctttaccacctgggaagtatgtgaagagtagttatttaaactaatttgcaagtgaaattgtaattgttcaggcacatgtgagtgcatcctcatttaggggcagtgggtctattcactgctttaccctcccccaaaagaaaacagctctagatgtgtaatctccatgcaaatctcgtcagcatatttacactggaaacaaatgtagccaattatagaaaaataggtggaactattcaaagcattcattacctctttcagggcaatgggataaattaaacttcataaaactgctgtaaaaataactactttagaatttaagtacagttgtgtaatttactgctggttaccagattccatttcaacagaaaaatttagcttccaaaaaaaagactcccaatgaagtgctgcgtctgaaaacccggagccatgcccccacaagcatttaaagattagggccctgtgtggcccgtttcacgctgcatcaagaggggcccttctgggcttccctggcggtcctgtggttaagatgccacgcttcccctggagggggctgaggtttggtccctggtccgggagatcctgcatgccatgagatgcaaccaaaaaggaaaaaaaaaagagtggcctttccagtccaaaaagtacccccaacggtttaaaccgtcttgattaaatacagtggtgggataaggcccctgagagtggggttcctgccagcctccggctccgagttgagagcagtgtctcccacccatcaaaggatctgcagggtcagagcaggaagcgagcttcctccaacccattccctccattttaataacgaatctgggaggaagaattcaagtactgtcataggaacgatccccccggagtaggaaatgggaacccactacgggcgggttcttgcctggagaatcccatggacaaagcagcctgcgggccacagcccgtggggccgcaaagagttgggcatgactgagcaactgagcacgcacaccgcacaggcgtcagtgttatttgcaaagttaagcttcagcgtgggtcagattctcatgagtgatgacttgtggaggcagctccctgaggagtcatcgtccgaatcaggcttatgaagcgaggacagagaacactgctggactcacagcctgcactgcgtcccttccagcggcagagtgcaggctggctcgcagctctgtggcgtgaagaaccccaagttcctctgagtccaagccaaattacgcacctactcctttgctccagttattttgtgtcagtttcatttctctgggctaaatggggtctccggagttctctttaaaaaggtacaaacctctggaaaagatggcctattcggtgccagtcacattgagatccaatatatgatcatttcctctgggagaggaagatctgtgagtgtcaagaagggaaagtggctacggcagggagttagccagatggggacgaggcagccagatcaaggggcattttccctgctttgcagagttgcactgcagttagctagaggcccagtta

SEQ ID NO: 42699 - DNA, 3552 bp, Bovine  19866881240788
  misc_feature (1)..(1): n is a, c, g, or t
ncttcggcccctgatgcgaagagctgactcattggaaaagaccctgatgctgggaaagattgaaggcaggaggagaaggggacgacagaggatgagatggttggatggcatcaccgactcaatggacatgaatttgagcaaattttgggcggtcgtgaaggacagggaagcctggcgtgctgcagtccatgggatcagagtcagacatgactcagcaactgaactataacaaccccagtacttgtagaaaaaacagggaagaagctcttccttacgggttttggcaataatttggggggaggggcatgacaccaaagccacaaacaataacgaaaataaaaaatggcagcacatcaaatccgcaagctccagcccagcagacaagtaacagaatgaaaagacagcctacgaaatgaaagactgtctctgcaaagcatacattggcaagaggttagtatctaaaatgtataaagtgaaagtgaaaatgttagttgctcggttgtgtctgactttgtgaccccatggactgtagcccaccagcctcctctgtctgtggaattctccaggcaagaatcctggagtgggtagccattctcttctccaggggatcttcccaacctgagaatcgaacccaggtctccagcgttgcaggcagattctttattgacattcagtcagttcaacaacaacgacaaaaatgatagaaaaatggcagaagagctcaacagacatttctccaaagaagacatacaggtggccaacaggacatgagaagatgctcagcctcacgcaccatcgggatggaagtcacagccacagtgagctgccctctcacctgtcagaatggctgtcacgaaacagacaagacaagtgctggtgaggacgtggtgaaaggagacccagcccctgttggtcgaagtgaagacgggtccagctactgtggaggctcctcgaaaaaattaaaaacgggtttacttaccacaggatctaacaattccacttctgagtgtataccgacaggaaatgaaaacaggaattcagcaaggtgcacgcaccctcatttttattgtggcactgttcacagttaccaggacacagatacagcccaaatgcccatcagcagatgaatggataaaaaagatatgatacatatacacagtggactatttttcagccatgagaaaaaaaaatatcctcccgtgtgtgacagtattgagcacatcgtcctaagtgagatgagtcagacagacaaagccaagtgctgtatgacggtagtacttctatgtggaatctaaaaacactaaatgtgtgaaaaacagaaagatggtgatcaccagaggacggaggggaggggtaagagtaatggtgtttaaaggttcaaacctgtaatgagtactaaataagccgcagaaatctccccgcatctccatgatgaatataaacaataatattgtactgtaattacacagctgataaataattacttcatcagcagtcgtgttacagaacacaaattaatcaaagtaacactttgcacactttaaacgcacgcagtgttgcacatcaaattgattccgataggtgaagagatgggaggatggattacggataggtccgagggtagatagatacatagatacgcacatagttagacatgcgtgtgtggatacataggcatgtacgtcggtagactgaccgcctttctacacggagattctgaccctggcctggctagtcttgagactgctcttttccagtgagtcagctcttcacatcaggtgactaaagtattggagcttcagcttcagcatccatccttccagtggatagtcaggactggtttcctttaggatggactggttggatctctttgcagtccaaggaactagttaccattagataagagtgagatgtaaagaatcccttataatatgaaacattccttcggtaaaactaagtggttcctcagtgctcgacagggaggccagcagagctatgctaatagcctcacagtgctgcactaagttgctcagtcgtgtctcactctctgtgaccccacggactgcagcccgccaggcccctctgtccacgggattctccaggcaggaacactggagtgggttgccatgccctcctccaggggatcctcccaacccagggatggaacccacggtccttcacgtctcctgcattggcaggcgtatgatttacgacaagcggcagttctcagtgttcttttgggggtgaggaggtaaggggacaagcatattccatctttctgaggtgcctcaacacagaggtcactaaagaaccacctcttggagcaggaggttggggttagtagatgtgatctgttctgtatggaactgaccagccgcaggccctactgtacagcacagggaactctcccctgtgataaaccttaatggaaagattataagaatacgcatgtatgtttccgtaactgaatcacttagttatatacagtaattaacacagtagaaatcaactgtacatcaatttaaaaactaaaactaaaaaaaaaagaatggttgcccttggagtctttccccagctgtcggcaggaggaccccggggtggccgaggcagccacggtttttcagccgtttcgggcggctgatgctgcagtgtccgcccctctcccggcgcctgctccacgcagtggcgtgggctgcccaccgtccctccacggcccctcttctttgctgggtcgcctatatcttgatttcactcttaatttgcccaggtgttcagacattatatcaaaaagccttccacgctgttggtcatagaacacccattttgagagcttgaagtaagtccgcctcactgactgtagaggactcgttcctcgagggaccagtttacaggcccagggtgaggccgccctgtgcccagcgctccgcaccccggtcatcccggcgcagctgcgaccagagctgcagagagaccggctcctgctctgctggggacccccggcctccccgccttccagcaggcctctccacctcccgtgtcgggagctccccggcacaccaggagccgctctccacagatgtttgacgaatacccactgcaatattctgagtggggaagctcaaatgcttcaaaaattagataaatctaaatgccagttgtcaagtcatactaaaatattgtttgtttaccttttgttgacagacttggtttttctcgccttcagtaatctcacagcgatggcaggtcattttacagaataagaacaaccataataacgactgtcgcatttcttctctttactaaaagcactttacctgaattcccactctatcagaacttgacctgaaaaagctattgaatccccgtgtcattaacttttctgtctaaagtcaaactgttgagatctagaattcatagataaatttctttatcctcttcctggttttttctgttatttcctaaaatctctgaggtatggattgttttcttgtgtgtatttgtattgggttggttttccttcctccttgtaaattttttacttacaattggaat

SEQ ID NO: 42700 - DNA, 2119 bp, Bovine  19866881349107
  misc_feature (1)..(1): n is a, c, g, or t
ntgtcagagctgcatgggttgcaaggggaagagcggcttcaggctgcaagccttgctgacggtgagcatcacctcctcctttgaaaccgtggctttccccagcagcgtcctgagggacccaggagaggaagggagagcgaagccacccagattgtgatcttgattgcttcccctcctcggagcctcacttcctgccgattcttcttgtgtcactgagcctgtgacagccccttcctctctccccacccacactgcaccaggtcttccacggaccagtctgcccacacacaccccctttggcctcctaatccaccctgacacaggccccaatctgcagcatgacttgcaaaactgcaggcccggtcacaccacgccccaggtagaaagccttcgctggtccttcattcctgaagaatgaagaaaggatacatagatgcattaattatgagggcttcccaggtggcgctggtggtaaagaactgtctgccagtgaaggagacataagagacacaggttcgatccccaggtcaggaagatcccctggaggaaggcatggcaacccactccagtattcttgcctggagaatcccaaggacagaggagtctggcaggatatagtctttaagatcgcaaagagtcagacatgattgaagtgacttagcacgcatgcaggcactcattaatatacgtacaacggaagcactttctgtatacctgacgctaacacagtgctgttaaccaagtgtactccggggacttccctggtggtccagtggctaagactccacactcccagtcaggggacctgggctcagtccctggtcaggaaactagattccacgtgtcacaactaagagttgtgatgaatatgatcccacatgctacagctaagacctggtccagtcaaataaataaatattcttgttaaaaaacctatactccaatatattttaatttttaaataaataaatgtaattattgcacgttatttatgtctgactttccaactagcagtcatccaaacactcaagcctgtagcgttctccatcagccatcctggctgagaaaggactcctttctccttgactcccccagaaagaatgaaaggtatttccccaccctcttcacctgcatccctgcagagaaggtaaccagcctttgaacctggaactctgacttccccgagccccagaggaaaaacacagccttttcctgtgttttctgtgggaaaaagggaagctgtttggtgcaattgcctccccctatgttttctgaggttgaggccacaagttgaaattggaggcccagaaaatccttatttggccttgaagaatttaatatgaattttaaacatgtattgcaatgttcaaacagtgggagatttcttatgaaaatctaaatttctgggttctcttggaaaacaaagatggagcacctctggtcccctacgttcacgtggcaaaaatgggcaaaatccaagtcgcgtgatcccctttagacagatcatgtgctccctggcctgtggcaatcccaccactccctaaggtctcatactgtaaatagacaggttaggggtccccagggaaagagaacgaggcatggatttcttgacctaagagaagccgttttggcctaggcctggtcactgtgcttatcccttaacaggtctccataaataatgatcttaaaggaacaaaggaatgaagggacagagaagaggcagtccgagcacagtgcagtgataaagcaagtcctgcttcctcctcagggggaaggtattattattattatatcaaacataatagtacctttgagttctacaggaactgagggccccacccaagaggagggcgggtgatggtgttgaccctggtggcttccatcaactaaaacctggagtctgtcggcctttgccccagttctatgctggattctcctctgctcaagccccttcatgaatatgcatgtactcatagtttaaaacttccccacaaaaaaaaaaaaaaacttccccaattttgttgttcctggagacgctgttttgggaaagatccctggtgttgtccttactggctgcaagtaataaattctcccttctcccgatctttggcgtgattgt

SEQ ID NO: 42701 - DNA, 1191 bp, Bovine  19866881894082
  misc_feature (1)..(1): n is a, c, g, or t
naaatatttatgaagcttctaaatatgaacatggctcccctctgagaatgggcatcaaaaattttgctttgaatgaacagtgaatacatttttaccaggtgttttgggagatgaaattgcatgtttattttctttctgtgtttgccttgaaattgacagttaaaggcaaatgcagggcttatatttttgccaaagtccaaggcacaatagaaggctgaaaattgttaggttggcgggcaagagggcagattctctgccaaatggctctaaatgagttgatacaaggaattcaaatattaggttttgatgaaagattgttgaatttcctcaatgttggtgtctcctttggtatgcaagctaattagacaacaacaactaattggaccaatggcttagacagcttgcctctgttggcacagatgccagagggcggagcagttggcgttactgccagccaggaagatgtccatcaaggcttcactgttaacgtcttcagacctctcccggcacgctctcggagaaccttgccttaaatgaccgttggtagcaagggtgttccaggagatccctactgctgtcactgtctgtaatgttggtgttatttatactcgcctgtcttaatgtatttcagcaacctcaagttctcccactccagaaaaatggagaaatcccctatttgggaagaacaaaaatgattacagagcatcctgcttcgtgttgagtgataacttgccacagaacagatgatcgtagtcgtaactgtgcatggaaacacccaggactcctgttaaaggttgggactcctggggcacaaccccgtccactctaacgcagcaggtctgggaggaagccgtggaagccagcctttccccggcttacccgaactggagcctgcctccttaattagtcggaagtcagagaggactgtaaggccaaagcgcttataaacagtttaaaacagatttggcctgtaataagtacttcggagtcaaacagtactcctctgtcgcagtgatttagccatgtttgtttacacagttacttctaagatcaaaccaaattagtgtcctggccacagaaagcttatttgaggtcacaccttttgtctaaagagcttatttattgttcctcaaggagaatgcataagatttactgttgactgaaaaaggttagggccacgttgttatactg

SEQ ID NO: 42702 - DNA, 1169 bp, Bovine  19866880092821
  misc_feature (1)..(1): n is a, c, g, or t
nggttggatctccttgcagtccagggactctcaagaggcttctccaacaccacagttcaaaagcatcaattcttcggtgctcagttttcttcacagtccaactctcacatccatacatgactactggaaaaaccatagccttgactagaaggacctttgttggcaaagcaatgtctctgcttttgaatatgctatctaggttggtcataactttccttccaaggagtaagcgtcttttaatttcatggccgcaatcaccatttgcagtgattttggagcccagaaaaataaagtctgacactgtttccactgtttgcccatctatttgccatgaagtgatgggaccagatgccatgatcttagttttctgaatgttgagctttaagccaactttttcactctcctctttcactttcatcaagaggctctttagttcttcttcactttctgccataagggtggtgtcatctgcatatctgaggttattgataattctggcaatcttgattccagcttgtgcttcttccagcccagcgtttctcatggtgtactctgcatagaagttaaataagcagggtgacaatattagagcatagcaattataagcaggtagactgagtgcatgtttgagaaaaagagttgtctaacatttatagctgttccaagactgaagaaccagtcttgtttgtgccttcataggtctttgtagaggctgggatgttatgaagacgtcctctatcaggtgggggcttcctcatgtggtggtctcttgctccaactatgtaaggtgtagcatattccttagacaactacattgcagataaaaccttgttcttagtccatgaagtttttggtcgatctctagacctaatctcagagctgggtgggaatatggtctgtgaactttctgaaaatttcagccaagtgtgtgaatgtgcaggggtgttttttctcaggggagagggttcgtggttttcagcaaattctcaggagtgtttatgacaccccaaatttaaaaagtatgctctacctgtgctgtctgataaggatgccattagtcatgtgtggctacaaaaattaaatttaattaacatgaaattcagtaactcagtcacactggctgcctttcaagtggcttgtgtgttagatatataaatgtgtgtgtgtgt

SEQ ID NO: 42703 - DNA, 2542 bp, Bovine  19866880405552
  misc_feature (1)..(1): n is a, c, g, or t
ntgtttgcttggtgtctgtctctcacacaagctctgtgagggcagaatccgtacaaaaaatctgtgttttgtttaccgtggtaccaccagtgccagacggttctgagcacgtaatagcactccctgagtattggttagatttgttgaatgcatgagggtcattgtcttcattttctatagaaaaacttgcaattttatactgtcacagaataactgactgtgattcaaggtttataacatatgtagttgatttcgtctacttttgagagtattccatttttaactgttattaaatactctattcctctgggaggttggggcaataaaattacaaatccaatcttaggggtatttttcctccctgttacctgcattcatcatggtgactctggttggcatggcatgacctgtcatctgtctgacagtgatgtggctgctgagttgggtgtttgtggaagagttgagtagcagccttctcctgtaacctgatttgggaagtgtcccaatacatgctgtttgcattgcagctgtgggaaaatccacctttgtgaagttactcacgaaaacttacccagagtggcacgtagctacagaacctgtagcaacatggcagaatgtcctggctgctggctcccaaaaagtaagttttcagttgtggtgggtagttggcaggcttgggttcataaactagttgcagtaatctaatttgctccaagtaggtgaagtagtccattttgtgtctcctttttaaaatacctttatttcagaaagcagaccgtgtacatcagggagggatgacttgtttgaatgtgttaagttttgatttttgtagttttgacatttctgtttaagtgattgcctctgttctttccagtttcccaaagcatggccagccatcctgtcattgaagattaattttgtcattcctacccttaagtattttattgaaattgaccatcaggaatagtagttaattacagtgattttagcttagttttgaagtcttagaaattgaaaggaatcttagagaagatcttgtcacattttaagtcaatgcagaaatcatagctaacatttataaagtgcatactatgtgccaggcactgtcctgtcccaaacactgtacatttcacagatgccttgtggctgaagccctcccgtcagtatgttgctgtgggagaggccacgggcttggtttctcactagccacatcagtgtgagtagggaacaaccaactggacgtgaccctcagaagcaactgagggagtggcagcatctccgcagactcctgtagttccaggagcagtcacgagtacctcattcttgcttttaacagcctattgttagaaagttcttgtatgagccactttgcatacctgtgactctgattcattggttcaagttctgactcttaagacttttaacttttccacatggcaactcttcattcatttctaaggcaatgatttcttgattttttgccccgttgagtcttctctttgaaatcaaataccattttcctccagactgtttctcatgcagaagtaactttgtgtaggagatgcactcctgtctgttggttttccacctagattttagtaagagtagcactcagagctgaacaggacatcttagatatcgtctacatggtacagaataccatagaactggttctctgtgccctttgcttgtgcttccaacttaggatcgtgttaccttttttggcagacacttatacttactgaggatatttgttttttttaaactgtctccatctatgtatgtacctgtgtgtgtgtatatgtgagattaacttttctatttagtaaataaattatctttttctgagtatgccacagggcacctgctttggggatttaaaaatataaccacagatttggtactgtttccttcaagaaggaaatagtattaattcttttattcttaattctcccctggagtgtgatctggacttggtgacttgcttctaatgagtacagtgtagcaggattaatagtgtgtgactttctgtggtaggtggtaaaagacaccgtatcttccgtcctgctctctctcgatcacttttggctctggggctgccagctgccctgtgatgcagcgtacctgtctgtgaaggggtccacgcagcaaggaactggtcctgccaggagccgtgtgactgagtcttcttggaagcaaatccttgaatccccagtcaagtcttcagatgactgtagcctcagccaatatcctgactgaaatctcatggaaaaccctgaggcagaaccacctggctaagctgtgtcccgaattcctttcccgtagaagtggatttaatgaatgtctttttttgttcaagccactaaattttggcacaacttagataattactactctgataatcccattgtctggaaataaaacagttaacatttttgtccttttaaatttttttaaaaggacaaaatgtatatattaacacacatataaatgtataaaacatacacacatttcatcttttaaaaaatgtatttaggctgtg

SEQ ID NO: 42704 - DNA, 1095 bp, Bovine  19866880576461
  misc_feature (1)..(1): n is a, c, g, or t
nttagggtgtggggggtatcttacagatatgctgagtactcctttcaaggtcagaaaattaatgagtctagtctttcctcttcccttttctcaatctcataatcagcaatgtataaaagaggtcaagagcctgtccagtgtggtaaggagaaaacttattttttgtctgggatgggttttagccactgcatcccaaggcagtttgtttccagggggtggggccctggtattataatacatttagttcacttaggaacttccctttcttctaagagttcattcctaaatgataagccaaggtaatcttccacaaaccctgcaaaattctcaagtttcacagttaaatagaaacaaatgtgttgagacatactttcatcagtcctttctttctttcaatatattttattctgatgaagttacaaaagtagatacaaaacactttttttaaaaagtacagttaaccgacttagaaaaatagataaaagcccctaaaggtttaaaaatacaaaataaattttcatgtaaagaacatttaaaaatattttagataatcaagactaacttaagcaagttattttcaatgtagaccaaacatagaatgttgtcctataataaatctatagcacactggtaatccattcggatttacagaatacttgtttgaaacagaatctgatgagagaaaacccaagtgaatttcaatgcagttgcttcagtaaaattactgctaccacagataatatcatcccccaaagcccattacagtctgaaatatcaaaatctaatgcaaaagcacaggaagactgaagagctactattttccctctttgccagaattgtacaatagtttaaaaccaagtcctgaaccagttactgaagtggtattaggaggaaataatgtccctattgaagctgcttagtttggtgtcccagctagtattttcaggccagaattctacagaaagcagagacagactcctacagtcaggcaaaggcgacaccagcagcatgactaaagctgcttagaaacaaatgtctaggacttacactctttgggagtgggtttgtttatgcgtatgagggaaatgatgtaat

SEQ ID NO: 42705 - DNA, 946 bp, Bovine  19866880632651
  misc_feature (1)..(1): n is a, c, g, or t
nccccagctctgcccaccagctgattcatcctttcagtgtctccttctcagtgaggtctccttgaactctctccagctccactttatccctgggcagagttaattactgcctgttctgctttaaaaggcatcacagtgtaattatttgttgactcatcagtctctccagctagactgggaactcacgttttgaagacagggaccaaccttatttcctttgcatcctgagtatctggccaggtgctaagaaggagatggatggatagaatgatgtaaatcacagaaacagagaatccaatttattcctaacattgtatccaatatacaaagattccttttttccctaggaatcttgcccaaatgtttacatttaatgaaaataaaagatgacattagcaatgttaaatcactaattttgaatgctggaatgttattaggaacgctctccactgctttacatacaagcctctaaatggcaaaagagaggtttcttctctgctgggtctttgaaaaccaagacggggggaaaaaaaaaaaaaagagactagtctgagatgactcactaacaaaagttcctacagcaatcctttattcaatttaggtttgtaaacacaaaataactgactttggaaggtgataatacactttagtgatggatacacttatataaaaaagatagggtaggtatttttattttttagattttaagggattctagatcccaagctttgacttttaatcataacatatggctcacaactcatgctagatgccattacttgctgcttcactgatccatttccttacgtgctactgtgcgtacctgcggggtcagatagccaacatttagagcagaaaacaagacaggtccctctaaacttatctaactccagctgggacaggggttcaccttcccctgttcaggtttcctgaatggatactccga

SEQ ID NO: 42706 - DNA, 895 bp, Bovine  19866880698670
  misc_feature (1)..(1): n is a, c, g, or t
nacggacagtgcagtgccactgcctctcctctcccctctctgttctcattccaactcccccctcccctcccttgccctcccaactcccaattaagggagtactccttcctggggttgacagcatctcaaacacacatcattcattcattcattcaattagcatctgagggcttctgacgcaccaaggaactgagccaggtcctaagaacacaaggcataaaaagtccttgacctcaagaagtactgtctagcgtgggaactcaaaccatgggtttctcattgaactcccaaacatttttaggtaccatccccaaaaggatggcacccaaaaaaagatttagggaaagaaacatcccactccatcagggcagcgtaagactaccctatcactccaaatttttccttccaaacccatcagcctccatcccttacctgacaccatcactcccatatcacccaagcattagcatgaccttgaaatatatctgaggcttcaaccagacaaaaaacttctaaagataaagctggataccactgtcccaagtcaaatgcaaacatccgggatgagagtgctagctcaaagccctgtgcaacctggttaccctcccaccaattgtaagcgcggcaaactagcccgaaccagcttctaaagacagctatgctcctattcacagccctcactgaaagttggacctggaggatcaaaacgggagaatggcttaacggtcttcagcaagactcttgtaaatgcagcaccctcaaggaagaaacagggctgtcaagcaagacccaacttacctccttgagaagccccacttttttcttcagcacctcacacttgcgcagtttgcagatttggtgtgtgcggcggttggtacagctggtgcaagcccca

SEQ ID NO: 42707 - DNA, 2246 bp, Bovine  19866880700019
  misc_feature (1)..(1): n is a, c, g, or t
ntttgccgagactaaggctcatgctaaggtcaggaaagtgggtgagctggagaggggtgggtgttggagaccccagcctgggtgaggccatgggctgatctgctgcggggttctgaccttcgggttcctggagttgggagtgctttgtgtggtggtttggaagactcctggccgggcctgccctagaagcaggagacacattggaacgtgggatggaggttaggaggttctccacagcctagctgagaacccactcccctgtctcgctcacaggcaattgagatggaattgaggcagatggaggtggcccaggccaaccggcacatgtccctgttgacagccttcatgcctgacagtttccttcggccaggtggggaccatgactgcgtcctggtgctgctgctcatgcctcgactcatttgcaaggtacggtctgtcagccacattcccagcagggggctgctgagcttgctgtgagccaggcattgggggcaccaagcagaggtggcagtcgttgtcctgctctcagggtttatgacgtagtacagggacgcagaatcacagacagatgtatgtcacagatggcgttttatgaaggggagatgcagcttgtgaagcggaggtagtgtctgggagagagcacagctgggaagctgatggagacagtgggctattactgaaggagtaacatttgaggtgagacccgaagatgactggagttcgtgggggataactgtcaggatcacactctagttggaaaggcagcagcagcagctttaaggtgggcaggagctggtcccactggtcctgctgccctgtcagcccgcacccgaatctccgtcagtaccagcagtcacatcaccctttgtccatgtgtgactccctgcccatctaagagctgtttctgccttctctcccgtgtcttcatgccctccgcagttgctcagctctctgtactcctgagtctgtgttctccatcctctgctctgagccccatgtctctggtgcttcttcccacaggcagagctaatccggaagcaggcccaggaaaagtttgaactaagtgagagctgttcagagcggccaggacttcgcggtgctgcaggggagcagctcagctttgctgctgggctggtgtattcactgagtttgctgcaggccacacttcatcgttacgagcagtaagtgatccctgacctccatggcagggccgtgggtcccagattggctggaactgaggtttccttgtagactctggcctcacagggcccttctctggtctccagtgccctctctcagtgcagtgtggacgtgtataagaaggtgggcagcctctaccctgagatgagtgcccacgaacgctccttggacttcctcattgagctgctgcacaaggaccagctggatgagactgtcaacgtagagcctctcaccaaggccatcaagtactaccaggtctggggcgagaattgaggcttagcacaggaggagcgagggtttcttctggggatgtttccagtgtagccagggttgtatgtcccaggctgaaggcgtgaaactcttagatgaactcaccttaggatccagttccttgagggttttggattctttcatacctctggagtcccttgatcactggggctcaaactgcagtttgggaagcatgcttcgttcttccaaggcctaaagactgttcatttgccatccctcctcagcatctatacagcatccaccttgctgaacaacctgaggacagtaccatgcagctggctgaccacattaaggtgaggtgtttgggccaatggttgagccccttgtagagattggaaatgaaagacatcagatcacacccacaaagggtgtcacataaggaacagggtcactaaggccaggtcagggaagccagagagctcactgatggatggggtcagccaaggagggagacttctttagagacgttaatggggcagaagggccccgttggaggctgacagccacctgcttctgtcttcacagtttacccagagtgccctggactgcatgagtgtggaggtgggacggctacgggccttcttgcaggtgagagcgcaaccagatctgttggagttcctcttccttcagagtccccaccttcttgcccccagccctaattctgacttggcttcccgtctgtctcctgttctgagtagggtgggcaggaggcttcagatattgccctcctgctacgggaccggaaacttcgtgca

SEQ ID NO: 42708 - DNA, 1174 bp, Bovine  19866880716661
  misc_feature (1)..(1): n is a, c, g, or t
ntgaaaagaagactcctgatgctggaagttgacaagaagtaagtaacaagcaagacagtaagaattcaagatcaagagttgtcccagaaacaatgcctagaacaacaacaacaacaaaaatggagggcagaagagaaatgcaagtccaacctggcccagcccaagaaaaggaggcgtcaaggagacgaaactaaaagagaagagccttggatcattggaccacatcattctccacaaggtgcattcaaccaacttcgccctactctttaacgaagttacaaaaagggcttcttaatcccttcctttgctccttaaaagctactgcaagttcacgttaatttaatagactgataggacttcagaacaactataatagttcaaactggatggctctttccttcttctctaaggttattaattaaccaagacatacgtaactgtaagtgcataacacataaaatataatgctatgtagaatataagtaactatgttaattgtattaatgagcatctataagaaatgttgcaatgatttccttcatggaagagcttgagggaagtaaatctgtcttggaggatttctcctccccagagctcaaacatttaggtgtttcctacaccttttttctgcatccaatcctgtcttcttattggcgatctgacctccctattggctatatcatacctttaaactgcccgctttgtgacatcattctcccaccaaatctactaccacctggtagaatcttggggtttccatggagttgtctgtaaataaatttggatcatcgcaagtgaccagtgaccagtgacctttgtactggccacatgtacacttggctgcagtcattccagacatcctctcgtatcatctcctcctcccttgtatctacagttagtttttcctctacttctctgaccatgtcaggtatggaaagaaactttgtaaagtttttcattagatttatttttctgcccgtaaatttagtagcagattcaaaatgaataatgaaggaaagtattgaactagaaatctggagacctaatttcagttttgacttggacatttactatctctgtgactttggacactttggacaagtctcacaaggtctgttttttcctcatctaatgttacatctaatgttacattaggatgctacatggtctatct

SEQ ID NO: 42709 - DNA, 1292 bp, Bovine  19866880814787
  misc_feature (1)..(1): n is a, c, g, or t
nccatcatatgccccatttggctccttctagctctggttaggaacccagagggaagaagaggctattcttgaagcatcctgcaacctccaataaactgtcatggggtggatgtgatcaaggaccctttaatgcggcccatacttgggcatttggggctgggagtggctaaggaattcagtcttgacccatagcagaatattttgagacgttctacaaacccagaggtttgttacaattattctgaagagaaatcgaggacagctgctgccttttctcacacaactgaccaaaagaacatgatgcacagttaacagcggagcagagaaggcaggcagcacggctgactcagggctacatgcacagatgccacaggactcccagctaccacctgagctggggagcgcagcgccgttcagtggcccaagttgtcagaccagattttccttggatgtcttttgcttaggctttatcgttctttgatattgagaacaatgtaaggtttatttgaaagccacttggagatgaaggaagaactataacatggataatcccagaaaaggtccaactatcaactagttttaaattctagtgtttacaaagtggtactcacttgggattgaaagcagccaagtcagtgtatgcagcatccataaatagaatacaaatcagttacaatggaaacaagattcaattaaaaagagtgcccccaaacaagctcttccaatagagtgagagtgccatggtcaaactgggttttgcagtaacactgggattatggaactgttggaaaatgagtggcccgtggactgggaaagaaaccatcctagttagctccctcactccagcctgctaaacatctagaatcttccctttcatattctcctaatcaaaactagctcgtcctgtttcctgttcctttccttttcatgaggaaactgaaaacctcatctcactagggctagttgctaataatgatttggtttaatagagctgtggttctcaaacttcagcgtgagactcacccagaaggcttgttagtatacaactggctctacctacccccagtttctgattcagcaggtctggggtggtgcctgagaatctgcattcctaacaagttcccagatagtattgatgatgcttctagggaccaactttgagaaccaaggcaatagcatgacccaaaaaaatgcagtgacattagggacctgggccaggccaggccagatgctatttggagttaggggattcgataacggttctcaaatcctactttatatgtcctttcagg

SEQ ID NO: 42710 - DNA, 1400 bp, Bovine  19866880843528
  misc_feature (1)..(1): n is a, c, g, or t
ntgcttttgaataactcagcaaatgctttcgtgttttttaatcaattaacggctgcactgggtcttcattgctttgtgcgtgctttctgtagttgtgggcctactcttggtttcagtgcacgggcttctctttgcatggcttctctggttgcagagtacaggctttagagcatgggctcagtggtgcatgggcttagctgccacacggcatgtggaatcttcctagaccaagaattgaacccgtgtcccctgcattggcaggcgaactcttatccactgtgccaccagggaaaccctgcttttgtgttttacagctatttctgtgagttcattttgaatttaggttcagtcaaatagactccttgttctactcttacaaggaacatgcaagcgtccccttcataatggaaaagagattaaataacctaaaaatattccaacctaagggaactgggcaggagaatgggaactttgattgactcagagactcaagatgctgaatacccaacaggatcaggatcagttaggttgtggtagagtaacaagcaatccccaggtctcactggtctgacacagttttatgtctccatcatgaaatatatcttctggagatcaacaggagctctgttttccatagccacttagggactccggctgctgcaagtagacatgctgcctcctcaactcagaaggcaggaaatgagggtggggcaaattgagcgtgaacttttaaagcatttacctggaagtaacatagatcacttttgctctgatttcattggccaaagcaagtcacaaggggcgggggaatgccataggtgcaatgctctcatgtgcctggaaggagaagcagaaatacttggttaataacactaatagctaatacatggggaaaagcatgtgtgcgtacgtgtgagatagatgtgtgtgcctttgaggtatgtgttaatgcaatgactgctgcccatttctagagtgtttctgcctcctagggacatatatttgagatttccactctaatggtttgccattcctcccactacacatgttcagagatttaggctagggtgaaagaaacctgagttgagggaagcatggtgggagaggtaagtgacagtggagcagactcagtagaaattagtgtgtaaatagaaaaagaatccaggaaaggaagagattcagggtatatgtgtcattaagggcctgcctcataaagaaaactactaagacagcatagctttagcagaagcatttcctgcttcttgccattcactccccctcatccttcctggctaaactcaggtggcactccaggaagcctttgatctttcaagattgagcccacagatcacatcatgagtcagtctgtcccatccacagtgcagggacagggaccatat

SEQ ID NO: 42711 - DNA, 1779 bp, Bovine  19866880843655
  misc_feature (1)..(1): n is a, c, g, or t
nggcagctatatataagtatgcaacttacttttccccaaagaactgtcaacagctggcagcttttctctgctgcacctgttggctttccttgatcaatttttgatagtgagagttaatactgaatttaatcagactttattaagggactttttgcatcattttgattttttaaataaaacacttctgacttgatatggaaagagtttctgaaatacttcatctttctgctactatcctcctgtggcctaatttttctcattggatgtaatcaatttaaatattcctatatttggtaacatccaatcctttgactttaacaaattggtttaaagagctgtggagaaaccagcctagtccttttaattgtacatcccaagccagaagtttcatctgtaagcttcatttcagtggttagtcttgttctgagtattttaaaccatatgttcaatttacacgggacttcttgatgtgttttgccaaatctccccctcctccacataatatgtataaatttttttcctgtgtgtgtatgtgtttaaaacattagattgcacagatcggaaggtatttgctgtggcaggcatgtttgcggctcggatgggtcctgtgtcttctgctcgagggctgagtagttggctttcataaagcaggagcagctcccgctccaggcagcttgaggcagcgagaggaaggagaacaatgcagagccgcccttctcccctgcttgttcctttgctgcctttatgcttttgatagttttctggagaggaagaggggtgatagttctagaaatgtttttgtaaatgaggtatagttcctgtctgtacatcatacctgctgactcacctaaattattaaacgtggagcaagatgagcaaatgggattaagttttattgaattgtagttacaagtggaaaaaagtatgacctgtatgaagaagtaacaatatgtcaacctgttaaaagctattaaaattaaaatgttcctgtgtatgtgtacaaaatgcaaataacatacaaggtaaaaattacagtgatcaatttacaacaaaaaaaatcaacattttagctttccagcttgtttgattaatcaagcacatttaatcctgaatccataccatttctacaacacagcttggacaaagtgctattggaaatcagccaggttttaaaactgcaatgttaagagtagattgttagctctcccagaattggtatagatgaagacaaagaatttatacttaaactcaggcaatggttctggatgagtgagcagctaagtaattctgttgctttcagttgaagtggtggaggtttagcgttttacctcgtggcagtatccctagaagggacttctgatatttaatttcataaacaccgagagctttctgtggaccaggcactgtactggctctggggatcagaggcaattagctgtccccatactcaagttggttaatgagtccagtgtcatgtgcacctttaaaaaatgaaaggaatgaagaaagagcacctgcatttgtcatcttgagtaagtctggtaagtaactaatttacacaagattcaaatccatagctgttttggagaaggtaaatgtcagatgcactgtggctgtcaggcacacacaggtggtgaataaacatggttggtgcttgttcaatgtgaattgaagataaaaagactgatcttaagcaaggtctgtgattaatgggttttagtctacccagtttgtttccaattattccttaaagtactagtgtgactagtattacagagt

SEQ ID NO: 42712 - DNA, 928 bp, Bovine  19866880871190
  misc_feature (1)..(1): n is a, c, g, or t
ntttgggacatccaacacgagcactggaatgttcagcagagcctcagagtggagcctgtaagaagcacgaatatttagggaacagaaaaaagatggtaagcttcacatactcaccagtcttaataattcataatagctctaaggtcacagggcttcttagggaaattttatgtaaacagtttaaaaaaggaactcaataaagttggctggaaagacgagattgaaatttctctttagtctgaagactgatactgaaggtcggagccccaaacaatttaaagggacagcacaccaagcctgaagggaggaaaggctgaaaccaggaatattaacttagtacacactgacaatgtttcagccctttaccctgagccaacgactttatcatcatcaatcaccaagttcagtctaagggcatatcgaaaaataaaaaagctgggaaacaatctaataaaaaagtttcttgaaatatatagattatatccggtattaaatttctgctggggataacgcttaacaatcccaaccacttccaggacattctgaacctgcttaaggggctgcgtgttcagcttcctgtattttaatgcctggctgcaggaaggcaggcccctgtccactgccgctctcttctccacttacgggggttgtcttgtggacaagccaggctttcgtgttgaccatgaagctgctccagataggccaactcaacttctttctcctcttgccgggccctccgctgtagtctctttaaacaaacctgaaagacaatccccaggctctgctgagctcctgggttatcttcggctgttacagaagctggggggctctcaggcctccttgctgtgtctatcctgggcgctagtgttgggacattccttctgctgccttggcttcttagtgaatcacaggttaatggcaaccatca

SEQ ID NO: 42713 - DNA, 1159 bp, Bovine  19866881012411
  misc_feature (1)..(1): n is a, c, g, or t
ncaggcattgctaagggagttaggctctggggagtaggactagatgatctaaggggggtttccactgtttgttctgtaggaatttttaccatttcgtaagtatgttttgataatactgagatggagatacctaccagttcgcttaattatttcccacacaccccatggagtagctggtaacatggaacactggtccaaacacattcgccctacattaattacatgaaagccatcgacatctttgtctggagaaacagcattgcagacctttctctcatcgatgtgctctgaaaaagaaatcagagcagtggtcaagtcactgttgcatagttagcactgcttgactccagcgtactcgaaacccattccccttctataactcaccccacaacttattcatctgtgcgttgggaacacacagcaagcaaagccaaatgccaagaccaaaccagtgtcctcttgtcctctccaaaccacttccctccactgtcctttgtattaagacctcaataccaagtcagggagtaattggtattctgagtaggtcggtcccatatctaacaacatactcactctcttgagtttacctcccctttctttaagacaaatacatatgaggagccaattgtataaactaaacaagcctctccacgcctcagagatcattttaaataaagctatgtaaatctcacctggaagaggcagctgaacaaggaggccgtctacattatcatcattatttagtttattgatcaaattcaacagttcttcctctgaaattgaagctggtttcagaatggtctcactgttgattcctataaaaaattttcaaggttaaaaaaaaaaaatagactatggaagatggcggaggaggagaacacacagctcacgtctcctcacgctgtgtcagaggtgcgtcagagaagttcttctggagcgcgtgctgggcactggcagagggcctcggacacctagggggatgggaggagtcccagcgcaatctttatttcagaaagaaaaaattttttttttcttttctgtttagtgtccttcccaggtagggtgtgggaaggaagtggggaacagtggaggcaggacaggaccagcacccctgggggaagctgggggagaggaagcaatcccacactcagggaagcat

SEQ ID NO: 42714 - DNA, 1336 bp, Bovine  19866881099131
  misc_feature (1)..(1): n is a, c, g, or t
ntaatcctgtcaacaacctgtaaaagtatatattattattatcatcatcatcatctccatgtataggtgagaaagctgaggcccaggaaggttaaataacttgatcacaaccctgaagtagcggagctaagactcaaaccccttcctgttccacactgcttcccacacatgtctttgtaggaagattcagaaaaattagtgacagggctgatcttctgtgtgggccgtgaaggacactgtgtcgcatcagctctgactgtgctccctggttaaagcgtagctgcagctccctccacagggatacatacacagaagaggggtgggtccttgctgtggggatgaaatcctttctggcgacaggaagaaatctcctctagtccatggtcagtgagtctaaagaatccagttctgaaataagaaaaagcaggtccagagtccagcaaaggtgtcccctcaatcacacacacactgggcagggcagagctcattctgagacaccttcaaacgtctgctggcccgcagatctcttctctggtgaatgaatcagacagtgattcatcactgccaccacatcagttttactgggagaattcatagtaaataacagggtttaaaatgaaaaagttaattttcagagataatctgttggatactgaaattctctaatctgacatcaatctcttgaaattcctactgcttcaagtcaaacacttcaaatttcttacatccttttcttataaaagcacctacattattgcttggatacttttgtaaacaagcagagtaggtttatcaggctacaggacttaaaaggaagacctttagaaaagccaatcaaatatcacaatctatatattagatagagaacaaggtcttaagaatgcagaacatttcctctgaggcttttcccctgaacaccctatgtacttactcctggaatttgggggaacaaacaatggctatcgactctggcaacatcatctggtacgagcagtgagtgtgtaggtcaacactggagaggaaggctgtctgcgtgggatgagtctgagaagagggaaaaaaagcctctgagaatacacaggcaagcccagcccatgaagaaagtgaaatgttagctgctcagtcacgtccaactctttgcaaccccatggactgcagcctgccaggctcctctgtccatggaatgctccaggcaagaatactggagtgggttgccatgcccttatccaagggatcttcctcaccctgggatcgaacgtggatctcccacattgtaggcagattcttaccatctgagccaccagggaagccccaccatgaaggaaggcagagccaa

SEQ ID NO: 42715 - DNA, 2297 bp, Bovine  19866881137572
  misc_feature (1)..(1): n is a, c, g, or t
nttcttggctgtgctgggtcttattgcaacacgtggcctcttcattttacactggcttctctaaatgcagtgcgtggttgtggggcatgggtttagttgcccattggcacatgggatctgaattccctgaccaggggttgaaccctgtcccctgcattggaaggagtactattaaccactggaccaccagggtagtccctagtggacttttaaacaaagtccatccatcaaaacccagaccccatgggggctcaggtctgtttctgggctgctgttttctagatccctttgtctatatctgggctggaattataatgctttaattactcaaggttttcagtaagtttttatatctgctaaaggcatgtcccatccccattcttcttttttagactttccctaactattctctgacattccccaactatcctctttttcagaggaactttagagttagtcacagcccaaaaatattcccataggattttgactggaatagtttgaagctactcagtaatttgaggtcgaaatttaataaaactgagcgagcaggtctccggctaggagcctttgcctccttgcggctctgtaggctgtccagtgctgccctctgcagaggagtcacaggccggtgccgcctctgccagtggcccaaggccttcccacgtggccctccccctcagcctatgatcccgaggcttctagaaaggacaaattcttacacatcttttgggtttaatttctttcctcccataaattacatttggattttaccctgaactttcagaaccaaaatccgagtgtgattcatggaaacctcaggccctacagtagaactgtggggaaatgatcgcctctcccagcaaaccataccctcataaggcaggcactgaacacacatgtgaccagtagacaggtaactaggatccagtggatggtttgttttttaaagagctctattattgtaggataccataaagttcccttgttttaagtgtattaattaaatgatttttagtaaatgtgcagagttgtgccaccatcaccaaacccaattttgcaacatatccaataaagcaattacctccaattagaaaataaataaaaggaaaaaaagaacagtcttcacacccatgtatggtcattctctgctgccattttgccctcagcatgccctgagcatggccccatcaggaggagtgagggatgagtccccaggagacactctgcctatgagtagagggccaatgcccccacaatgtgcagagcatgacctgcaagccagcatccctctcctgaagagacccagctgggggctcctcctgagggcaaaggccatgctgagccccgtccttacctctacaggtggataaagtttgaagaaaaggtagaggaaggaggcgaacgctggagcaagccccacgtgtccacgctgtccttgcacagcctctttgagctccgcacctgcctgcagacgggaaccgtgctgctggatctggatggtggctccttaccacagatcataggtgaggcaaggactgctgtggcccccgaaaaccagggcagcatcccccttcccctgccccatctcttgcccacccttggtctatgtggcatgcccacctctgatgcctgcctaattctgcagagaccaggttttgggtctgatgctcccaaagcagcatcacagttactcctagtctcagatgcctatagagagggcaagatcagcctctgaaatgccattcagcaatggaacgaaacggagagcacttctgagcctaggtggagacccctgttgccatggcaacctgtttcttatcagggtaaatggatcatcactcatcttcaggaaattagctctcgtttgatggagtgacaaaggaagggagtagcttgccttactgtccctaaactccttgtgaattttgttttagcacattcagttttaccagaagtatgctgccccaaatacttttctaaaaagaattcacactgggactaaaaccacttggcatagtgccttgtgcttcttagggtctttcatggttacaatttcatttactttccacaatattattgatagaaagagcagagaatcctatacccatacctgcatgcacacatgcacccacaatgcactcacatgaaccacatctgcacacatgcgcccacatgcacacaccatgcacccccatgcacacacatgcaccaactcccacagacacacgcttttacatatatggagccgaaggttcatgactggtgcatattttcagtttgggcgaaggtgggac

SEQ ID NO: 42716 - DNA, 1202 bp, Bovine  19866881281998
  misc_feature (1)..(1): n is a, c, g, or t
ntacctcttcctcaaggaattttcacttttaactcagatctgttggtcttaggactcctgtgctaggcagaattcaaaaagaactgggctataagaattgggactccaaccatatggaagccccaaatcagagtgtatagatttcagtggtcttcactttagtgtgggcaaaccccctctttccttccttaccccttgtgcccccagttgcccatggcaccacctgccccctcttgcactgtttcagatgcactaatccaaacatggcctgttgagcctcgcatgttgcctatgattgttgaaatgactgagagctcaaatcccagctgagctgctcctctaggagagcaagtagcatcacactaggattatgaattagtcaaggtcctagggcttgctccccgaggttctgaatgagtgacaaacaccttccacatgttggaagggaacctgccccaaaaggaccagatgtggtttatgaagaccctgggggattttttttgctgtctttacccactcccagcctcagcttcctatcggtggacagtcctgtcatcaagacaacacagtctatcctgggcgtagtctgaaagatcccaacatgagtcctgaccctggtgcccctaagggcttggcactttcccattttaggcatcctgccagcccccacaagggccttccagcaaaggggcttccccttatattctcccacagaggtacttcttccttgtgaatttcccactctccttctcctttcctcttgtatacatccatctcccttcctcattttcccctggcccctgccatgcctcccacctacctctgggtgaaggaataactgaagcggaagccacccacctccggggtccctgtatcatctggtgtagcactggccacggggttagagaacagaaaggagaggaaatgggtgagggaagcactggagaaagagtattctccagaatagttctcaaacctgctccacatctgacactttaattttcctgccaggacaaagatcttccagttggagttactcactctgattcttccttcagtgattcagaacttgaccgaaggtaatagccatgagacagtctctttgggtgttagataagagaataagcaatggcttgaatgcctaggatttctcaagtcagtgtctcagtaaaaggcctctgcgctccacctcaggacacaaa

SEQ ID NO: 42717 - DNA, 915 bp, Bovine  19866881350107
  misc_feature (1)..(1): n is a, c, g, or t
naagttgctcctcattttaataataaaatgccacattctttctggcattgtttgttgggatcaggaggaagcgaggttcccttgatgtctgatagtcattattttgagagtgtttgtttaagggctcctgttgagaatgaggtgaaacaaaaggtggattctttggagagttataaaagcaatgaagaagatctggggaaaggattatctcagtgttttgaagtaaaggagaatagaaatactttagtgttttcagaggtgcatcccagatcttcagaaatacaatatattgagaatgttgtagttcctgataattctgtagaagtttcagaagcacatatactctcccgggggcttgatacctctacgatggagatttctggtggtcctcttcagactattaaattcaactcaaatgagacatcagaacaactgtattttcaagaagaaagaaaccaagaggcaacttctgtttttgatggggaaaatgttggtgctatgaaaaatgtagcttttcgggcagttattgcctctattgaaccttccaagaaggagagtacagtaaatgaaatccaaactgacatcaacaaatctttaacaaatgacagccaagaaagtgaaccaaaaagtccagatccttccctgttaaattatgatgaaaaccttttatttgataaacttaaacgtccacgctatcagtctactcctggggtgtttgaatcaggagcttcaaaatcattgtataaaaaagatgatggtgatagctccctgtactggcatcacaattttaaactcaatccccagtgcttctcaggaaatactgattaagccactttctcttagtccagagcttaagccatcatcttctttaagtgaaaaatctctcaaacaggctgttggtcttggcagaacatg

SEQ ID NO: 42718 - DNA, 1559 bp, Bovine  19866881381331
  misc_feature (1)..(1): n is a, c, g, or t
nagagtctcttggactgcaaggagatcaaaccgtcaatcctaagggaaatcaaccctgactattcactgaaaggactgctgcttgaagctaaagctctatatactttggccacttaatgggaagagccgactcattggaaaagaccctgatgctgggaaagattgagggcacaaggagaagcgtgcgacagaggatggcatcaccgactcaatggacatgagtctgagcaaactccaggagatggtgaaggacagggaagtctggcgtgctgcagtccatggggttgcaaagaatcagacacaacgacaactcctctccatagttcttcctcgaaaagatttttcagaaggatagggattgtggacttccctggtggtacagtggataagaatccaccttccaatgcaggggacacaggttcaatccctgatccaggaaaatcccacatacctcagggcagctaagcccacgtggcacagctgggaagccatcgctctatggcctgtgcgctgcccctacggaagcccccacacctagagcccgtgctctgcagcaagagaagcctgtgcactgtaacgaagagtagcccccgcgtgcagcagctagagaaagccatcgcacagcaaggaagacccggcacaaccaaaaattaatcagttatttattttaaaaaagaattgggattggaagggggaccagggagaatccatctcatagatggcagtgtgctctaccacaagacctcagtaccccatccacagctgacacaccaggagtgagtatctgatgcccagaacaacaatttctaggctggcctgcagtctagttggcgcaaaagcttatgcatcaggagtagtggtagggaactagatcagtaagagcctctctctgatctacattcacatactagaatcacagggatgagaacctgcttgttaggggacaatgagacaactcagatctagaagaacctgtagtccctcaaatatgttcaaatctctgaaagcctatctctccctaataacaactgattatgcagctcttcctgggttccaatgtggaagattcctggctttatttccacatatatccatacagtaaagttcacattacttcaagtagaacaagaaggtgtaccttacgaaaaaggaccaccactgaaaacaagactttcccttcagatttctgtccccagtgtcataaggaatgttacaactcaacactaattaagaacatgattctttgaaacatcgaaacaatctatttccccttatagcgcatattttttttaacagcacatatttaacactcagggatgacatcaaggtactggatattttgtatggtcagatataattaatttgccaggccactgttaaataaaatgttaaagctctaacagtctaagtcttcaatgcctgcttttaagttgcattgtgattaaatacctactttaaaccaagtctcagtgtcttagatgtaatgcagtaattttatatctaaaccttatattaatctgtatttccatcttttgagatagtaagatgatatcaacgga

SEQ ID NO: 42719 - DNA, 1656 bp, Bovine  19866881390719
  misc_feature (1)..(1): n is a, c, g, or t
ntacagacagccttgtaacaaggggagtcctcagctgactcccagatgcccgaggacaagagaaaatgaggccaaaaacccaggaggtcaggatgggaaagacaagaggccccaaaactaagccaaaacaaggcccctccctatactgcctgcccccatccccagccagccaaaccatttgctacagcctcaggggcatgggaggggacttggcaacaccacaataaccatttctagcagaaatgtccatctgcagctgaagggagcccaagcacccaggcccctcctcagccagcccagccagggggctaaggagccatcacagtggccttataggcagctcaggggcagaaaggctctcctttggactcagtcacccacctgtactgcaaagttcccccctctcccacaacattcacaaatggctggggtcacaaaggaggtggatctgagctctgggactctaatactgtactcattatgcacggggaagccctctctttccatcctcaaactcaactctgaaatccccttggttggttcctttcctagcctagcttgatatgcccacctgcttccatatctgcccaacttcactaccgcttgtaaacaatacctcagagataagagagttcccgctggaccctcagagcgggaacagcaggcaagaaagaactaggaggagctccccacggtgtgtggaaagttgaggatcacagatccttgacaaaaggagcagtggtccaaaggagagacagaaggcagagatcctgggcacaggcccaaaatagtttccacacatcctcagccaatcaagggttcccatggggcagagcatgggagcagcgtgggaagcccaagagcctggtgcttgaggctctgggcactcactcttgtccaggctgccaagaggcaggaggtgacaacagtgtgtgctacggcatgttccttgggatgtcataggtagacatgcaacacgccagacagcaaagtgacaggctgcacgatcagcttcatgcctgtgctgggcacgacacacaccctgtatcatggatatttttgaaaccctgtcaggactcagcacctgctagatgtgcacattcccactgctgctggatattcttcacccagagagcttacccatcctgggcccctcccatggaaacccccaaaccgggagaccccgtttgccctgtgtcccagagtctttgactgctctgattgagttcacacaccacacacatcttcctaaagcaccaccttctgacagaagaggatctcacaaaaccgctctccgagggtatgtggaacaccacactaaactatgtgagagaactatgtggggccgcggggaggtggcaccaagaacagagggctcagatccgagtgcttgctggcagtgcccaagctgggccaagaggaagctaggactttccaacagacaactcaacaataaaaacaagcacagacacctcagagctttaaaaacaccaccaattcaggccccacgccaagaagggggcaggaggaagacacaggtgaagagcattctctaccttctcaggcagccctgctccatgcccacaacactaaggactgagataggctggggagatcccagcaggggtggcagggccggcacaatgcaggcaggga

SEQ ID NO: 42720 - DNA, 1075 bp, Bovine  19866882000301
  misc_feature (1)..(1): n is a, c, g, or t
nttctttagagaggaaagtagatctaaatagctcaagaagcaatccttcctacaatgaaggttgagaaaaagaaagccaagaccagttgattctggtttggggaatggtaacactggagaacacactctgctgtttcttgtgatggcatcactcgtgctgaagttatctcctttgttggcctggccaccatcccgcttcacagcagggaggaaaaagagatgtatgagtgtctccataattaagtccaagtacttgattactgcctctctgggaaaatgaacttgactgaagggagagtgagcaggcattcattcaagcaacaagccacttactgagtgcctgtaattgatggggaaagatgactctttttagactggaccatccaaaatcagttgggggtaaagaaaaaaaataagctggaggggtgagagggagaaagaccatagttggtgggtctttagggtactcctgaggaaacccctcagctcctgagctcacagctcagttccaaattccaagatgcctggttagagagagagggaaacacacgttctcagggacagaagcccacagagccaaggggtctgatttctaaggcagaatttcatcaagggctgggtgacactttggaaagccatctgatctccagaggtcctgatacacaagaacaactcggcccgttccatcaagggagagagatgtggactcaccccttggcccctcacgcgtgccctctttcttgccccctcaagagccaaagcagcaggtccatcgtaaaaggacgcctcccttaggaaagcttagttcaagtggggatttttatacaagctccatgtttcctggattcttaggagcctccaaaaaggctgtaaataatccttactaaacaggaagaagtatgaaataggcacaggaccaaccactgtgacttccatggctgaaaagcacggattaaaaacgggcagtcagacttccatgcagagactataattagggggtagatctcagccccttactggtagaagtctgatgttgcacagatgcacacacgcatacatgatcccttctctgaag

SEQ ID NO: 42721 - DNA, 1907 bp, Bovine  19866880414352
  misc_feature (1)..(1): n is a, c, g, or t
nccaggaaggcccgccctggaatagagagactcagaacctccccaggcctagccgctcctacaaatgcatttccccttattctggtccccctgtcctcatccccatctctggggagcgtctggagctcccactcctgctccccacgttgcccctataattcaaccctaccttaacttcctccccttcccttccacctttggctcattccatccttcatttgtttattcgtaaattctgaaacaagcgttattaagggcctgctgtgtcaagtctcgttctagtcagcgtggatgcccccatgaacatgacacagtctcctccgcaagcccctctagaggggggcacagggaagagcctgtgagtgacagtgcagtgtggtggggctctcagaggggtgagaggagccggtccctgggcctggagagaagggagtaggggagagccaaggatgtttcaggcagaataaagagctttaggcaaggtgtggaggtaaaggagagccagatcacaggttttgtatgtgctaatacggtgtggccagaatctctgtccaagccacgggaatggccagaactgaaggtaaagagatgccaaggtggagggaggggggtgcagggccactgaaggtttctaagcaggcagtagcagatttgtattttagaagggtcccaggctggattgtggagaagagatctgaggtgtgccggattcagcagaagacaggtgaaggggtgttgaagttggatgggtgggcatgatggtggcctaggctatgggtgatgcccaggacttgggggggctcttgagatggtagaagccacagacttgattacctaggggaaggtagtaggaaggggctgagagaagatgaggataatctcaggttaccaattcttgtagtagatagatggtgatgccagacagggtaattggaaataaagatattacaagcaaatttgtggaaaataatgttgagcctggcttttgagatggtgagattgtaaactctgaggtagagtttagtaggtagctggatgttaggatttggattccaagagattattagtacacacacacacacacacacacacacacacacgtgcgtgtccatccatcaaagccacagaaggaagtgaagatagccagataacctaaggagcatttataaaatgaattcagacaaagcacaggtaagaaccctgaagacatagaataagagtgaccagagagcagggggaaagtgtttcagaataactgagaataagtaagccaaaggcaggaggaataaaatgttgtttcaagaaggaagccgtcagcagtgtcaatgccctctgaggtcaattcaaacaaggaaagaaatcgtgcccactggtttgacaaacagcaggtctaccccttcctgctccactccccacctccagccctgagagactagttctggcaaagtcaaaagaggaggggctaggttcattttctccagcattctttgatgaacaattttaaacatacagaaaatttgagtgaataatacaatgaatatatgtataccctccacctagattcaattcagtcgttgttgccattctgtggtatttgctttatctaaccatctatctataaatatttttggctgacccatttaagttgtagacatcatggccactgagccctaaattctaatcagcatctgaagccagattaaaagtgaataggagagtgaagaggaggtaaatgaataaaacacggtgaatgggaattttgctttcgagaagtatgactatagggacttccttggtggtccaatgattaagaatctgccttgcaatgcaggggatgcagggttcgatccccggtctgggaactaagattccacttactgcaaggcaactaagcccatgaaccacaa

SEQ ID NO: 42722 - DNA, 1087 bp, Bovine  19866880447184
  misc_feature (1)..(1): n is a, c, g, or t
nccccaacccctgcactcagacctctccctgggcccactcctctgacaaatggaatttatttcctgccctattggtaaacataggatgtcacagtcatcagcaattgcagccaccatagacagtgagctggtgatccctgagggaactcagcaagaaagaacacctgccatctagcagccatcagactgcagccacttcccatggtgagccctggagaaactcaggatatgaaaatacaggatactggccccagatagctggggtgcatatcaaaggaatgatttcagtgagcccagactcttgcatcttcccatgcacagaaaatcaccaaactctttaacctgggttatctggttttctttcattaacaactgttttttgatgttagaccacctgccctttgttgcacaacttctatataacctgacttctccccttgcctccttggagcagttctgtcagttacttagatgctgcctcctaggcttgaagtcctaaaaacacccacctaatgaaacctaactctcaactttgaggttgtgaataagtccacacctccaatagagccccatcaagacccagaccccagggaggcaaatggagacctctgaccttcaggccacgctggaaggtggagatagacagcagggctaggtcttgctgctcctcagcgtagcgcaccaggtacacgtagacgagcttcttcacctggggaagagggggtttctcagcagggactggtgccccttccctgagagatgtcctcaccccgggtggctgtgctccacagagaaagcatccagggtaccctggccccatcatgctgatccacatctggttcagggacatctgggaggtgtcttttcctggaccagggacattctgagcagattggacctccagggactgggatgtcccctttctcatccccaattagctccagtttactcctggaggtggacaagggagacccctccctgggagcactcacctctatgttcttacaggccacattcttcaccacggcggggaacaggtctgaggcgttctttccccgggcaatcatctaggtggtggggtcagggt

SEQ ID NO: 42723 - DNA, 1466 bp, Bovine  19866880490633
  misc_feature (1)..(1): n is a, c, g, or t
naattagacgaatatttgcttaaatagaaaggaacctcggtatcctcaacaactacagaactctgccaaacatatgcagtaaatgttgaactgaactgaacaggcagcctgatgaaaagggatatgggatatccaatgagggatggaagaggattcgtgcacagaatatactgatgtctaaatacagtcagaaccatacaccataactgagggtcaagggtaccagcaatacaaggggcagcggaagccacaggaataaatacaattcacatgaagagcacgcatggagaatgagaggaggtcaagggctgagtcctggacacactgacctcagagagaggtcatggcagccaagagttttgaacaaaacctcctgaacttcagatcagaaactctgcctgctggaggaaaggggaggacagagctgtcacatgggtatggaaacctttaagagtatttattaatatatcaggggcttccctgctggctcatatggtatataatctgcctgtaatgcaggagacccgggttcaatccctcagtcaggaagatccctggaaaaggaaatggcaactcactccagtattcttgcctagagaattccatggacagaggagcctggcgggctgtagttcatggcatctgtagaaccaagaaaagggaaagcctgtttgggggtctgagaagaggtccttatccccagggacctgagtgacagggctttacaaatggacaggactcttcttttcaacaatataattttccttgaaaatggatctaataatgtgccttgtgcttccatcaagactaaattggactccactgactcataagtctttttgtgtcttcagctccgatccttgcttcctgtagcactcactaaatgacagcgctgttgttctttctacccgaaaatctatttcagggacacagtggacagtctatagttgcctgtgctattattacctggggcacagtgggatcctttattgcattcattttggatgtgaaggaaaagaggaaacgcaaaatgaagtagaatgatatcttgctaggtaaaatcccctgagatgaatgttctttatgatgaagtcagctgtgtggagaaaaaaaaattaaaaatggctacttcataaatcttgccttgcagtatttgcaaggatctttgtggctcagaaacaacatttgactaaactaatatgtgggggtaaaaatatctctagtctgtttgagtaaaaatggctgaagatacacacatcttatccctggcaaaattcaattcagtctggcaaatatttatggagcaccaactgtgttccagggatgcagaggtgcaaggccagagaccatggccccaagtgctgcccagatactgagacaccggggaaggggcaccctgagtcactgaggaaaggaaggtgtatttctcattgtaattaacaagcggtatcgatctaacgagaaac

SEQ ID NO: 42724 - DNA, 1058 bp, Bovine  19866880527427
  misc_feature (1)..(1): n is a, c, g, or t
ngctcccccgtccctgggattctccggcaagaacactggagtgggttgccatttccttctccaatgcatgaaagtgaaaaatgaaagtgaagtcgcttaatcgtgtccgactcagcgaccccatggactgcagcctaccaggctcctccatccatgggattttccaggcaagagtactggagtggggtgccattgccttctccactagatgggagatgctggtcaaactatcctgttcttatcctgtctccaaacctcatcaggaaccctcacctagccaggacctggggagaggaaaaggtcagatgttttattccatcctcaaatattttactgtcctcctctcctcagagctaccagggagttaggagttaggcttcatttccccccacttaaactctcagtccccataacatcccccacgcccgcccccctcctggacactaaatgccagtccagtcctcctgctaaagaggtgggacttaaatggttcctgctggaagagatagcttcccatccctggccttcctatctgcctgggggagagtctctgagggctcctctgtaccgtaatggctggctctggctctggccctggccaggctctgggcaaggtcctcccagggattcttctggggtcgtgtcttcttctggggcttgcagccaccgaagctcctctggctgcagggcctggtaccagggtgggggcccaccttcgggggccagcacagggctggcagcctcctgatcggcctctctggcccctggcctcactggtgcccctgggagctgcaggaatcgctgcatcagggcaccagatcctgcttcgaaatgagactgagctgaccggggagctgggggtgcctgtcccggtcaccagagggcccgcccgaaactcagaaactggacactggcaggagggaggctctggtttcctctttgctgctcagagacaaggactcacgtggtggaggagggcagggactagggacagagccaagtcccagtctgcaggcaggggactggcaggcaggagagcagatccagacacaggtgag

SEQ ID NO: 42725 - DNA, 1005 bp, Bovine  19866880637088
  misc_feature (1)..(1): n is a, c, g, or t
nattgaaggcgggagaaggggacgatagaggatgagatggttggatggcatcaccaacgcaatggacatgagtttgagtaaattctgggagttggtggtggacagggaggcctggcgtgctgcagtccatggggtggaaaagagggtaattgtatagaccagtgctactcaaacttttaagtgaattaatgtcaactgggaatcttattaagatgtagatcaattccaattccagaagtcttaggtggggggctgagaggctgtataacatgattctggtgatactgattttgttggtcggccatgctagactttgggtagcaagagcatagttggtatctagattctctctgcgtgcggcatggagtccccgtgaacacaaaggccctgattttggccggggatgggaaaaatgattgcttctagatgtgggtgtgctcacagtgtggtggaagggaccatacagagagtttgtaagggggaatgggtacttatatttggatgtttttaaaggaagcattatgtttttataactattacatatgggttatttttaaagtatgtactaagcttgggggaagggtggacagagaagctggggggggagtggtctggggtgggggcagcaccagcatgggtgggttcttggctctgactgtgcagtggtgaagaggttttgacagacacaggcttggagcaggcagagtatctacagccagacaggaataacatggatggatgacacagcagcaaagctctttaaaaaaaaaaaaccctccgaggggaggagtccctcccacagactggccgttctccccttctcagctgtgcctgagcgcctgtggacagaaggggacactctggaggctctggccagccgttcctgtggctaacagcagtagctcccactctgcccaccttgtaccctgtcccgggtggtcccaggtgggcatgcttcctgtgtccggttccttctcgctgtagcatggcagagcgagcggggtc

SEQ ID NO: 42726 - DNA, 1831 bp, Bovine  19866880714453
  misc_feature (1)..(1): n is a, c, g, or t
ncccacacccagcaagctcccaagaggttcctggcctcccacctgactttggcacccacagcatctgatctgctaagtctgaaagcgactcccttgggacaaaactgatgattaatcaagtttgacttttgtcagagcttcctctttttttttctcctctcagtttttttctttcttttttttttttttaaagcaggcatgtttcaccaaggatggaaaattctggaaaattggaatcccaccacctgactgaaagccctatcactggcttcaagggagggagctttaaaaagccactccttggcttctcccatgaattttaagtattctgaaagctttgcccacaaaggcagcaacgcctcatcccttgaataattaaatagagcacactggggttggcgggacagcataggcccaggcacaccgttcctctgggagcctcctcctcaagtggggagctcagcggaagcccgaggaggtcctcctcgcagagagatggatgcagctgcaaacagccgtctttcaagcagtgggtaaggttggcacaaccctggcagtgtcgcggaagcggatgcaggtgtcacgtgatacggcacatgttttccctcaggtgctgccgtccagcagctgttcgcacaggccctgtgaggtcttggttggtctttcttgtcccttcgctgccacatcactgcccatgtaaggtgtccatggccttgggccatatcccccatctcccagccactgtagtattgacattggtttctctgtgtacttggtggaaatttctggagactctgtgagggcaagagaaggctattttatcttctagcagatgaccctccccctcaggagccatggtagcatctcggaactggccgattatttcctggctgtcttcctgttccataattacacaggctctttatctgtgaggccacagaatggtgtgctggacagacagaggttgtgtcagatggtcactgtggtgtcttacttgagttctgtggaagactgagttttgctgggaggaaaggaaggcatatttgttgattatctataggtattatttcatttaagcttcatgttttatggataaggaaatgatttcagagaggttaagttacttggcgaatgtcacacagccagcacattgagtgggctggtggttatgtatgttatctgactctgagacttgtacagttccaggagaaatgaaaaacactctttgtttcaaaagtataaacttgaggtctaaaagaagagatatgtttaaggaagctctgttagcacaccttccaaacagcaggggttaagagcaggtatctttggtctggtgtgagcacaaagccattcacacagctgagttttctttatttttaaaatttttttacttatttatctatttatagctgcactgggtcttcattgctgtgtgtgggctcttctctagttgaggcaagtgggggtctactccctagttgcggtctgcaggcttctcatggcggtggcttctctttttgcagagcacaggaactaggtgcttgggctcagtagttgtggtgcacaggcttagttgcttcgcaacatgtaggatctccctggaccaggcatcaaacctgtgtcccctgtattggtggattcttaaccactgggccaccaggaaaatccctctttcttttttaaatccaaaatgtgctttttgtgatggtttcccactcatctggattcagggtgcttttaatgctgcttccatctgaaagagcatctgtctgcaagcctggcttttcctctgtaggctggctgaggacagtagagcagccagcacacaaag

SEQ ID NO: 42727 - DNA, 1251 bp, Bovine  19866880941094
  misc_feature (1)..(1): n is a, c, g, or t
nccccagccagacactcagactgacttgtaccccgagaggaaaccagctcaggtgacctgtgtttctcagttactagtgactaactgtgaggtggagccactcacagccactgtgtattgaacagtttcacacgtaaacacgttattttggtttcacttcatagcctttttgaggggagtgttttcccctttcttcagatgaaaataaaaacatcagagtaacgaggcttctttctaacctcagtgccaccgtacctctcccacccccttaccccctctcagtggataaaagggtgttctgctttgctttggattcctttttccccagggccaagtgtgggaaagtgctgctgtcttctgctgtcctctttacctcccttatctctcctggccttggattcactctttttttgatgtttaatatttaaatattgtgcactgggctctgctgtgctgagcgctttccatctgctattttaattaccgacccctcctgaccatgttatgaagcagttggtattccacccaagatgccatgagaaaacggagactcggagcttcccagagcaggcaggtgtatgaaggtggtatcaggctcagccaggattgctgtcagccagagcagctcgaccacaacatcactgcttccgtcctaaatgtttgaagtccagggttgtctaggagaatctgcatgggctggaattctgcacacagtagcctctcggatgagatggatgcttatgctctgccggacttctgggtcatggcatggaattctgtgtcctagctacgtagtgttagaaagggcacgcggtgcattcttctgatagacgtgttggcaggcagcaaggaaggagtatggtttgggcttcctaactgtgctgacggtgtctcctgtgatgacatgggcatgtgtattcagacattggtagcggctgtcacaagggccccccagtggcacagaatgtcccaaatgctactgtcccagggacctgggtcttcagaaagccatcctattcctgcctctcattagataccctgggtgtacatctgctcgttacacttgtcactgtggttctctcaggcttttggtggtcctgccttggtgtgtcttgctctgggtgtaaagggaaagcgcttgtctgggaagaaaactaagaggtcacgagattctttttccctcctcttcctagtactgagcatgctccataacccactgggcaatgttttgggaaagccccccttagcttc

SEQ ID NO: 42728 - DNA, 752 bp, Bovine  19866880999825
  misc_feature (1)..(1): n is a, c, g, or t
ncaagtttcctcaatatattcgagagcctgttatttattttagtcaacacaaacctccccctccacaaaagtctctaacttgcaagaactatgaaattaggtgtgattcaagaggagtggaaaactaaaggagaaggaatgatcatcagaagaaagcaaaccagtatagattaccaagcgaaggcccccggtgttagataaccaagcgcaacgtaatcttggctgaacaaaacaaatgagtgtaaattgaagccaaacagaaatacagtagatgttgtttgtaaacactgacaaaatcatcccaaagtcacaacagcacacaagctggcttttctcttagccttctgcaggcaggtagaaagacaatttacaaccccaatgctcgggtgacagccgacagcctgaaaattaacccaagtcacaataaaagctaaacagtgtgcttcagcattaaaagaaaactgtctccaaatgtgatttccttctctcttggcccttgcaactctcaattaagcatgctatataaaaggtaatccagaaattatcacgacttctaggctggcatccaggcaaggctgcccaccacttcaagcattgactcaatcaaaaaatttattggaagcctattaggggcaagacatggtgctaggtgttgggattcactggtgaagaacgtaatacctcctcctctcgggatactattggggaaggcagatgataaacaagcacaaagaacccaaacaacagcaggt

SEQ ID NO: 42729 - DNA, 1238 bp, Bovine  19866881027454
  misc_feature (1)..(1): n is a, c, g, or t
naagtcccatgcctattgctttcttttggataattccttagaacagattcctggaagtaatattataggtcaagatattaacactttatggctcttgatgaatattgccaagtgggtttccaaagagttctgtcctccagcctgtatgagaatgccagtttattgcatcctcgccagccttaggtataagatcttgtttggttttggtgttattagctatgggagttgaattttattaagtggttttatagtatttcttgaaaaatttttttcctggtgttttcattattctgctgtcttcctcaatattttaaaagatatttatttctttatttcactgcaccaggtcttagctgtggcatttaggttctagttccctaaccagtgattgagcccaagtctcttatgttgggagctcagagtcttagccactgggcccccagggaaatcccttcctcagtattttgccatattattatgggagcagagtaaaggaggattatcaatagacatatcaccaagtttacaaaagaaaagagctagactcgatgcttcatagtttcttctgtgtctttaatctgtgttcatcctgatggacattttcacatggattatctgctgtcaccagaaattcagtgtatctgaagctgaatacccttatttgtcctctaaaccacctctccattttcccagtcatttgttgccagaaaatatttttaaaaagaaagcaaatggaaaagcgcaggatcagttcccttttagttgatcaaaatgaaagccggactcacgtttatgcctcgttctagatttcaaggccataactcttgtcctggtacagtcttgctcagactgttgcagtagccttctgactggcctcctcctgcctgcagtgtgtctggtcagtgctcctaggcagttggaagcaggggagttttgggtgcaggctggttgcagaatggggcctggctgtgggctcctccctccatgacccccacgaccatggagcaggaagcctccattgaggatcccccaggaacagtctgagagctcgtggtgccctggatcttttgatgaggctcccgtcttcaggcaaattctcccttcagcttaagttctctaaaggcctcctttgtactctcagcaccgctgaggttgcagatagaggagcttggcctcgcagtcctctctcttccttcaggttgccacagctcttactcatattttacgcgagttcaccc

SEQ ID NO: 42730 - DNA, 1412 bp, Bovine  19866881056656
  misc_feature (1)..(1): n is a, c, g, or t
natgctggagatgtctgctggacatccgatagaaatttccgcatgcagcaatacttccagtctagagctcagatatgatggatgtctggggatatccattgttgagtcatcagcacagagcgggaagctgaagtcatagaagagtctgagtctccaagggcaacaccaggagagcagagtcggggccatgggtaggggaatgaggggtcagctgaggagaaagaaacagcaatccagggcagagaagaatcatgagaaatctgaaaacagagtgagaagaaggtttaagggagggaggagataaaagtgtcaaatgcttcccagatattaagtaaactgaagattttaaaccaacagcagctgaacttggccctaggtcaactttgtctggggaactttcccagtgtggtttcagtggcgttgtctgtgggcagaaacctgattgcagtggacagaaaagaggggagggtagaatgctgaggctgtgggcactctttgtaagatgtgccccatgagggggaaaggagatccgagatctttataggaggacacaggattgaggcagggtatcagttttgttttgagactggagaaacttgagcaagtttacatggtgtggtgggggtgggaggagcccttacagaaggagagttgaaaacagagaagagaaggaataactacaggagtgatgttcagcagagctgaaggggacactgatcaaagacacagcagcgagagactggaagacaaaaggtgaaagggggcagaaagaggtcaccctgcagcagaggtctttccctgtgagatttggaaatcaagggaattgatattgaagcctcaatattatctgcaaaataagaaaatgagaaaaccaaggcccagagaggtggtgatctgcatgataatctacagagtaatagtttgatttagtcaagtttcttgactccttgcctggtcctctttctactccctagaattaactcacttgttttgaagacatttgcattgcctgaacatgtgtttgaaaatggggcttttttgtacctttcttttgaaagatgaccaggcaaggctggcttcacaaaatggaagactctgccacctgtcaccaaggacagtgagcctaccaaaacccaggaatgggacctagagattttccctcttgaaatgagtaagggactttcctggtggtcccgtggctaggactccatactctgggttcagtccctggtcagggagctagatcccatatgctgcaattaaagaatctgtatgccacaactaaagattccatgcactgcaatgaagacccggcacagccaaataaataaatgttaaaaaaaatttttttttttaatgggtaagatagcagcagttcaccctcggacagagatcctgacttactcatgcct

SEQ ID NO: 42731 - DNA, 1958 bp, Bovine  19866881101314
  misc_feature (1)..(1): n is a, c, g, or t
naattctccaggcaagaatactggagtggtagccattcccttctccaggggatcttcccaacccagggattgaacccagttctcctgcattgcaggcagattctttaccatctgagccaccagggaagccctgacacagtgacacaatggtggggttggagggaaagttgggtggaggcagcagtgcttggagctgttggcttaaagaatctggttctgggacttccctggcggtgcagtggttaagactcggtgcttccactgctgggggcacaggttccatccatggttagggaattaagatcctgcatgttacaggacatggccaaaaaaaaaaaaaaaagaatctggttggacacctcctgtgtccccaccctctgtgatggctgctgactcacctctcatgtcccagaccaagctgctgacccagtacgtgctgagcctagccaagtatgaccagaactacgatatccgtgaccgagcacgcttcacccggcagctcattgtcccttcggagcaggggcggggctctcagccgccatgccaagaagctcttcctggcacccaaaccagctccagtcttggagtcgtccttcaaaggtgggagctgaaatcaaaaggagccttcctgggggaaggggagaattggccagcaccccaggcctggctcttccccctgaggtctcagtctcggccaggcaccagcctttggtgggcaggattcctttgcccctgtggctggaccagtcctgtggcgccccaggcttgctccttcacccgctcaccaccaccactagcatcatctcacttggtctctgccctcccaggcaggatgggccgctgtctcctcagctgtcagactcctctttccatccacctccctgagcaggcatatctaggaaggcaggaagtagaactgcatacaaaggaggggtgtatgttggtaagggtcctgagaaagcggtttccagcattggctgggctgtcattgcagatcagcccagttcccaggccctcagccctgcctcatctctcaggtgggtgtcccgtgacaagggctctgacagcgagggggtgagggacccagctggctctctggacccaggaatctcctcaggagggagcttccttcaccaagctcggttctcctacgtatcttcttgttctgctttgtctctgccctggacccctggagtaaggagattcagagccgtggggcagatgggaaaagccccagggaggaagtgggcggtgcttttcatccccactacaggtctctgtgctgccctcctctggctctgatcccgtcccactcctgcgcagacggctcagctctccccatgcaggccagagcctgaccagacacagctctttgcccttggtctcagcctggccagtctcttagaggcgatacccttgtcgcaagcgggcctccctcctgagcctggcactgcggccatatagccctcatcccacccgcaccatgccctgggagaagccacgcctgcatttctactcctccctccccgccccatctcagcaggcagaccccggcagacaggcctgcagcagctctgggcccagtgccctcccatctcctctgagctcccagtttcccccaaccctccctggcccctcagccctgctcttgtcggtcatacaaccttcttcccagcctgtggacctgccgatgtggtcagggctgaagagcccttaggggacacgaccaccccttcttccgtctagctaaggatgttcccaccagaatcatcacctggccccacccaggaaacaacccccagggcatttccttattgccactcctggcttgacctctcaccctgtcctcagaccgggaccacttccagctgggctccctgtcccacctgctcaatgccaaggccacgggctaccaggagctgccagactggccagaggaagccccggacccatctgtg

SEQ ID NO: 42732 - DNA, 2717 bp, Bovine  19866881180679
  misc_feature (1)..(1): n is a, c, g, or t
natcccccatggacagaggagcctggcaggctacagcccatggggtcataaaaagttggacatgactgagcgactaagcacagcatagcacaggtcctgtgttgttaggaatttatcaattttttctagattgtccaatttgttggtgtataattgttcatagcagtctcttatgatcttttgtatttctgtggtacctcatttttcatgaaattccaatcttatttatatattctctctgcttttcttggcaaacctagctaaatgttggtaaattttgtttacctttccaaggaaccagatcttagtttcattgatcttttctattgtctttttatcctctatttcacttatttctactctaagctttgttattgccttctttctatgaacttttggctttcttcttctttttgttgttccttgaggtgcaaagttaggttgttcaggattttttttccccttgagatagatatttattgctataaactccttcctagtaatgctcagctgatcacagcactacaagtgtcagcagccagcataaagcaattgaagagaccacagtgagaatgactggctctgaacaagatctgatgagctggaacagcagtgcaatgagataaacagagagaaggagaagaatatccagttgaagagaagagctgaggatctggagtccaagaaaaagagatgaagctgaaaggcctctgaaaacacagtgaaatcacacctccactcacgccagagtgtgaacacatctctgagaagttacaggcagcagagagagacagtaggaaccctggaagacaaggtgtgttctctgaagacagacattgaggagaccaagtgccgacaccaccacctgaaggtggagctggagagcttctcggaggtgctgggtgggaggatctgtgccctgcaagacgtccaccagggcctctccaagccggggtgccagcaggcagggctgctcctgagtccccagcgtgtgtgtgagagagggggtctcctcctgagtccccagtgtgtgtgagagagggggtctcctcctgagtccccagtgtgtgtgtgagagggggtctcctcctgagtccccagtgtgtgtgtgagagggggtctcctcctgagtccccagtgtgtgtgtgagagagggggtctcctcctgagtccccagtgtgtgtgtgagagggggtctcctcctgagtccccagtgtgtgtgagagagggggtctcctcctgagtccccagtgtgtgtgtgagagggggtctcctcctgagtccccagtgtgtgtgtgagagggggtctcctcctgagtccccagtgtgtgtgtgagagggggtctcctcctgagtccccagtgtgtgtgtgagagggggtctcctcctgagtccccagtgtgtgtgtgagagggggtctcctcctgagtccccagtgtgtgtgtgagagggggtctcctcctgagtccccagtgtgtgtgtgggagaggggtctctagtggtagtgctaggctgtcctctcgtttcgttgcttctgtaaatgcaggtgcagtgtatcgcgcttccaaacccgaggtgctgtccatgctctcctcctcagaacagaaatctcccttcgcttctctggccttatgagcttgtagataactgaacgattctgactcaggaatccaaaactaggtctaccttaaacatttatgctgtcaaggcagggatgtttatatctttcttaagggttgttgcaaccacatgaactgaaaaaaaaaaaagtctcttctaatccaaatatgaataccttcctttgccacttcctttttctgagtagtgttcagagtattcgaatgtccatcaggcaccagtgcgtggggatgtggtgacagcaacttccctctcagtatacatggagatgtttcaaaacaaccacttagtagagatttgtcccaagaaagaaaacaagtttctggtgggtgtgttttttggcacaggaatcgcctgcattcactctgcccacttccacccgcccctagtttgtagggttgtgacaattttctttatcttggtttcatttctgagcagattacaatgctgtggggacacgacacactgagggtgcctaacacagtgcctggcacaaagtaggtgcttagtaaatatttgttcagttaaacacattaaaagaaacacctccctcttagaactgcttttgctgtagcccattaattttggtatgctgatcagacatttttattttcgtttgtctcaaggtattttttaaatgtcttcttcaatccattggttgttcagtagcatgctgtttaatctccacatatttatgaattttccagttttcttcgtgtaattaatttctagtttcataccattgtgcttagaaaaggtgcttgatatgatttcaatcctcttacattgattaagtcttattttatagtctgacatacaagctatcttggaaaatgttccatgtgcacttaagaagaatgtgtattctgttgcttttggatggattgttctaaaaatatctgtgaagtccatctgctgaacatgttgcttaaaaccaatgttcccgtaccgattttctgtgtggaagtaagtgggatattaaaatcccctagtactattgcgttgctgtctcttgctccttttaggcctgttaatatttactttatatattcaggcgccccatgttcggtgcatataca

SEQ ID NO: 42733 - DNA, 1274 bp, Bovine  19866881258508
  misc_feature (1)..(1): n is a, c, g, or t
ncgtttcctggaacccattccagtctctgtcctggagatattattcttggagccaacggcttccagttctaatttggactgggtgcttctgaggcccactcacagccgtctgtctggaagttcttttcttcaggctcctggaagccacccattctctttctgcccccagctgcctccttactaggcttcacccttgtatggctggcacagaccatcagaatgaatgggaataaaccttaagtccttgtatacctataactgacttcactctcccctgacactggatgagactggctcagtgtatttgcttcctggggctgcaaactacaactaactgggtggcttaaaagtacagggtcttgggacttccttggtggcacaatagataagaatttgcctgtcaatacaggggacaagggtttgatccctggtccaggaagataccacacgctgaggagcaactaaacctgtgtgccacaactactgaagcccacctgccccagtgcccacgctccacaacaagggaagccactgcaatgagaagcccatacactgcagcaaggagtggcccccactcgccgcaaccagagaaagcctgcacgcagcagcgaagaccaaccaagaccaagaccaaaagaaaaaactacagcatttgggaacttctctggtggtccagtggctgggactccgtgctcccaatgcaggggtctgggggttcgatccctggtcagggcactagattccactgctgctgctgctgctgctaagtcacttcagtcgtgtccgactctgtgcgaccccatagacggcagctcaacaggctcccctgtccctgggattctccaggcaagaacactggagtgggttgccatttccttctccaatgcatgaaagtgaaaagtgaaagtgaagttgctcagtcatgtccgactcttagcgaccctatggactgcagcccaccaggctcctccatcaatgggattttccaggcaagagtactggagtagggtgccattgccttctccagattccactagattgccgaattgatgcttttgaactgtggtgttggagaagactcttgagagtcccttggactgcaaggagatccaaccagtccattctgaaggagatcagccctgggatttctttggaaggaatgatgctaaagctgaaactccagtactttggccacctcatgcgaagagttgactcattgggaaagactctgatgctgggagggattggggcaggaggagaaggggacgacagag

SEQ ID NO: 42734 - DNA, 1424 bp, Bovine  19866881324902
  misc_feature (1)..(1): n is a, c, g, or t
naatgcaactaaagaaacagtatgtcataaacagtaaatctgataaagtaaaaacataaaacgtaccaaaatagcaagcttacatgaaagttgcaagttctcgcatgtccctgaatggctgcagtaaatattgaaagaacatggttgtcgcagtaactaattcctggtacgcttcatcttcctctcgatacacattcattaatgctaccatggtgttggctttttcatgcccttgaagcaactagaaggcaaaatgtaaataaagttcaagtatggacaggataagatcataccaaaccaacagagctaaagaaacctgaatgttcctaacattaacacatcaatttaaaatgctgattaaacatgaaaatgctattgtcctccaaccaaaatgcccagtaagaatggttaaataaatcatggtacatccatagtagaaatattattattgtaatcatttattcagcactgtgcttttgaagaccggttctgtaatctgggcacttttataataataaatgggaattagaggaggatgtagagttgaaaatttatgtcctaagtatgtagtacatgtactaaggactcagagaaaagggcctgagagaggatatttttccatcacttttttgaccataaaggtattgtgagaatgcactccttttttaaaactgctaagggacttctctggtgatccagtggttaagactgcatttccactgcaggcggcataggttcaatctctgatcagggaactaagaccctacatgccgtgtgatgcaatcaaaacaaacaaaaacaaacagacaaactcataaggacatacagatgattccaagtacttctccagcatgttgactcttaattcccccaggttagtattcccaccaattccccagcagagtagactcattcacagcatcacaaatggggctgtagcctctgaagaatgcttctgaggcagggcaagaaataaatcgaacacttataatctagaaaaactcatttggtaagaaactaatttactgcccaggagaagagaaataaaatcaattaatagtataaactccgcaccccaacccctcggtcagtatatccttaaattcttctatttccttccctctgttaaggataaagtgatctatgttcagtagtcattttatccaggtgataacagtaggattatgccccccctcaaaaaaaaagcaaaagtttccctcaagaaaattaaaacacgtgaaaaagtaaacttaagacaatgatgtttttcagccttatttcttaagactattcagacttcaaaacattcagtttcactttctgtattctagcaatgttagtaattggtctaattctagaatcaattgctttcctgttctaaatatgagctgagtactaaaattattacatgctcttccatggat

SEQ ID NO: 42735 - DNA, 1457 bp, Bovine  19866881420923
  misc_feature (1)..(1): n is a, c, g, or t
ntgctggcgggagtataatttggtatcatctttctggaaggcaatatgaggagagatgtttaccagctgagccaccagggaagtcccatattaaaagtccccaacatgcgaatattgtattcttagtcaggatacattatgtgtgcttcagtaaccgtgacatgccagtagtgttaagacttaacatttattctttatccacactgcaggttcatgcaggtggggccgtgtcatagtgggagaagggcagctatccacacagtcactcagggacccaggctgacagaggctccagccctgggacgtcaccaaggcaacaggagtctgcagacctgcccaggggcatctcagagtctcagcctggacgtgtcacgtgtcactgctgctcgtacttcattggccataattaggaacaagacctgaatgactctaggggctgggaagtggtgtctcctgtgtgcccaggagtgggggagaagacagggcatgcttgcaccacccttcatacttttagccagcaagtccaattttagaaagttatcctaagtaaatattctgagaagttcatgaagatgttagaagaaaggatttcatcatatccttgagctgctgctaagtcgcttcagtcgtgtccaactctgtgcgaccccatagacggcagcctgttaggctcccccttccctgggattctccaggcagcaacactggagtgggttgccatttccttctccaatgcatgaaagtgaaaagtgaaagtgaagtcgctcagtcatgtctgactcttagtgaccctatggactgcagcccaccaggctcctctgtccatgggattttccaggcaagagcactggagtggggtgccattgccttctccgatccttgagcataaccatataaaattgggaccaacctaagtaccgaaagtacaacctacactgatgttaaacatgatgctgttacacatttactgacatagaaatatactcacaatatagtgttaaaaggaaaaaagcaaattaaaacagtataatatgtataacatagttgcatctcatgaaaaaagtaataaaacttatatagatgcatacaaaaatgtctgaaaagatatatgccaaagtgttaacagtggttataatcagatggtataacaacaggtgattttttttattttcactcattttaatttcttcttaaaaaaaaaaagggatatattatttatgtaccaaaaaggcatgaaaaaaaccccagtattcttggggaaagtccacttaactacctcacactcatcattaaattcttatatgtgatgcaagaaatgcctaattgtctgtcacaccataagacactgctataacagtttatttaaaggcaggactttaaaagtggaacacagggcaagaacagtaacgcactgcccatgggctgggtatcatcagacctgtcaagcatcccacagt

SEQ ID NO: 42736 - DNA, 1196 bp, Bovine  19866880561202
  misc_feature (1)..(1): n is a, c, g, or t
ntgatgtctacgaagccaaggaaggacgcgcgtgttgttttctttccccatttgcctaaactcaaacacacccttgacacaaacacacaaaaagacacactcaaacacacgctgaccccagacagcactgacctgcacactgccaggtctggggaggagaacagaggcggtgggtctgagtctggggaggcaggagcacccagtggttagggtcacaccccagccctgccctatttcgctgtgtccttggtgagctggttactgtctctgtacacagtgagctagataacatggcaccctcagcactgagaaagccctcagtaggtgccaaccataaccatcattgaaccatgagagtctaaattctcttaccgagtggagagggtagaaggcacactgggcctggacccttcaggcaacagctccatgtctcccaggtccatgttccaagctgggccatcctgattccttctcggagtccaggatttggactctatagctttttcccccaaggcccgagcctgctccaggctcagcattcaaggatgcccacgagggcctgataagccaggcacacaggctgcaggaggtcccggccccagtgctcagccctggctggggcctcccacacaccccaggccaggacaggggccagcaggatttcctgggtcacagcctgtcttgggaggccatggggtcaactggcctttcccaggacatggctcctggtttgcaacatagagggacaatcgtaccgatttcataggttggggatgtatctgtctggctgccggtggtcagcacgacacacagccagtggcacatgcgcccttgcactgacacacgagagtgatttcacatggggcagagcatggatgtgcagaaagggggtgctgattccctcccctgtgccccgctctgccctgagagcctggctcatgtgacagtcaccccagggtggagagtttcttaataaagattctctaatacctgttaccccctgaagcatccaccatccgtccctctgacaaggctgtcagccctggtgcccaacccaagtgcaggctggacccagaggcttgccctcctctggttcaacccacacttctgctgacataaccaaaagcagaccttacaacacctctagtatttccaactctgccccgtggcttccctgtcacagctcccacaagcag

SEQ ID NO: 42737 - DNA, 1521 bp, Bovine  19866880578640
  misc_feature (1)..(1): n is a, c, g, or t
nttggatttttcttgttcaggatgtgagtgccttcagccctcagcctccactggtccaggtttccctcctccttgtcttcccaagccactgagctccaccccctttccctgggggctggaaggtctcgattgcagagtctgtccctgaggttgctctcatcgcccttggttcagcctctaaccccatttccttgagcagctctgcctccccaacccatttagcacaatggtacagccctgaaccaggtgggcagtgtgtcaacatcctgcttggggtctgggtgggaggccctgaaggtgtgtcctgtgagcaaggtggtgggaaagggggtcctccgacctctgcagcctgcatcttcacagaggaccctcaggccgggcagtcaacacagccccagcccctgtatctcttcaaaagggaggtgacaacagcagccacctctgagggctgtcgtaaggcctaaagggaatacctagcacaatgcctggcacttcataagtggcaggcagtccaacccctgtgcatcctttgaacaccctggtggtgtaggcaggttggcattcagtcctcaggttcctggcctaggggttaaagcaccacccacggtctcctgagccccagcagggcgttctcatcagggcagctacccccaccccacctccccaacatggacagggtgaagtgcagggaagggtgagcagagcccaacagtactgctgggagaccgtcagacaggattgctggacagaaatagtccaggtcaagaggccgggctcaccatgtcactctgaggacaaccctgggagaaagcagggtcattgacctggatttgccctccctgggctgagcctccgtgacccctaggcactgaccaaggaggatctggtccctgcactgctccgggcaccacggaggccccatcaagtcccagcacgtccgcctgatttgccaatctgttgactgtgcccctggccctcaagtccctattcattggtcggtaaacatgttacctagcaaccgagtgtcaatatcaacaaaggctcggatgaagttgttaatctggcaagactgacagctctgcactcgcccctgcgcatattgtgtgatgctcagaccggcccacgaggatagcgatgctcaaaagaccctgtgtctccctccactatgaaaattaaatgaagtgtgcgttgcgggcagggaaaaggcaccggcgctggcccgcctggggatcttgtttttcttttcctttcctccccccggtgccatagcccgtggggtggagtgcttcccctgacgcagcaaccgctgctaatttccgggaacaatgtgggacactctagggccagtccgtgacacccaagcagacacgcctgtcatttgtcatttgcgtgcagggctccaggtggggtcagcagggcgcacttggctccgggacccagccctgggccaggctcaggccacgattgacagtatggcctggggatgtggctgagcatgtggcagccactgccaaggcccct

SEQ ID NO: 42738 - DNA, 1894 bp, Bovine  19866880588892
  misc_feature (1)..(1): n is a, c, g, or t
nctagattacactggggagaggttttcggggtgggggctggagaaatgtctctacagcaactcctactttggagaagaagggagaagatagttttcatggccttgtgtgatggaagagaattccatgggtgttatgagatccccaaaatctgtatgttgaagtcctaacctcagaatgtgactgtgtttgggacagggcctttaaaaaggtaattaaattaacatgaggtcactaacctaatatgactggtgcctgataagaagactggacacagacatgtgcagagggaagatggtgtgatcacatgggaagaagatggacatctctaagctaagggaagatgcctggaggaaatcctgccctcatctggctcttggaaggaaatagttctgctgacattatgaccttgaacttccagcctccagaactgtgagacggtacatttctgatgtttaagccccccagtctgttatggctttgttatggaaattatggaaagtctagccaactaacccatgtggtaaaggatgtatcaggtagagtgcctttgtttttgtttatttatctggcactgggtgttagttgggcatgcaggatctttagttgcggggtgaactcttagttgtgggatgtaggatctagttccctgaccagggattgaactcagtccccctgcattgagagtgtggagtcttagccaggggagtcccagatagggtgttttagctgcaagtaacaagcgatccaactaagaaagatttgatcaggccatttaacaaccacatatggcaaagaagcaaggcaggcacatgattttaagatattatcagggcttctgtctcttcccagttctgagttccgcctcctggttgtgcttttggtccttggaatacttagactggtgatctgggaggacctcgctgaagagatgacatctgacttggacttgcaggttgactagttacccatcctgggcaaagccagagaatgacctctttttagggctggggagccagcaactgtgtcccccttggggctggggctgaagacctatcggccattgactttgactctgagcccaaggccaccaggtctcctgcctgccttcaggcagtgccagtaatccatccagcatagatgccttattctatttgactatttttcattcctggcaacatccgttgaaggatatgcaaataagaaaatcaaatgaatttgtttcacaaagaacagcatttaatcagcacaataaatacagaacattgttggctgcctaagatgatagttcatggagaagaaagtgtaggagggaaatttgaagggcaaagaaatagaaaagaaggaaaagaaggagacactgtggtgataactgagtgaatgaagagccaaggggtccaaagacctgaggttgttcattcatttgttcatgcatctatccatcctttcatccagccacttgtcgtttctttctttcatttattcatccatcaatcctttctttcattcactcatccaataaatatttatggagaacctatatgcaggtacaatactagaaattgaaaatatgggactcatcaagacaaatactgctcctgcctaccgggcacttcttctagtgcagtgagaggagaaagacagtcatgaaacagtctcacaactatatatacagctgcagactatgatacatgctaggaaaagggcagggggtgaagaagagccaaggaagtagtaaaatcagatggatgagcaggaattaataaggaagacaggttggggtggaaggcttggtgtttcttacacaaggagcagctgctgctaaggctccgaagggaggaagacgcttggctccctcaaagcactgaaggaagctggtgagaccagagcgctgag

SEQ ID NO: 42739 - DNA, 1301 bp, Bovine  19866880666507
  misc_feature (1)..(1): n is a, c, g, or t
ncttcttggtgacgtgagcgtctgggcctggagccgtcttcacgtgcttccggagggagctggggtccgtgtaccgcttggtgcagcctggaatcttgcagatgtagggtttctgggaagtgaagaggcgtcatgcatggggcaggaaggcagactccacagggcagcactgcggcacccctgttgagaggggctggacccctggatggagccctgccccaccggcctcacctgctaccttttcttgcaggtaagcatgtagctaatgagaccctcatccccaccccccctaactggagatatggatcagagcctgtggagggaggggtcacagtgcctggtgtgatcagcatgttgggatttttagtatcaatgagtgtattacctccttatatgtctgtgagacaccactgaacaccctgctctctctcatgaggaaagacaggatcagagaggcaaagacactccaagtcacccaggagcggaatgaaaacccagggtttctgacgcttagtcctgagctcatacacacacacatgcacgacatccatatgtaaacagacttttgtctacatgtatacacacagacatgtacacacatgtatgcacacacatccacctaaacacacttaaacatgtatataaacacccacgtgtgtacacatacttacaaatacgtatccatacctcctccccgcataacacatacaaccacatccacacaggcacatacatacttgcaaacacacatagctttccaaggctatctcttgtctttagatgctctgagttgatacctttgggaatttctctgacttcttatcaaagcaagtctctttggggtccaaaatgtccctaaacttttagagacatcctttcctgagtctacctgagtgatggtggttgaccctaggagagaccgggaggcaggtacagcccacaccaagggctccctcagctctgcccggggctctggctatctggggagatagagcctcctgtgccccactgagggtaggttgacagccatggcaggccaggcagcactagtagctggagtgtgtcatcagctgctgtcggactgtggggacaggggtaagggctgtgtgctgagctccaacagcacggggtggcagggagtgacatctggctaccaaatggcctataggtgtcaagaagccatggggtgagggtgacccatgccggggcccccaggcgggtacctcgttggagtgggtgcggttctggtgcttggcgcggtctgaggcattggagaaggctttgttgcagccctcgtgctc

SEQ ID NO: 42740 - DNA, 1487 bp, Bovine  19866880699450
  misc_feature (1)..(1): n is a, c, g, or t
nccccaccgaaccctgtcttgagccaagtgccattctgctgggctgaccgtggggaacaggatgcctgccccgactgggtcagtctgcagggtgcgggtggtttccggtggctgactttcccaccggcccccaggtgtcgcagctgccccccaccctctgtcctgtctctgtgtccttgcccttctggcctgcaccccttttgttctaaccatctgttctttgtctctacctctttctcctgactgtacctcccctaaggatagacggtactgaggtgagcagaggagctgggtgggactgggggagggctggcatgagtaagggcggctggggtgcttggccaggctcctcaagggcctgggaaggcagatttggttaggtagacagcaggtgctgcaagtgggccgtcggaacaggttacagctggcaacagggggcaagtgtgcagtcacaggaggaagccatggggtccgagcctgcatgaggatcagggcagagtggaggtgcaaatcaggctgcagaggagggaaggacagacctccagaaggtcttgagtcctgaggtgaggaaggtgggcagtgccatgggcaagtgaaagcactgcagcttccctggaaaggcctggaatgtgggaccttcagaccaggagtgagccggagatgcttcatcccaggtgagccttatttgggctcagatcctaggtcacggtgaaggttgcccacattctgtgaagttccgcaccatacacgtgtgccatgaactctcatcccactttgccttgactcagagggagtgctggtttggggagggtgagggcaagggctgcatccagcagctacaacctctgcagtcaaactccctttctaacaacccgtctccagccttttgggcaggcagcaggtcagcaggccttcactcttccttgcttcctcgagcagcccatcactgctgtcaggatgcttaagtctcctctttttgtgttaatttcacacggctgcggcagcctctgtggggctcagctgccaaatgttcacatactgaaagctcttcaagcagagctctggcccagacactggctggaagagcttaggagcacagcagggaggctgtgtgtggggagaggggctgtaggtgggtgcctgatgattacctggtgccttctacttgctgggttgtctccatctatccattggctctctccagggggcagctcaggtccagcttatagttggggaagctgaggttcagagaagtaatgctttgaaagctcctccatgcagcagcttccttctcgccccccgcccccacctccccaggtgtgcaagagtgctgtgttgggtggcagggcccatggcttctcgcaccctctgagtctgtgccttatcatgccccctgcagctgtgtcagtccagccccggagcccagtcttcctgcagcagcgagccctctcccctgggcagtgcccccaacaatgacagtggcgtgg

SEQ ID NO: 42741 - DNA, 1149 bp, Bovine  19866880710691
  misc_feature (1)..(1): n is a, c, g, or t
nctagagatgatcttctaagtgaagtaagtcagacagggaaagacaacatatgctatcacttacatgtggaagctaaactatgaaacaaataaacttttatgaaacagaaacactcataaacctagagaagagacttgtggttgctcagggaggggtggcggggttggcgggggagggttggattgggagtttgggattagccaatgcagactattacatggacaatcaacaaggtcctactgtacagcacagggagctatagttaatctcctatgatacagcataatggaaaagaatacaaaaagaaatgtatatacatgtataacggaatcactgtgctgtacagcagaaatgaacacaacactgtaaatcaactataataaagtaaaattttttttgaaaagcaatcttctggatgctttgccagggtggctttgcctgaaggtcgagataaccccaccaccaccaccctgcggtgggagtgggggcggggtggggagcagccgccagtgttttgtttggcgcagcggctggcgtggttgcctcggtagctgagaacatcggctctggtcacgcttgcctccgctccaatcctattactccgtgcggttgggctccgaaaatagcctctgtcagccccgtcatcacagttcagcgtttccaccaccggccatttattgttcctcggacacaggcatcgttaacccctccgctgccagccggctgggggcacctgagctgagcggccccctttggggaaacggttttcttttcattgtcttcatccaggaggagctgcaaagggcggggagttggcctccgtgccagaccctgcatacaacctctcattttaactcatttgagaaactgactgaggccctggcgtttctgtccgcatctgacgcagcaagatgaagtgacttgcccaaggtcgtccagccgggctacagtgagcgtgggtacagaccagaccgcctgactcaatgaccgtgaccaggccccgacaccacgctcctgagtctgatgataaagcccaccaggacatacatctgtcccaagacactgcagggccccctgggaaggaaagaacacgggcccacgggcccccgcagtgtgctcttcagactattaacacgcatcattctgtt

SEQ ID NO: 42742 - DNA, 3218 bp, Bovine  19866880900572
  misc_feature (1)..(1): n is a, c, g, or t
nttgggtagacaactgtctttgtttgcttgtttgttttcccattctctagacatttttagaaaatctctttattcttggttatctgaaatttcacaaagacatgttgaaataagattttttttttcttttaagtgttaggcatgcagaagagcattttaatgtaaggatttctgtctttctgatatggagaattttcttctattaactctttattcattttctctcatccattttctgtaacttccattagttatatgttcagccacctgctttaacagtctagctttctcaactctcttcatttctctttgcctttgcttgtttattctcctttccatgatgtttccatctattcctttgatgaaccttttatttccaccaccatatagttaatttaaagctatttttctaggggtgggatggattgagagtttgaggttagcagatgcaaactattatatagagactggataaccaacacagacctacttactgtacagcaaggggaactataccaacctcctgtgataaaccataatggaagagaatattaaaaaagaatgtatatatatgtattactgagtcactgtgctgttcagcagaaactaacacaacattggaaatcaactatacttcaattttcagaaagctgtttttctgctctctaaaaattcttgtttcatagcattctattcttgttttatgtatgcaatgctttctgagaatacccatgagaaggatatctttgtcatttacattttcacttctttcttgaatttggtttctcctgggacaatactctgcccatggtttatgctgatatcactctttcatgtcattttctccagatgttggttaaacactgaatgtcaatttatctataatataatgatgagagactagaaacctgtctggaagttccacaatgccgactgggacttgttcagtggaaacttttactgttccactgggggatccctaaatgccaaggtgcatgaggctcagctctggggctccccatgcacgtgttctgccctggtgacccaagagagtcactttagtttctctgcagaagaagccaattatcaactaatcactactgacataaaagattaaaaacccgatctcaatcattctccacaggggagtcacaaggaagaaaggggtcacctctcactgaatctttattaaaaaatcttgtaaaatattcataacagagaatttgccatttcaaccacttttaaatgcataattcggtaaggttaagtacattcacattcttgtgtgaccatcttcctgaactaaaaatgcatccccaatacacactaactgctcatcccctatcctcccagtccttggcaaccaccactctactttctgtctctgtggatgactattttggataactcatataagtggtatcatacaatatttgtctttttatgactggcttattttgcttagtatagcatcttcaaagtttgtccatgggatagcacgtgtcagaatttccatgctttataaggctaaataatatcccactgtatgtatgtagtatagtttatccattcatctgccacccatttacttttattttttcccatttactcttaaagcagctcagaggaatgcctgacaacaatacagtactgccctcatcgtgcacaagcagcccaggtcttcagacgctccacctcaccccctcccaatcccgccctctctctctcatggacacctccatctgtcagcttccagacctcttcacgcaagtaggacatatccaagacccacatctcatttcccccagcccccagatcctctgtgtgggtggccttgacggaagactagctatttttagtggaaacacagaattgccaccatttttagcagaaaaggcaaaggagccaaggaggcttggtttcccttcaactcttccctctccagagtgtcttttctgccaggtccctaggcaaaagttgccaagaataggatgaacaatggaaaacagacctaagttctcatctctgtcatgaataccctatctccacctgaaaataaaatgaaaatctggagacaaacccagtagcagtgtcaaggggctgggtaccacccagtctgcaaacacgctgtgtaagcatcattgctctggacaccaagttccctaggtgatgagattcggggtagaactgcatagccccagatatcacagacttgttcgtggaggaggcccaggccttgctggtgcaaactacaggccagaactggggcctccccttcccagggctgtcccagggatggctcagtaagtgccatccagagctaagaacagcttccctcccaagttcaggggccaggagcatccacgaccagctcaggtgtgcaccgcccaactagctccatgaagatgcagcctatatcattcatgccttttccctcttctcccagctgctctgagcactacccccacctaagtacatgtcattaataaaagataaacaagaagcatgtttcgggatggtgacatctgccacaccctctgtgggtctccgactttctgggctttagaaccacatgtggtagggaaaggggggttggtagggacccagctgtattctaagcctccacattgggtcctggccttggctggatgaaatcaattccctggctccaaacaggaatcccccacccctaccccccatgcggccagagcatctgaagaccagaatgtccaggcttgctgtgggagggtgaggactgattttcaacacacacactgctaccctgtcatcaagctcccaataagcattttggggctcggcacacccagacacacaaccatcactgcctttcccctgctagaatctcgggaacctcactgcctggatgcctgcggctgtgcacccatttttgccaccagccgccagctcttcttctctgatcctcagacagagcccccaggcagggatttggggagggtagggggtgcggtgggtggccgtcctcccccaggcacacatgaccctcgtggccctgagcacttttgcctttaggggctccttcatttttaaaattctatttcaggcacgtatggtttagagattaatatgacccagacttctgtgctagactctagtcatttattttcttctcatttaaaaagcaattaaaactttttacgggcccctaacagcactgtgggccttcagcatcctgtcca

SEQ ID NO: 42743 - DNA, 1613 bp, Bovine  19866880918114
  misc_feature (1)..(1): n is a, c, g, or t
ntgtaaaatgggggataagatgtcttcatggtagagtaattgggaaggtgaatgtcatgttgtacataaagtactgggctttgtggtcagggattgactacccgggatggagaggaacaattcatgagtctggttatcacaatttatcacagcatgatggtgggacaaagaagtaggccaagggtgaacttaagtcctggctgcaaaggaaatttccagaagctccacacagcacttgtgcttaccttctactggctaatcccacagccatacttaggcaccaggggaaacacggtctactgtgagtagccttgtacctagcaaaatccaggcttgtgttactaggaaaggtgggatggttctccacacatagctacacggcctcacggcctcatctcgtgtgagcctcaagaggcatggtatattggctccgtggctcagaggagacagcgaaagcccagagagcttccatatgtgtgtgtgaagacttaatcggtgaacgactgagcatccatccctatctcaggtttgcccctgcccctgttccgtgcctctgtgagggtctcagagaagtccagacacccgagagtcacccctcaccttctaggtttcctgctactggaatggaccaggcagttttccctcttcttcagaggtgggagcagggcatgatttggcccctgtgatggtggctgaggacacctaggggacacagagtttggtagaaccccaggccggtgggggtagcatcctgggagagaggagaaggtggggtaagggagaggaacacccaggggtggaagaactgctccctgaggcagagaaacccccacaaaaccaaacagatttcacccagcgacaggttacttattagcttcaatgtagacagcatcttcaatgtagacagcatcacccttggcctgaacgcggaagtggctttgtctctagagccgccttgtgtgtggagatacatctgggcttgagaataccacaaacaggggtattttggttcttccttgtttaaagagatgatcctgctgctgcctggccccacctcaccctccagattggaagctatgtgaccctcatggaaggaattccattggacacctctagccagatttccaagctgaagggaacacaggagcctccccagggccaaacccatgctccgaacagctggggacgatgttctgtcctgtccctccaaaacaaaacttaaactgagcaaggaattgctttcaaatcagatatgtgttggcacatgtctgtgtcctgttggttagaaaacatgtttttttgttttaaaatcagatttccctggaaagaacaatggcataatcaaagaagacaagtgtttggtggggcagagaaaacaaactcctttgccgaaaaaatcttgaggtttggcgagtgccaagctgctcatagcagctggctcctccagcttgtgtcagaggacagggctcaggccttatcaagggttgtgttgtggccttcagagtcccttagaggccctggggcaaaggatcccaggggcagtgtcagtgactggcgtctcacagctccagtcgacctctgctcctgctgagctgcggcactgcccgaggcta

SEQ ID NO: 42744 - DNA, 991 bp, Bovine  19866881089265
  misc_feature (1)..(1): n is a, c, g, or t
ngttgtttgtttagtttttcaaaattttctgtattaaccatctaggaaaaattatttgggtagggatggctacgtgaaagtgttgactgagcctgagtccctgatgagaaagtaaagaattgtgaactgtagcgaatagacctggagggatattcactcacacacagactcactgactcacatattttttcttcttccagccacaaatattcactgtggcctcctccctcctagaggccagctgagcaagaaagaaagaaaatcaaatcctttctgttgtagaatgtattggttatttcttatggccgttaaaggctctcactgaggaaggccatctgtttatacagtgaggtccatgcagagctgcctaagcagaaatcatgggtacagtaaagtcacttcatagtgttgagagacttggctgaataaaggggaaagtttaaataaattaatgcctgtctatggaatgaagcagtttgaatcctctaaaatgttatttatgcagaatcttaatgatgatattaaaaaaacagaatatagaattatatacactgtatgaaatgtatttttcaaatgtgaaaaccagtggaagtgttagttgctcagttgtatctgactctttgcaaccccatagactgttgctcaccaggctcctctgtccatggaattctctgtactggagtggatagccattcccttctccagggcatcttcctgacccagggattgaacctgggtctcccacattgcagacaggttctttactgtctgagtcaccagggaagcccatttttcaaatgtattctgtagccaaaaggaaaaatgcaaacttggcttactttttctggttttaaaattttttcttctacttgaaatatcccttgaactccctgattctggcaccattctgccctgttggcacgcacccacatctgggtacagccacggaggggtgggaggtgtgtgtgtgtgtgtgtgtgtgtgcgcgcac

SEQ ID NO: 42745 - DNA, 1859 bp, Bovine  19866881170666
  misc_feature (1)..(1): n is a, c, g, or t
ntggttcctattttgtcaaggttggggttactatgcacaatctacagcccacgtgatttcaaaggcaaggcttaattggtccccagtgcggggctttttttcatctcccaagaagaaatgagttctgttgccttgatggatgggggaggacaggtggaacttgcaagtgtatttggaagttgcagaaggagttcattctgagactctgtatataataaacggttcaagctggggctgaagtgagatccaagaaataagacaggaaaggagggaatcagggccagacggccagagggagatgttcagggcttggtttggtttggcttaaaagggcaattcagatggtcacttttcagtggctccagtctcttggtgctgggtgctggtggccctcgctgtcagaggcctcagtgatagaactgggatccagctattcagttctggctgctccagaaccttctgctgtcaaacctttgaccttggcccaagaagacaggttggctgagtacgcctctgagggtcctccagccctggctggtctttagtttcatgtcctgtcttcgtgtctgtatgtgtcctcatgggcagaggatggggagtctctgtccacacgggagatgcacatgggcataagccttagatgccgcagagctggcagcagtgacccaggtgaaggggagccttctgcagccccgtgatgctccccacacttaccctctgcccactgtcttcctaacggccccacatttgatccgtaggtgtcatgacagaagaacctataagagggtcctgggaagagacgggtgtgactgggaggtgttggtgagcggggaaaacagggacttgctcaggtgcgggcatctgtagcatggggggcctcggaggaggaggtgtgtggccagcctggattgtgatgcaggggcaggaagagccatcctcagcccatcacagtcctagggatgtgttcatcgctgagaacaactgtgggcagtgggcacaactctgtgagcaatgccaggagtgactgtgaggacaggtagaggtcttgccagacttgagttctggaatctgctcggtgcttctggaaagtgagtgtttggggagcactgagcaccatcccgaccgagggaaaatggagtggtctgaggagcttcttgtaggtggaagccattccttcattcgttcttcctcatcccttgagcactagcctcaccttccactcagatgctcatttcaagcatagcttctttagagtggaagggtaggggcctgggtgctgagggtgaccttgtgacctctgggttttggttcttgaaccatccagtactgcccagtacctcccaggtgcagaaccaggtgtgatcgtgcatgagcgatggacggcctgtcctggaggaagcacaactgtttgcaaggcctacaagtcccttgggatcccccagggagctttcaaaaatgctgatgtctgggagcccaccccagaggctctgttggccagagtgggctgggtattggcatttttaattccctggtgtttcaaatatgcttccaggtcctgcaatcccctgaggttgagaaacgggaagaggtaagggggatggtgggtgatggcctccctggacccctaacccctcaggcatgggggggtatgcagccagctggtgcagggacagaaggatgcagagagcagcccgcactgcaggctctccctcagccattaaagtttatcgtcgccgcggacagtgattgaaaaaggctttttgcaggactgaaatgtgagcaatgaaacttgccagctgatacctacacagggcacttatctcataaaaatatcctccgtgtcaaaaggtttcagtaag

SEQ ID NO: 42746 - DNA, 992 bp, Bovine  19866881194402
  misc_feature (1)..(1): n is a, c, g, or t
nctgagaagcaccttggcctgaagcactctggtacccagagcacaagtccctgaggtccttcctgaggcttcccccagatttggtccagttcccctggcccctgagcccactctgtggctgttgagccacctgcagatgctcactcggcctccgctctgatcagataccatgtgccgctgggggtagcgcctgcccacgcccaggttcctgatcgacaggagcccctgtgagtacaaagtctgccatgctaggctcagctaccaccaccagctgcctggccacctcagacgcagcacagccccaagccacagtccagcttcccaacacctacaagagtgggtgcccccatccatctgatggatgaggaaacaggtctatttcaggctgaatggggagaaatccaggacccaaacccaggtctacctgtccccccagccctcccccagccacattccactgagtgattgctggccctagggccgtcagtcccaggaacacataccccaaatgaaagtcacctccggcacacccttgactgaactgaggttcccaggcacccaacccccgctgcgtcctccctgtagcttctcccagcaccaccctccacactcctttttcttctttgcacggacagcagctgccacagcatgcagctgttgacaaactagtcagcatcctgccgaggcatctttccaagccgcccgcgtcctcctgagcagagagatacctcattagcgtgctattatatttcagcccccgagaaaacaatgcacgccaggagaccataaacaaccagtacaaatgctacagggtcgtggatgatggatgccaccatgggatgttcgacgtgggccctgcttacacagacaggagtgcagccgcttccaggcacatccatcttttccccaaacgctgacgcgggggaagaagtcggcacggccttgctccacataccacggggccatggcccccagccacccaccacaagcct

SEQ ID NO: 42747 - DNA, 1383 bp, Bovine  19866881285254
  misc_feature (1)..(1): n is a, c, g, or t
ntataggtaatgggttttccatcccctgggtaataggagacaccaaaaaaatgaggacattacttagtgagtccctcacctccctggccccattcagcagactcggaggaaggacattgcccagcattgagccgtgtgtggatttaatggggtttccagctaaaccttccatcaaatttacagctgtgcctgtctcctgaccttccccctctcacacattcttttcggaaatgaagctgtgtgcaggctgggaggtgtcacttccctggcgtcggagatatacagctgtgggcccgggttgagatggtggatttaatcaggctgggttgctgcagtgcacctgcccctaagccaggtaacattagaagagccactggggtccatctgacccacaaagagtcggcgagtccttatcctgccagttacaggcccaggcccaaaccttgcccatctccctgctggaccgaggcctgatgtctgctcaccccagccagctaggagaaggggtcactacaccatgttctcccttcaccccccagcctccctgtcgctgctgtgagcgtggattcacttctccttcctcctactcccacgctgctcctcactgccccctcttcctgtttcttcccctaaataccgactcctacctctctgcccatctatagccaactgtccttcaagttcccacataaacgtcaccacctccaggaagccttcttctgggaactacgagggcattggaggtaaaagccacagacactgccttcacaagggcattctccctcttagtatgcagccccatgtggactgtgagccttgagggtgggcttctccctgtgggtccagttgctgctgagcttggtccacagaaagcacttattatcataggcactgtccatgttgctgccataaggccttatggtcagacccctgccccagagagtgaggatacagttacactgtgaatgctcccatccccaacagggcatgctcaaggctcacagatgggccctcctcagtgccagggtgctggcctccgtatgtctgggctctaaaataactggtcccgtgggaggcacccctacacctttctgttccagcctggaagcactgaccaggtctttctgactggcctggccgccctcgctcccatccctggatggggcaggcagtttcttccgctcctctctgctctcttgggggtcagggtgtattttcccagcccttcccttcctggccctgtgtttgtctgactggctgcctcagaggcctgcggtagaggctgtagcaacaggcagtgtccagtgcccacttggacaaacagcacgcgaggcggctgctggcacaagggcggtgtctagcaggtgggcagagtgactcagg

SEQ ID NO: 42748 - DNA, 649 bp, Bovine  19866881287324
  misc_feature (1)..(1): n is a, c, g, or t
ntcttgacagcgtccagtcgacagaagaaggcaggtgacaggacaggggcttacaggggaaccccacagggccagactggaagaaggccacatccaaatcactctgcaaacttgaactgagccgcaggccaccagagctggccacaaagcaagagcctgcaggccaggtcccgctcattgcatctgagccactgcagcccggctactccctacccgggagtggacttcctgagtccctgtctgagcgaacaataaaaggggtctgcgaatgagcgtctaaagctttggagctgcctatcgtattgatggagcaccgcgccaggagcccagccctctcgaggacctgggcaaatgctggtattagtgctccccttcctctcaagggtttactcagcagccactccactgtttcctcaggaggagacccccgaccctgacaatccatcaagtggatgcaaatcgtggtccagacaaaaccaggcaaacagcaccccgctctgcaataatggcctctggaggagaagggcccttgccaacaatgattgctgtgtacacagcccactaaatacccaaacttctgattagcctcataatgatctgtgtgcacccgtctcctttgaaaggctcccaagtacacggcacaagttga

SEQ ID NO: 42749 - DNA, 1731 bp, Bovine  19866881307847
  misc_feature (1)..(1): n is a, c, g, or t
ntctttcctgagagcagtcctccacctcaactcaggggtctctccttggtccaccccatggaccagtggctgccctggggggtagataatgtaatggtcctgtctaatgcagggagatcctcttattattgtgccactcaatctacaaatgaggatgttgtagagaggttccaaacttgcacaagggcccctgaagttgggtctgtggcccaccctgtggtccccaccccagggaagcctctggaaggcagcagtgtgtggctgcctggtctcctgtgtcccccagccccaggtgatggacggccttctgctgagacttatgagctatttgaagccgtcaaccagctttgtgtaaatatcaactctgtttggcaaaatagctggagagggatttttatttctgctgggcatgattatgagtattgatttgagaatctgaaaagtcaataaaacagattaaacctcctgaagaacgaacgcagaccatcaacttgggttgccgagggcgtgaaagcaaggtgggtggggaggagaaatcagaactgcgtcaagtacagcaactctcaggccccacctattgcttagcctggtcctaccccaggcattcaggacacagtgaacacacggccctccacctgcagggcacttggcctggctctgctgtaaactgacatcatgggagtaatttggatattctttttctctttaactttgatttttcttttgaagggtaattgacatataacatattagtttcaggtgtacaacataatgattcaatacttgtaagcatggcagaatatcaccacaacaaacctagttgatacctgtcatcttagcatagctacaaaaaatttgtttttcttgggatgagaagttttaagatctattctgttaacaactttcaaatatacagtgcagtattagtataatcaccatgctatacattacatccctaggacatatctaatttatgactggaagtttttatcttactcatttctctgcccccctgaccattgcctctggcaaccaccagtctactctgtaactgtgaactaagggtgttttttttttgtttgtttgtttgtttgcttgttttagattctacatataagtgatatttatggtatttgtgtttctctgacttatttcacttagcatcctaccttctaggtccatctgttaggtaggtagtacaggaaaaaaggagtccaaaatggtggtggctaaaagacaaagatgggttgaggcctcttctttggggtccacctgccctcatgcctcgagggtgtactatactttgtcaaataaaactctcccgtcaggagagtgtgtaatttcctcgattctgtctcactgcaacaaagattttaaactgtgaccagtgttacaactcagagttttaattggcaaacaaaggactgtacaccctaggcatgagggtgggggcacctcagtggagagacctcagcttgtcttggctccttctttttatatgtttgtctcctccccaagtctgactatgcaaattagggctagccgggaagggggcgtgtttgtttcacctgaggttctcattcaggtccatggatttttcctttgtccccttttcacgcccttttccctttctttgtcttttaaccactgccattttggactcctttttcctattctaactacctaacacatcaatgttgggcaaatgccaagatttatattttaggccaa

SEQ ID NO: 42750 - DNA, 938 bp, Bovine  19866881351349
  misc_feature (1)..(1): n is a, c, g, or t
ncgtattacagtgatggtcactttggatttatttccatgcatttatgtcctcccccagaaggcacttgttaacacttccaccccctgcttcttaaacctctgcttggtgaactatagatcctcctagaaagaatcaacacattaagagctattttctggccatcaaggcctacctatgccacaaatacttgcatactaatctccccatcacaggttgaaaaatatggacttatttttttttaactcccaacataatgaatgagtttaaatattagaagttgaaattattaagtaaatcatttcacctgcaaagcttctatttgcataatattaattcatggtggcagctaaaacaaattcatcacattctgtatattagaagctgatttatgtaggaactgaaaaaaatcatgagctcaaaattatattgacatgatgtacagactcaatggagaaagatttttctctttccttctttccctttgatttttttttttttaacatcatctgaacaattgaattatggtgagaaggaaaaggatttgaggagaggaaggaggcgaagggctggcatctcagaaaatgaataatgctcccgcctcacgtgtgtggcaggctcccggtgcgggtatacacacacactccggttattaatgtcaagtatgccaaagatacgctgggaaatcattaccattcatcgccactaaccgccattaaatttcaatcaattcaacttagcacaagtgtacttgagcggcccttacagttccttataaatgtggctcaaaagtcgggctgacttattgcattgtccacaacacaaaggagcattgctaagcgtctgcttggaccccgggaccgacgctcttttaacatcctcagcattcaaagatccttctttttctgagcgctaagaggtcttcaatccctacagatca

SEQ ID NO: 42751 - DNA, 1050 bp, Bovine  19866880837360
  misc_feature (1)..(1): n is a, c, g, or t
ntggtgtgatgggctctcctgaggcgagtatctaggccaagccgtgccaccctgccggtcagggccccggctggcttcccatccaccgagactgcctctttcttgtttggcacctttctctctagctggtgagcgaccgtgctctcctgactcctttatagaacggccttccttacatatatgcaaaaatctcttggaggggtccctttggcatttgggagagcagagtcccaggtgggaaatgctgcctgggccttcagaagccatgtaggtcttacatttttgaaacctcgataaaggacttgcagctccctcttggtgaagttggtttgtgcctccagctgctccagcccctcaggccgatggcaaaccatggtcatctccagctcgtcttcaatcttatctggaaccagaagacatggcattggggtggctcaccttggtggtcacttgtcagactgtagcctgggttgtcagaaggggggtgtggtgaccaggacatagggtcatgggctggggggtcacattgcagatgaccttcttgccttgagccccacctctctattcagttgctttctatctcaccatcagtccaccactccaggtgtgttagacaccacctatggagggaacttcagcccaggaacatgcgttccaagtgctaaaaataagtccatacaaaaacatttccttgtctttcaaaatatctgttttgtatattcaatttgctgcccactgaatattccactgctcatctgaatattccagagacacaggtaagtgagcagatggattaacatcctccgaacagcaaagggagacaaacctactaaaaaaccatagagtaaattcttaccatctgggaaactagaggtaggctagcttgatttggcaaaaagtacaaattatagcatgttaaatattaatttaaaaatatgaaaccactttccagtattgtaatatctaacagacatccttaaataataggaaagtaacttaaatgggagctactttacataaatgaaaacttggaagcattgaagggctcta

SEQ ID NO: 42752 - DNA, 1072 bp, Bovine  19866880929677
  misc_feature (1)..(1): n is a, c, g, or t
ncaactacggcaacagattccaagcgagaagtgataaaggccttcgtgatttctggtgcactaagtgtctaataagtggggttcagttgatttcacaaaaggaactgatgctaccatcctttgccacagagttaataaataatgaacactgttgggagcaaattcccaatgctacaaaaaaataaagcaaatgttatttaaactgatatcatatcttcctagaataagaactccagaggcaaaataactaaacatacatttaaaactaaacttattctgattataacactaatgaacatttaacatagcaaattttaaatctttgtgaacatccttctaatcttctttccatgaatattttttaagagctgatatcatgcagaaaatatggttttaaaacttctccccaaacttataaaaagaatttttccaaagcctaatctgtaaaactttattttatttctccacatagatttttccacagtttctcaattcactctttaattattagataatcagatggcctctaaattattattataaaatttgttacaaagaactttttcctaaaatcttgcaatgaatatttttagcaaagtgctttaatagacttttttaaaaatccctaccaaatcttatcaagaaagtattctatttacagtttagcatcaacaatgtatttttacttacctgtagactagtaatggtaaaattggcaatcaatctgataacttcaggatattctttcaccataactaattctcctagctgataatttgtctttaaacgagccaaaaatcgacaaaattcatgataattacctggatcagacaaaccctaaattatgagacaaaaaggaaggctattttaaaaacttaaaaataaaccaaactaatcaccatcaataaaattccaagagtattttactaagtttcagtgttttcatgggtacttactgcactttgcatcaactgggtaggtatcaatttaaaagaaaatgattccccctgggcttaatgttgtcataaatgattagtaataagggaattcatagtagaggcttcggaggaag

SEQ ID NO: 42753 - DNA, 2475 bp, Bovine  19866880931251
  misc_feature (1)..(1): n is a, c, g, or t
nttgtgaatttgtattactttctggatattttatttaattccctgatctgtctaactaaacatcttgcccaattatttttttcatattattaattttctaaaactataaaattaaggctatgttaagttttaataatctcattttgaatataaacatatttcattgaaatacaactactgtcctttatcctactagcaaagagttctaggaagaaaataccttgtttacagcaaatgaacttctttataaatcttgatatttactgccaaagtgttatgaaataatattttggcaaccatttttatagttaaatagctaaattaagctacttatttaaaagtaacttcactcactaaatatctttaatgctattaaaatttatgaaggaaagcttaataaagatcaaatttaaaaatcatattatcaaccacgtttgtttttctaaagaagtatttattctttgatttgaaaggaggaacaaagctagcttttaaagtctacgtattgttcaacgcatagactgctgaagtagttttagttaaataaatacagacaccaagcctcatctctggattcaggtgattttaagtaatgcatatcctgcttttaaattctttatgagtaggacctcccttttcctactttagttctttgctgattctatgcaattgcttgtttactttcatttcctttaaatagcatacattccaaaaatctgaagaagacatgaaaccaaaagacaagtttgctggggtgcctttacaactcatattaagctggtgatttgcatttgcttaagaggcaatgctatcccaagcaggagagtaggaaaaagttcccagcgggggtacatgacccttttgtcaaatacgctttgatagttgcattaatacaggaagttcagctgcaagtaactgaaatccaaaataacaattgcttgaacaatacagatgttgatttctctctcaagcaaaaatccaaggcaacgctctaggactagctggtgagccatggtgtatccagacgcaggttccctccatcttgttgttataattgccttcactcgcccagtcacttcatggtttaggatagattcttcagataaacccatgtgcatatatgttacacacaccacgtttacttacattaaactgcccagaatatagtcacttaaccatacccagatgtaagaaattatagtaaatctagtctttattcaggtggccaatgcccagcaaaacatttcaggtattctattactgcagaagaaggaaagaagagatacaagacaactagtagtctctgccataggactcttcaaagatttgtggccacctctaacaaacgcttaacaccagagtttgtattgtatataggttaggttaggttattgaatattcacttgcagtttaaatttagtggcctacatttatttttacctttatcttaaattatctttggagcatgaagggaatacaaatacaaaatacattaaataactttgattcaagtatatgcacaccattacaagtataaagaaatgaatttttggataattaactcttttatctcttttacattctccttatatccaattacataagtagtttttcagtcaataaacacttgaaggcctactataatggtaggtatatgttaggagttcagaaaataacactgagcaaaacatatatattcccagtcctccagaaatctataatctatgctgggaaagacaataaaacaaataattagaataagcaatgacaagcgctataataaacactatgaagaaattagcaagaactcctgacattcttggatgtaacagagcaaagagagcattgagagaaaatggcaagtgtgtgtagttatctagacagggggaaaaaaaaggcatgactcattgaagagctgaaaaaaagtccagtatggctataaagcagttagtggcaggagataaggctaatgagacaggtaggaccctgattatgaagagcctgacaagccacattaattttaatcccaatagcaatgaaagtcattgcagagtttaagcaaagcacagatataatcagatctttgtttttgaaagccagaaaggaaacagagtgtcgatttcaaattacagcatgactctaggtaaatgatgacaggcgttaaaacagcagggtgacagaaataattgaaactagctaggataagtagaaggtaaaagttgatagactttgatgaccatatggatgctggtgagagaaaaaagaaaaagttaaggagaagtcccaggatttaggccttggcaactgagtggacagtgatgagacacatgaagaaagtcagggttgggagtggatggaagagatgagtttaattttagtcactgaattagaggtacatgtgggataaaacttgcaagagaaccagttcgataagtgttggtaatcagaagataggaattactaaaacaacacaga

SEQ ID NO: 42754 - DNA, 3114 bp, Bovine  19866880973266
  misc_feature (1)..(1): n is a, c, g, or t
nactatttcttacactcttaatcgtcatttcatccatgactacattgagcagaaaaggtaagttgtggaaagggaaggctagtccatccctttggcctccagttcttagtactgctattgtgccaggcattgtgccaagcagagcatcaccctcccccaggcaaatatcccattcaaatgcaaagactgtgaccataagcaaatgcagcttaaagatgaggctcttcacgttgtcccttccagcacaactgccactcccaagaccctctggtgtagaaagtctggagcctcacatggcgtggttggggatacagagatgaagcggtgggcaggacctcctgctgagggacttagaatccaggagttcatcaagagactccagcctataaacagcaaataattgcttatattggacactgggagtcttggtttcctcatttgacatcatattaaaaagattaagagttaacagcagcattcttggaaagaaagcaatgtactgaacccctgttacatgccaagggctgtactaggggcttatatacataaccttattttatggtagaatgctctggaaggtagagtcttcatctttctggtttggaccctgaagctcagagaggtgagggacactgactaaggtagcacagctccctaaagaggttacactcttcccacagtatcctggagcctcctactaggggattctgtctcacctcgaggaaccaagggtccttcacacaaactgcattcatctccagtcagctccgagaggcaaaggcgttctttgaacccaaatagcagatgaggaaacagatatagagaaggggaagccttaggtgtctgtggatacctcggatatcttagctatctgtgcaagagcaggtcaccacacctctgcgtgcatgaaatactcccagtctggttgcccttggctactcttcttatggctgggaacacagaggccactgctctgcctctctatgcgagcttcctcagtgcagccatgcagtcatctaaggctgctggataggtggctggcccctaacaggcatacagttaggcccaagcagaggatctccacttgtgaccctccccacactggatgtgcactgcatcctgaggttgtacagtgtctaggccatggttctccaccctggctacacgttcatcatcacctggggagctttgaagaatgccaacacctggaccccatccttgaccacttgaagcagaatctctgagggtagaacccagatatcagaattccttagaagctgcccatgattgtaaagtgcatgcagagctacagtggggaactgaccatacccggtgctatgaacgagcacaggatctgaaccatcccactggctacgatcattggctcagagctgggcttcgtacatatgccagtccacacagcatgaatctcaagacttgtgctaggaacggtgggacaaagatgttctgtctcctactggacatgaataagagacagtcctaggacagcttgcagtgatttgggaattctgagagcttatctgataaccaaaggacagataaaccataatcacaggagataagcagagaggttttgcttttttttttttaataaacaatgtaaaaataaaccagaaattgatgagatcattgagctgctggctcccgctgcacccgaacccaccacatacctatgacctttccaggtgcctttgtctgatgcctgtgttagtttagccagcatttctcccccatggctacctatcagaatcacagaaagtttttggagtacctagtgcctgagccttgtcccaggttctgaatcagaacttccagaggtggggccctgagcatcaggaggtgttaaaaactatcccggtgattccagtgtgcacctagggctaagagcccttgctctaaaagaatggaagggctgctgccgttctccctgtcctggccaggccacaaataagaaactcaactcagtcctcagaacctaatactgacgggaaaatcagcatctggagatatcagagagaaattggaatggaaggaaggttcaaaacttgtcctaagatgaataagcaacagaaaggacgttggtcatcctggtgggtagagagataaggacaccctgttggagcaattgcaaataaatgggccatcattcgtcaaagcttttcataaaggaacgagataaaaataaactctgcggtttccacagaggcacagaaagaaaaagtggcctgggctcttgtgaatccatgcatccctcagcagcggaggtattagagaaacaaggttctcagcttggaacatccatccccttggcatcctggagggatcctcctcctcctgaatcatccaccagattatcactatttgccagtcatcacgcctgctgctggggattcagctgtgtagtaggtgccttgccagacaccctcggcactcactcctgcggactcaacggctgccgactgcaaatgcatgtgactttttgcctgtgactttgactgtcacagcagactgtggccaagatagccccactctgtttgtggaaagggcaggcaggaataatcaggttgttaacacttcctaggagcagccctgagccaatgactcatgccaagttggcgaatcaataacccaggtcccaataggaagaactcttgccttttcccagactactttctccactggaattgagccccaatcacccacagtagtaacctgctcaaaagtgcacccctaattgacctctttgtcttccccgtctcatttcctgcatccccctaccattacttcctggaatcacctcccaggtagaccacttacttccacatccttgtcccaggactggcttctggaggaacctaacctaaaacaagcaatgactaggacaggtatgtgtcctgctctcaagactcttatattctattgaaagcaaacagacaacaaataaaatgacttgggctacttaaagtggtatgaagagaacagaagtgtaacatgaggaaaatgacgggggtggctgctccagacagggtgcagaggaaaggctcctttgagcggaacctgacggatctcagaggtgaggggtcatcaggcact

SEQ ID NO: 42755 - DNA, 785 bp, Bovine  19866881104553
  misc_feature (1)..(1): n is a, c, g, or t
natgtatgcccattacctcttccatgccttcgacaccacgcagacaggctccgtgaagtttgaggtatgtttgtctctcagaggccccagggccccaacaacgcttcctttaaatgatgggcatgttgggaggagtggatcattcaatgcttaagttctataccatttaagaaggatttcctgaagacagaagaaacaactgtcttccaagaactcagggcctcagggactgacagtctaatggctcacatgtgcaccgggctgaccagcgctgcagcgctgcacttagcactctacgcgaattaactcatttaaccctcacaataacaaggtagggttctactatatattatcagtctacagaagaggaaagtaagataatgagagacagagtggctttcccaaggtcagacagtaagaggcaaaggagggctttgaacttgggtggtatgtttccagagtccacactcttagccgccagaggatgcccccacttgtacggtaattgcagccctggggtaaggcgacacccgatgtcagcacacgctgacttcccttcttcctccagaagctccttcctcagtatggggcaaggtaggcagtggaaggtgggtggcgtactgtgctgagcttggccacatccttcaggagacagaggacctgggcgataccattctgtaaagaccgtcacggagtctgacccccagacagagtgccgccccacccagtggctcgctgcttaatgtctcatgcctcttccacttctcaggactttgtaaccgctc

SEQ ID NO: 42756 - DNA, 1091 bp, Bovine  19866881490127
  misc_feature (1)..(1): n is a, c, g, or t
natcctaaaggaaatagccctgaatattctagaaggactaatgctgaagctgaagcttcaatattttggccacctgatgcgacgagccaactcactggaaaagactctgatgctgggtgagggcaggaggagaagggggtgacagaggatgagatggttggatggcatcaccaactcaatggacatgaatttgagcaaactccaggagatggtgggcagggaagcctggcgtgctgcagtccatggggtcacaaagagtagaacacaacttagtgactggacaacaaccccaccatcagttatgaaagcaaagtatctaagtagaggcttgtataacttacttttttagatactttttccctttgggattccagacaaaatgatacaagcagtccaagttgctctgacttgtttccacctttcagctgttatgaacgacagtgctgtgaacatttctgtacaagtccttttatggacatgatttgatttctcttggacagatacttaggagtaaaacgccgggtcaaatttatgtttaatttttcaaaaaactgtcaaatcgttttccaaagtggttgcaccattttacatttccaccagcaacactctcaccatctattactgtctatctttttcattacagccattctggtggatgtgaagtggtatcttactgtggtcttgatttgtgtttcccttaagactaatgattttgagaatctttttatgtgcttattaaccactcatctgtcttctcaaaggtatcatctgaggattaaatgagatgataatgttgtaaagcacttagaaaggtaattgattactaagcgatagatattatcatcatcatccatgggctttggtattaaactttcttgaggtccagtacaggtttgtttctcatttgctttgctgtcctgagaaagttatgcagtctctctgaatctgatcattctcatgtataaaagggacaaagcattacagttcctcaattctaaggcacagcatgtatcgaataggaacactgcagaaaaaatgtaggctctaagctctacttaatatataacaactggagatccatttcaatttca

SEQ ID NO: 42757 - DNA, 698 bp, Bovine  19866881769002
  misc_feature (1)..(1): n is a, c, g, or t
nactgacccacactatctggctgtttaagtgacagaaaaagtacatataaaacaatgcaataaaataagtatgtaagttatagaatgtatgaacagaataataaagcctagaataaagtttatacaccaaaataattaacagtgggtagcaaattccagctacgatggaggagtaacttaggcaaaaataggccataaagtctaacagaaaaacagaagaaaaaaatgttataaaaggaaaagattccacttcttctttggcctcaaaggccagcatacaatttgggaaaagagtgaagaaaaagtaaatacttcactatttaactaaaaatagctttaatggaaacaactccaaaatttgagaacactttcaacagctgttcttgacaattatgatgagaatcgtgacataagaaaaaaaatttctcacaactggcacatttcaaccttaatttttattaacattaaaatcacacacttacacaaattagattaaaagacagattttcctagcattaaactgtttctcctatggattaaaacaatatggttcttttaaacttcattacatataattttttatttccacgacaaaacttgagaaaatgatacagccatctgaatataaaagaaaatcgacttatttacttctattagttttatttttaatatcctgaaaaattttaacctggaaggga

SEQ ID NO: 42758 - DNA, 429 bp, Bovine  19866882019035
  misc_feature (1)..(1): n is a, c, g, or t
ntctggactctggctttaaccaagtctctcaagtattgcttagtgcagaaaaactcaggaccgctgtgaatgtgggcaccaagtcacacattcactctaagagtcaaggtgaaagttctcttggagtggcccttaagagggagggtatactttttatagcatccttataacactctctacgaacccatttttcctttcttagaatcacaacaactgttgcatgtaacatggacctgtctaaataccccatggacacacagacatgcaagttgcaactagagagctgtgagtatatgtcatgtgggccccttagttgagtttctggggtgacttagatctgtgtatgtgtgaggagtgtcctattcatagtagactttctctccttgatgttgatgacaatgggttcatcccttctgggtgtatgtccag

SEQ ID NO: 42759 - DNA, 2344 bp, Bovine  19866880345005
  misc_feature (1)..(1): n is a, c, g, or t
ncgcagaggaggaggtaggagagagtccactggaagtttattcctgcaggtctcagaccacatcagctgcctgtaatgtgaaaagtgatggagagagattttttttaaaaaaaggagggatgtacaagagagaaaaagatgtctgtttcattcaggagtttcgctactacaatcagaaggagaggttgccaaaactaggggtccccaaccccaagagcgtggaccatgcaggaggaggtgagcagcgggcaagagagcaaagcttcatctgtatttatagctgctccccactgctcacaataccacctgggctctgcctcccactccgtgaactcaataaatgtaacatgcttgaatcatcctgaaaccatcttccatgaaaccggtcctgggtgccaaaaaggttggggacccgtggcctaaagtaatgaaaaagaaacattcaagctgtactccatttaagccaaaaatcagattggtctctcttgttcattcatgggttcattgacacattcaaccaatactgagccaccaagttggaggtacagtagcaaacaaaagtcccgtcctatgactcattttgaaaagacccctggatgctggggaaagattgagggcaggaggagaaggggacgacagaggatgagatggttggatggcatcaccaactcaacggacatgagtttaagtagactcagggagttggtgatggacagggaggccttgcgtgctgcagttcatggggttgcaaagagtcagacacaactgagtgactgaactgaactgaactgaactaaatttaacttttttgatttttttgtttactttgcccacataaagattggagcctctgtgtgtataaatatggagaacttcagaactgaaaaatagttaaataatgtattttccattttaatggcagttatggagttgactgaggcaagaatagtcggtggcagaactaatactaaatcccctgacattgagtgcaatatctacttgatgacactgttccatctctctgatgcatcatgctttaaggtttttaaatgcataaaactaatgccttcaggaaaagagtgcttcattctctgctgtcaagttattatttgtaatttgcaattgaaaggcgttttcaggccacagtgataatactgttctcatggagtttgaccaccaaggaatgactgcagaaagagaaaatctgggacatataatttgtgaggaatgctagtcaaattcattgccaaatatgacttagctttacaaaagtgatgataaaagtcattggacttttgcagcaagtaaaagcagaaaccattggaaaaggctttgtagatcatctcactcaattccttcattttaggaatatggaaaatagaaaagagaagagataaaactagttctaattggcaatagaggtaatcttgatgtcaagactatggatactttcccatatttttctaagaagtaatatttgtagcatcaaaatatcaactgctgctgctgctaagtcgcttcagtcatgtccgactctgtgcgaccccatagacggcagcccaccaggctcccccatccttgggattctccaggcaagaacactggagtgggttgccacctccttctccaatgcatgaaagtgaaaagtgaaagtgaagtcgctcagtcttgtccaactcttcacgaccccatggactacagcctacaagcctcctccgcccatgagattttccaggcaagagtattggagtgggttgccattgccttctccaaaatatcaactagtatttgcttattgacattgcagaaagttatctaagatgcagactctccagcaacagattatgtatttagcaaaacatcatcaaaataaaaatagttttaaatgtgtgatcatgtaattaaatcaattacattttacacaattgcattttgaaagaactatattatacacctgtcagatagaatacataacccagtgctttgactattatgaagctattttcatgtttataaaactatttaactcatcttgagtttatgcttactggaagagtagaagaaaccacattaagtgatgattgcaaatattaacataaaacctcattaaattcaaagaacaaatgaaattgattaagattattcacataatttttagcatagtgaaggagaaaacagacagaacaggctccatcttgaaagcaggactccatcttgggccagactgtggactttgagctatatgcccagtatctatggaaacaacataccaactggaaaaccggacctcccagcggaagagccccaggctcgtacctacactctccaggcctaaaagaatacc

SEQ ID NO: 42760 - DNA, 1073 bp, Bovine  19866880552204
  misc_feature (1)..(1): n is a, c, g, or t
nccatttccttccccaggggatctttccactcagggattgaacctgtgtctcctgcattggtaggcagattctttaccatctgagtcacgagggaagcccattcacagccttagcccattcacagccttagtccattcacagccttagagttggacaaagaggagaagctgaaagtggatttccctgtaaggcaacacgcccactatgcccacccctgcaaagctccccaacctctccaatcccagccacacagtcttacctcccacgaactgtgcagctcccatgcaacgtcccatcattctggagatgagttcttccatgcagcagcccaggacagcagccagtgccaccaggagcagcagagcacagccagcacctgtcaccactgtgcacatctgccaggccaggctggggatggcactgaagctggcatagcgcccacactcttcaaccatgatcagactctgcccctctcccctcacagggtaattgcacctccggaatgtgctgaatgacactggcttccccagctgagatccaaagagccaataaggcaggaagtaactggtagaactggccacggcggtaacaagggacaggaaggcccagagggtccccaccagggtcaggctgctcctcatagtcccaggtttctcggtggggatggggagatgagtcggttcacagcgccaaatgcagaaagttgtcatgtaggctccaccagcctagttttcatctgcctggccagccccagggctcagtcatgtgcttcttggcccttacttctggataaggttattgtcttgaggaccatttgggtccctatgggattctgctctccaccacttttctcatcttcccttccttccacctggttcagacttctatgatctctaggctgcaatggaagaaccacagaagtgaattagtgactgtttcgtctactccaatgcagcctgcctgagtgtgtgaatgctaagtcatttcagttgtgaccaaccctttgtgacactatggattatagccccgccaggctcctctgtccatgtgattctccaggcaagaatactgg

SEQ ID NO: 42761 - DNA, 2424 bp, Bovine  19866880918823
  misc_feature (1)..(1): n is a, c, g, or t
ntttctgtgcttcgaaatccttattgcttacatagtttatgtgtatatgtatattagtttgtatctgttaaccccatgctcctaatttatccctccccccacctttggtaaccatgtttattttccacacctgtgagtctgtttctgttttgtatatagattcatttgtattatttttatattatatgctgcatataagtgatatcttttgatatttgtctttctctgacttccttcactttgtatgataatctctgggtccatacagcttgctgcaaatggcactatttcattattttttatggctgagtagtattccactatatatgaacactgcatttattaagcctcttgtctgttgataggcacttgggttgtttccatgtattactactttggctgttgtaagtagtgctgctgtgaacattggggcacatgtatctttctgaattagtgtttttgttcttcccaggtatatacccaggagtgtaattgccggatcacatggtagctctatttttatgtttttaaggaatctccatattgttttccctagtgactgtaaccaatctacatccacaccaacagtataggaggccttgccttctctctgcaccctctccagcatttattatttgtagactttttgatgatggctattctgacagaagtgaggtgataactcattgtggttttgatttgcatttctctaatgattagtgatgttgaacaccttttcatgtgcctgttgaccatctgtatcttttctttggagaaatgactatttaagtcttgtgcccattttttgatagagttgtgtatttttgttgttgagttgcatgagctgtttgtatattttggacattaatcccttgtcagctgcttcatttgaaaatattttctccaattttgagggttgttttcacatcttctttatcatttcctttgctgtacagaagcttttaagtttaaaactgaagtatagaccaatgttacaggacaggaaacccagggataaacccacacacctgtgatcacctaatctatgacaaaggaggcaagaacatataatggagaaaagacagcctcttcaataagtggtgctgggaaaactggacagctacatgtaaaagaatgaaattagaacacttcctaacaccatacacaaaaataaactcaaaatggattaaaaacctaaatgtaagaccagactctataaaactcttagaggaaaacaggaaaaacactctttcacataaattatggcaagatcaaaaagactcacctcctagagtaaccaaagtaaaaaacaaaaataaacaaatgagacctaattaaacttaaaagtgtcttcacattttattttataatattactgacattgctatgttccaaaaataaaattctctattgtacaatgtacttttgtacattgatgctgtatgcctgctggtcaatgatgagaagatgatgaattaaaccttatccattaatcagacatccaaatggtacattctttaaggcatccaagtatcatatttgttttctcaaatttgtacacagtccatgtcactctcaatcatttttcatcaaacaatatagattaatcaatcatttaatcaagacatcttctacgtgcccagaaacacgctagatgttgtggagtatcatagtaagttgagaaagagaatcctgttattgaggcacttgaaaaccagctgaggagacaggtttacagtcatagactgtataaagaatacaataatataaagtgctaaattctgtgatattagaactaagcaataaggtcttatttgtgacataaaccaataaatgcaaaaaaaaaaaaaaaaaggagaattcatcagaaaaggtttcatcaccgggcttcctggtggctcagtggtagagaatccgcctgccaatgcaggagacccaagtttgatccttaggttgggaagatctcctggaggagggcatgacaactcactccagtattcttgcctgggaaatcccatggacagaggagcctggtgggctacactccacggggtggcaaagagtcagacgtgactgagcgacgactgaataataacaacaagcctttttgaaagcaccaaatttgcatgaaaaagtatatttttatatgtaaactaaatgctaatgcatgacttctagagaacactaaatgtgtttctggtcctcagatgctttcctggtgaaaaggggaaggggcaaggtctcagctattggcatagaaagctggcttattctttgttgatggagaccatcctagcttccactttaaatcagttatgttttattgtaatgaatattttaagtaattagagcattgaaaaacttcatttccttgtgaccaagtcctttctgccatttctaaggttatataacacttttaataaa

SEQ ID NO: 42762 - DNA, 1341 bp, Bovine  19866881139901
  misc_feature (1)..(1): n is a, c, g, or t
ntgaagacagaggtagacatgatcctggcatgttaatgaaatggtccgggaaaataatggatgctgagaggtaggaataactaaagttaggtagctggagtgataccagattataaaaatctttgaatgtcaagtataattgcttaaaggctgttgattaaaggattaaatcaggataaaagcaggatttaacaaagattagacaaaaatacccaaaacatgtatcaatttaaattaaggtctctgttcattattggagtcaccaatatcttgtcaatatttgttattacattaattgacagtataaaggctcatgtttgaattgcattgactttatatttcctaacagaaatttagtaatttatagattaagtattatcatgaaaatagaatcttcctcctgtccccattttttcctgataaagaatttctccatagaactataaagatggtcctcttaaattcaaacctgaaaaatgacccctgttcttggccattaacccatgttttctagctcttacattttgaaatgtagagggagtcttttgaactcactagagaaaaggtattcttcaacagagaaacaaaacttttcttaaattggcactcgtctttctttaccttcaactcattaaaatagtgtgaaattagtttgtaggccatcatattgagtttttaatgtacctattattaaagcgtgttttttctctaaatgagattgtaaggtccaagagaatatttcaaatctaataattggattttggattaccttattccaggagtatattttctaaattttttctgaatgctattaaatgaaccttctgaaacattttcaatctaagttttactttgttgaaactgacagctccaaatccacttgcttagttctaattcaaacctctatttttaatttgatatctttaaggaatattattaagatatatagtttttaaattttatttgagatattattagtatataacattatattattttcaggtatataacatagtaattcaatgtttgtatttattgtgaaatgttcaccacaataagtctagttaacattcatcactgtacatagttacaattttttttccttataatgaaaacttttaagatctactctcttagcaactttcaaatacataatacagatttattaactatagtcaccatgatccattacctgactaattcatttttagtattgccttaccaatcctttctttccttttatttttcttgatttaatttattacaacctggtatattaagcatttatttctttatttttttgtctcttctcactaaagtttaacatctatagagcaagga

SEQ ID NO: 42763 - DNA, 753 bp, Bovine  19866881255231
  misc_feature (1)..(1): n is a, c, g, or t
nagcaggagggctgaagaaggtggaaggtttctcctgccatgtcgggaaaggcatttagctaacacagggcccctgcttgaaaagtcagagctcatgcccatcccaagagatctgaagtatggaggctggaatacagaacttgctgttttttttttataaacatgtgtttttttcttcctactctgtgtgggaaagctcattttttattaactcttctctcaaagggtagacactgaaagcaggaaaaggctgaggtttcatttccagttctgtccttaacccattgtatatactctgggatcacatactttggtgcatacctcttcatatcatatgatttcagtttatctgtagtaagaaaaaaatgagtgctgttccattgccactggacaaattccagagcctagaaaagtcttttgagtgaccagtttcatttcctttaagactatcagacagataagaatgtcttctaattttaagcattccactgaagggaatttctaaccttacttggtcactctttttagtttctaaacgctctctcaccatcagaaagctccttctgttttcctatttaaactcttcttgttttttctttaggtccatatctttttctctggcctcactgaatattgagaacagctcatgttgccattggagaaggcaatggcaccccactccagtactcttgcctggaaaatcccatggacggaggagcctggtaggctgcagtccatggagtcgcgaagagt

SEQ ID NO: 42764 - DNA, 1847 bp, Bovine  19866881496276
  misc_feature (1)..(1): n is a, c, g, or t
ngtcgctcagtcgtgtccgactctttgcgaccccatgaactgtagcgcgccaggcttccctgtccatcactaactcccagagcttactcaaactcatgtccatcgagtcggtgatgccatccaaccatctcatcccctgtctcccccttctcctcctgccttcaatctttcgcaacatcagggtcttttccaaggagtcagttcttcgcatcaggtggccaaagtattggagtttcagcttcagcatcagtccttacaatggtcttggtcttgggtaaagcttattcccaatgctgcattgcctgtcttgcactgggaagaagtgaagacctggccataaagggcataactcacagggctccccatgttggtcttacaactttgcttcttctagcagtagctgcaggaatcgaagctgtggactgtgggacaggtgtggacagtagcacggaggggagaaatttgtggatcctgacctgctgttgcggttcccaagatgtttccagtggccccagcactatgggtatataggactggtccagcccatatccttaaatgcttggattctgtacaaagtcagcccccttcctcagaccctccagtcccagcttcattccctcagaccccagcaacaccttatctgggccctgctgcctattttcatcttgctcctgggaagctacttagagcatcctggctagaaatgggagcaactggtaggattggaatgaaaaagagggtctggaccatttggaggaaaagaagaaaattgaaggaaaagagtggactaagaaggaactgtaggacatttaagtgactgacagctactgaagcaaaatgggagggttagggtataggtgaaagggggtgagaggtctcaaaagacagaactatatgtatctttaaacaggcagatgaacacatttttcagagtttcaagcaagatcatcttcctttggtgaaatacaggggtttatcaggattacctcatcattgctgctcatgaaaatttacactgactggctaaaggtcacattccagggagaggctgaaacttctgttaggttaggtattaagtcttggtttgctgacgtggggcttagcacaagtgactccatttggggcctgtttcttctattaacacaatgtccttaatgaagctgtaaaaaagtgttccttttactcaattctgagcctggagtatgtgtccttttgttattctgtgtgacagaatgggaactataataaagcaagtctgctgcatctgaagataactatgctcatcttgaaaaaagtgttaggaaaggtagttacgtgctcagtctttcaacccctgtactgttgtataagaatgtgctttgggcccagaacatttccttacaaagatataaagagctctcacagtctgggctgggcatgtgcctttgtttgggcatatcttttcctattctggactggatgtgtacttctttgttctgcttaaccgtgtgcatcatgtgacacccaaccaaccctactgctgtatctgtttgcagcagggagagaattggggcctttgcttatagcacaagaagagtgcatacagatctgctggccatagggactgtcatcagtgaagctgatcttgctctttctcttcactggtaaagagtaaagcattgttcacacattgcctctgtgaattgtgtctttttgcaacaccaatacctacaaccatggagcaggttggacaccctcgggctgatactctggtggaagatgttgttataccaactactagcctccatgcagtgggactcctcccctggaggtggtaataagtgtcacttgctcaacaaaaagcaatt

SEQ ID NO: 42765 - DNA, 1627 bp, Bovine  19866880507229
  misc_feature (1)..(1): n is a, c, g, or t
ncctgctgcctgactttatttaagacttactatcagctttcttcaaaacatctctgcttgtgaatttcttggagcccactgacccgtttctcttaggcttgagccttttgattgtacaccctcagcctctccgggacgcctcctgactctccctgtcaccctctccggcccgcagtcccggccagcgtgcatctgcaagccgccgtggagcagcaccactggtgcatccccttctcggtggacgggcagccagcgccctctctgcgctggctcttcaatggctctgtgctcaacgagacctccttcatcttcaccgagttcctggacctggcagccaatgagacgatgcgccacggctgcctgcgcctcaaccagcccacccatgtcaacaacggcaactacacgctgctggcaaccaaccctttgggccaggccgccgcttgggtcatggccgctttcatggacaaccctttcgaattcaaccctgaggaccccattcctggtgcgagggccaccctgaaccctgctcccaccccctgggccccaactgggtgcagatccaggtgtccggggaggcctggcccacttcccactgtgatcctgaccctggaagttggagggcctggtcccggacagaaagtagcctggagttctggtgtccagctctgtgctggcttccttgccccagccttccccagccccaggagtcctgcacccctgagttattccattcactagggctggctgaagagagagccacaaaccagggcatccctggcccagctggagcagctccgcctccccctcccactcccacccacgaagggatgagtccagagggggaaggggactcactgctcctttcctccatgtgattgctctctctcctccctcctgctgcagtctccttctcgccagtgggtgagtagcccaagctggagggcaggttctgtctggtccctggagctgggagctgccgctggggcagggggcacagttaacccttgagggttcagccggggccagggtggggagtctgtggaggagatacaacctgtgacaaagcctttctaccctgtgtccccacagacaccaacagcacttccggagacccagtggagaaggatgagactccttttggggtaagcatgggaagtggaagcttgttcaggacttaggacagggagctgggctggaggctcctctgtatgtcatttccagtcagagcacagagagcagcagagtctggcctgagctccatcaacaccttcacagccgtgactcgggggccaggggaggagaaggcaggtgtgggggcctggctctgggcatctatgcaggatggagaagtagttgactagtggggagctctgagggttcaggatgactactagatccaaccaccccataccccaggtctcaatggctgtgggcctggccgtttttgcctgcctcttcctttctacaacatttcttgtgctcaacaaatgtggacgcaggaacaagtttgggatcaaccgtgagtagaggggctgtggaggggccgtcagtctgtcttcctggctttatttcctcctggttgttcccgactctgtccttctgtgtgggggcctgggtacacatgggg

SEQ ID NO: 42766 - DNA, 2716 bp, Bovine  19866880590315
  misc_feature (1)..(1): n is a, c, g, or t
ntgccacacggaggaagagggcaaacgtggggtgtgtcccccactcccctgcccaacctgcttgtcttgggccctcggaaaccagggagccaggaagaggagttgcaccgccaacaggcccgcagaaggcacggctgggttggggacacctaacagagacgctgctgcgcccatcactcacctgcggcccattttgggggtgaagggaggggttgggttctcaagagacctgtggagagaatgtcaactctgagccaccctcggctgcctggcccccaagataccagtgggcggagccctcccccgagccccgcccacctggtggagaggctggaggcagacgaggaggctgactggtgcaggcgggcggcctccgcggcggcgtccatgtccacgtcgctgcgagagcggggcacgttctccgccttccgggaccgcttcatctcctcccggcccttcaggctctcagaccggcccaggcgaatctctgagcgtgaactgggtggaaacagcaagagactttggggtctcacatctgaccagctctgacctgctactccatctcagggcctgcctcggcactgcaggcttccactccaaacaccagacccaacgtgcccaaactccccgtggcagacactgctcagtgacaaaccgcttttactacagactccttcctctccccagctaggcttgatggacagagcctctcatcttcctctttcctttaaaaaaatttttatttatttatcttttgggtgtgctgggtctttgttgctatgtgggctcttctctagttgcggtgtgcatgggcttcttactgtggtggcttgtcttgttgaagagcacgggctctagggcatgcaagcttcagaagcttcagggttgggctcatcacctgtggttcccaggctcaacagtggtggccccgcgggcttagctgctccgcggcatgtaggatcttcccagaccagggatcgaacccatgtctcccgcactggcaggcagatactttaccactgagccaccagggaagccttcatcttcctcctgactgatcagaaagggatcccaaaaggaagctaaaatctgggacttaatagaatcagacttgtggtgtatctggatgccaaaggccctgagtccccatcaggctgctgtggacaccaaagtctatcaccaggaaccatgaggtcctaccctccctgaccccgccgtctcctggccggctcacctggccctctgctctggaacgggttggtgcccacccgttccaaggcaccagagtccaggagagctggactctgctcgaggcacagctctccttgtacaagtacaccctcacatactctttagcattctccatactgcctgtcagaaaagtctatctgaattcccacccctccagttgcgatgtggatagtggatttcttctgttcttatcctgagagcatcctttctaggcttccagccccctcggagcagagcagcttggaagggtccttcaggggcatgcttactgatgggcagaaacctgctccctggcctgccattcttggtcactgagtgtctgtggggcttgagatgctgacgactgggtgctgctctttttcaagtcctgcagtgaatcagccctgtgacagctggcatctctgacccctagctgccccaggatggtgcctccccccatggccctgctgggctggttctttgctgacattattgctaatctatttgctgctctgcatctaggaccacagaaggcctggggagtctggagagttcttaatagcacagcagactgctgcagagaaagagccaaatggcctggtctccattcatcaagtctgaactgccaagggatacaaatgccgctcccctctgggttccacagtttgtctgcagggttagaacccacactgtcagctgatcccctactgaactcactccttgaagcctgtcaggacaatgccaatacagactacctcaaaacacttgcaccagtgccccacaatgggtcacttgagcatctctcatcaaaccttgtgcaatgaggttcctggggcttctttcaagtacccagaagtgagcaatgatcccaagaaggaaggcatacaacccttctctagccacaagttcctaggttaccgctgtctagaactgggggcttcttatacctgtttagtttctacaaaaacctttgacacactacgctgccgatgtcatttcttccaagactgtcagtgaatttataatcaccaaatccaaacgcttctgccaggatcctatcctcaccaatgtctcagggaaaatttacctaacaactttaagaatacgtttacaaatggtctcaaatatttcctcaaagtgctgacaatatatcttataattgtatatttgatatatctctaagatcacacctacctcagcaatcatataatttgtatacttaatttactcaataacattagaactcaacctctgttgttgttttgttgtttagttgctaagttttgtctgactctttgcaaccccatggactgtagcctgccaggcccctctgtccaggggacttccccaggcaagaatactggagggggttgctgcttctttctctaggggatctcagcctctgaccccggcacaaatctaacctttatcttgcctaaatctttggtaattctcactatggcaaaaccttttaacatatattaag

SEQ ID NO: 42767 - DNA, 1183 bp, Bovine  19866880593847
  misc_feature (1)..(1): n is a, c, g, or t
ntttgcctcctagtacctggcctcttgtctgcatggtagtgaaggagccttgggtcagtttcctagaccttcagaccccaattgcctgtctctgtgtttcattcaggaaggctgcagtgggaggaattgaagttagatggggtggtggacaggatggaagcattgctggggtgagtcttccttgtatcggagttcccaaaacagagcaagcacacaatacaacaaatggttgagaaagaaagagaggtggggcgagcttgcatacatgggtgcatgtatgcatgtgtgtgtgtgtgtacatgtggctgggacagggaaggagtagggtaaaggagtggctgagggaagcaggaccccttcttccttccactttgtcacgcttcttggctctgagtgctttgaggtccgttcctggaggccagggactgagcaaggtggctatttcctaacgaccaggtaggctgtctccccattccattctgcctgagggaggagcatgctctccctgcccctctgtcccttggaacaccactggtcttacttagtggcctgaggcttctgtcaactctgaggccgggtgaggtccccccaccccgggacctgggccctgtccccatcttcctcacccaggagcagggagaagcaattccaccccccctactccagccccatcacttccaatcacctgcccatctcctgcaataacccacgctctccatggctcctcagggccgacagcatggctgtctcttttccctgggtgtccagctccccccacccggtgattcaatctgggtcttatcaccccgaggcctagcccgatggtgtctgcctcttgtccaggctggttagtgctaatggaggtctgacccaaggctgcaggttgattgatgggggggtctggtccctgaaggccaagttcagaagccctcttctcatgtcctgggctgggtggggctggcgaggcaccactcctggggagggagggcttaagcagaagtgattgggaggaaaggaggttggaatatgctgggagagacagggtcggaggatcagatccaacggatgagcccagagacagtgcgaagagagagaccgtgcagaaaaagaaagggagaagacctgtagatgtggagacaggccaagagactgcagggaaggtgcatacagagaaggagaaaga

SEQ ID NO: 42768 - DNA, 1117 bp, Bovine  19866880607045
  misc_feature (1)..(1): n is a, c, g, or t
naactgaaagggcaaaactgcttccaagaaacttagctgagttctataacaaaatttgagaatatatataggaatataaaaatatctagcatccaactaaaaattgccaggtatgcaaataagggtgacataatatcaactggaatatatatcaatcaactgaacctgatccagaaatgacatatatgatgtaattaggacacaaaaatagttattataactgtaatctatatgttcaagaaattagaagactgggcatgctaagtatagacatacaagaaactttaaaaagaatgtaactgaacttcttggaatgaaaactacaaatgtttgagatgaaaaatatactggatatgactaatggtaaatcagagaaagcagcagaaaagattaatggatttttagaagagcaatagaaaccatccaaaatgaaacatgaagagaaaaaaggaagagtatcagtgagctgtgagacccctcagtggcctaatatacatgttaccttcaaaggagaagaaagagatggggaacagataaaaaatagctgaagaaataattaaccaataaatttccaaatttaacaagaactgtaacccacagatccaagaagctcagtgaactccaagcacaagaaagtaggaaaaaaattacaccaaagacatcacctacaccagcagacctacacaggaaatgatgaaaaggaagcatttcaaacagaaagaatgataccagataaaattccaatttacaaaaaggaatgaaggggatcagaaatggttactgtgtagataaatatattaacttccattttaaaaaatatttatttggtagcgctggtttagttgcagcacgcaggatccctgatccttatggcatgctggatcttcagttgttgtatgagagaacccttagttgcagcatgtgggatctagctctcccagcagggatcaaatccagccccctgcactgggagtgcagtcttagtcgctggacagggtttgatccctgcgttgggaagatcccttggagtagaaaattgcaacctactccagcattcttgcctggaaaactccgaagacaggggagccggcgagctacagtccatggggtcacaaag

SEQ ID NO: 42769 - DNA, 1748 bp, Bovine  19866880656565
  misc_feature (1)..(1): n is a, c, g, or t
nttggccttgctggtgctgggctagaatccaggctcccccacatcttccccgctgtggcaggctcatcaatgtccacatttgctgtactcagctagtaggtgaagagatgttcatcatactgactgaagaaaactagcactgagaaggtaggagagtggtgtgggaactgtgagaaataaagcatctgcaaagaccacagctgggttcaataaataagagaaagaaaggggagagaaggggatgcacactcagaacccaggaccccaggacttcggaggctctgttgtgcccacacctcaatgacgtgctgcaccagatcccaacttaacaggctggaagggcgtaggacagcaggaaggagccacacatactgagaccttcccaactgcaggacaggaaatggctccagccgtccagtctcagcaaccagactaccatatagatagagagcgaagtgctgcaaaattctggaaagtagaagctgtgtctgggaggcttggtgtacactccagtaccaaggggaacacgtgtttgctaaaggtgtagggacagtaacaatgaggtgaggggtcagattctgctttggggactcccaagggggccacccagtagacctttctttcccacttactttgctgaatgatttcatggttttctcttctgtcaatgacttggtcatccactgctgggccccactgagctggtcgtcacctttgatctccacaaagttgatctcctccctccctcggttccttttgccctgcagccgcttaaactggaaaaggggggagaaattcaggagtcgagggtctgggtaggggatcaggagatgtcaccaaggacccagagttcatggaatgattttggggctccccaattccactgcacccttaattctctctgtgcagtatgtcctttcaccatgccacctaccaagctgacaggtgaaaggctacttctcacaagctctcctggcctcaggaaaaagaaggccaaaatgtattcccaaacgtgagtgcagagattcactggtatgaattttactcaaattgtgtataaattgtatatgcctaaaagaactgcacactattttcaaattaagaattaaaggtacaaaaacaatcctaggatttctcttctaaaaatcagttcttttaacatgtctgttctttctcattggttcagtatcaccaaatcagcagaccacacaccagattagacattagaggagaaggcaattcgagatggagagagaggaagcctcaaaaaagagcctggcaaaatttccaggagactgctactctttgcccttcctccgaaagaaaaaaaaagtatcacactgttaagtcaccagaagatgtgctgaggagtgtaggtgaagaggaattaaattcaagaacacttggaaatctgcagtgaagcctaggttgtggtctgagcatcagcaaggcctctctctacccataaggagctgacttttgccactggataagttccctgctgcctcctaggcttagaacaaaaagggcctaactactgaacttgtcaaggaggacatacacaggaaagtggacgaacacaggacgaaccacaggcagaagtttacaaagtttctgtgaaaaggtgaggagaatgttatttttataagaccttgcatcccctatttctccaacccactcctggtaggctgcggcctccctacagatggaatactttatctcctgaacatgcctggacggtcgcagaa

SEQ ID NO: 42770 - DNA, 1389 bp, Bovine  19866880718916
  misc_feature (1)..(1): n is a, c, g, or t
ngcctgcgtagggaccctggtaggtggactttgagggctctctgttctgatcaagactttgaaaactatttgccattaagccttgctgtgtcctgtagactgaccagggacagtgtgtctcccctcagtgttgttggaaggaggaagatgaatgttttgacctcattagcaaagaaagagaaaaatgtaagaaaccactggtttatatccagccaatgaataacagttgggattttgtatgcagttacagataccatgaaggcagtcagtgcaaattaaagcactctaattactctagggggcccttcaatttaaatgtatgttttttgtcaatactttaaatgaaaattaatgctttaattattctgttttttaatgtattattttgatttaatattaaaccttatttttcacgtataaaatgaatgttcttagaggagcatttcttggagttttgggcaaaagtggaagaattaggaaaaagtgcaggcagggaggaaatagtttctcagccctgcagttgcctgagttggccacagtaggggccttgcccttgccttcacccctgttcctccacggtccacagcaacatctggccagctcacctctaaaggggcgtcatcaattcctgaactgaaaatctggtaatgcaaacctggtttgttcccagttttgtcaattccataccacccttatggtggtttatttttatcagagatctgcaacctccctgcctgctaggggagggagtcccccgtgcccagggctgctagatccaacgaggagcaggaagcatgcctcatgccttctcctctctgctcacactggagcgtcctggggtcttctgagcaggaggagcccggctgaggcacggtagaggtcagcagtaggagtcatgctggggaagcagctaagggagcaggctgtgaattgaagcaggagagaatgtctttatttcttgtatctcttccctagaaaaaaaatccatctgtctggatggtgtagatcagaaaaaactctggttcttgagttgtagggtaggtccttaggatctgtgctttggctggtccgcttgaggggtctgtggtgtgagtatcaccactgcctcttggatgaggttttctccgttctctgcactgtgccctcagctggtgtgttttctctcctccttgactacaggattattacagtggtggctactatcccgcacaggacccggctctggtctccccccaggaaattgccccagatgcgtccttcattgatgacgaagcagtaagttaataaagccaaagtgaccatctttgacccctagacaccaggtttcaagtctgaagctaaaggaaattctttttttttaaaaaaagcaaaaaagctgtattcatttgg

SEQ ID NO: 42771 - DNA, 3302 bp, Bovine  19866880735722
  misc_feature (1)..(1): n is a, c, g, or t
ncgaatccagcttggggtgatgcaggtctccccccaccgccctccagtgcctccgtctggtccccaccctgacctggggttgctctctgggcctctgaggcctgaaccccgagcctgaagagtagagatcagcgggagtacccaggcgcctcccctgaactttggtctggctgaatagctggcctgaggccaggagcaaggttcccctctccaagggcagacttcctgctggccagaggccggggaaatcccagaagcgagcttcccctgccccacaggggctcccagcggccaggccagggcagggagctgctgggccctcccacagcagagggagtgccaggcagggggaactggggctcgggcccaccaaggacagaggacagggcgagagaggagctagggagaccgaggagcagggccagaagcccaggagggagggagaggggacctccttcacctttcatttctgggtatcaggctgtatcactgttatcctgctcaggggagagggtgagggctgagggcacagtggaggtgggcagccaggagacactgagaggtgggtgccgggtttgcctgtcaggaggaggggatctgatcgtgatgggctgaggtgggggaggagacagctggcaaggcccactctccccagctggtggtcctgtgggaagatggggaagggaggaaggaggtagtaagagtgaggggtttccacgtggcagaaagcaaagcccccgctgaagacaacacagcacgcagagggtggtgctgggcattacagtggttattcttgtcctgtttccctagagatctcattcgggccccctcacaacagctgtggtatgttcctcctccagctcccctgctgggaccaggcccagaatcttccctgcagtgagcacccccccccccacattctgtctccctcctttgcagctaactgcccctcctgaccaaacctgagcctcctcctcctcctccaggaagctctcctagactgacctcccccatccctgcattccagggctcctcatccccaccacaatggccttttctgggctctgataggtggctgcataagtgttctacacactgtggtttcctgggtgtgcctcaggtctcccattagtaacaagtccagggcagggaccttgacatcaggtcacaagccagtccatgtggagagggggtgggggagccacccatggatttttacagctccaaatcctaattaaagtgtctctttctccatcacaacctgcccaaacctggccttatatcttccctttcacctactttcttctcaaacttccagttctcggccaactggtctacccttctcctactcactgaggctagaaacctggagtcatcttgactttctcctccaacagcccagatacaggctgacatccagccctgccttttccagggctccaacccaggtcacttcacctcatctcaagtcagcaagcattcttgatcacctgccagggcctgaccgatgtcaggtgctggcacacaaaagatgagtaaggcagcagccttgccctcaagggcgtcaccgcgctgttagtcgcactgtaacaagttctgtactggaagccctgagagctttggagtcggagagccgcatttccactggggacatgaggaaggctgcctggactgtgtctgtccttccttcatggaaaggacaaagttctgctcaccagtgactggctgggggacttggacaagttacttcacttctgagcctttgtttccgcagcaacaatatgggaatggtaaacccttgccggatttgggaggattagctgtaatgatagctaacatttgctaacccttattaggtaccaagccctctcctaagagttctataggtaacaggtcatcttatccttacagccctctgtgagacagaggacgaagtcatccctattttcagataaaggagctaaggctcagggatattaagcatattagtgagcccaactaaaaaggactgctgccaaaatttgatgcaagacactgtttcataatttggtcatactcacttgtgcaagtttatcttcaaaataatgtaattattttgttaacaataattaattgtaatataactttttttgagagctctactctgttccaggctgtatgatgatgacttgcatttaatcctcagaacaaccttgaacagcagatattatcatattgtgagaaaatcaaggctcagaaaagttaagtaatgtcccagtcttacagccagttccctggatagtcaggctttaacccagatctgtccaacaccagagttttctcttctgcccagcaccctcccgtggctcagcctgtctgctcacctcccaggctcacacagtcacctcacgtgttcaccatgtttgttaatgctctgctgctgctgctaagtcgcttcagtcgtgtctgactctgtacgaccccatagacggcagcccaccaggctctcctgtccctgggattctccaggcaagaacactggagtgggttgccatttccttctccaatgcatgaaagtgaaaagtgaaagtgaagtcactcagtcgtgtccgactcttagcgaccccatggactgcagcctaccaggctcctccgcctatgggattttccaggcaagagtactggagtggggtgccattgccttctctgctcactccccaccaactctccacatcacctctgattcaccccctccacttttcagattcccacccgccatcacaggctcagcgtctccataagccgtccacactgagtcattgaagcccaccctggcttctcccatacagcatgtttgggacatatattttgacacttgaccatatttaattggggcttcccagatggtgctagtggtaaagaatctgcctgccaatgcaggagacataagagacacaggttcaatccctgggttgggaagatcccctggaggagggtatggcaacccacctcaatattcttgtctggagaattcaatggaaagaggagcctggtgggctatagtccatggggctgcgaagagtcaaacacaaatgaagcaacttagcacacatgcacacatttaattgagagtgtaattatattttatttggcattgtcttataattatctaatatttagaaatcatacatccccaaccagtgcaaaacttccttgagggcaagaaacttaacgaaaatttcccttcacttcttttgtctcctcccctcgtcacttcagcagattgctagacacacagcaagtgctccttaaataaatcgaga

SEQ ID NO: 42772 - DNA, 1454 bp, Bovine  19866880829478
  misc_feature (1)..(1): n is a, c, g, or t
natgggtggttttatggtttgggagactttgcgcctattttgaggttattggttgtgttctggatttttcagatcattaaatcagtgattcaggagaaggtgtaaacaggctctgaaggagagccattctctaccatattctctcccacacctcttcccttcccgtccctccctctcttttccacctggagccagaggggttccccaaagacatcagctctgccccctcctccaccctcctgcccagctgcctccagccccaagccagctgaagctcttcttcattttcccctcttttctccgacccaggaatctgggagtctgccgtccttggggctgaccctggccaatgtcaccagtgacctcaataggaagaacgtgacgtgctgggcggagaatgatgtgggccgggctgaagtctccgcccaagtcaatgtctcctgtgagtgccagtgactgcctctgtgcccaccccatccctgcttcccggaaaaaaggatgtgagggttgggggctgcaggaaaggggtgggatgtacgtgtgtccacagctgctccctcccagctctttccagattcccatgaactgatcctttgagggaagtcctgggggctcgtcaaggccagagggatggagagggatttctttttggccccctgcccaagtcttgctactgaagccctcaacaccagctacatccattctctctgctcccttgtatttcttcatgttcattcctctgtaggactttttgccctacttcctagttttaaaagaagaaattctccatgcaagtttctctttaggctccctgcctaatttctctaggtctgccaacaaattatttaaaatcttctacatggtataattttttcttcttttcttgggaaacatactttacatagatatgtacataaaacatatacactttaaacaataattcggcttacagacacttcagaagacacccccttctcactattcagaaccccatccttctcctccaccccattctgacttttgtgacaatcatctccttgcttttaaaaataattttacacacatatgcttccctctcagcatggttgagttttgtctgatcctgtacgttatataaatggaatcatacctcatatattactttgtgtctaatttcttctgctctacattatatttgtaagatttgtttatgttaactggagtaacaattagttcattcatttcactgctgaatagtatgctgctgcatgaatgctggctggaattccagtgtcaattgggtatatgcatgctcctctgtccatgggattttccaggcaagaatactggagtgggttgccatttccttctcctggggatcttcctaacccagggatcgaacctgcgtctcttacatctcctgcattggcaggtggattctttagcagtagtgtgcttcacccagttcttgtcca

SEQ ID NO: 42773 - DNA, 918 bp, Bovine  19866880898130
  misc_feature (1)..(1): n is a, c, g, or t
ntcattaaaataatgaaatagtctcataatggttcttaagtagcactgcccacatgtcctgcaccctctctggagacccaacccccttccttgtgacccatcattaaaggagtcatgcctggtgcagaaggagttgccctctctcacaggctatattgtcgggattgttaaaaatggaggggtgattcagaatatcacttctgcccctgggacactcggggacttggatgcagggggagaagaacattgaaagctaatgggcccccaaggcagagaggagggtgggggcattctggatggagaggcgaggtctggtggagctctggggacaggcccggctttcgtgcctacctcactcttcatacccatggggagcagcgctggctgaaatagagcaggggcccccagcagcaagcagggggacggggccgtccggatctcccacagagggtagttaacgacgatgagcttgctgaagttgaacttgtaagtgaaccttttgcctttggtcttgtgcaggatcctcttattgtagtaatatctggagatcccaaggatgagagcaggaggttggcagggaggatgcattcaagagacccagccatatccctgctccccaagattggcaagattgacccctagctgttcttggataaccgctagacacactccagagcatttcccaagcctcagaggggcgggaattggacaggggtgccagaaaccacagcctttttctctgaactcttccctctctggtcacgttggctgcctcctctcacctgagggcccggctcagcttgtcgtaattcatctgtggtttgcacttcctgcggccccagaggcgggccacctcgtctggatccttgatgacgaattccccgtattctccctgctgccaggcaatgacatgggtgg

SEQ ID NO: 42774 - DNA, 1206 bp, Bovine  19866880919092
  misc_feature (1)..(1): n is a, c, g, or t
ntgtagagagtcagcatctgccaaaaccggcctcagaccgatccccaccctttcagaccaacagccttttcagattcaggtccctctcggtgcagcgaagctcccacgcaagagggtttcagaccttgggaagccacacgagggggacgaaggccaggcctgtcccaggcagcctcttgcatccgtcacaccaccacaggcggaaaagctaaggcctgtggctgcacgtcagcatgctctgggtccccaacgcagccttcgtccaaccgcagtcacctccctgtgcactcagtgagtcacaaacaggccagcacctccagccacaacccatatctgcagagcctgctggcctgcaaagcttcagctggttggtctcccagcagggcccagggaccctcactgtctgtgagctgcaagctggtggacctgccctacaccctggggcagtgaactgtcctcctagagagtctcatgatccagttttcacagggtctcttcatcttagtcttaacatccatcccatcagtcacaccaagtacattaccttctaagcctggagaagcccctccacccccatggagaaacagcactcaacccgcgcttgtgtccagctcccatgcaccactcccatctaacctcactccaatcacaaatctggggctcttcttctgggcttcctttattacaagattttcctcctgattcttggctggacatgttctcagcaactctcttccatccagcgaggggaggacagaccacaacagccagcacaaccttcctcccaccccaggggttcatgtcacaccaaacaccccacaaggaggtaggtgggctctgcagatccccaattcacaatccctgaaccagtgcccacagacctttgagaccctcccattgggggcacagagaggaggaagagccccagcatgaactggtaatgggaaaacctccccattttcgaggtcacaaacatttcttatggttctgagaaagaacccccatcatcagcctccagcctgcagacctgctccccttccctggagtaagaatccttccctcccacccttgccaaactcccaccaacccatccagatgcagctcagatggccacctggaaccctgccctatcctgccccagataaattaggcgctctctgtgctgggctcccacagcacttcagcaagttgttggtcgtttgggga

SEQ ID NO: 42775 - DNA, 1132 bp, Bovine  19866881090322
  misc_feature (1)..(1): n is a, c, g, or t
nagtaggaacaactgagtggctaccaatcctcccagttgtacaccacttaaatgacccatccatgtctttatgagatatgagggctgaaagttccccaacatgctaaaacaaagaccccattagatgacaaaggacgggaggaggaaactcagggaccccaaatctttaaaaatgggtatgccaaggatattctctgttgaaaagttatagtcaaggtttctgtcttaatttatgtcatattgtgtgaatcagtggtgaggataaatctgtaagtgataccatagaaaactcgttacagagagacaaaagagaactaactaagcaagaagagagaaactgaacagctcatctggcagtctaaaagcaccagagttacacctcgcttaactggaaatcaggctctgacaacgccagttctgtggaacacagtaccaaatccagaagtgaaaaaggcctttaagcgcacagaatagctaacacagagcttttgaaccaaagtcagatccttagggctacacacagagccttactgagttatgctgaacaaggttcctgaaacctctggcttcccagcccatggtcccaggaagaccaggtgggtgtgggtgaaaggcctgctaaggagggaagtgttttgagagcagagagatagcaaacagcttaagagcccaggacaacaggactcaaaagtagacacagcattgtgctgtatatcacttcactttagagaaaggattataatgcctcgtctggtgcctgatggctcatcaagccctttaacacacattatctcatttcaactccacagcaagcctatgaagtagatgctgaggggaaaaaaaaatacacagagagggttattgacttatccatggtcacactgattaacgagtgctggagctgggaataaacccagattttatgatgtctaacacaggccttttcctctacaccaggatgtctcctttttgataatgacgactgtgagtcatcaagaggttagtttgcaactagcagacgctgttgaagacaacagggaagtaggtaatatgcttattttttttttaattaaaaaatgatacaaatagacaaaggttggcatttaggataaagatcagctttccattctca

SEQ ID NO: 42776 - DNA, 1025 bp, Bovine  19866881193648
  misc_feature (1)..(1): n is a, c, g, or t
ntttttggtcttgcatctatcctgttgcaatggcaatttcatttggggaggatcagagccgggccttaacagatttgaaaaatgctgggtccttaagcccagggagacacaagaacagaacatttccttcaatgttgaggattagagcagacctggaggcaggatgcttaagtctatgctccgtgctgcacggaatcctgagggctcagggaggccaggatatacagctgtcctgcccaggggaaggcccagctcctctcttctactctcccacttcccaccctctatagaattcctgcttccttcgtggcccctaccctgtatggcagagacccaggtgtccagccccacctgggtttaatttctacatgactctccgccaacaaactctctgatccagcagatgcaataacactgcgcagggtgaggcccttctacaagtgctgcatttggctgggaatctcccggtccccgttgggggtgagggtgaggggttcacaacactcccgctcttgccatcactcctccccgactcagcctcaagggaatggtggagagaggtggggcagcctcctcttcccaagcccccagaccccttaattgtgcatacatctacatccactcacaccctactcttgcaaccattcaggagcctgcccatctgcattccttctgcaaaaccagccactttccacatagccacactgcaatgggaacaaagctccagaatgtttctttcctaactctagcttgtctgtttcttcctcacccctatcctgcctctgctcccccaccttttctcaccaatctggcaccccccccacccgacttgagtctccaaattcctgggggagccccaagagaggtatgacccaggctcctagaaaggggaacgcattgccccaggcagatctgcagcagatttggtaataattaaaaggccagcgacactaggaaattccttctccttatggatcccggcgggaaattaaagccagttgtttgtgactgagtgactgatgctg

SEQ ID NO: 42777 - DNA, 2705 bp, Bovine  19866881301688
  misc_feature (1)..(1): n is a, c, g, or t
nggcctgtctggaggggaggcaggcaggggttaacctgtgaaggtcggtagatttgtttttccaatgactcccatcaggggagccctagagaggccagggcatgatgggaagtggcatgtgggctcctgaaagaaccccccatctgcctgcagagcctgattggcctttgcctagagggaccagaagtgttttctctttgtgtgtgtgcatgtgtgcctgcaagtgctcagacacacacagttgctggtagagctaagcacaggggccattaatgacgacagggagaaggtatgaagtaagccccagcgagccagcctagcctgcccaccccctttaaaacatcaggggatgggcctgggtatttaagatgcctgccgtgttgcttgaggactgggtaggagtggaggggagtggacgccggagacgttagcaggactcgactagcaaaccaaaagattcagacccgaatcttctaagtgaggaccatggaaagtatccttgggagaagggagtgcaggagccaggtaagcaactctattaggggaaccattctaggtgacttggggaaagaaaggaaaatggggccagggtcctgggacctgaaaaatccagacacacccagttccctgagggaggaatagacttggggtccagatgccgttgattcaactcacaacccccgagtgcccagtgcttcctgccctgaactgggcaccatggtgattgacaagggccccaaccacaggagagtccctccttagaaatggtgacagagagagagaaagcaatgttgcagcaataccccaggtattctggtgtgagtgctggacttagtgcagcagagcctgaagggaacgtgattaactcagggtcagagggtcagggaatgggggcttgacctgaggctttcaggacaagaactgaggggttaacaggccaaggaacttttctaaggtactagtggggcccagtttatcgacgtcctggaatgtcaggctgaagaatttaaacttgaacttttggcaatggggagccatggaatgttccttcgaaagtaaacagatgctgggaccaaggttctagcttccttaggcctgggagagaaagggagtgtatgaagctcagactattgcttctcagtcacagaattcattcactcattccttcatcaaatatttactgagcaccaattttgtgccaagcactgtatcaggcaccaaggacacagcaatgaattacatgatgacccctgcccttctaaagcttacaacaaacaaaagaagtaaattgtatattagccagtgttaagcatttgaaggaaaactaagtaggaaagggagtaggaggtaatagggtgatcagagaagtcctcactgagaaagtgacatctgagcaaagacttcaaagaggtgaagagccatggagagggaagagtgttctagccagagggagcagaaggtgcaaagaccccaaggcagcagcttggcaggctcgtttgagaaaccacaagacagccggtgtctctgaagaaaagagaaaaaggggataaagtgggagaagtgcagaggccatgtaggctgtggtaaggacttcagcttttcatcagtgagatggaggccgctagggtgctgtgagcggtagaggagtgtgatccaacttgtgtggtgtgtttccactctggctgtggagtggaggataggagagagagggggagaggccggaagtggggagaccatttaggaagctattactgtaaagtctggagaagacgatggtgaaagcagtgaatgcgattctgggtatattttaaaggtggagctcacagggtgtgggggttagagaaggaaaggaatgatggaggctttcgctttggagtctgactgcaagaaggaagttgcagtcaactgagaaggggacgtgagtttgggagggaaggtcacttttgcccaggtgggctcctctggtggggatcctgtaagctgcggatgaagcctctgaggccgagagaggaggttccccccacacccacagcagagcctgactctgccttaatgttccctcccagtgtggttccctcctccccagctgccagagcaggatggggtgcttggcccaagctgtgctgatggctacctgccgcttgtacccacagtgtgccccagcctggacatccgctcagatgtggcagagctgcggcggctggagaactgcagcgtggtggagggccacctgcagatcctgctcatgttcacagccaccggcgaggacttccgtggcctcagcttcccacgcctcacccaggtcaccgactacctgctgctcttccgggtctatggcctggagagcttgcgtgacctcttccccaacctggcagtcatccgcggtgcccgcctcttcctgggctatgcgctggtcatcttcgagatgccacacatgcgggatgtggggctgccggcactgggggccgttctgcgtggggctgtgcgtgtggagaagaaccaggagctctgccatctctccaccattgactggggtctgctgcagccttcacctggtgccaaccacattgtgggcaacaagctgggcgaggagtgtgccgatgtgtgcccaggcctgctgggcaccacgggtgagccctgtgccaggaccaccttcagcgggcacaccgactacaggtgctggacctccagtcactgccagaaag

SEQ ID NO: 42778 - DNA, 1281 bp, Bovine  19866881347372
  misc_feature (1)..(1): n is a, c, g, or t
nttctgtcacctccaccagctttgttcgtagtgatgcttcctaaggcccacttgactttgcactccaggatatctggctctaggtgagtgatcataccatcatggttatccaggtcattaagatcttttttttcacttctcctgtttcctcagctatttgtaaaagtcttctcagacaaccactttgccttcttgcatttctttttctttgggatggttttggtcactgcctactgtacagtgttatgaacctccgtccatagttcttcaggcactctatctacacatctaatcagtccctcgaatacacacacacacacacacacacacatccatagttcttcaggcactctgtctacacatctaatcagtccctcgaatacacacacacacacacacatccacacacaaataccataggccagcagaatgatttgtgggctggtcactgcccttcagctttgctgtctagaagatcacagcccttttcttgcttcatcacacaccctctaagctcggatgaggaggctgtttctccttatttttacagagcacctgtcctgtgtctggtgctggggagcatactgggaagaacaccctgtaatctttgccctctggcagggctgacacaccagatgctcgggagcagggaggaacatttgtgtcagaatttgggttgcattgtaaagaaaaggataaagaaatggaagatttctgggaactgatagggagtttctttgaaggtctgttaaatgaaaaaaagtgtaaaaagtgtaggatactacctgttgtggaaacaagacaggaaaataagaatatttatatgtgtttgtttagtttttacaagaagaaacacagaaaaccaaaaacaaatggaagtggttacctggggaagagtgagatgaagggacaaggacacttctgaatgtaccttttaaattgcattttgagttttcaaccatgtaaatgtttgacagatttaaaaaataaataaccctgaaagagcaaaccctaaagttaagtacagatataaacagaaacctaaggacttccccgtcggtacagtggttaagactccacgcttatcctgcaggggatgcagtttggagccctgttcagggaactaacaccccgcatgctacacagcacagcaaaaaaagaaaaaagaacaaaacctaaatgtatctcaaattgatagcataaaaaactcatccaaagtgactttcacaaatagttcagtcagttcagttcagtccagttcagtcactcagttgtgtccga

SEQ ID NO: 42779 - DNA, 2705 bp, Bovine  19866881349784
  misc_feature (1)..(1): n is a, c, g, or t
ngggagacattccttcttagtggatccttcatccttcaagcccaaaggaaatgtcttatcttgcatttggaagtgaaaggcggttcttcatcgacaacatagaggatatgaggtctcaggggaggcctgtgtccccagtacagacatgtgtctcccaggcggtgcctttatatccagactgtgactcagaacaagtgagtcaaggcttagtgagtcagggtggggccagagaagtgctggagaccccccactgcacgtcctccactggccaacaggggagggggctctgctccttcccagccattttaggaatcctggcaagttacttccccctggctggggctcttccactcccacacctgcctactgcctttgcctggctccttcagacaggccggagcataggaaatcccatcctgccagagcccatggacaccttctaaggtctgaagttcccaggtgaggagtggtgagagaaaattaaacacctctcccccagcctcatacccaatccaggcccaggggcgcctggctcagcacaccggaaggcagcccagaaggctaagcccacactgactgccagccagggttctgaccaccacacccagggcccaggcctgacctgacccaggaaccggaaaatctggggcaggagacagttggggccaggaaagtgtggcaagctggagaggcagaaaaggtggtgccttgggtgtggggggagggggcagagagagaaaagatgggtgaggccctcgggctgtgcaggttttctgggactgtgaaacaggaagtgaagaaaggaggaaggaacagaaggggaaaaatccctgagtcttgcaggttaattgttaagtgcttggagatcccccggggaagttaggcagaaggaagaggaaaggaaaagattaagatggagtcacaccgtccttccaggcaggtcttgcctaccacgtggtccctctggctggactctgcaaacactgggctgttccagtctcacccagagtcagtcaccctccccagaagtagggcctaaggaagaaaagtccacacatttgccttcaccatggctgagggctctggttgcctattatatggaacagttagcaaggctcctccattcctcctccatctcaggaagagccagagtctcttcagactctgccactctatagactaagacagcatccaagggtggtaaggagaccccaatttgtctgctcttttggcattcaagcagaatgtattcggaacataactaccttgggtgtaccactccctctaattttcataatcaagacccagagcgcaggcaaagggtggggtcctatctctttgggatccagtctggtccccctcccccaactctaacttcatctaaagggtccagccctcaaccgagcaacagactgccccctgtcctagaggcccgggatgaagaagaaatagacattattcccagccccagtgctgcccttactccaaggccaccagaaacccgaaggtcttcttcatatgggccagtatgcatccatatggggccctcccttctctgcagccctaaggggtcctctgcaacccacattccagctgagccccttccccagtctctgggctttctcccacccccaggaggtaggagcagtagagacctcggttcagttcttgccctgcccaccaggaccttggcatctgaaccaagaagccagatggatcaaaggtgcagggtaaagtacacgagtgtccacacaccacaaacagacatacacacacacagctgaccgtggctgcttgctcacactgcccccagccgccaccaccacccaagtcccctaggaggccttggaagttgggagagccctgcttcactctagacttcactcccactccagaggccagacatctagaagtttccaggaacaaggagctcaaggcatatgggattaggcacattcctgaggagagggtacagagtgaggatctcctggattttctcaggctggccccaaagttggtctgcacactctgagcaggacccaggggggcctggaccaactttcctcagggcagggtctggcccagatgaagacacagactcacgtggaaaagagcaacccacagccaataacgcagttctacacttggccccctcgtccagaagactccttccctctacttctctctgcccttggatttcactctatactcgagggccaaacccaaaggccctacaccatctttgaaataagttgccggaggcactgtcccttgtgacaccccaacctcctccaacaacctctggcaacctcccatacagttacttcacctgtctcagttctaggggaaacacgatgaatgctccaggctgggcttttgggccccaccctcccacctggccaggtgctgggcggaggtggtggtggggcgcctcatattggcgggctgaatcaaccacatggcagactggaccgttctggcgggagaggcttaagaaatggggaggagaagcaactcgggttccctccacctccacttacagggagggcagcctggactggacttctcaatccaacaagggccctgccaccctcagccccaagtctgagttggcagcacacgaagcagtatttttgtggggttgaggagtgaagggtactagcgggtgatttccaaaccaggcagattccctcttcttccgcccc

SEQ ID NO: 42780 - DNA, 1374 bp, Bovine  19866881357400
  misc_feature (1)..(1): n is a, c, g, or t
natggcagcaccatgtttggcacgtagtgagcatttaagaaatgtttgttgaattatacacacgtgttcatatgtgtgtgtataaacgaatacggtatttgaagttttttctcccgtcttggtcagggtcttcgttagcagggaaaaaagggagaggacagggattgccagcaatgattcagggcagcaagcacttttgtttttatgtcttcgagacctcttctatatgctaatcaagtgttctagcaatgaaacatctttccctttaacagtatgtgttgtatcaccctgagaaaaccagccttatggggacacgcattagcacacatcaggcaagcagaggacagccccggacaatacgtaatcatgcgccaaaacgcacacagcaaggaacgtgtctgctgctgtggcttgggaatcccctgtggccgagcactagggctcagtgcctgcaccgcagcggtctgcgctcgatccccagtcaggggaccaaggcccacaagctgcgaggcgcagtggagaaaagtgacgaaagacgtatttacaaaacagacatagactcaagacaaagaacactaacttatggctaccaaagggaaacggagggataaacaaggattttgagattaaaagatacacactactatatagaaaatggataccaaacaagatgtactatacagcacagggaactctattcaatatcttgtaataatctataatggaaaagaatctgaaaagaattatatatatatatatatatatatactgaaaaagaatatatatatataatggaatcgtctaaatttgtaaacattgtaagcaacattgtaaatcaaccatgtaaaaaaaaagtaaaaatcaactgtaatacaattagaaaaaaatcacacagaaataacttaaaaaacttccctgttaatatataatatgctcttatttctaaggaattttaagggcctcaagtctcagtccaagtgattatggtgagatgaaaagagcattaactgataattaggaaatttatattctaaatttggttcctctacatgtatgattttgaacaagtcccttcttctctctgggcctataaaattagagggttgaactggatgatctcaaaggtcccttctggctattaatgtgtggttcatgaagtctgggagtcctgacaccctaaaactctgccggaacccaggcgtgcttctgtcgctgcgtctggtgtgacgagcccaggagcctgggtcaggggcggttggtgagctcactttgctgcgtctcagcccagttcccactcctcctagaagaaggttgagtagctgcttggtgctcttcccaggggaagcctaacagccccagagggccagagggtgt

SEQ ID NO: 42781 - DNA, 855 bp, Bovine  19866881398146
  misc_feature (1)..(1): n is a, c, g, or t
ntggacagagatgaaggggcccttaagggcagaggaggtggcgggaagtaagaagggagggaggtctcctggacctttaaactgctttagatggactgcaggcggtaaagctggtgtcagctgtccactgtgggcagagccccattcttggtgctgagggtggtgggttaccaaagatacagaagacagccctgaccgcaaaagtatttccagtctaatgaggatattggcagactcttgtaggcaagtattctgagcttgagatttttgcataataactttagtaaaaataactatcttgtaagtatacagacttaaaaactgctccaagatgacttcttccccctaggatttgggctgtgtagtttttttcttaatacccatccttgttgcattggggcaagtgagaaacttccacttttctttcaatgtgttaatgattgttctcttcccttacagaagaaaggtgagcagccaacaggccagcagcggcggaaacaccagattacgtacctgattcatcaggtgagaggcctgagggccctggcctgctaggcaggatccctgtaaacctggggatttgaaggctgagatcttggctggaagcctgtcagacaacctgcttccagcgggcaccctccgcagttctccacatggccactaggtgggggatgtgtccttcagaattatcctactctgcctcaggctcacttcatgtaagactcaagtacaggtgcttggaataaactgtaaatgaacattcaggtatttaaaacataagagagggggtgaaatgtttcttataaggttcttttaagtacaagttcatctataatttaaaaaacgaaagaaaaa

SEQ ID NO: 42782 - DNA, 1570 bp, Bovine  19866881418140
  misc_feature (1)..(1): n is a, c, g, or t
nggaagccactgtaagtaaagcctgatccggcgggggtgggtgggggaggtggccctaaagacaccgcaagcagagggctgtgggcctcccttcgggtgggcccagagttgctgggaacctctgcttcctcgacctcccccctgttttatatcttcccagccggaaacatcgtgaggttatgaaaacaaactgccagtcctaaattcatgaaaactgactttagcccagcctacagcatggaggaaaaatgttcttggagaatatgtatgggtcagaccctgaagtacccaaccaggctgggagaggacagagccagggactttacccttcctgagcccaagttgaaggaagtctcattcctttcaaagcaaactgcttgtttttcatgacataaattatgtatattctttaagaaacataaagagaaaatacagataagcaaaaagaaggtataaatcacacataacctcacctcccagatgaatgtttacgcttccagatgcttctctgggtttgtacatgtaaatgcaaaaaatcgcatttatattatgtgaaacctcctcttgccattcttcagtgcatcacggccatctttccgtggcactaaatgtacgtctgcagcatcttttcaatgatatcacaattagatgacaacagtcattcgtatagtgctctatagcttacaaagcacttggcatccattatcttatttcagcccttggccttcctaagggaggtctctcccttatgtaattctgcttccaaaaggggccacctctgcctccttggcacctgggcctccccctccccctgctccccagaagtttctctatagccctacctgcatccttcctgctttgggcaggagtcaatttccagttgccatctgcggagatgcatgctggctagacccctctatctctccatctttctgcctgacccagctgtcaacctctgtccttctggtcaccctctctcctttctctgcccctcagagaagaagggacctctgttttgttcgcttgagaatcttcctgcatagtctcagaatgtcttccctgccgccaccctggttacccttcccttttctccccctgcaccgctgcccacttcccttcttctgtccagtgctgcttgaggaccaacttgaccccacctgatagggcgggaacccaggtggccccctctgctccctcaggatgtgacccccccctcacctccagatacgactaaacaccaagtttccctgttgttgcttatgagtggggaaggtgggggcagactcacagagagccgaggggtggagggtctgcggagcctccagtgctcgtgtgtggagaggttctgacgcctgtctccctgttgcccgggtctcccctcccacaccccctgccttggcttggctctctcccctcattccctccccagcatcctcatcctttcctgctccccctctgcccgacatctgaccatggctctggggtttgagagctgcagccactggggatggaggtggggatagaggcaggaaggaattttgtgcctccttctctgtcctaggatttcagt

SEQ ID NO: 42783 - DNA, 909 bp, Bovine  19866881516495
  misc_feature (1)..(1): n is a, c, g, or t
nttggcaggggcgagagctgagaggatcaccagccctgaagtggatgagaaaaaggcccaggagaatgggtgggatgacttccctaaccaggctggggctgtcctcagaacagtgccctggggagggccaagcccattagccgcccaagcctaggtgtctcccagcccgccctgcccagccccggtcactcacagtcgaccgagccgcggagtgtaatggaaggcatttggcgccacagaacggagaccgctcttcacgatggtgctggggagggcacagcggggtcaacactgaggggagcagttacctgggcccctgctctccaccctgccagccccccagtctctagtgctgagccccaaacacttcctcggcaaccctggacccctgaggccaccaagctctctggccagccagcgcctcagtcctcagccaccccagtccacccaggcccctcgcgcccttggtcctagcaccctccctgaccctctggtctcccaggccctgtgtggagcccctcacagtttcctcagctcccccaggcccctcaggtcgctgcgcttcagctgctgcagatgctgctggttctcgatgtagctgtgtggagacaggatgggaatcacaggggcccaggcccgcactcgagtccccacactcacctgcctccctccctcccaaccacaggcacccacaggcatccagtcacacagagacctgtttacacgtgtaaacgcctacacacccatccacatacgcacagagaccctcacacagtcacacagtcccatgcctgcatcctcacactatcacacatgcatgctcttacacattcaagcacacacacagagatgtgtaaagatatacacagagacgcacctcctcacatacaccagcatatgcatgcgtga

SEQ ID NO: 42784 - DNA, 1726 bp, Bovine  19866881579057
  misc_feature (1)..(1): n is a, c, g, or t
nattacaatggttatcttctctgagactgaccgtaagaacacaaggatgaagaccctcaagaccagagagatcaagtgacttgctaaggtcacaaagcaggtctgtgccagaaccaggctgtgggctacgggctgctgcctcccaaggccaggtgtccgtgggccctaccctctgtgtgcttgatgatgttctccagcagcagcgggtatttggtgagccgctgcatctcggagatgatgaggtctcgaagctgtagtcgccggcactgagggtggctctcggcctcctacagggaaggacgcacagaggaagatggcagcccgggttaggagctggcttgtgggctcaggacccacaggacgggacagatgctaaataggtcctaattccagaagagtcactcagaaatggtggtggcagcttcttgctttgatatttaggaaaaagctggtgggggcagaaagacaatagcccaagaaagggatacggtcaaggcacataaagcaaggattattcccactttataagacaaaaaaattgagatccatctgagtgaatacaggcattagcaggtgagcaaggccatctgatagcaaggctggtgtctctgtattgagagcgggtatatgtcagtgtttctgaagaggcagcctggggagggtgtggatggagcagaattgctggtcaccaaccctggtagagagaagaggccaaggtacctggagctgggggccagtggggcagtctgggagatagtgggtcgacctggtaaactctccccctcggcctcactgagctaagactggactggctggtttcagctgtgacaagtacaggccaagcgtacctgcatgaagagctgaaaccggctctccttgcgctgcctggtcttgatcagctccagagcgatggactgataggagcagaactgtgcggccacctcctggagctcctcccgggcagggccgtcaaactgatagagagaatggacaccatgcagcccacctcacacccttgcttggaacctctccccctcttcctccaaggcctccccagggcctgggcagccatacccgagccagcatgaggtcactgacttctttgataatggggccctcctcccggagcttcctcatagcttcacaccaggaatctgggggcaaggagagaagacagagcgcctggggttgagctgtgtggccaggcccttggtgatgggggaaagaggtctctgagggtcgtgccatgggggcagggtctgggagccacttcacacatgggggagttggaatgctggcttcaggctgggcatcaggttctcccaccaaagagaagaggcaggggctatgtgctcaggggtcctggcatgtgggcagcaggctggccagaggtgggggcgggcagggagctcctcactgtggatctcgatgagctcgggaaggttgggaaagagccgggccagctcctctcggggcagcaggccctccttcttcatccgctggtagaagatcaggtccaggacccggagtgtgcgcagatgggacgcctcggtcacgaacagctctgagcaggtgcaggaataaggagggccaaagagacagcgggacagtcgtcagcaaggatatactgggacctctcctgaaggccaggatgggaggtggtcctcataggaatcacagcatgggctggccgtgccctaaggccccaccctctttctctaccacc

SEQ ID NO: 42785 - DNA, 1486 bp, Bovine  19866880096455
  misc_feature (1)..(1): n is a, c, g, or t
ntatggatgtgagagttggactgtgaagaaagctgagtgctgaagaattgatgcttttgaactggggggttggagaagactcttgagagtcccttggactgcaaggagatccaaccagtccattctaaaggagatcagtcctggatgttctttggaaggaatgatgctaaagctgaaactccagtacgttggccacctcatgcgaagagttgactcattggaaaagactctgatgctgggagggactgggggcaggaggagaaggggacgacagaggatgagatggctggatggcatcaccgactcgatggatgtgagtgtgagtgaactctgggagttggtgatggacagggaggcctggcgtgctgcgattcatggggttgcaaagagtcagacacgaatgaatgactaaactgaactgaactgataccatatttatagtatatacatatgtgttattaaaaatctttctgggagattctatttaaaattacaagaatcttttagctcacagaattcttaggacagaatgatcgtaaatagggagaaactagatacattaacaagaatcattatctcccacattttagctcacatatcttgaaatattctctacccccaattacttcacaattattcattagctttgacaacatcaaagaaataaaggattgacccagatctgcaacttagaactgggtcctctggtcagtcagggaaggtcaaaggggctaatgcattcaggaaacataggaaagggcataatgaaggggatatatttaatcctcagagccaaataatcattagcagtggtgatggataaagttaaatatgcaataactacagagtcagtactacatttattcagattcataaatgaaaataaggagtgataatcaggctctgaggtggttggatacttgaataaaagataaaatgtctaagcccataaactctgacagtaatcatgaaatcatatactgcctttctactatataattctgattttagtattttaacattatttattgagagctcatgtgaagcaaatgtagataaaatatttcacctaggaattatatatactttgattcaacaaatactctttgtgttcatattctatacacatgtgaagtttcaaataacacttgtactttagacaattctatctattgcatgcaaatctagttttagtatttcttatcacaatgtacaaattcaacacacctaagtctataatatgctgatctttttttaaatataaatttagtttttaaaactatgtcatcactattgcaatttaaagttgcttgtaaactacaattaaaattagcattgtgataaattctctttgaagctctgtaaaagacagcatacatttttttcgctccttttcaatatcaaaaattaaatatttgttgctatattattcagtgacacacttctaaataaattggatttcaggctgccattgcatagtaaaata

SEQ ID NO: 42786 - DNA, 1206 bp, Bovine  19866880456612
  misc_feature (1)..(1): n is a, c, g, or t
ntaagctttacttttgtaggagaatcaataaaattggaatgagtggagaaacagcatagcttatttaacattctgtgaatttcttgtatgtgttaaattatttactatttaacgaaatgtgcatgttaataaaataaggttatgtggctctttactgggcttgctgcacccaggatgttttttttacagaataaatatttcataattttgttgcaacgtattttttgcaaaggcattgatttatactaccaaaaatcccaataagtccaggtatgtattcataattttatcctgttaaacaaaaatatcagaagtattgcttatattaagtaatgaaaattatttactttttgaagttaattctgttaaatcatgctagctttgtttggtaaatatacaaaaatgatactgaaaatgaattatataaaactatcatttttgaaatagagtagtaaatagcaattcacatgatggtaacaagactcgtgagaactcactgtgtagtgatctaaatgtgatttagggaaattgctttaaaatgaggttttatgatatcatgtcttcattgtcataggaaatcagaattgtaattctaaaaaaggtacatttcctgtattttgtcaataaagttaatgcagcatatcaatggggagagtaagccaccaacatgatatgccaactggaaactgcaatcagagaatattaaagatacaactttaaatgtactaaccatctcactgcagagagaaggaaagggaaaggcaatgaccagtctcattagtgttaaaaactaaaaaaaaaccaaaaacaacaacaaaaaaaaccttctagttgggaggataacagcaagcaaaaatatagaagtcaaaaaatagtactgacatatgagatattaagaagtctatggaaaaaaaataaactgaggaaagggtaattggtcttgtcttgagaaataggtttttggttcaaatgagcataggcctttctgaagaggtgctataaatgatttatgaagaggttaggaagcaagtcaagtgtgcattaggcctcgtttttttaattatgtggtgataatataattattaatagaagcaaattcagttcagttcagttcagtcgctcagtcatgtccgactctttgtgaccccatgaattgcagcacaccaggaatccctgtccatcaccaactcccagacttcactcaaa

SEQ ID NO: 42787 - DNA, 983 bp, Bovine  19866880475881
  misc_feature (1)..(1): n is a, c, g, or t
ntatatcttataggcagcaggcataattctttaaattcagttgctataatgccaaagaattaaatatatctaaaggacctactgaactaaatttttctgtttttagcgatttatttactttaatattcttgtttctataacaagaaaactcattcctcttaataaaagcactaataatttggatttgactataataaaagcagggaggaaggtggaagaactataaagataaaacaccactaagtttatatcaatgtggttcaaatagaattattatttgttcatgtaatctttttttgctcttttattttaataaactttagtattatgatagtaataattattaagtcagtaattcaattaatccagaaacatgattatgtaaactaataaatgaacagaaaatttatttattgaacaccaaatcttcaaatatttcagatagaatgctctgagatcaagtgaaatatatagaatctgtactatgtggtcatagttgttatttatatttatacctatcctaaaaagaatagaaacaaagaaaaaggaaatagatttaccgttagttataagtctggtttcaaacaatcaatttttaaaataatttttatattatttaatggacacctatccttgttaccatggtaacatgaatattaacttacagtttgcatagtttataatctaagaaagtgttcatagctgctctcacactctaaacagaatacagttgtctttatagataccttagtttccaagacaacatgatatgcactcatgcaactctatggaaaccaaaaaaaactcgcaattggtgttcaacacttgtgatagccaaattctgttgggttttcaatataaatgctaatgaaaggagggtgggtagctccccctctccatgtttcaaaataatgcatctaagccccaaattgcattgtttccctggataaaaggttttgtatagacacagcattacattattt

SEQ ID NO: 42788 - DNA, 1393 bp, Bovine  19866880542413
  misc_feature (1)..(1): n is a, c, g, or t
nttgtaagtgagtattctaggattcaaaccaggtttatccaattctaacccataagatttcagccacttaatagaagatttagctacacctcccttttctcttcaaggaagtttaatatcattttggcatgatgaaaattatgactgctttatttaaatgcaatgcatatactgaatattattacaaagggcccacaagccattctgaagggatgagtagttaaattatcttccaacactgttacacaataacaatgtacagaagtaaaagaaaaaaaaactatagatttttaataaaatttaaacttggtttaaaagtcaatttgttagcatcacatatgtgtatatataaatatatttatttaaatatatattatatatttaaaatatatattgcattacatatttttaggttccaaaacatttatatgtaaaattttctaatgtgagacaataaccttaaaatgagagaaaaacatttaagtcaataatcagtctacaaaatatattgaaaatatatacctgttcagagctgccatcctaacctttgcatgaagttgcaaagagtaaatagattggtaactatatcatctgtataaagatgccttaataggtatgtgaatgtaaacaaaagtgaactgaagttggaaagagaagagggtatggggaggtaaagagaagagatgttactgggagtgtttaagtatcggggtgcctgacagaggatgggtttgctttagcaaggcttaatggaataaggaagaagagttccttcaggtcacaaagctatcaaacctgaaactcccttactgaagtttaagcatcctctcttctgagaataaagtctgctagattgttgactcaatctacctagatccccagaaaaaaagatctttaactaaaagctttctttatcaactcaaaggttatgtttggatgaattgaaacaaatattgtttgacttaataagaattaagaaaagagatcaagagttctacaaaatcaatcaaatagtatttaactggccaaagcatatctgttagtatgataacaataagataactcagacttactgtttgctatttgaaaagcactgttctaagtgctttaccagaattaattcatttaaatattagcataatttttataaggttaaataatctgcttacggtcaaaatgtcactgtagagaaataaccagcattcaagttcaggcagtctaaacttcattgtacttagactgtgttttaatcgctatactctacagccttccttagcaacgatcttttataattaggagtattttcttcttgctactttaccatctgtaaagaaggcagaatgataacccataagtatatccaggtatcttaaaaataaaacaattataatat

SEQ ID NO: 42789 - DNA, 1891 bp, Bovine  19866880578281
  misc_feature (1)..(1): n is a, c, g, or t
nggtaatcagttttagcaaataaaaaacacagttaaacttgagtttcacagaaacaatgcatataactagagctacacctgaagtattgtgtgtatatggtaaccgtatttataaagatgtctaagacgtaagactaaaaattcctgcagatagtgtggtcagattttaagaatcttgatatcttaagatcaataatgtaaaaaggttaaagtgtgtcctattttcctttccaagtccccctatatcctgttaaggaaaaataaaacattaagttcttaattgacatgttacagagaatttatcacagatctgaaaccatggcatatctcagacataatgtggatttggcaccacagctctgcattcaagtgagtcacatggattttgtgtaatggtttcccactacatataaaggtcagtttatactaggccttaatctattaactgtacaatagcattatgtctaaaaaaataatgtatataccttaatgaaaaagtgctttattactaaaaaaatgctagccatcatccaagcctttgtcaagtcataatcttgttgcaatagtgacatccaagatcacagattacagagcaccataacaaatatgctaattatgaaaaagtttgcagtattccaaaaattaccaaaatgtgacacagagacatgaagtgagcaagtgctattggaaaaatagtgcagacagacttgttcaaagcagagttccacaaacctttaatttaaaataaaaatgtaatatctgtaaatttgcttaatcaagtcaaggagaaaaatcaagcaaaatttattttatgaaaaaggtgcaaaaatctgaatttttacattcaaaaagtattcaatatcaacagtttataaataagaagatagaagaccagaataagtttccagttatcatctactatacacaaaaattaaatagaggaatgggttcaatgataaatttcctatttcctccttgcccaggaaaaattagttttgctttcattctaggtttatctgttttaatgttagggtccatcattattttgtaactttgcactgtaaacatatatataagccaaatgaaaggcagtaacaactcactttgattcctgtgaatgttttcttgagtttgaattcttgaagtaaaatatattttaaccttaggcgtcatcagatcacagtttaagcatcttgaatttacatttagatgatttgcttattggtcttggacatgtatattccatgaaatgtattaggtggtatgtatagagtaaattgtcaggaaagagggaacttatataatggcaagttagaaacagatcgtttagcatggtgacagtatttgtaaatgcagagccttgtgtgtgatgcttttgtcctgcacatgtctgatgctgttctggagcacatgaacatgattggtgaaccagccacatcccctgtgtttgcagagtagtgaagcatgactgctcatgtgctatcttagccttttcctgttatccttgatgacagcatctaatagaatctctggtttctcccattcccctgcagtaaggctgaatggtcatgctttttttacattttcccaccaaacaattccctggaaacttgacttttattaacccccaaattcccttcatttgtttagttttcccaaactgtatccaacttttaaaattcaacaaaactgatggcacgtagtccgatataatacatttctttgtaagattcctttaaaagcttcagcacttaagggaaatcaatagcacttgatgtggttttgtggctttcagtctcttgaacactaaattcaacttgatccattgctattagtggcttaaaggttgcagttcagccatctagaaaggtgagggtctttggcccatatt

SEQ ID NO: 42790 - DNA, 1159 bp, Bovine  19866880643597
  misc_feature (1)..(1): n is a, c, g, or t
nttaagtgttacataaattctttgatcaaaaaatagtccttgtatatttcataaaaagttggtgatggaaaggaaagcctgggcgtactacagtccatggggttgcaaagagtcagaccgacttgagccactgaactgaacctaaaaaaatgttaactaaattattaatatttgagccatcacctgcaatattttctgaagaatatgtttcaaaatctacacattttactttcagttgaaactaattctttttatttctttggagtggaaacctacacagtctgagttattattccattattttctgcaatagacaaattgaaccttgctttctaattgtgatttgtacagctctcttctgtgtgctcacattcaaattttataacctactctattttataacccactgtataatagttgaatcctaaattaatgtgttttcatagcaagattcaacaatggatttaacatggactctaaaatctagacagatattaacattttagtgatatctcaatgtctgtatgtaaatgtattttatagaaacaaaatagtaaattcttgataacataaatcccaagagttttccttgggaattataaaccttaaaatgtctttgtctttagttgtgacatattttacaatgagtacattactgtctcaaaattaaagaatataaacaagttatgaaacgtattctttctcaaaatatttacattataacaaacaaacaaactggaaatacacatcaagcagaagtcctttaaatgttgtaaaacataaccctctagtgcgacaattgcccttactgattgttatatgtaagaattatatttccagctttatatgaaatgaatttcttcttagtactacaaatatgtctttttaatctgaatatttctttatttgcagctgtcattcttgttttctttatagaaaataagagacaactataaggccaatttatttctatatctgaatatattttggctgaaatcacttaatcagttgtgaaaacaattcttaccagtagctaagctagaagggggagtcacataaagaactcaaatatgtaaaaattttctggtaggcctgaagctattttctgcatagattactaaaattattcttaggataaatatttgttcttgcattaatt

SEQ ID NO: 42791 - DNA, 1636 bp, Bovine  19866880667852
  misc_feature (1)..(1): n is a, c, g, or t
ntaaagagatggaaatatcagaccacttgacctgcctcttgagaaatatgtatgcagatcaagaagcaacagttagaaatggacatgaaacaacagactggttccaagttgggaaaggagtatgtcaaggctgtattttatcaccctacatacttaacttatatgcagaatacataatgagaaatgccaggctgaatgaagcacaagctggaatcaagattgcagggggaaatatcaataacctcagatatgcagatgacaccacacgcagaaagtgaagaaaaactaaacagcctcttgatgaaagtgaaaaagttggcttaaaactcgacattcagaaaaccaagatcatagcatctggttccatcacttcatggcaaatagatgaggaaacaatggaaacagggacaaactttattttggggggctccaaaatcactgcaggtgatgattgcagccataaaattaaaagatacttgtcccttgggagaaaagctatgaccaagctagacagtgtattaaaaagcaaagacattattttgccaacaaatgtccatctagtcaaagctatggtttttccagtggtcatgtatggatgtaaaagttgaaccataaagaatgctgagcaccaaataattgatgcttataaactgtagcattggagaagactgttttgagagtcccttggactgcaaagagatccaaccagtccatcctaaaggaaatcagtcctgaatattcattggaaagactgatgctgaggctgaaactccaatactttggccacctaatgcaaagaactgacttatttgaaatgaccctgatgctgagaaagattggaggcaggaggagaaggggatgacagacgatgagatggttggataggattatcaccaactcaagggatatgagtttgagtaggttctgggagttggtgatggacagggaagcctggcttgctatggtctttggggtagcaaagagttgaacatgactgagtgacagaactgaacttaaaaggaaacatttcttgagttgaaacacactaatagataatgtattagatctagttctaaaattaagatataataatagttcaaacagcattttgcactctgagcaaaatcaaacctctgtgatttcatcaccaataagttgtttttatatgaaagaatgtcattcaattatattctcatttttgaatgtatgggaatatctttgcttatgtcactcaaagccaattatatctgaataatgaacaatttggaaatcactagctgttttttctttcttctggccagcactgatcaatctacttctgataaccatgtaggctatttagaagatagagaaattatgatgtagattagtgacgactaatatttcaaatatcttaagaagaaataatgaggttaccaaggttaatttgtactaatttgcacttagtaaattaccaaagagtaaattatattaccaaaataaacataattgccttatctctattagtagagataataactctctaaattagacattgtcatgaactacttaatcttaaccataaatccttaataattttatattatttctttgaaaataatgccgtattatagtgacatctttgtgtatatatgca

SEQ ID NO: 42792 - DNA, 3865 bp, Bovine  19866880686282
  misc_feature (1)..(1): n is a, c, g, or t
nagagtctggagtaggatgccttgccttctccgtgactctgtattctccccaaagatatattttggctgaaagagacaggctctgtggccacaaagaaagcccttatgcctctacaatttactagatcaaattgacatatcctaccattatctgcattgaatgttagctaattaaaatttagacaagttcacttacattagattcagtgtggaaacattttaaatgtggctaagagttaaatcaactcaaactacctagtttaagttcatgaaaagccaagaccttaaccatattacttaaactctcatgaatataatcactgtatctacttcataaagttgcttttgagattaagtgaattaaaaatgggtagaagacatatagctcaaaagtttctctagtcacactgatcccttgatttaaaaagaataagagcttccccagtggctcagcaggtaaagaatctgcctgcaatgcaggagacacgtgttcaatctctgggtcagaaagaaaccctagaggaggaaatggcaactcactccaatattcttgcctgaaaaattccatggacagagtagcctagtgggctacagtctaaaagaatcacaaagagtcgagtatgactgagtgattaaacacaacagaggacagtgcttatcccatagtaactgtttaaaagttttattttactattattatttataatgaatagtttaaatgttagtcttcttgcaaatttaattgtagcatgcctacatttatactttaattttgcatattaactcatattaactcatgaatatgaattatctacccacattatataagtagtgttttgtttttttctttctaatttagcttctagatttttgcctttgccagcaaatcctgtggcaaaaattgttccatttcaatttcaagtccagaactggaagcatcttcctcaaagagttgtggaggaataaatatgtatagcctggccccaaattataaatctccttccaagactatcattagctggagagattgcgtttcacaaataattaaatcaagcttttgaagcatattgtttaatctcttttacaaaagaatacaagccaaagccaaatcaaataaaaccttacaaccatcctttggctagatcaaattagggctgagaaccctgtgaaataagagtaattgctgggcagtgggtatgtagtttattatttaaaaaaaatatgcagctataattgaataaggatgacataagattttaataaagcactggcaatttttggagcttaaagataaaggctatcatttcccttgtgtgttggacagacatgtgtttttggcaaccatgtcgaatttttgaccaggccctattatggccatccttatctacattccatacacagaaatagaaaagaaagaaaaatcccagtctgctgaggcaggaagaaatgcattgtgcatctgatatagttcattcatctactgaaaaaaaattctagccattcacctgcttgcagcaaaaaaagacttatgttcagttgtgaaattaatttctacaaaaatggcaagattcttttcactagcagactgttctttgttaagatgaatagtaaaactaaacaaacaaacacaaaaaagcacaaggagaaaagagaaggaatgtatcttaacaaagcgatgcatatatcccacaaaacaacttgttttcatgtggtgagtattatctatgggtgagatattttaaactaattcaaagaacatggcatttaaacactagaatatttaaaagaattcaaaaagattgatttggaggtgaagaaggaataagaagttaatgttgagagtatttaaaatgtacattctcttgtatttatgcataggcattatactataataatgtatgtgaatattctttccttaatttattatatattttgactgaatactaattatttcctcacaggatggttatcatttatggagaaagtaaccttcaattctgttattgattagagtttgatgaagatcatcaaagagaaagaaattctttcaagtgataggaaacaggagaaagtttcttactaatgataagagttcttaatgagagtatttaattcatgtaactctattaagaatatctttcttatatttccatttatttatgaagagttctcagtgtgacagagtgctaaacacatctgaagaaaattagaggcatagttaggatgtaggagaaccaatatcataatgagagaatgaataaattaaaaagtcttaatgatagaaaccaaataaaccacacacacacacacacatacatatacacatttccataactatgatctagttatgtttctttttaaaaagatcaatattttgatgtcttgggtgattattctgtgtgcttaaattctaattggcaatgaactttaactataattatttaaactctgaaaaatatatattttccttttcctcaaaatgtgaacaatgactggcttaatttatacattcatggaaaagtgctattgggttaagaaagtattttttaagtaaatatgcaaagttagtaccttctagcaaaatcatacctgtatattctagctaagtaagttatatttacaaaattaattaaatatctagcctcttagagcatctaaaatgtttatcacaataacttttaaaggtaaaaaaataaatatatctttatacattatattttgttatctctgacaaaagagatttaagtcagataaagtatttctacaggagttcttttccagtattctgttatcagttaaatattaattatccagagtcaaattgttcatttctttatccaatatatatttattatgctgcttactaagtaataatcaacatgctgcattcacaggaaaaaactaagattttgcctctacctctaaaacacccacagtatggaataggatttatggattagcaatgatgtttttggagttacataatttctttgctcttcctttagctacctactttcctgattgctaattcttctccatgaagaccaaagagggaaaggtaagtgttgatgtaccagaaactgtaacacttaaggtgtatcagacgctgtgtgtaaatagtaatgttatctgatgtttatgtgttcttccccgttaaatgttgaaaacagagggtaggtgagtagaggagaaagaacctaaccatgagagattaaagtaaatgactttagtagaaagcaaaagaaaacaacagtaaaaacaaaaaagagaaacaacaacaacaaaaaaatgtattggacagaaggaaaggaattgacctaaacaaaagaatatacatatgaatatgtaaagatgaatagatatgtaatacataatatgtaaatatatataatttagaaaacaagtaacaaaacaatgtctttgttaaatttaaaaaaaaaataacaagtaacttgttttataagtgttgtctgaatgttgtaggaatggggactctttcttgggcctgagagtgggctcttgtctaacattcaacaatgaattgctagaagaaatgcatgtgttgatgaagcaagaggcttaattgagaaggggaacctgggtcaagagcgggagagtaagggaaacagcaggactgttctgccacgtggctcaaattctcaggtttcatggtgcttgggctagttcctgggttgttcctagcctgtcattctgacttagggtcctttctggtggcatatacattgatcattcaagatggattccagcgaggaggattctggaaggtcggtaggacatgtggtgtgtccttttgactttttctgaattcttcaggttggtggtaactttgttagttctatgcttc

SEQ ID NO: 42793 - DNA, 3429 bp, Bovine  19866880803731
  misc_feature (1)..(1): n is a, c, g, or t
ntctgatctgtgcctaataagagaagtggtattgcagatgtcacacaggtattttagactgtacatacagcatgcattaacttatatgaataaaaagtacctgtggccctttaaatatttaaatttatcagaatttccaaatatattttaaatcaaaatatatcagtgttcacttatttgatgataaagtcagccttcataatcttaagaatgtgattttgttaaatcagaattgacaaagtaaatgaattcctaaagatggctttattttcttcttatgattcatagaatttagaaaaaatgtatatttagatacattagttataatatgatgaatgtctaaatataggcctgaattgagggatcaacactaataaaattttgaagctactgccttcgcatataactatttgtctttatgaacctgtaggcgaaaagaagagaaagggtcaatagacaaaattacctattgatctcccaacaaactgcatccttttttataataatgcatttcctgttcccttctggatgttattgtattgtattgttattgcatctaaagtatacaacagctatctggagcctgaagtatgagtttgattgcctgtggttaagacaagactgttcttccaagtgttttaactgtctttaaaaatgttagatactattatcatctatacattagttgagacttttatctttacttatgttgtatttataagagaagctttacagtcaggtctttttccatttgataccaagattctattttagatgctattgctgattatctactctttcccagatttcctatatattctgtcacatgtcaatatggtgtttcaatcttcatgtccgcactgatatgttggagttagtactatcaaaacaaagaatgaacacagtaaactcaagagacttgggacaatgtaatttggggtacaagtgtgtgtgtatgcatacacatgcttctgtgtgtgtgggaaggcaggccaataaagacatccattttattttcaaatcactaagaaggggcctgatgctcttaaacatgcaatcaatgtttatatattgtcctttattcattttcttaaaaaaagagtctttttctcacaaacagatttaccaataaaattaagaagtatcttgatagtattttgtagacaaacatttgggtcataataaaaataaatcagtacttgccacagaaaataaattatgtttcataattttcacattctttaattttcacaagtcagggtctaagcctcaataatgaaagaaactcctttttggagctttttttcattaaaaaatgtcccaagttaaagagtctatgctttggcaatagttatcatgagtcacgtgctttatatttattatctaattttccgttcattacttaatgaggcaatgaggcaatgattattgttctaagataggatatagcttgttcaaggtcacacatatctaataactggagaagccaaaatttaaccacaggtctgccagatttcatgttctttcatttttccacaatgataggatgcttcccttcagaaatgatatctcaaggccatactcctgcaatgactgcaatttaatttagttgtaaaagaatcaccctgtgtttcaaaaaaatgaggtgcagtatacttaatagcagaaagaaattaaattggtgcttctgtgggaaataatgctagctatacttgaagcacataatgttaaaatatgtatcatagagaatttagtgacaaattgttcttattctttgggcttcaatggtgactcagctggtaaagaatccgcctgcattgcggtagacctgggtttgatccttgggttgtgaagatcccctggagaagggaatgctacccactccagtattctgtcctggagaattgcaaggactctatagtccatggggtcacaaagagtcagacacaactgagcaactttcactttttgttctcttcaataatgggagaattcacatttggtctaggaaagtgttagttgttcaattgtgtccaactttttgtgacctcatggactgtaggtcaccaggctcctctgtccgtgggattttccaggcaagaatactggagtgggttgccttttccttccccaggggatcttcctgacccagggatcaaacccaagtctcctgcatttcaggcagactctttaccatctgagccactagggaaatccttctttttagtaataagcatgttatgtaatgtcagttgaatattggcagcctttttatcagacctatcctgtataataacacaatgtgaaaaatatagttccatttacagggaagcagaataaaaatttattaaaaatattttgtcttcacttaaagcctactccatttgaaaaagtatctttaatataattgtgtcattaaatcataaaaatggaaattgtgttaacagcaggatgttatcttttattgaaggcaaacagcagggttgctgctaatgagaacgtcatcaacttatcagcaaaaggtcaacctaaagagctctttaaccaatttctccctaagtagttattttttcccctttgatggcatatcacactgacaagctagacttttacgtggctgtattattatgaatcagtctctattatgacaagaaatatatataattgcaagacatccatggaatttgggacacattgttcagaagttaatttctttccctgaaaggactatcgggctctttggtgatgttgttgctttgttcatttattttaaacattttgatattatattggtgagtcctccattcaagaccttgaaaggtgtaaagatattttaaacaatgggtaaggacattggtaatgtcaaaacaatgataataaaaacaggataaaaacagtgccttatacagattgatcagattcttatctttattctattaattgccttctctacaaatagataaaatattaatcaaaattacagtatcatttactatgagcttattttctgccatacactcatccatgtgttggataaacacctttcattttgtattcacagcaagcttttaacaattacagtgactgacttttgtttgcgtttctgtaggtttttgaagactgtcctagagctcataagagttctccaagatttgattagaattgatttactaatgatatttattaggctcaaacttttggaatattaggacaccggaagccattgagtatatcacctggaaatctgtgcttataccagaagtatgtagcaagcaattattaaaattagtgataataataaaaacagtagtatttattccagatatctcattttcccaattgaatctctctattactcgtttaattttgaattaaatgactataaaggattatttaaaaggctaatgaagaaagcaaaattaattcaaa

SEQ ID NO: 42794 - DNA, 1393 bp, Bovine  19866880920382
  misc_feature (1)..(1): n is a, c, g, or t
nccagcaagaaatctttctgtagtataaaatacaaagcaagcaaactaatactaaacgactatttgcatgctagcaacaccaatgggcaaacaaacacagttaagacattttcaattttcaatttattgtgagtgatttttcaaattataaagtctgcagaaaaacacatgctttttgtacttgtttagattttcagtgaactgtatggggaacagtaagttttaagcagaagtaatcatagccacatcctaaaaatgctactttgaaatctaggaataaaaaagatttgaaacctgcttaatttctagtaataaaaatttaaaaaaaatcgctggaaattaaaaatcacacagacagctgaggttgaactactcattattaattaattcataaacctcactgtaatacttggctgcaatatttttagcttgaaagaaaatagtaaaaactgagactagaaaatgaaaacaaaacaaggtgatctaaccagttcagcccattagaactattccaccatccatgatttctaaatttaggaaacaaattctggttttttttttccccttttcttgcttttttcatttattgtaaaatcaagaaagtgaaatattctaagtatatgcttacaatgattttaccattaggaaaaatgctagtgatattgtcagtgagtcatttccttctttgtttatattcctacctagattttaaaccacaggccatctcacctctcagctctctctcagtgccttttcctttatccctagagaattaatctcatgtaagtcttcaactttgtggctgtgacctcggaaatttctttggcactccacattgtgataattctttgtctgaaagaacaagagcatgagttaaccctaaaagaggagctggactgcagaaaggaagcaactccaagctactgaccaaggcaagcctctatcatacctctatttcacctttcccgaagtttcatgtatgttgtcaatattgtatatctgcacatacacacagagattgctagattgtggtacctaacaataagaatttcaacataggactttgtttctagtattatctaaactcaatacctggacgtaccctggagattcaactgatgtttaaatagatatatttaaacaccaacaatatatatttaaactccaacactatattattgttgtttagttactaaatcatatcaaactctttgcaactccatggactgccaggctcctctgtccatgggactttctagacaaggatcctgggagtaggttgccttttcctcctccaggggatattccaaacccaggaatcgaactcacatctcttgctttggcaggctgattctttactgctgaaccttcaggggaagattcatatatatca

SEQ ID NO: 42795 - DNA, 2479 bp, Bovine  19866881021712
  misc_feature (1)..(1): n is a, c, g, or t
naattgatgcctttgaactgtggtgttggagaagactcttgagagtcccttggactgcaaggagatccaaccagtctgttctgaaggagatcagccctgggatttctttggaagcaatgatgctaaagctgaaactccagtactttggccacctcatgcaaagagttaactcattggaaaagactctgatgatgggagggattgggggcaggagaagaaggggacgacagaggatgagatggctggatggcaccactgactcgatggacgtgagtctgggtaaactccaggagttggtgatgggcagggaggcctggtgtgctgcgatacatggggtcacaaagagtcggacacgactaagtgactgaactgaactgatgggtagctcagtgaaagaatggagcaagactttttacaccataagaaagaaatgtttcatatccaattctgtgagtcttaaatcagtaggattttaaaaaatataatcgagtttcaatggtgagggactggcaatcaggaacaaagaccctggcaagtatgggatgagagactacagaagcttcgctccacagaacactttatgtgtatagaggagggttgccaaccatggaagaagagttccagagtaggagtcccaagggtttggaacagcaaaaagagaaaggattttaattaaaagacaggaagaacaaataggtaaatgcacagtaggaaatgaaagttagctctactttggacaaatacaaaaaatagacttctacttttgtcagatacaggggaatacagggtggaaaggcatggaaaacatcacccccactaacttcatgagactgcaggttggaaatcaaatagaggaaatgatctgcagacacacagacacagaaagacaattccagtagcgtcttgtcactgactcacaataggtcagtctgtttggatgttagtggatacagagtctctgttgcaaatgtttatgagtcagtgggattgcacaggtcagtagtaagcacatttttaatagattacctctattttaaattgatagcaagaatattaaaaaatggtagtaattggagttttcagttatgctcattttatggataattagcaattaatagagtttgaaaatgtataatcagcgattatatttacattttattacagtatcataacatttatttggaagttgagagtagaaggtttacatgtaaaatgtttctatttattttaggtgactagggaattacaataaaagtttcttccattattggagtagtggttcagaatacctttagagcaatgagagtgcttttttagccattctcatgaagagccctaggtcatttaaaatttatgctatgcactcaacaggaaagttatcaggatcctgggctgtgtgaaaattgagaacatttattgatcaatgatgtatgaactgaatctacaactttttatttggcttcacctgcacttcactgacactccgattcatattcctggttatatatatatatatgtcagatacatacttgaaaataaaccattttgatactctaataatatctaatttatgcagtagcctaaatcttacctcaatcttatccaaggaccaaaatcatctgagtagttttatttggaacatgttcattaaaatcctccgagaattttcttggggtttacccttctagtaaaacaactatcacaaattctgggcatatttgaaataaatatacagatggatacctgcttattaaactcagagaaataaatatacagacatagttgcctattcaattcagagaactttgccataaatataaaattgtataaaatgtgtgaatttttttaagaagcaggccaaatgtgtaacaaggtattaagactattttattagaaaaatctaaaaaatctactaggctttatttattataatctgcttaggcaattatctttttgtcatgttctgcttggatttaatgcttccttctgggcaaattttgtctcttttattgcatgtatttggaccttcgtagtcaacactagagttaaaaagtcctcctactggtacaggatactcaggggatgcgggtttgatccctgggtcaggaagatcccatagagaaggaaatgacaagccactccaggattcttgtctgggaaattccatggatggaggagcctgatggactataatccgtgggtcacaatgagtcagacacaattgagcactcatgaacacacacacacacacgttatatgtattatatctctttgtcaataaattaatagcttatatctgaccagagtggctgcttctcttatcttagtgcatcacattttcatagggttcacactttttcaccctatgacacttacttttgttactaagaagttaagctttattttactagtgtatcttactctcagattttcttttggtacctaattcttccaaagaatgaatgtcctaccccttcat

SEQ ID NO: 42796 - DNA, 697 bp, Bovine  19866881401444
  misc_feature (1)..(1): n is a, c, g, or t
ntgtgaaattggaacattggtctccttttgattatattacatattctacttttcttccaatatatgttctctaaagggtttgatattcataaattaaaatgtataacaattaccactcaagcaaaaattagcaaattgctgaacagtattttaagcaattttgaatatgtctataaattttccatatatatagatttctcttcactgttaataacattgtttagtagatttttatttaaatcattttttagttttaatattccaattatttagaaatcttctgaaccactttgaaaggaagtaaatgcatagtgattttagttgaatattcaaatgtattcatatatttaaagcatttgaatatcaattcccttatcagttattaaagcaaagggtgtaatagactaaaattatcaagaaaaaaaattgagcttgatttattactttcaatatattaagtgatagacataaagttagctaaaatgtaggaagtgtaggtaaggaaaatactataaatcaggagaacagactataactgaagagcacattcaaaatgttgatgaaattggaatgtcgtgggataacatagtgaatattcattcacccaggaaaaactcatctaatcttcatctaataattcagcattctaattacatggttagatttgaattaatatgtttaccaaggatctgcattt

SEQ ID NO: 42797 - DNA, 1185 bp, Bovine  19866881501621
  misc_feature (1)..(1): n is a, c, g, or t
ntctcgttagaaatataaatggacgtcgtggtgtgggtatactgtgcaatggagcagggaggcgtgatattccatgtgccatatcccttcacttcaaacaactaattgatggtctgctatatatcttgtttctcaagggtcagagatattgttaggaatcctcagtgttgccagtttaaattaaaagagttggcagacagattcatctagggtgttaagcataaaggaaggataaaacccttgtcactctaggaagttcatgctaaagaatctgagtacaggaagccagaagacttaagtcactctctttggtaaattttgtttattaaaaatgtaacccttaaataaagaaaaaatatagtttattctgggcaaataatttggtatatttatctgtgaaggcgattccatgagtcaacttctgattaaaccactgatagtatagtcaacagaatattttagaaagaaatcatttttctgagcacagtgtcactagtttgtagaattttcttctctcttttgcaaagaaacatatattatttagatttgcttgaataatgaaatttagagtttggagcatattaaggttataaaaaatcaataaacttaggtaagctatcatttattaaatagggtaaaacccacactgaagtcgtctacctcattaggtagaaatattgtcttgatagtcagaggaaacaacttttgattcagcatattttaatcatctcttcctggattagaaataataccaaaaacggggatttttttttttaatacatgatgccattcaaaatttgagatgaacagaattcaacacaaaattaacggtataaaactctcttccatgagctagacatttgtttaaatgctggaattaatgacaaacatcacgaagcttatgttcttatggcaatgacatataatgaacatcaatgtaagtaaaaacttagatactaatagttacctatctcctgagaaacctctatattggtcgagaaaccacagttaaaatcttacataaaattgaccgattccaattgggaaaggagtagacaaggattaatgcagagtacatcatgtgaaatgccaggctggatgaattacaagctggaattaaaatggccaggagaaatatcaacaaactcagatatgaaaatgatacctctctaatggcagaaagtg

SEQ ID NO: 42798 - DNA, 1946 bp, Bovine  19866881590161
  misc_feature (1)..(1): n is a, c, g, or t
ntgttaaacactatttctgaactagatatttagcatttttacagtaaaggaaatttgaatcacctatagctgcaccttatacaattatacagaatgactttaaatattttccactcatctttttatggaccacatatagtccaggaagaatataaatagaaaataactaccaaacattagaagaagtgttttgtgataagctcacttatcctttctatgaatgcccaaaactactgtgatgacaatcatttttcagatttcttaaaaatgacttgtctgtgaaagaatgacaatgttttacattcagtccctaaacttggaaagaaaattaagtcaaatattcacaagtgccaactacaaagcaaatttgccatggtaaccgtacctcaaaagcctgtggttgcagatttttgccaattagcaactccaaagggtgctattagttccttcaaaaacataagggacgtggttttcatctgtgattgctagtcctcttttacaacatgccgtgacaaaagatggaatacacagttatatacaccctttagctcttacttataatcataaaactggttcataaaaagaacaatgtgtattatggtacagtacttttcaataaagaataatacccttgctaaatcataatcattaactttaactctttcatttaagcagactgctgtatcaacagcaaaagctacaccatatttaatatctagactatatattctttttataatatctatcttctaggctgtgagctagagaatagatgacagatacataatgagaagcttcattactatgaatatggcatctgggagtagtctcagactattcttcacaattaaacatcaactacatatttggattgccattccaaaaatatttccaacatatttttcattcctaatacatttcctgaaatcttattagacattctgtcctaccaatgatgctctatattaataaaataaaccaaaattaattggttaattataattattattatcttgatacattagtatagatgactttatggagctgcaatcaaacatgatgaaacatttactgtaatagttaagtaagcattgataatattaatgtttattaaaatgatggcttattataatgcagctcaaatgtaaataattcttgtgtactgaatattgcagataatcaaactatttgaggagaaaaaaattttcaaatgatttcatttaaaatttcctttgaaaattagacctctaatccttaaccaaatttgttgtttttaacttctgtaaagttatatagataagctggactgaatacaagttttgaattctcttaatatgagttgtcaacccaagaaactgtcacaaacaaaatattgggaaatgtctgttcattttcaaattcagctttaattaaggcagaagcagcattttggtaacatacaagataagtagaaaaattcataagtagcattttaattaatatttttatcttagtattttatactaattatatacatatgtgtaattagctatttcaattgtattcaaagactgtaatataaattacatgtaattttttttcttggattagcactgcatacacatatataagagaaaacacatgaaaagctctcaacaaaaacaaatgaaatgatgctaaaaagataacagaaacttatgaaaaaatttctaagaaataccaggtgtcaaaagaaaaagtgatgatgatgatgacaggaaattttattattctggaataactgttgttgaggatgcagaacataagatacatgtttttatttaaaaactaaattttatatttaaacattgggttttttgaaagttttctttgttatgcctcacaagtttttttcaaggtgaaaaagaaattcttaacagaatacctctttcggaagataatagaagtttatatatatagaaaatata

SEQ ID NO: 42799 - DNA, 2818 bp, Bovine  19866880201651
  misc_feature (1)..(1): n is a, c, g, or t
nccatctcatcctctgtcgtccccttctcctcctgccctcaatcattcccagcatcagggtcttttccaatgagtcagctgttcgcatcaggtagccaaagtattggagtttcagcttcaacatcagtccttccaatgaacacccaggactgatctcctttaggatggactggttggatctctttgcagtccaagggactccatagcatataattggaagttaactaaatgtccaataattggagattcattaagttatggcacatccatataatgggctttatgtgttcatcataattcatgacttcaaaaatatttaatgtccttaggaagtgttcatccataaagttatatgaaaaaagatacaaatttgaatatgctatacagtatgtaacacaaaatacacatatataaattaacaactggaggaaaatatattaaaacattaatactatatcaacattgtaacaatacacctgctagcaaaaggattatggctaattttaattttattgctttgctttatttcctataataaaattgctattatgagtatatatttcctttactattgtaaattattaagatgtcttaaatttctttttccaaatgtattttgtatacataatgatgagtctgttttaggttcaatccaggtgtgttggaagagtttccctgagacttatggagccttttgctagcaaactgtgcaccaggtggacaaagttgtacagggcatattatttacagcatttaattagggcaaaagtgcttaaatacgaatctgatcatgttgttccagaactaaaagttctctgttcgcccccacccaccaccttcagaacaaagctccagtcctttagggtggcacctgagaccatctccgtcagcccttgcctgcttccacagctgacctttcgttctgcccatagccaccactctccagccacagtgacttcctggcagtttgggaaacatatagtgctacctctggtctcagtgcctttagattgctgtttgttcttggaagagaataggagtgagtgagtgagctgaaggggtgagagagaagagccagtatacgggtgcatcatcacactattgctatgaggaaagagactcaattcactggtctctcttgagaagcctgcagaagtcctcccatattcttcactcaaaggacaagagttacaagcatttatccatcaagccccatcttctgctgattaagagttgccacaagggcgttaactccctttcgtgtttgaaaagcatgcacagtaggaatgcctgcctctccctgactccccttgacttactcctgttcaccactcaaaattcatttcggagtttctttggaaagactcccatgatcaccttctataccaaactcctgaagttcccttaggtacccctactccaggtaccattaacataaagctctcctgcaactaaaaatagcatcctataatcatgcagtctacacttgtaagccttttctcctattcctgcccacaggggcagaattttccttccatttctgtgcttctgccagtattctgtacctgcacaggatctggcaatagtaggcactttatacatatatgtcagttgaatgagtgcagcaggtagtgatacacttttaactaagcataataaacattatgcctatatcccatattgtcttcaggcagccaactgagtcattctcccgagccaagtctcaacaacctctactccgaaaccgcatctcattgaaatctcggataacctgcagaaagcagagctatatgaaagcctgtatcatctgttacctgtgtgccaagaagataaaccaatccctatagagaacttatgcagtatagcacatcacaataatacatttgtgccaaatcagcctcctcccagctttacaattgttcacacgtcctctctgccaacctgggtatgctttctcagttagacttggcttcagacttcattgttaacggtcccttgagatccccaaatcctcaattctgacttctacaggatccttattttttttttttttttttcctagtccggggctgtctctaaaagtccccactctgaaaactaaggctaagatttactttattttcctcaatatgctttacatattacattttattttattcattagaaatgccaaggggtagtttttgtacgtaatttgtataatggcacaaagataaaaatataagtaataaatactgttttttcaccaacagttattcagccctattctcaacaaaatttaagcatctctgtcaaaagtcttaacagtatcctcctgttcctcatttctaccacatagcacccaagttcactgctaaatacatactgagaaagtagttaaagaatattaaagagataacagattattagcctttccaagacagtcacaggttcctgattgtaccatattttttagttgtgcttttggtcgatccacacttccatgtagacagaggcatgcccagcaccgctgtccctatgatctcagacaccttatagtctcttgtcgctcagtggggcatctgggagaatcaaacagcctcagagttcttgagtaaattagaaactggaaccactcaatactaataatttccgttaagtcattaaacattcttttctcacaaacaaaccgatacaaaagacattttgtagtcgagacaagggagtcaatacttttctgttaaaggacagacagtaaatatttcaggctttctgggccatatgattcatctcatcgattcagctctgctattgtaatgcaaaaaggctgcaacagacg

SEQ ID NO: 42800 - DNA, 1596 bp, Bovine  19866880247519
  misc_feature (1)..(1): n is a, c, g, or t
nacatccagaatagacttatgctcataaggagaggggaggagagggttagatgtatagaaagagtaacatgcaaacttacattaccatatgtaaaatagatagccaatgggaatttgctatatggctcagcaaactcaaacaggggctctgtatcaacctagaggggtgggatggggagggagatgagagggagtttcaaaagggagcagatatatgtatacctatggctgattcatgttgaggtttgacagaaaacaacaaaattctgtaaagcaattatccttcaattaaaaataaatttttttaaaaaatcaacagtttattctgcactggtattctggattgttttatgtctctattaagaatgtaacatgggactttttattgtgctaacatcttattaggatggttactattttttgagtattctggttgcaaagctatacagatatggagagactggccccattcctacttttttcccccatttgtcctatgtgtgtttgcagaatattaggtttttctggaatgcatatactatgttagagcagaaattcatgtactgtaatacattcattaacatccccaagctaaccatatctgccaaactgaagtacatgctatgccaacagatcccaagaaggaaaagaaaaactgtttgcatcacaaaggctaacactagtttatggcatgtttgtctgaaaacatgacctatgaacatcctaaaacatggatttttctaagcaaatgttagttgactcctcacaaattcttatacctcagccagagtagactgtaactctattttataggaacgagaattatgaggtgactgtcacatgaagggatgaactgtacagccgccacacctaagggactggcaacaagccagcccatgctgccacaacctcctgaccctccacctagggaccctccacctggggatcaaggaggctgctggcaggggagacttctaccactgcattcaggtttcagaatgaataactcacttgcacttttttgttttctggtcagacataatactctaggtcagagataccattatgataaaaaggccacttaggtaggctccataactgtgtagttataaatgatgacaagcaggtaccatggctcatatgtatgtatgtgctaagccactcagtcacgtccaactctttgcagccccatggactgtaggccaccaggctcctctgcccacaaaattttccaggcaagaatactgaaaggagtgtcatctccttctccaggtgatgtccccaacccagggatcaaacctgtgtctcttgcatctcctgccttggcatgtagattctttaccactgcaccaactgggatgcccatgcctcaaaggaaaacacacacacacacacacacacacacaggtgtgagtatctttgaagggcaacccttgggacttctctggtgggtcagtagttaagactgtgcttccaatctggggggcccaggttcaatccctggtcagggaactaagaccccacacgctacacagtgagacctgagaaaacaaaggggcaacccttggtggagcctgtatttggtactgacccaaa

SEQ ID NO: 42801 - DNA, 994 bp, Bovine  19866880392214
  misc_feature (1)..(1): n is a, c, g, or t
ntttctgggcctcaatttgcctacatggttcctaaagagttaaacttcaaagacagaaataaagaaaaatttcatgcagcctttcaaacttaggggaaaaaaatagattccgtcaactttagaatcagaattaatttttcatagacgaagtataggaagtaagtaaatagctgtctggtcatgtccgactctttggtaccctatggactgtagcccaccaggctcctcttcctatggaattcttcaggcaagaatactggagtgggttgacattcccttcttcaggggatcttcctgacccagggatcaaacccagggtctcctgtattgcaggctgtattctttactgtctgagcaaccagaggatgatctctttagataaacaagacagattttctcaatgttattgatatttaagaaatcccttgctagaggtctttagtaaaaaaatttataaattgaaaaagaagggactctagaagaaccaaaactatttaaagccattgggagaagatagtccaatttttctaaatttctgattatgaggaggaagttcagaaaaataaatattcactatgacacctaaattcagctttcccattggctaagggaaccccatgttatgtgaaacagtggcaaaggcaagttgcttttcggaaactaccatcaagttttgttcttttagaggatttaatagggatataatggaagattaaaaaattgatttccactggaagtaggaattttgccaggtgcctataccatgtttggcttcccttatgttcctgctctgcttactaggaggcacttgaaaagtctggccaagcatcatcgttggtgtttcatactgacaggaataaaaatgatgcttgctaatttgacattatgaaaactgctttcaaagcaccattattgcaatgaacattttagaatgatttttttttcctgtcttctttcaccaacagctcatatacaatattttctgtcctcacat

SEQ ID NO: 42802 - DNA, 1682 bp, Bovine  19866880457490
  misc_feature (1)..(1): n is a, c, g, or t
ncttgacaacatgcacacgctgggcctatacatttttaggggatagaagatttaagatgtgtggtagcaggaatggaaagccttctactttattgcaataatgaaagggaagcaaaacttctgtagcacaaaaataataaaagatttaatttctaaatactctgagtatggtattaaaccatgaggtggcataaggccaggacatattgggataagcaggaaaaaaagaaaagcacagacattgcatattttggcttttttatgactagctaaaaaatgtatcagaacaaagcattataacttttggacactgttattcaaagtctacagacttgtgctaacacagtagccactacccaaatatggctactgagtccttgaaatattgctagtcttaactggggtaaaccatattaatagaaattgttattctccttgaacataaataaatagactatcaccatgtctccagttcctgaccttaacagtgaccttggatgcaagcagatagtgacgtcactcaagaagggtctgccggttgatttttccagctaaaggtgcataaaggtggtagctagatgtactgatgcaccaaacccagagatcaattgaaatttttaatgctttactcattccagcacttgtgagattttgcatatttaagaccagggctggtgatatgtttaataactagacttaagttctagggcagtcttggctctttatatggtgttgggcaaatcaataaacattttgggttttatttcccctctgagatgagggatatgaatgagatgattgtttgaatagtctccagctctgaaattccacatgatgaatttccatagaaggctgcgtttcacttcggctacaacctgcctgaatctttctcatccattgtcatatgagaaggcagagccctaagagtgagtgttttgtgttacaggaggtaagagttttggctcatgggttaattgtggagataacggaaggccagatcagggcatcatacaaataaagggcttaaagcttcaggatgctgtgtatcagcagagttctaaagaggaactctgctatcttccagtttatatctatgaagtaactgtgtgtgtatatagtttctcccctcttgcttctattatatattgtgacgtttttcctttgaatgcagaggcaggataagacaaattaggaattacccttcactttggacagtgaactaaatggatcatggcaggaaatgcatgaaagacatttagggagagaaaaatagaaaagaggttcaagggtaaagtgacaggtccttgagactcaccaagaagtgctgttcagtttcaaagatgacggcattactgcaaaggatgcgtacaagagtctttcgaagaggacaatttctctcaaaatgtgtggagataaatttctcaatagccctgaatttttggcaccaggtggccttctcagtatttcaatttacttttatagacacttcctgatgaagacctattcccttttctttattgtttataatgggttgttcaaatatctgaatgcacagtgaccaggcatctgaatcagcaatactcttaataattctttaacaaactctgctgataggagacgtaagccattaaaaaaaaaaaaaaaaggcttccttggtttggaggagatgggatgaggggggg

SEQ ID NO: 42803 - DNA, 1851 bp, Bovine  19866880475984
  misc_feature (1)..(1): n is a, c, g, or t
ngggcaggaggagaaggggccgacagaggatgagatgtctggatggcatcactgactcgatggacgtgagtctgagtgaactccaggagttggtgatggacagggaggcctggcgtgctgggattcatggggtcacaaagagtcggacaggactgagtgactgaactgactgactgactgggatacatttgggaatattatacaattttctggatagtatcttacaattgtttactgattgatcaaggatattcgtattagataatttccttggagttctacacagtgctgattcccattagactgtggccatcaatgggctatagaattctgtgtctctgcgagtgagcgaatagatgggatgtagaggcattggtttgcttcttgaagggtcttaggttagtaatcagaacactggctgattgaaagctttagttttgcttatgtttgataaatgttatgtggagaaagctttgctaagattttagcagaatgtatattccactggagcactgccagttctttggggtgacattgttgtttaccaaactttgtctccttaattattctgagagacaaaatgagatttagaaatagcatacagaaataggaggaacaggaggactacatttttaaaaatctccattaggtcttcttatatagatatttgtgattattttctgctattgttgactcagttgtttatttctctgattttttcctttcaaattctgaaaagcaatctaagtaacactgaagcaatttttctgttagcaaacataaaaggacccagcaaattcatctgtgttctgtgatttgtatacaacggtacttagaaataataatttcttcccctaattgttgctaaataggtctgcagtggatgcagagtccttccataattgcagattaaacaatgttgcagttttgaatgaaattagggaattgaggactcaaattggcaacataacaaacgtctgttatccctgaggaaatttgtgatattgattctaactaaaagtagaaattgtacacactgggatatcaggagaacagtttaaaaagccaatgggatggtagttgtggtggtgatacagatttatgattatgaaattacagagtataatactttgaaaacacctgtgatttttactcaactattttagttgaaaactgtctctgacaacactgttgttctctgaataagttatttactatattattaaaatttaatgcactgtggcatgctcttgagaaatccattccctcaaaacaaacaaattacacttaaagagttctttctagcacacacctgggagttaacttctatatgtctttaattggtaaaattagattaataacacatattggtcaagtgacatatagaatcaaaagagttgaatatgtaaacagcggtatcctcctctacctatcacttccaaatgaatgcaaatgagcatttcaagaaaagtaacgtagaccgtttaagcagtgtttactttttggttcagaatatgtttatagtatatcaaatatctaaggagatttaaaacgtagtcatgtatttagatgtttgaaatcattagtgccattaggacatagagtcttttctcaccgttgtattccctgcatgcatcatttaggttgtttccatgtcttggctgatgtaaaccatgctgcagtgaatattggggtgcatatatctttttgaattatggttttctccagatatatgcccaggagtggattgctggatccattagtagtccatttttagcttcttagggaacttctatactgttctccataggctgtactattacactcccaccaacaacataggaggattcc

SEQ ID NO: 42804 - DNA, 1718 bp, Bovine  19866880482184
  misc_feature (1)..(1): n is a, c, g, or t
naatttttatgattggcctctgtagctgctagggtactggtaaacagatttataaacccaagttttaccaaaagacaatggaatctaaagacagaaagccacatgattatagagctccctcccccaaccccgtcagtctcagagcttgccttagcagtgggtccatggtcattgttcactgcagacagcattcagagtcggggatttataaagctcctcaggtatttctaactcagcagcaggatttcgagtcactgcccttgagcttgtaacttgctagaagagcagaacttaggctggcagatggaaccaaacttgccatagacaaccaggggttgctgcctttgaattgcacagtgtctgttgccccaggccctgtggtaacggtactggggaaactgtagttcaggtcttatcgagagccccctggacacgtgtaccaggtggtgcggagtggtggcgagagcagtagctcttttcccctttgcctcattttgaggattctcagggaaaagctgggttccttagggtgccagtgggcttccctggtggctcaaacggtaaagcgtctgcctgcagtgcgggagacctgggttggggaagatcccctggagaaggaaatggcaccccactccagtactcttgcctggaaaattccatggactgaggagcctggtgggctacagtccatggggtcgcaaaagagtcggacacgactgagcgacttcactttcactttcactttctctagttgcagcaagctgggcgtagtcttcactgtggtgtgtgagattctcactgcggtggcttctcttgtggagcacaggttctaggcacacctgcttcagtagttgtgattcacgggctctagactggggcctcagtagttgcttcatggcatgtggaatcttcgagaccaaggatcagacccgtgtctcctgagttggcaggtggattctttaccactgagcccccaagggaagcccagaagtatattatcttgaagagaatatgggttgatatttggatgtttggtgttttcttagtaatatctagtaagtagtggtcattgttattattataggcccaggcaggaaatctgtggaacaaacaatcaggaatccagaagaaggacaagaaaggaattgatgaaaaccacaaggtcaaaggtctacacaactaaatgttgggattttgctggaggcatgagtagcagactccaggggtttgagtagaggggcagcaagtatgacacttggtagtgagccaactatccactgaggcacatgtttgcaaagatttctgttgaagaccaaggtcatctgagagcgtagacatctaggcttatgtggggagacaaatatgcacatgggatactggtaacttactgacatgaggtttacatgaggcaaattcttctaaaatgaactgtcttatttgttcccaaaacaggctttttcactcctagtgttttttaatacattatggttatgtccaaatttccataatgacaaaatcctctccttgttggtagagttagagtttttatgaaagttacatcatttatgtgtctaaaattattttaaaaagggaaacgggctagaagttctaaacaaattttgtatctattaacactaaaacttctatgcttacagtgatagatatagctgtctttgacagcagtaaagaaaaagcatcctattgctgctgatgctaca

SEQ ID NO: 42805 - DNA, 956 bp, Bovine  19866880551794
  misc_feature (1)..(1): n is a, c, g, or t
ncttgaaatataaaataaagatatgaatgtttttgttatcaaaaacactaaaaaaatttcctgagcctctaatctgtacaaagcagggtactagtattttttttttttggtgtctcccatttttcttcaaatttactattcagtcttatccacatgctctcagctcagagtggtagacacacatagcttgcatctgtacaggatcccttgccttaccgcttctcattaggtttggccagtgggagatactgacatgagattgagggtaggtaaagaatgaagttgtagtagttattctcctgactcccttcttaccaaattatcctagatgggctgctttactcacagagccactctcttcaggttctagtaaatgcttggtgccctgcccttcatgcccagggaagtactggttccctgtagctgctcatcctagagtagtgcactctcttctgttggttaaggaaagcatacccaccacagttttgcagatagtccctgaagttcaatacaagttgctcagttttaaggttctgtctctttcacatctggattcaaactcatacaaaaataaatcagacaagtatcaggtcttcaaagagaagataaagcatgtatcaacataaatatgacaagacagaatttaagtatgacaagacataatttattaatgtaccagcggaaaagtgatcttgagattagattatatagattcctcatccctgctctccttctaattgtgaacacttgagcaagacatgttaactttcttggatgttggtttccttaggtgtataatgagagagatgaactcaatggacttaaagattccgtccaatattgagattctgtgactgcaggcttgctttcagagctgtaaggggagtagtagttaaatgctctctgggagtgacagcgaagtaagatgggaacctgggaggaaacactgacctcta

SEQ ID NO: 42806 - DNA, 1650 bp, Bovine  19866880597286
  misc_feature (1)..(1): n is a, c, g, or t
naaactgtttactgagaaaacattgctatttggttatagaatatgtaggtagcagatctaaaagttgacctagttaactgaatcttttccattcttctaactgagttagtatttacaataattcaatggaactattaaataagagataatgataatagctattatttacagagccccttccatgtttcaggaacatataaggcacttgttacacacattatttcaccagcttcccatctacctgtgtgagaagaagcattgtccccaatttacaggtagagtcattgaggttctgggaggtgaaagaaaaatggtccaggtcatgaagcttgtaagtctggacccaggtttgctggtttcccccactatattcacttggcttcagtctgtgtgagaagggaatctgtcctccccctcagacatgattagccaaacggtgatgtgacaatgggacaggctgcttttcacaaattaaatgttgattgaaattctgtgagcttggagtggatagtacttctggctgaaaacagattattatcattctgtttgatgctggttgattggaagccaatgaaaagatattctgacttcagccagttgcattaaaaattttaagttctcagttttctctttttactaggattatcttgggttctgaagtgttcttgccttaaaccctgaatgaattaacaagagaagaacaatactatatttctcctttttaatcaaaatgtcatgtctttgaaaggaattcttctttaagagatgacagtttgctcttagcttgcttgatgttgtatttagatatgtttggggaagtctttcacaaactcaaaattctgggaataagtaagctttcattcttagtctcttttcactcaaaacagcaaactcacacaacaatagctcaatcttactcagtttctaggcattcacttttaatccatgaagagttcctaaatgagcattatgtgagccattctggattactcaatatcctaaataagatgatgggtgccctacaaggacagggcctattgcttaaattatttgagtgtactaatgctgtattactatcatatttgagtttctgttgttaatctaaacacaatatgggataaacatgtccatgactctccttgatattcagatggggattctgtagattctggcactaaaacagatgtgcaacagcacagatttggagcctagccccaaaaggtcattggggctttcggtgttgatcacgaagcaaagcacagttcccagcacatattcagtgcactgtaaatttttgttaacttcatgattgggttgaaaccaggttctgaaggctgtatcacagtaaattatgtgtcaattgaatttttgagaatcaattctcattttgaatgtatagtaagagcttgttatacttaagaactttgcctagaatcatctgtaaaatgaatagcttcttcttaatttgcctactctgtaagttttacttaaaaaaaaaaaacaattatatattccctcacactgcacatttcatacctgcgattcatttattttgcatttgggagtttgtatctcttaatctccctcagctacttctctcttcctcctaccctcccacctctggaaaccagctcttttttttctctgtat

SEQ ID NO: 42807 - DNA, 2090 bp, Bovine  19866880632325
  misc_feature (1)..(1): n is a, c, g, or t
ntcagtgaaatattttttcttgaatattttgctgatgaagcttgaagattctatagtctgtctgtttgaggtactattatagcaaggttgccatgggaaaatagctgtccttcccttaagattaattattgtttagtcactgtcattaaaatgaggagagatgattcaaaaattattaattctggtctccgaaattgacgttgtgcctacaaatctattgtataaaatcctatggtcctagtgaaagaaaacacttcctatgtttctcctacaaaactcaaaagtccaaagtatcaaagaaaaatatttactgtttttatgaaatgcaaactacttttggttttatatccctggagttttgtaatactaaacacccattatcttttctcttctgctcaaatctttttcttgccttgtctatgcattttgaacactctggatcagctgtaaccagtatttcccgttttgtacgtcagggcagtaataagtgcctgtgtcacactctcccacccaaactgtggactttctgctcaaagggacaagcaagcataatgatatccatctgggagggagcttaaaatagtgtccatgcgtcattttgcagttaggaatctggatatggctaatgaggtgttatcaatcaagagattaaaaaaattaaaatcctacattaggaactgctcctgccagaaacagtggattttgtaacagctgttttatattagatgctattgtgttctttagcagcaaattacatagatcagaaatgtacagttaacagtttccccaagtggggttgtaaataagcctgttgtcctctgtacaaagatattgcaggaaggagaggaagctatgagcaaaatcttggtggacttaatgcagttttctgctcccccttgaaggctagctagttcgctcagaagggaatatatatatatttatatatatataatcctagtaaggaaatgatcctagggaagtgatcctagtagggaaatgaccttttgaactctggaggggatggtattaaagcttttacctggatagtgtctcctaaaaacctgaatttgattggttccagaattcattaagccttaaggggaaaaattatatggaggtggggtagagggaagagagagagaaagaggaagccgtgtatccagcaagcaccagtgtttcagctccaaatgaagataagttgtttggaattaatagctaagagacagtcggtgcattctcctccttattgcgactcagtaaattagacttagcatgctcaaagcctgcttcatgctgatgttcctgccttctggaaaataacacgcttcttccccacccccctccttttttttctctctctaacagatgacagtaataatgagaactaaaaccactcaagtcagcgtatgaaagagaactgtctatttaaaaaaaaaaaaattaaaagacatctcttggtaccatctgctgaggtacaataatgttttgtaacgggttttggaaagcacattaaaaggcttcatctgtgcttgtcctttccagttagtcaagatatagttgtgtttctcctgtttgatgtggattcttgaatcatgtaattatttctaatttatgtctaaattgaagcatctcaaatacaattttaattgggatttcattaggcacttattataccatgtgtcaaatgatagttgattattcttagcctggatatagattctgaaaaagatagcaggagaatgatgggtacctctgaaagctgatggtgctcaataaatatgtcttaaaaataatcagttgatatataattaacgtaagtaattactgcaattaaactcagtttgtggaaccctgctgtgttgttttccatcctgagcttaaacatgattgttgttcttttgtccaaataaaattaatgtaatgagagaaaaatagaataaatataggcctggataacagagagacaaaaatattttccctttattagaaaagaatggcatgaagagaaaattttcctttcataaggaaaacgtatatgaggctttaactatatccttttcacctaaagaattagatacactcaatgcaca

SEQ ID NO: 42808 - DNA, 1979 bp, Bovine  19866880681507
  misc_feature (1)..(1): n is a, c, g, or t
ngtgaggagatacccccttgtccaaggtaaggagcagtggctgtgctttgctagagcagtcatgaagatataccccacgtccaaggtaagagaaacccaagtaagacggtaggtgttgcaagagggcatcagaaggcagatacactgaaaccataatcgcagaaaactagtcaatctaatcacactaggaccacagccttgtttaactcaatgatctgtaccttaccccctcccaagtatcaaccctgagaaagctcagaaggtatttccttcactaactaaagcatttgggaatgtattagtggaaggaacactggaaatgttccatgtctactttctttgtcgactaggtacatctgtataagtaggctcctgatttcagtggggataaggaggacccagagtaggagaggccaaagcagttcctaatcactagagagaaggtggcacgtctaccataaggagtagcaaaaaatgtcaagtaatcagaaatttttagcctgcagagatacttggcagaggataattgataactatgtttatagaaacaaccctagatgagcagcctattagagtattgctggatacataaaaggggaaaatgatttctcaaagccaaaaacctgatctgtggacagacaaaataggcacagattgggaagatatttgtgctccacatgaatattcattacggtagacaagattccaagtaaccaggtggataaagtgatattctcagtagacatcagtcaacctttagtcatagtcacccagtgcttgttcagtggaccaaagtggccaaagtgacagggatgtaagctatgcacaggctcacaaataaatgggttttccttcaccaaggaaagtcactgcatgacatggctcgtgcagtgccgagtgtctaatttaccaaaagcagttcacattccattcaaaaaagacacgaatggaggtcccatctaaacctagtccctcagcttagatgttaagtggagtcagttatagaaaatgcttctctctctgagtttgaagcagtagaaatttttaagctctctaagtgattctacttggaagccaaggttgagaaaaactatgtcagtaaactccagttcagttcagttcagtcgctcagtcatgtccaactctttgctaccccatgaatcgcagcacgccaggcctccctgtccatcaccaactcccggagttcactcagactcatgtccattgagtcagtgatgccatctagccatctcatcctctgtcgtccccttctcctcttgcccccaatccctcccagcatcagagtcttttccaatgagtcaactcttcgcatgaggtggccaaagtactggggtttcagttttagcatcattccctccaaagaaatcccagggctgatctccttcagaatggactggttggatctccagtacaagaatataatccagtcttttttttttttttttgcttctggcaaaataagactcttaacaattgaaaatccctattgtttcaaagcaaatttaagtcaatatagagcaagatttaaattaatcagagatttaaatacacattgatagattttaccactaattctgccttatcaattactgcttaactttgacttcctattcttaagcaaatttttactatttagaatctttgcagctttggggcattcataaaaccaactgactaacctgagaaccccttatctgtgtttgctttgtaataaacaggttgagcaaagatttaaagcctagagtgggatacaatgcagctgctggtgttgtgaatttttggtgacttcctcaagccagtgcaaggtgattaagccacagaggctgcctgcctgggtgtgaatcaaaattctggcccacttatataggatcatctcatagccttgtgaggagaaggcagtggcaacccactccagtattcttgcctggagaatcccagggacggaggagcctggtggg

SEQ ID NO: 42809 - DNA, 3148 bp, Bovine  19866880686318
  misc_feature (1)..(1): n is a, c, g, or t
nacctggatccaaatttgaccctggttcaactgggtacaaactatttgacctgtttgagcctcagcctcctaatgtcaaatgcagatactaagatctcctatagagtgtgtataataaagtgtctgacagagtacagtagtatggtgtctgcctggggaagcaacctccatcagcaggaattttgcataaagactgtcagcatcatgtcctatagctgatgtctccagtcaagagcctacactcatctaaaaatggctttccaggctttttagcagctacatcatcagccatatttagccatgtggctttcttgcctgtggcttctggagtgccctggtacctcctgcttccctggagagctctaggcagatggaaaagtcaaggttcttttcgttatcagccctctggttcttgctgagccctgcaagagcagtgacaaggtggcatcacccatcaaggaactagtgagagggccccagagtagcattcagagaaggaaaagtctgtcccatgactgtgccacacatctccttagtcttatgggattaagtttggggcaggatctgggtctcctgagtctcacagctgaggtgaatttccagtctccattaggcctttcttccagaggatggatgccaactgtgcccttctgacagtatctgaactttgtacattaggcaattggggatttggcagaagtcccaaatcactctgcacaaagctccaaaggactcaggaacacctatgcaaataggacgctgagaacagtctctgttatcctgttctatccaaatctatcctgagatagatttgctaactcagttttaacagtgcctctgagctatattcctgtgtgcctacatatatatatatatatatatatatatataaactttctatgtttatctcatctttaccgtcagatttcaaacctgaggggaactgctctggtagtcagtcttcagtgggtgcctttgctttgtaagagcttagtgaatgctcactgatctagtatacaggtcaaccttgtgaagtgcttctgatttaagtgacaggcttacctcacagtaacacacacacaaacacactctgtgtttaaatgagggtctaccactatggtttgccacttggcatctgggcctctgccttttacaccagagcaaatccagctttaatgtgcacaggaaccatttgaagatcctattaaaatgcagattctgacccagtcattctagggtggagcttgcgattctacttttataaacaggctctctggtgctgcctgtgctattctgaggacggcaattagaacggatatcaacaatggagaggccttgcttcaacctcttcagctcccattgtgcttgctgagttgcagggtcctttagatgaagtttctggtccctttctctcctcacttcttaattcaggctctgttttctttggctctccagaccttactttggaactggaaactcagggccaaaagtcgacattttcatgacagtcccattggagctccatcagagttcagagcaaggttaaatttgctctggctgggctgctgacaatcactttggggtgcccaaactcccagacttaaagatggaaatataatatctccccgaggaagcgtttttattgagtccatgaataagagagcacgccttttgttgcaactaatttcagctttactccctccatgtggcgtgcctgcaaggcagcggtgctcatggctggtgacgtcggaaatgaggcaggatttagaaaaaacctggaacttatgtaaaagtagaaagctatttaaagcagcataaatggctacacggagcccgtgcttcttttgatattatttaggattttaaaatcatgagataattcgtctgggaaagaaacatagtctagagcctctccctctctctcttcgctttctcaccaccactaaaaagtacataacaaagatagttggcacagacagatcaggaggatgtacatctgcttggttttaaaattttattgcaaataaacaacatagatagaaggcagttgatgttacctaataaggcaatagaactgaaggtattttcttagaactgtttaaataataaaatggccatcatcaaaaaaatccacaaacaataaatgccagagaggctgtggagaaaagggaaccctcttacactgttggtgggaatgcaaactggtactgccattatggagaacagtgtgcaaactccttaaaaaactgggaataggactgcatgtgctgtgctgtgctgtgctgtgtctaagaaggtcagttgtgtctgactctttgtgaccccatggcctgtagcctgccagcctcctctgtccatggggattctccaggaaggaatattggagtgggttgccatgccctcctccagggaatctttccaacccagggatcaaatccaggtctccgacattgcaggtggattctttaccatgtgagcctccagggaagcccaagaatactggaatgggtagcctatcctttctccaggggatcttcctgacccaggaatcaaacaggggtctcctgcattgcaggcagattctttaccagctgagctactagggaagtccttagaactgccataaaatccagcaatttcattgctagagttacaccctgaggaaaccagaatttaaaaagacacatgtaccccaaagttcactgcagcactatttacaagagctaggacatggaaacaacctaaatgaccatcagcagatgaatgtataaggaattatggaacatatatatacataatggaatattactaagctataagaaggaacacatttgagtcagttctaatgagctggatgaacctagagcctattatacagagtgaagtaagtcagaaagagaaacacaaataccgtatgttaatgcatatatatggaatttagaaagatggtaccaatgatcttacatgtggggcaacaaaggagacacagatgtaaataacagacttttggattcatgggagaaggtgagggtgggattatttgagagaatagcattgaaacatgtacattaccatatgtaaaacagatgaccagcacaagttcgatgcatgtcaactcaaggcacccaaagttggtgctctgggacaa

SEQ ID NO: 42810 - DNA, 781 bp, Bovine  19866880689051
  misc_feature (1)..(1): n is a, c, g, or t
ntccccccaaatcaccagtgataagccacactgactggattctatacatttcccatgagggaaccctgggaattcagctactctttgtaacactgtttctgaagggaagatgtttgactccctcattttctcgtttctccactgatcaagaaatgatctttaggaatgcaaaccctacctggaaaggtgagggttaatgctgtccacctgagtagagaaaggtgactagtgtctgctgttttgtttcaggcaaaaaatgaactgagtccttgaaacgagatcaaagaaggctccccgtgaaagctgcacagagcaggcagttgaccctggaacatttggtatccctgggaacactcctgctttcagttggacagaccttgagccatatctgctccaacattctccccttagcatttcccttatttatgtcccccattcattctgaaaacccccttcctccctgtacccagagaaacagtgggaatatccatcccctgtttctagggaaaaccctacctcttctataaagccatatggattcaaattctgccgcaaattttggagcccacactataaagtctattttattttattcttctattaaatttatactgtttcatgtagttgaatattatttttcaaattattttgtcaagttttttaagggcaaggactgattccatttattcctcacataacactttacaattctgaaactcaagaatgttttgaagatgtctggttactcacagattccagacagcaagactgccacctgcct

SEQ ID NO: 42811 - DNA, 1768 bp, Bovine  19866880719220
  misc_feature (1)..(1): n is a, c, g, or t
ngaggagaaatgctgacctgtggcactgggcaagaaagccaggaatggaataaaaggaagtgaagggaactctcactggaatacttttttcagttgcatctgaagccccatgaggaaggtttcagatatgaatcactgacagctgcctgctaggctgttacgcttaatcctttacattctgagtatgtcatggtactccataaaaaagcttattgcctaagctgttctcactctcctaagttcattctcttcaacaatgccagaaatataataacaggtaagcgaccaagaaaataagtgaccaactattgtataagattgcattttgctaaaggtcaagacaaattatcatgaaatccttaaagatgctgttatgtggttgctgggggacaaaaggtttcttttcagaagagattcttagaagcagaggctgctgtgtttcaatcctcagctaacttttagttaatgactcttgccttttctcctaccggctctgcttattaaaaggagaatgcaatctggaatgtgtgctgtcagaatgaacagcagggtcagtcactaatcccaaattgtatgcccccaggatgcctgctacagaatgaggaaatgcttacatttgattaaccttccaggtagagaaagggaggcagccaggggtctgcagctacatgacatggtataatggtagttttaaaatatggcattcctagaggatgcaagaaaagtcacagcacagggtgctgacttagtgtaatgagtgaagattatgtctctacaatagcaagcaagctttgtggggaagaacattgccaacctgggcattcattttcttcaaaatatttataacaatatgcactaatcccttatgtctgtgtgatgctttatggagtacagaatgcttcaagggcaccaccccatttgatcttcaccactgtccttggtaacaaagggttagaactgagaagcacttttcaattttttaaaaaaaaatcctcctcattagctgtcaatgcactatttcttgccctggtcttttctttaacaatttctttagatacaatgaagagggaaaaaataccattgggtgagtcaaggggatattgggtggatagggaatagataaaaccatgtagtttggaaggatatctcctgaaaatatgagtgaaagaaggcacaaggtctcttctatctctggggctccaagtacaataaggaaaaaaaaaactatcaattttataaaaaatagtttcattctattgctaaatctagcattatatgctaattaagtcaacagtcaaaatttgatatttttgtgaatatgaggcccagaccaatggcacccctagagacctagcaatagataatagatgcttttggtatgctactgcaagatgacagtggactaattagaggcagttctttaatctcttaagaaaggtatgcctttgtacttatttcccctcagcctttgattccatatccatgcattgaacaaaatcctatttgcttccaagatcaagcttagataccatattcaccatgaggtcttcttgacagcacttttttttctgtctgttccagtgtgtcaattatgactaccatgttatgtcatatatgtgctttccatgctctctttcctagcagagtctgagttcagaggagtcaggggtggagtaaaacaccaccaccaaatatgaaggtactcatatttgctgaataaatggaacgataaagcaagaagatttaccataaaataatcaagcccagt

SEQ ID NO: 42812 - DNA, 756 bp, Bovine  19866880724744
  misc_feature (1)..(1): n is a, c, g, or t
nctatcctagtaaaagtgtgatctttcagtttcactctaaggcgcaggtctcccaggtggtttgctcattatgtgatggcacaggaaggagaaacaaccctcattggaagtagggatcaaaatgagagcgatagagttctatagaacagtattgcataaaggaggagacctggaaaggtgaattctttcatgtagtttgaaaaaagcgagcttcactggcaggtggagaacctacgtggagcctttgctcccctctagagaaccacagtgcagacttttaagagcaaaactagactatcctctacagttaacagttcatttgagaaacagctgctggcctgctgcttggccctaatagagactgaatgtctgatgatgaagtgtagacttatagaataccttgttaccatgatggcattccacataaggtgcttctgaccagggaatccattaacagtgtctgatacaccaagccataacgtgggcaggcacggtagcactgcaccatcaagtgggaatgctctatttgagcggccccatgaatgtgtggctcaaattttcgtgattcctacttttgctatactccctcctttctctcagcctacccctatgaccagctgaccaaggccaaaaatctcatgcttgctttatgacgatttcgcatgaaaagctggcagcatctacaagtaggcggtggtgacacagcctgacttgagcggcctgaaggacatggtgaggggacctcctgcaagtagg

SEQ ID NO: 42813 - DNA, 2672 bp, Bovine  19866880734236
  misc_feature (1)..(1): n is a, c, g, or t
ntatagctgaaaaggcatccatataatccataacaaacaggacacaatttttgtgggagttctgtgggagtcaatttttgcagaaggcaattacactggaggataattgcacttgcagtgttccacaggtctgtgaaattagcaattaagcacagaagtagctagaacaaatagaaatagtgtagatgggctgtatgcagcaatggcaagctaaaactttagaactctgcaattagaagataaactctagcaccaggaacctaaaacaccaggattaaatgggggcgggcagggtgcagggggagatgtaggaagatgtaaagatgatgcataattagtagcaggtagcaagaagaggggggattccctggcagctcagactgtcaagaatctgcctacaaggcaggagcttgccctgtgtgctaacttgcttcagtcgtgtccagctttttgtgaccctatggactgtagcctgccaggctcttctgctgatggaattctccaggcaaggatactggagtgggttgccgtgccctactccaggggatcttcctgacccagggatcgaacctgcatctctttcgtctaacctgctttggtaggtgggctctttaccactagtgccacctgggaagcccacaatactgctctgtaacatccctggtcacatgatgctgtgatcactcacctagagccagtcatcctggaatacgaaatcaagttggcctcactatgaacaatgcaggtggaagtgatggaattccagttgagctatttcaaatcctaaaagatattgctgtgaaagtgctgcactcaatatgccagcaaatttggaaaactcagcagtggccacaggactggaaaaggtcagttttctttccaatcccaaagaaaggcaatgccaaagaatgctcaaactactgcacaactgcactcatctcacacgctagtaaagtaatgctcaaaattctccaagccaggcttcaacagtacatgaaccatgaacttccagatgctcaacctggatgtagaaaaggcagaggggccagagatcaaattgtcaacatccattggatcatcgaaaaagcaagagagttccagaaaaacatctacttctgctttattgactatgccaaaaactttgactgtgttgatcacaacaaactgtggaaaattctgaaagagatgggaataacagaccgcctcatctgcctctgagaaatctgtatgcatgtaaagaagagacatttagaactggacatggaacaatagactggttccaaatagggaaaggagtatgtctaggctgtatattatcaccctgcttatttaacttatatgcagagtacatcatgcaaagtgccgggctgcgtgaaacacaggctggaatcaacattgccagaagaaatatcaatagcctcagatatgcagatgataccacccttatggcagaaagtgaagaattaaagagcctcttgatgaaagtgaaagaggagagtgaaaaagttggcttaaagctcaacattcagaaaactaagagcatggcatctggtgagatgaacagtgagagactatttttttgtgctccaaaattactgcagatggtaactgcagccttgaaattaaaaggtgcttgctccttggaagaaaagttataaccaacctagacagcatattaaaaagcatagacattactttgtcaacataggtccatctagtcaaagctatggtttttccagtagtcatgtatggatgtgagagttggactataaagaaagctgagagccaaagaattgattctttggaactgtggtattggataagactcttgagagtcccttggactacaaggagagccaatcagtcaatcctaaaggaaatcagtcatgaatatttattggaaggattgatgctgaagctgaaactccaatactttggccaccttatgtgaagaacagactcatttgaaaagaccttgatgctgggaaagattgaaagtgggaggagaagggaatgatagagcatgagatggtttgatggcctcaccaactcagtggacatgagtttgaggaaactccggtagttggtgatggacagggagggctgacatgctgcattccatggggtcacatagagtcagacacaactgagcgattgaactgaactgaacataagttataaagcaaaatagcctttaatggaaataaaagagatcattagatccaagatattttggtagataaataggcttcagtagaataaatgggatatggaaaaaaaaggcatcaagaataaattctaatctctgtactatactatgatatgaatagtattttcattcactgtcataggaaatgtggaaatagaaccatacttttagggactgcacatgggtgttgtcaatttggctatataattcttggtacaccaatatagaaaagtcattttcacacctatttggcaggttcttcatatttgatattaattaaaatgtctctttgaatattagaatatcaataaataatgcttctctcttcaattctcaaatgtagaaccaactcatagactgaagtgtcagacagatggaaatgaaacatgacttttattgttatatagctaagtggaaaaatgatttgagactgaagtttggtttgccagttgtgcatcctaga

SEQ ID NO: 42814 - DNA, 747 bp, Bovine  19866880752241
  misc_feature (1)..(1): n is a, c, g, or t
ngtggggagcgggtggtttcttgtttgccctcagcctaactttaggttttcttaagagaaaaacttgtccatatgtggctctaaactcattgtgtctatgggaggaggtcagtttgggatcttcctgtgttgccatcttgaacagtaacttttctagatggaattttaaagtgaaaaagtgaagtcactcagtcgtgtccaactctttgcgaccccatggactatagcctaccaggctcctctgtccatgggattttccaggcaatagtactggaatggattgccatttccttctccaggggatcttcccgacccagggatcgaacccaggtctctctcattgtagacagacgctttacagtctgagccagatggaattttaaacactcttcaaatcatgcaacagcttgcagcctacaggtttttagagaaaatcataggaaataaactttttaagtagcatcagtgtgaaaagaatgaccctggaggcataaaacattgtcgaggtttttctaagtactccttgagacattggggcctcagtgattgagatttgaactcctgtgatctacttaatactgacaaggttattctaagggctttgtgctctcaaacatgagcagcatttcattaccctagatttctgcagaacctctgaaatgccaagaatttgcctgctgttcctaagttaggagaaatactgcctggtccagcaggtcggaggaccttacctttgcatggggccca

SEQ ID NO: 42815 - DNA, 4334 bp, Bovine  19866880771527
  misc_feature (1)..(1): n is a, c, g, or t
ncatgctttttggaataactttaattgtacatctaaaaccatccttcactaacacaggcatgacagaaaggcacagagctatacgctaaccttaatgagatctatttaaagcatctcaacaattattttgtaatggtttcaagttcaaaagtaaggtacatttctatatggagttctaagagcacctcagggctgaagtgctctgttcataatctgggactgtggttcattaaaggagacaggagctggaaaaattaccaagttgcaagaaaaatgtaagttcctgcacagtttgtgcagcattcctatatcagcaacaaacctttctcaaacaacctcgattcctcgcagttataaactgggacgtgtatagagaaatatccacgctccacatctgctgatcttcatcatgccccacaactgaattatttctgaacattactggagacgccccgcttttgttttgcccttttatttaagtaccacttcctccaggagaccttcccagacccctggaataggttaggtcttgcacagtgtatttacataggactctatacttcccccatggcatttctcatcacattctgtctacaggagttaaccttttagctaacctatgactcaatattgtagatagtgaatcaactcgtgtcccacccccagctcttactgaggatctcttggaatttggagattctatgttaagactcattaatctgatctaaatcccctagttcatgaattaagaaacaagccctatctatggtaacatacaacaaccagtaacacatccaatctgagtcaggcttagataagaatttagatttcagaattcaacataagggacttctaagtgttgagatcattttttaacccatcgcaagaatctgacctatgtttcctccatctttttttttttttccagcaccagccaatcctctcaccttgctctcagcctggctctcagcctggctctcagcctggctctcagcctggctcagacaggcatttatcaaagtgaaggagagatatactctgattctatgccacatctcttaaaatctacatcatcctctaaatattctgccaatacgcacccctcagatcactccctgcctctgcttctccaacacagctagtgttccctcctctcctactttatcacacttctcaccattgttgcccttgcaaagactcttctccccctgcacaaacattttgacttagattatcccaagacagtagcccctggtctcagctaataatctttgggccagcaaattccctagatactaagttcaaaagctaaagccactacttcatccctacctatcaatgtccttttttacaactttcaataaagtattagatgaaagtgaatgataagcatttattccgttttctactcaggaagcatccactattatgtgagccttatgggaagcagtaccatgcatgcctcctacccctggagagagagaaaggaggatattctcgttcttgcagcagtttagacatttgctcatgatgtgaggctccaccaatcttgccttgtactttgagtcttgagggagggaggtgaatgtgaaaggacagtgaaagagtattcctgactcaggactgaaagttcaaggtgagatgccagatacagatataagtagtgtatcctctaatgtatgttcttccctctttgctgtgttatatgcatacttacatattttaaactcattttctctcacttttccctaactactgtatatggactgtgttagaaatagttaactttatagtatattccttagatcacagaaaatggaaagaggatcatgacagaatatggtcaaactgtggatattctaagtttttaacaggatgaagtaactgacaagactaagaaccctatgtgtgaagattggactatacagccagttctacaaagaagacttaggttcactgtaactggagacatgtctttttaaagtacataaagaatgggtttccctggtggctcagtcagtaaagaacctgcctgcaatgcaggagacccgggttccatccctgaatcgggaagatcccctgaagaagggaatggcaacccactccagtattcttgcctggagaattccatggactagaggagcctggcaggctacaggggtcacatggggtcacagagtcagacatgactgagcagctaatacacacacatgaagaatagtgtagatgaagtacatgaaaaagtatgtggatgttggacagccaacgaaatgactacaaggaggaggcattttttatttttttggttatctgcgatctgaatcctgtcttaattttagaggattctccattgtgcaggtcagccataggatgaacagatgattcattatccctcatgggaaagctactaagagttaaatgggcactgttaataattatgctggaataatcaacatcaactatgactgctccaagcaagccagggaatttggctgctcaaacccaggaaaaggcagtctctgccttctacaatagaaaccattaagagataaaatccctctccctgctgcctgacagttaggacacaggcacctttactggttcactcagacactccttgaagaaattatgtaaaaatgcagtggctattaaagaatatcactagcccttgtcactactagacgtgtgagtacgcagtggccacagggtcaacaaaaacatcccactagccacactgttgttctttgtatatggccacacttgggtgtggtatctagtctcccaaatggctcccaataaaccttacctacaggtatttcaccccttataatagtccccacttaaacaatgaatgtagggcttcccaggtggagccagtggtaaagaacccacctgccaaggcaggggacataagagatgcaggtttgatcccctgggttgggaagatcccctggaggagggcatggcaatccattccagtattcttgcctgaagaaccccatggacagaggagcctggcaggctacagtccacggggtcacaaagagtcagacacgactgaaacgaattagcacagtgaatgtgggttgacctgagacttgcttcaaccaacagaatgtagagaaagtgatgctatgccagctcaagacctgcaccttgaaaagacctgggatattctacttttgttctttggggagccctggctcatcatttaatagtctggtcaccctactggagagaccacaggtagagagggagaagctctaagaaaacagagaacaagaaagttccagcagttcagagggagctgtaagatgacagagaataagaaaggcctggcagttcagctgtccctgtcaaagtgtcaaacttgtaaagtcttagacatccagccagttcagtgttcaaatgagtgtagccatgctctgcccagctaacctatagaatcaaaagagatagtgtttcttaaagccactatgtcttaagtgttgttacatagtagtaagtaactacagctctaagtaatcagtttgccagcctattttagctattcccatttcatgatttcatgagactagttctctagttttcccatttcagtttattagtctttatacaaacctcttttctatctcctgatttactgattagttttctaattttcctgcttcagttcattagtttttatgcaaacctattttctctctcctgattcattgattgctctctaaatataattatctccactttttctcactgtaggtaggtgctccccaacatttcaaacatgaatgcttcatttttacttaataaattgcatgcagcaagtgtactttctagtaaccactgactgaaaaaacataaaatggcaaaaagcaattaagaactcagaaacagctttaagcagatgtgtctatccttcagaataaccacagaaatatactcaaaaacaaaaaacaaaatatccatgtagaagcatgttacttacttagtacttaggaagtttacaaatgtctggactctttccatagctcctcaccctcaaagtccacatcccagaggatgggagccacttagtaggcacacgtttctcttttgcattcccgtgagatgaagtggttcccaaaatacactatttcttgggaaagaaaaacaatctggaagacactgtagctctggacagataatatcactgagaacagaataaacacataatttaaggaaaaaaaccccaagataccatcttcaaagaatgggctagtgggggaaatcaacattttggagatgcactggtatcaaagtttgataacaaggtaccgaatcatagaagcaaa

SEQ ID NO: 42816 - DNA, 1365 bp, Bovine  19866880809462
  misc_feature (1)..(1): n is a, c, g, or t
ngtaggcagtttacagtaatagcataggaatgaagctatgcttcaggcaggaaaggttaaacatttttaaaatgcaaaccagataaatttttaaaaacctcaaaatagtcttggtgccacattgcctctatgccatccccagccattctcttaacaaaagacgcctctctctctcgcaggcttctcgtttgtcagaggagagatttccctgtctcctcagcggcacactctgtataatttaaggtgactcactatacaggaaagttcaccttccattagcatgttttctttagtaagcactctcttgcaagtgctgtagtgtaaacatgagtgcctacgaatatgaacatttattaaatagcactgatgaatatttcaatacctcggggagagcaattcacagctcaatcattcaggctgttttaagtgcagcacaggacaattccactacatcttccattaatatttaattgcccattttattctgtttacctttttggttaatatataatttaaagcccttctactaaaaaggggggaaaagagaacagctgttcatctgcttttaacaaatctctagtgagagcttttatctcatttaaaattcattgcaaagagtttttatttaatatcagtaacacaaaacctcaggtattaaaagtaaaacttggaagtggctctcaagcagaaagcctcgttgtgacttgggtttgattacacatccattcctgagtggcaggcattgacaggaaatgtctgaattgccagcaatggcgccatgtgtcacgtcctcatgaaatagaatcacagtaactcgacctgacacattctgacaacatgtcggaaagttgttatgcaccctgcagaaagtgagtcctgtcatcccagcaatgcagattttactgacgggataaaacacttctctgcttgctaaaggacaagggagtcaaatatgtgtgtggccttgaggagccggggaatccctgatgcgctaaccattcatttctccttggcttcccttggtggatgctatcagcttggcttctctttttgttgggttcagagccccagggcttcactcttgtcatttcaagttttctttcctcccagttggctgcagttgtttgtcccttaaaccctacctggtggcagggatcctgacatttactgacagatctccacgttattggggtctttctagacctcccaggctagccagtaaaactgacccccacatccaccccagtgagggtcaccctatcccttcatcctcagtcacctggaatcaacggctttccaggacagtgagctgcataatctcctgtttttcctgctctgctgatctctgcagcggattcattcctt

SEQ ID NO: 42817 - DNA, 1090 bp, Bovine  19866880812466
  misc_feature (1)..(1): n is a, c, g, or t
naagcccctgttttcctaaaggtatcccactttacagaaaaggaaatcaaacaaaatgatacaaagcacaacataatacaacaataacaaaaaacaatgtgtaatccattgacatagtttggagttgtggcttattattttttaatctcagaaaaaaccttaactctattgcttaaatatagagttctgtaaaagccctaggctttctgtgagcaggctttttcttttataaaggaatggagattacaggaaaaaaataccagttggaggaatccttttaagtaatttgcatatgaataatccccagggatgttatttaggcaaaagagtatagcaacttctacaaaatggaagtgacgctaaacagggaaaaataattttatagattgtgtttgagaaaaagtaaactaggaaaggaaagatgaagagtctgattcttttataaatgttatgtacttggatagtaaacacatcagtagcaattctgtgttttgtttttcttcagccatgcatggtgcttttttggatggatggtgtttctttcttgatgctgtcagtcccagttcagatctccatatcccagattgcttgtcttacattagctatgtattaaaattgccttatgtcatacactccatgcaatctagagaaatatttttcattgtggaacaaacttgaaaaaacaaaatatttctatgaaaagcaatttgctttgctaggcttcgcttgtattcccagtacaattactatagattatatgagtttgaaaatgagctttcttccttgcaatccactcctacctctgtttgattctctcatgaagtcataatcctctgacataagcctgttaccatggagattaatgtgatgttacacatttgctattatttatgactttgttgtaggatggatccaaagagaaattaatctctgatttcttcaccaaatatttggggagacatatgagaacaggtgaaggtatttcagcttgcacctcttaattgggaaatgggaagtgttttcacttgtaacaaatatccaaggaataataatttttaagaatattaaacatcttgaaggaaagttgaaa

SEQ ID NO: 42818 - DNA, 697 bp, Bovine  19866880843487
  misc_feature (1)..(1): n is a, c, g, or t
nctttcaaagacaatgggctgcttttctggatgcctgatgtcctctgccagaattcagaagttgttttgtggaatttactcagcgtttaaatcttcttttgatgaatttgttggggagaaagtggtctccctgtcctattcctctgccatcttctgattcttggaagttagtttttataattcactccaaaatatttttaagacaaaactaacttaacataaactgagacttgagtatgcatttgtaattcatttcaccatatgataaagaagacttgatacaataggctccaacttggagcctggaagttcaacccaggaatatgtatctgtttcataaacagttgttttaaagaatataatatacagatcacttagtaaagtgcctggaacttagcaataaccatctcaataaccattactaatttactcaaatgtataattttttaatgtaacccaaggcctcactcagtaaattcttgatctttgaatttttactcaacagaaatacagaaaactataaaccagagtttctttgaattcattagaattgccaaaaataatatagcttttgtgaattttgggaccactatacagtaaaagataatggtattctgaaaaataaggctatttcttgaaatagaactactcatgacgccacactgaaaccccacattaatttctattgtaatttttg

SEQ ID NO: 42819 - DNA, 1420 bp, Bovine  19866880882027
  misc_feature (1)..(1): n is a, c, g, or t
ncatattggagtgggttgccatgccctcttccagggaatcttcctgacccagggatcgaacccatgtctctttcatctcctgcatttgcaggtgggttctttactactaacgccacctggtgtcttacaggtactcaatttacatatgatctctgaatactagtatacatttaatgaatcagggtgttttttgcatatttctaaatatgaaatataaatataaaaagacccttttgaccaatgtctctccaactttagcatgcacaggcaggacctattatagcagatggcctggccccaccccaagtttttgattcagtgggtgctgtggggctgagtttacatttctaagaagtccccagatgctgctgcttctgctggtccaggtaccacactttgacaaccactgcattagtctttactataaatgagaatcagaaacaaaactccaaaccacaaaaccatgtatctgaaaggttagggtcattgagttgtacttaaaagagtagatccaaagccacttagtaaacaaagtgtcccttacagaaactcaccccataacccctcttttctctaaaaggcggttactcctttccagtcagttctttaaaataaaagagaaattaaaaatcaaatatatacttgataaagcactgcaatttaaaatgagatgttcttttttattttactttgcaagtctcttttctaatgagctgagtgccctttggaacattttcttattctctatataagttcgccttccccagtactacctgtctttacttatatggtatatttgaaatgactaacacattcccgattttacagatatagaaatggttatataacataaataatttgcccacagtcatggagattttgtggtaatgatagagacgtctttctggctgctcagttttctgatttataatccacattttacaatatttataaatggacatatcctgtacattatacttaattccaggtctttagtgattgcctcattgcaatgcgatttgctatagaataagacaagttcaggaaattggagaataattcatcatttatatcccaaatccttttagaagaatgtgggatcatgaataaacaataacaaaatcatccccatcctcttagaaaccacattgcaattagccaggtgcatcatactacatatttaataaataagataaatttggggtggtggaaaaattcagcagtggctctgggagcacactcgtgagtgaaggaaaggcactttccttcagcctaattcaagttagtgaattaaaagatttgaaaagtattgatacaaaacagttttcttgattaataacatatatgagatccagatgcctaaagttcaacgtcttcagagcttctgggttgtgtcatatgtagaaacacagaagtccct

SEQ ID NO: 42820 - DNA, 931 bp, Bovine  19866880905455
  misc_feature (1)..(1): n is a, c, g, or t
ncgtggcagatgggagaatctaggttatccaacttggaaactaaagaccaaaagaaatgtcttatggggcatgttggaaaaatgtctccaaactacaccagctgacttccttctgttccctggttcacctgagctgctgactgaatgcgaaactcgagagctgcacgttggtgagaaagagctcaggctaaaccttctgtattcatcgcaactgcaggattctcaaacaagaaactgttaaatatcaaggaatgaagaggaaggggcattgaagaatagtgagaaagagtgagaaagaaagaaaggagggaaaataacaagaaaggatatagagaaatgacaaataacgcaaaaaatacatctctaatccagaaaacagttatctttgcagtactgccacccagcgattcaggggacctgccctaagccccagtacttagaggcccctgatctgtaggcttttggctgtaacatccctcaaaggaaatatctgtgagcccataaggagagcccacctgagacccacccaccttcctccttccagataatgctgtgtgtattcaggagcctagaaatccttgctgataagaccctcaggtgcctggagggttcgtgagggccttttcttctgtctgcatgatgatgatgatccctgaggctgctcaggagtggccagagcagctgtctgggtagaggaatgaaagggggcttgacaaggtgggggcatccctcagcgagcacgcaaaacagctcaggatttggaagggactcagaagtgggaagggaagggatattcatgttctggacccacaatgttagggcctggtgacctttttcacttaagtcagtcaatccagtcacgcagtatttccacatttctcattgggagaaaaaatatgcggattagaccttcctgtaatattttttttca

SEQ ID NO: 42821 - DNA, 1346 bp, Bovine  19866880920790
  misc_feature (1)..(1): n is a, c, g, or t
nctgttatttattaaagcgcagataaactgatggattcagcagcagtggaccaaagttgagctttgccacaggatgctgaagaccttgtcagatgtgtgcagccagcagacagctgtaaggcaacccttgacctgagagctccaccagggtaatcagtgttgcaaatgagttaaactcactgtggcatatgctgaaatctaaaatagctccctcagtcaccaccctgtgcctggatgagcttgactgctgttagtgtgtactaaatgtattctcaaagggttaacaaagcaataataaagaggctaacaacttctctcccatcccccacttccccaccctagatgacttcccaaacccatttaaaatagagatggattccagtgagtcttctataccacaacctgatcttgggctgtataagattacttttcaacaatataagatgcataagtgccttttcatcgtatgaagaaagcatgcccactggcaaatgaatcatattataaaaattgattgtatcccaaaagggaaaaaatgttattgaagatccaatggcctgggatgatacaccattgatcattgtaagaaatacttccagaaactgtttttaatctttccgccagagcattagcaattattctttagcccatggtgagtaatgacttgagtttcccagcttctcaatcgataaaacatttaccctaccgctacaaatgtgctcttcgcttagacaagcagaatttttcttccaattactctttttttagtgtgacctcataaaatattttaaaacatatttcaaggctttttttttttaaaggagaggaacaatgctcttccatgtgcttatattttcctctttcttttaagaaataagtcatgacaatttcatagttatttgaatagctaggactgctttttttttttatcattttgtgcaaacttaagacatgatttgagtccagccaactgctacattttggggttagccaataacaaaacaaccccctttccattttgcctgaacaaagatttgaattcctttgaaaatcaacaacaaaataactcccaaggaggctgagcaactcctccactttctctgcatggttcataaacctatagcactggctaatggagagcagccataaaacacactgttatcagggtaacaaatagctgtgcagaaaattagagataaagacaaacatccagaaatgccctctgatgactgaaaagttaacgttccagcaagttctcctttccaaagaattcatgctgtatttccatttgaaattacaacctcaactcaagcaaaagtgcccactactatttcttatcacaattg

SEQ ID NO: 42822 - DNA, 696 bp, Bovine  19866880922782
  misc_feature (1)..(1): n is a, c, g, or t
ntaaacaaatgggaggggctgtattgcaacacaaactttatctgaaaaagcaggcggtaggccaaatttggcccataggctgctgctgctccctggtcgggataaatcaatactattctcaaaaatctaaaaagttcaaaggaaaacaacccctctcaataattaaactcttatttaccaggtttaccaggatgacaacagcacagctatttcttttattaaagccaaagtatcaaactgacccagagctctatgataggtggtctccaatatctggcactgaggcagcttgacttttgcagagacctactgatctgaactcaaggttttgtttggttttcagtaacaaccagtaactcacagtaaagtgtatgctaaataaggaaatttaattacattcaaataatcagaatctgtttattttgcttaaaagtaacaggaaaaagctaatttgatttcctaatgtaatacagaaaaacacgtttcctgtatcagagactccctggaaattctgatggaaggctccagtttgacatcttaaaggaaaaggagatgatcctcttggaaaaagacaacgagcaggctgtgtatctgcccacttctactttctctttgtcaggtcttttcttgctgaaactggatttgtactgattagaagctatggtttccagagaattcaagcatagcataattttt

SEQ ID NO: 42823 - DNA, 1432 bp, Bovine  19866880925623
  misc_feature (1)..(1): n is a, c, g, or t
ngcaatggcaccccactccagtactcttgcctggaaaatcccattggatggaggagcctggtgggctgcagtccatgcggtagcgaagagtcagacacaactgagcgacttcactttcacttttccctttcatgcactggagaaggcaatggcaccccactccagtactcttgcctggaaaatcccattggatggaggagcctggtgggctgcagtccatggggtctcgaagagtcggacacaactgagcgacttcactttgacttttccctttcatgcactggagaaggcaatggcaccccactccagtactcttgcctggaaaatcccatggatgcaggagcctggtgggctgcagtccatggggtcgagaagagtcggacacaaatgagcgacttcactttcacttttccctttcatgcactggagaagtcaatggcaactcactccagcgtttttgcctggagaatcccagggacgggggagcctggtgggctgccatctatggggttgcacagagtcgggcacgactgaagcgacttagcagcagcagcagcagcagcctgtctgggagaagccaatcctcaacaaattatgtcagctttaagatgttccataatgtgagtgacttaacctttagctccaagtgtgtttaggaaattagaaataaaaattctcatatcaagttgtgttgtgagaatttaatgtgaatatgcgcagcaatcattaaaaacgaattgcctcattgaaagaatgaggtattaatatcggcagaaaagggagaaaagagggcatgaaaagagaacttcacctgcctcacattttggtcagcatgtttctgggtttcccaccaatgccccatgtgtccccatcctgccaggctatgctccacatcagtcactcctccaggcctgtgtgaagattaatgaatagctgcttgaataggaccacaaagcactttcatctctagcacaacagaaagaagcaatcaagtggagaatattaataacaagccaaatcctcatcttctggaactgcaatggaaaatctgggttatttgtttcaatatgttttcattctcacgactttagcaaaattccttagcgctcactgggtaagaattcagcctgctaagaattacttccatttaccagaaactgcctttttctcttcactttacatttcccaaagcaagacaatgttttgatgttgtcacatcaacaaatatgtattcactgcccacaaaggctctggaggaagctgcagcgggaccagcagaagctacaagcaatgagaatcagaagtgagttctacttttggttctccctctcttctgaggaagccttcacttaacccttccatgtttcttgaccttcctttgtaaactgtgatcacctcttgtgttcccctcctagctgtaactcactgaggt

SEQ ID NO: 42824 - DNA, 1120 bp, Bovine  19866880986649
  misc_feature (1)..(1): n is a, c, g, or t
ngctgtaccactgggtggatttttgattatcctaggacctcacatatccatgccctaactacaatgtgaagccttgttctttgaaaagacacatttgactgtgtcagaaagaacagctcagcagtagaatcagtggtgtatctccccaaattgtacattttaaattgataaccctcctctgaacatactttctattatgtcaaaatgacccagagtaaagacttattcatttatgacaagtgattggctagatatgttttcattaaactggattgtatttagtacatgtgggaagagcaggtataagtggtaaaaggtgttttttatcatgaaagaacatattttagtagaccagagttgctggtaactatgaaaatttgattccagaagggtttcattcagggaaaaaatcatcttgaagatcaaggaaatattgaacattcatgacaagcagctttctctgtctcctagggtgtgtgatgggaacgggatcagagtgtactgtgattgtgctgcatttgagcaaggaccctgaactgtctgcaccaggacactggaggtgtctattagctccggttggcccggtgagggtggaggagcagctcccatggagggcagcgcagaaagctggctaagagtacagagactggggtcaaacatttttgtgttaggatctcctttacctttcattagatgagcctctactaaaagagagagtgggagagacagagagagtgggttgctggggctggggatggggggagagagagaggttgagaaagagaaggagactgagagagagactctgagctgagctgaactaagaaaggcttcctcctaacatttccagaaagaaatctcttcatatcagaggcaaacacctgtgtttattattaaatttctggtcattactgagaactatgcggaaagtaagttatagttcataagaactatacatgaacatatagttcataagatgctatttatctggtaatcatagtatatattttactaagaaaaacactcagcaaaccatatatagcaaaggcaggtgctacccagagaagcaagtttctgtaaattatctgactgtgtaagaatcatgtaacagcaagtcaca

SEQ ID NO: 42825 - DNA, 1954 bp, Bovine  19866880996306
  misc_feature (1)..(1): n is a, c, g, or t
nctgtgaaaatagctggatggttattgatcccctttattagtcggcattgacccggatttttgtaacctcggactaggatgtgagggcagagtgggcggaaggagactggttctttccattgtttaaaaattgaaatggcttttaaacaagttgctgccattccacgtagtgcccagctgctgcgtgggcatcttgcttaaacacagaaacacagaaaagctccctgtcatcattgccttcacacttctactcccagtctgttcagaatatgctctcctggggcactccttggctttggagtgttttgcagggaaggaaatgaaggccattactaatgagcagcattactaggggcagcaaccttgtgctgagtcctccataacccagcccctgggcatcgagttggtgctctcaggccactatcatgaaaagcacgcaccagcagggggcttggagccagatgatgggaggcctggcagcctcgggaaaagacaatggagctcatgaagaggatgaacagaaaccaggactttcattccagctctgccacctgctcatatgtgagcccatgtcttctgatctgtgaaatgggtatcataataccacgtggcaaagttgtgaggatgcagcaaatgacttgtttttggtaaagcataatgtgctgggcaagtctaagcaacacttgtcatcaggggaaatactactgatgctcttaacctgccaggtgagttcctgatagggtcatatcccaggcttcccttgctttcaaagctgcttgcctcactggactgctctgagtctcatagacctccacttgtctcttacattctgaacattctgctcttgacttcccagtctaacagtcatttctgcaagagaaaaaattgttttttgctggtttatttttacgtggaacattgatgacaatgttgaacttgacttgagctccagattcctggaaaacagcaacatttaggaaatcctcctacccttttgtgttcctgaacatggtttactgcaaacctcccacccctgcctcctcttaaatgttccttgtgtttacctttggcaagaccagattcctgtcctttttctcgtaaatgattagctgaaccatttatccccactgaccaatctggataaaatgcttgttaattcaactggaccaaacttaagtctgacttttcttctgagaatcacctgaccttaaggaaaacaatttcctgtccacctattcacctcactccccacagggcattccagccttactgtacttctccccaaacaagtgattcttttctgccctcactatgggggtgcttgcaggtattttgatcagagtgctttccctattacaatagtgttttcaaataaaatctctccttacctgagtctaggtttgtttctgacagtagaaaccccactttttttttttttttttttctggtttcctttcctggatcccgttcccttgccatccttaaaatgttgatgttcctgagttctgcttgcataaatcccacagttaatcccactttgaataatgaaagaggaggagggaaataagtttcagataatttattataatgatagtgatattaaccttttccttaatttccttaggaatgttttccttaatgtttgcatttccccaaatgctgatttcgccttccttgctatgtcacagccttacttcctaaagagtcgtctgtagttctaacctcttttctcactttcattcactcttgaacttgctgctagttttcctcagctctcccatatccatctctccactactgcactaaaaatctgttagccattgttactgcctacatgccaaatccaaccagacatctccatatctttatcttttttttgtttttttaaacctctctggagcatctgacactggtgggagaaaaattaataacttggtgtgtagattccctttgg

SEQ ID NO: 42826 - DNA, 1385 bp, Bovine  19866881016238
  misc_feature (1)..(1): n is a, c, g, or t
naacaatattgcataggaacctggaatgttaggtctatgaatcaaggtaaactgaaagtggtcaaacaggagatggctagagtgaacatcaacactttaggaatcagtgaactaaaactggactagaatgggtggatttaactcagatgacaatgtagcttatgtaagacagtttaatatgagagcaggtcatctggtttttggcttcagcaggttacaaactttaagaaaaagtctgtctaagatgtaggttataacatcttccttcactgtaagcaagcattcacaggatggaaaaactgcctggaatttctcaattataggagcttgcatgcgcactcatagccacttctgtgcaatataaagtccctggggccaacatgccttcttgtttctctggctatttcctaccaaatagtgttcccaagtctggttgcctggccacacagcccaattggtttatcttacattccttgactattgtaaatagaggctcatgggatccaattattattgtttcttcctccctgatagagttattagacctgtgagctgtgggcagcctctacaggattcttgggggatacttcaatacaaagattggagttcagcttcctatccagggataaggtaaaaggacatcaccagaagagaaaggcttgaactgcctattaaagtgtcagaacccctagtaatggtgaagtaagatattactttccagatttttaggttagattatccacttaaatcaatcattttaccttactcatttactccagggctaatctcttttaaaatagtttagatgactttttcttttaagcctttgagacattctttttctttttttcttttttctgtatatgaaaaaatgaacatatcatggaattgttgcttattagtctctgcatgaaagaacaattaagtgtttgacccgtcaaaacacatgatgtaatctctgaagctctttctgtacctaaggatgacttgaagcttgctgattgggcattcttaagttattaggctacactcgttctaagatttagacttgcatggatgtgaggaattggccatacttaaacatcactccaaagcatgaatttcactgtgtgaagtaggacctgagatactgattcattttattgtttttagttaagttgtcctcaatttaaattgactagctgggttatgtgagctttgtgcagtatcctggagcttgaattagctcttaggggttgcaagtgggaatttaatgatatccagtaaaacaatgacaaaacggcccaatcaaggacttcttgaggcttttgcagatgattgtaatgctttttcagtaagaaaggccctgccagctagccacctaattaagcaaaatgacttgtctg

SEQ ID NO: 42827 - DNA, 905 bp, Bovine  19866881107367
  misc_feature (1)..(1): n is a, c, g, or t
ntgggtaatacagcttttctcagaaagcccaagacaatttgcctattttccttatggccaaatggaagcatattagggaactagaataccctggaagtcaagaaaatagccccttgggataaagacatccagctctatttcagaaagagagagacaaagaaaggacacacgcagtgcacaccagagcctatcctgaaactggctctgaaagaagaggataatcatctggggaggagaggcagtgtgtcccccacaacagtgagccatattaacatggagtttttcatgtgatgacatgccatagtgttcttgcctggagaatcccaggcacggcagagcctggtgggctgccatctctggggtcacacagagtcggatatgactgaagcgacttagcagcagcagcagtactaatagttgatagatttcttcacccactcttatcccaccccaggtgaaaataaagagtacgtggccagttcacttgaatgtttatgctactctttaagttttttcagcaaagagattgtgccaggtttctggatggccattcaggctaagtgtactgcaaaactatccattcagtggcaccagaacccatgacacattaggaaacatctttaaactttggcattatttccatgaaagcctaatgtgctgcagaattcaagaatgttttttcccttctgcaaaatgttcgcaaatagtgtaggaattattactccattgtatccactaggaaactgaggcactgattaagtgacaaatccattagaggagctataccaactcatgcttggaaatagtacctcattatgtggaggctaactttgaatgtgaatagttggagatgtcaccttgtgtcgcgtctaagcagccacaccccatacagtgctcaccagttt

SEQ ID NO: 42828 - DNA, 1014 bp, Bovine  19866881111750
  misc_feature (1)..(1): n is a, c, g, or t
natttaccccaaacaaatacatcgaggcaagcccatttctccttctcaggttcagagggttattttctctgtgcacattggaatggcctggaaagtctttacctctggagttatgcttccagatttctctttacttgggaattgaagcaaaagagtacacacttaaaatggttcaggagaccatgacgcaaacattttgaggtatttaggaaccatgggatgtatgagacacacacaatgcctttgcatcttaactcaaatccagtggcatgggcttccctagtgactcagtggtaaagaagctgcctaccaatgcaggagacatgggtttgatccctgcttcaagaagatcccacatgctacagagcaactcagcccgtgcaccacaaataatgagcctgtgcgccacagctagtgaagaccacaggccctagagcccatgctccacaggaagagaagccactgcgatgagaagcctgagcaccacaactagagagcagccactggtcactgcaactagagaaaagcccatgcagcaacgaagactcagtgcagccaaaaacaactaactaaataaaaattatttttaaaattccagcagcgtgtgaatcccactttaagcacaaggaaggtatattgccttcatttgttcactttaaacgaccctgagtataattcacactgaagttgctgtgaaggaggaagtaggatagattaacctttcggtgccacacctggtctccggatttcccaacgtgttaatgaatttcctgagatgggagcgtcagacctgctggcagtacattaatctgagagagcatgcagcaatacatcctccagactcaaaggtgggtgaaccaatttagaaaatgttaaatcaagtccaagccgttccctaaagacagtaccaactgcaaagcccaaagacatctggaaaagttactctggcacagcttactcagttgctgctaatttctagcctactttcttcattgcatctagaaaataggggat

SEQ ID NO: 42829 - DNA, 810 bp, Bovine  19866881115525
  misc_feature (1)..(1): n is a, c, g, or t
natttaaaaatgtgaaaatatatttgctctcagactgtgcaaaaagaagcagcagctgtaggattctggtccttgtagacaataaatgttaatttagtgatgatatctcttttctcagattgcatgatctgagtgaacctgcatcagcctgggactcctaacaggtgagttatttgaattccattgtatgttaaaagatcctcataaataatattacccctcgatctctctatcccactctcacaccctgcacccctctctcccttctctgtctctatctcattcttgaaagacaagatgggtttaatggcaaatgtgccccaaatacttccagcattaactattcatgctattaataccaaggtaacatagctgatgacagcttttttcattgattcataattcatgtccctgttaaagggtatctgatccaatgatttttatgtatttcattctgaatatgctaatcttgtcagactacataaaaagaaaaccataacttatttctttctttactgaggaattaaaggagaaaatgcctctgctgggggtggatgggaaatcccaaggcctagaaaatgcctctgagtctgaatgatcaactcctgttcaagtcaaaatcagactgcctcttagaaaatcctgctcaagtcagtgatggctgtcctatggcatcatggtaatatttcttatgtactagcttcacagagtttcaagagacagctttcttttacaaatatacttcaggaagtggttgtattttttaaagcaatttttaaaactctgtttaaagaacaggttcatcaacgg

SEQ ID NO: 42830 - DNA, 1129 bp, Bovine  19866881127931
  misc_feature (1)..(1): n is a, c, g, or t
nggtttgtttgagatttaaatgaattagtacatgttatttgctaaaaagagcacctgacacatagttagggcttaataattatttgtaaagtcttgaaataaaagtatccattcaggtagtttaagcagagatagataaaccaggaccattaaccagcattggcaatcactctgctaggacagatcacatcatcagatatattaggtgctctagaccttaaatatgggtctgtcctaagttgcttcagtcacgtctgactttttgcaacccgatggactgtagcccaccagactgctctgtccatgggattctccaggcaagaatactggagtagtttaccatttcctgctccagaggatctttccgacccagggattgagtctcttacatctcctgcattggcaggcaagttctttaccacatgctgctgctgctgctgctaagtcgcttcagtcgtctctgactctgtgtgaccccatagacggcagccccccaggctccgccgtccctgggattctccaggcaagaacactggagtgggttgccatttccttctccagtgcatgaaagtgaaaagtgaaagtgaagtcgctcagtcatgtccgactcttagtgacctcatggactggagcctaccaggctcctaagaacataaaagttagataggattttgagtaggcataacttaagtgtatttttatatacctgagaaatgaactccctggaaatggaaaatccattacttatctttgcttccagaaatctcatccattttcttgggtcccttttattcttgctctctttgaaggccaagtccacactagtaactcttggatagtgatagttgaagtattggggttgaatttcacagtccttaaaaattgaggaattgaacttaatttgaagctgtatcatgcatcttgattggaatgacaggaagactagaatacgattatgatgaggtaaaattgtacaatatttaggatcaactgaatctcattaagaatgaactatttgtgcttaaaaccagctttaatgaaaaagttattctcattactttgcaacagtttctttctgaagattttcctcctctgttgcccccttttcctttcttgaggggcatatctg

SEQ ID NO: 42831 - DNA, 1595 bp, Bovine  19866881154337
  misc_feature (1)..(1): n is a, c, g, or t
ntgaaaatgaacttgaaaccctatgctgaacaaacaaacaaaaaaatagtattaatgggtgacttctagtcaagaaactctgtcctttcatgagaaattcaagacagcaaggctagtttccctaaatgcagcacattcattgcaacctacaaagcccctgaaataatgccaagcttttcctcttctgtgaaataaaaaaaaatgtccccaaaggaaagaaaaaaaaatgtgactgtaaatgaaattgaaatatcctttcaaactgttgcatataattcctttcagcttaacattttgccttatttttttcaccaactgacagtttaggtaataacttagattcaactcacctgcttttaccagtgccctgtgacgctatagaatgacaaaatcaatctgtgagtctcaggatttgagagaagggtatattctaataatgcttcaagggttgaccaagaaaatcccgaaaattttggtcttctcttcaaaaaattactgtaaataagttcagtttatgaacctttaaaatttttttttcctgttaactccctgaaaggtttaaacagtttttgataaccattatcattcaaactagttggaaatacctatcaaaatgcaaagggttgggttcactgttcccgaaactatgggagattagatatcagcagttaattgcattgtcatgttaaatatttatttcttatttttctcacattctgaaccactttagtataagtggcaaggatctaataaagcataaaatcagaagtttcaaatatgtagccagtgcaatgaaagtcagaaacttggaaaaccaagttgttgcaaaataacgtaaaattcataatgggaaaaagaggcttttgccccagtcatttaaagaccttttctgaaatgcatttgctattcctccaaaatcattttcctactatttgtttctagatttcccattatataaactttcacctttacttaaattattgtgttattggaaatatttttaatcttgaggataaattttcttaatgttctagattatagtaaaagggtaatatttttgtcaatctcaaataccaaaatcaaataggaaaagatcaaacttgagatgttcaacagatgatggccttggcatattctttccagaaaagactgatagaaaaaccatcatttcctgtctgctctcacctcactaaactcccctactcctcacctttttagtattcttttggggagatttcctttttacactggaacttttgccttggaaatttacaatttcttaagtgctgtcatttattaacatcatttcaatgttgcattcttcaacactatgaagttgatactatcctcatctttcaccttggaaactgaaacctaaaaggttaattgaattgctcaggatcacatagtaattgaccaccttgcaatttaattcttcagacctgattctaacttacctagaatgttgcctgtagtgtagatcttcacaattttcaagcagcaatataatttcttggttcctgtcagcccttccttctttcttgtccacttcctttgaattctcagctttcacccatgttcaaaagactcatatt

SEQ ID NO: 42832 - DNA, 1413 bp, Bovine  19866881218195
  misc_feature (1)..(1): n is a, c, g, or t
natgacttagtgactgaacaacaacaacaacaacaaaatacctacttggctttttattggaattacttagatcaatttgaagagagctgccatctttccaattcataaatatacctttccatttaaaatttttttctaatcttttattgctgatacaaagaaataaagttaatttgtatatataaaaaagatactaggccactcacatagggcatattaagggaatgtgatattagttttgtaggatggcaaacacctacactcagcctgtatgagaagtagaagttggagttggggggagggactatcttgaaatgagtcattggtatacgcttatgggaagggaagtgtccttgacctcaagtcaagaggaaagggtgatgagaaccactaggagagttttggcccatgtcccctgtggtttaggagccacagggccttatgtcctttttctgttctttgagtccatgtgtgtgtgtgttctaagttgcttcaggtgtgtcaaactctgtgcaaccctatggactgcaacctgccagactcctctgtccaaggggttctccaggcagaatactggaatgtgttgccatgccctcctccagaagatcttccggaaccagggatcgaacctgcatctcttacatctacctgcattggcaggtgggttctttaccacttgtgccacctgggaagccctctttgagtccattctgcctcctaaatatggttgttctgatagttgtcatgtgtccatgttaagatggccactttgtataggctgatgtatgccagttgctctgaagccttgataatgctaactgctgctaattcacttcagtcgtgtccgactctgtgtgactccatagacgacagcccaccaggctctgtcgtccctggaattctccaggcaagaacactggaatgggttgccaactactagaaatgaatacacacatttacttttctttaaaaatataattgataatcaagaaaatgcttttttaataaacttgtaagagttcagagtccatacaaatctatggattcttaatcaacttgatacaagaagtagcaaatatgaacaaaatatgttccctccactttggaaattgattctttggagagatttagcctcttgatgaacccatattatctttttactgttaggaaaaaaccattcaatctcattgaaaggagaatatataatactgcatctgggaagaaaattagatgagttagagcttgcatggtgtagaaatgacaatttttgattaacaaattgtcagcatgggggcacattccttcaattttcagcaatttgaaatcccagcattaatcagcttttgctgaatgccacccactgttcatacagcagtgaggaaggcagtaatgaaaaattgaagaactagcatt

SEQ ID NO: 42833 - DNA, 1423 bp, Bovine  19866881295659
  misc_feature (1)..(1): n is a, c, g, or t
ntaaattgaactacctaatgaagtgactggggagaagttagaagggtgtctttctacacagactgtgtgtacacagtcacttgggactgtttcatagaggctgcctgggaagccttcctataaacctgaggttaaagcacctctcagcatgctccctaaagtgtggctatccttccaagaaggctctatctgaatatggttcatatcatggacttgactccaaagcaaaaggtaggaaatatttgtgcatgggggaatgctgatttgaaacatcattttacttgacctctgggcaagtacatagactaatatctctgttctattgttgagggaaaaaagatacacctctaaagtctttagtaacaatatacaagatttaagcacctagctgaactctgaaataggcttttctctccctaactctctaacatgttttgtttccatattcatatacagtagaaatttatcaactacccctctatgctaggagattttctaaactttctcacttattatttggaattactctgtgcagtaggtattaggagctcttttataacccctactgtcacatagtaggttctcaaaaaatacttgaatgaagaaaagctcaatggataaatgagtatacaaatggctcggatagtgttaagtgatttgatcataatcacagaaataataagcaaacgagctggcatttgagttgaaaaaatgaggactggggtaattgtagactttgtctaaggtagtttgcccattaaaatattttagttatttaggatatatcatgagtgactttcaaatgttataaataaatgggactaatgttttctcacggattgtatttattgatgaaataaaatcttaagaaggatttctgccttacttccccaattcattggcaagtgagtacagcaaagtcataaacccatttcttggaagcttatgagtattcccactccttatcctgttcaacattctgacaagcagcttacttgtaaaatgtacccccaaggcaagtgcagcaaatattctgacagcaggataaccaatctctagttgaattaaggaacagaatcctctattacgtgaggaacacaagactacagaagaccatgaacttgttcccaaggagtgaagctacttgtctgcagctcgtgttcactcatgagagggcaaaatgtctgtacagaccttcaagctgacctcgtctgaccattcagagtgttgccaacacagaaccctgttgtttccataacagttgccttgcattccccagtaaacctttcttccaggaactgctgaaaattttgacctgaagctattctcagatatggtcacccctggaaaaatgccagagtacagatgctggacttccaagtgagagcttccagggggtgctctttgctcgacactacttcga

SEQ ID NO: 42834 - DNA, 1710 bp, Bovine  19866881336606
  misc_feature (1)..(1): n is a, c, g, or t
ncttataatgagaaatggggattaaaatgctacctgatgttctagaacactgtctaccattcctcatatcctaaaaattctgggcagaattgaattggaaaagtcctttcagcacccattatctcttgagtttaaatccaaaatctttgccaatcccttctagggcactaaactggaagatctcttatctatctttccagcgtcatctctctctgggtattaatacatttgtcttcagccacacttgtctcttggtcttcctcaaacataccaaagggctcacgacctttggctttgctgcttccctctgcctggaagttttcttcatataattgacttcttcatcagtcagttttgttctgatatgacatttcttcaaggagcctttctctgaccatttttttttttttctaaaataaccttcctcaagccctgtttctctctaaccttttaaatattctttacaggatttatttcttccttttaaatcttctccacaggatttattactacttaattcctttgtttcctgtcccctctactggagtccaaggttcctgatgaaaagggctctgtcttatccaggccacaaggaagtagtcgtcgtctcatgtagggtgctaggtaagtggttgctacattaatgaatgctttgttcatcccttcactggttgaggggttctggataagtcagtttacatcttttaatcatagtttcctctttcatgagatttttacctagatttaataagataatgcctatgagaaaataatgaaagttgttaaatatcacacagatattaagtaagtattgttatttttccttctgaggttaactgggcctccaaacagctatcaaaattccttagattcagagtagaaaacaccagcgtttgctttgcacagcaaaaacgagtctctgcacttcagccagcaaatggaggtattgtgggaggcatgccgtgaggatttcccacctctaaacaaccacagtgttgagtccaaagaaaaaacaaactagaatgttgtaagactcatccccaaggatgccacggtcttttgtgactgtgtctgttgggaaggcaaaatctctaatggcattcccatataccagtctcaattacttcttgtctacaaaagtattttgtatttagctactgtttttgtcaacttagtcattattcagcttctgaagggtgcatgtaagaaaactgaaaatgaaaggcagtcagctcctactttcttagataatgacaataatcatgtggtaaattggtatattcttcaaggaaatatgtagggagattcattttaagcaacctacctgtattaaataggatctacttaaaataatcatacagctcagatggtcatgacataggcatactaagagttacatagaaatacttcaaaataagggtagccgaattctgcttttaaatctcaacaatgttcatataatacataggaaagaaaataagggagtaaattattagctgacagtgcatattaaatgcaaagtcactaaaatcttttcatttacttaaactgatggtattacaagccacgtgctaataaacagaggagaagcagcttgctgtgtatagtcactccttagtaaggttaacaaactacattaaccattcactcatctgtaactcataattaatcactcctcgaaaattacattgtataataaatgaggacaga

SEQ ID NO: 42835 - DNA, 721 bp, Bovine  19866881340076
  misc_feature (1)..(1): n is a, c, g, or t
ntgggctacgagtcagtaaattaatatatatctggaatcagactgaaaacccaccatttacattgcagtgttaggtgtcagccttgtgctcaacattttcaggattattattattactgtattgtaaaaagcaagcaatattttagtcactaactataggccccactgcaaggacaccactatgatctattactcattaccatagattcctgggggcaaaggcacccgtggctgccactctgcccttgctgtccattacagtaaatatacatactttgcatctgacagttaaggattgccacctggactcttctgttttagaattttataatcctcatagatattagggagcccagggacatggcagcaactctaactaacacacctagccttcacaaccataactaggctctcaaagactctggtaccctccatcccagtatattctttattgcctaaacaaggtagtgtcccttgcttaatccccagggtacatagtcatgtgaatgtgatggagtctcagatattacctagtaatacagagatacattctgaattctctacgttttctgatttcttccttcacaccatgccaaggaagttctggcatattagccctgtttaatagctctcattgttgcttaccagatcccaggaaccgtgcctacaaattatcaccatcaggtccaaggattccttgccagaacatcaaattccagtc

SEQ ID NO: 42836 - DNA, 1013 bp, Bovine  19866881341053
  misc_feature (1)..(1): n is a, c, g, or t
ntggctctcctgacacatccttgaaaacccagccaagatgctgtctcctccaagagcctgcctggacccctccagaggagtctgggtggatctctgatgtattccctatgaaccctggcttccctctcacagatccttcctcatgtatctgtctcttccactagcacaggggtatcactggatacccattgcagagcctgacataggtattccgttcatagaagcatatttcctttcattaggtagttgtaacagcctgaaatgcttctgaaataagatatttggttatcatgttacatgtctcaggtaacaaactcagttcaggtcctagttaagtacgtgccaaactggtgcagacagtcgtctgtactcttgttagtctgaaccatctggaattgctagtaattgactgtcactggctgagaaaaacggcagttccatgtggctcaatctatgactgtgctgtctgcattaacagatagcattctaattggaaaagatgtgctttccttcctacacattttagttgtttcgccaagtgggtacaagcatctgcatgcttttcttagggcaagctcagaagctgctgagcttttgccaccgctaattgatgatatgtgactgtccgacactggcagtgataattgacgctggctggtgttggtgcgggaagaggtgaatgacagggcgagggaagccctggatcccgcgtgtctctggtgcccgtgtcacgctcagcactgtgacctttctgcctgggagatgactcctggcagatggcagtgagcgaaagggcagcgctggcattaattaagtcaaaaaattaggcctgaataatttgggaagagaacattatattggtggtaaatgggattttgttggtgggggagggtacagaaggtttttgcttttgcagaatttccatcatcccctggtttatacacagcaaagaaattttcatgtgttggagaagaactttgtgtttggagggaaagagggaaaggaaaggaaag

SEQ ID NO: 42837 - DNA, 773 bp, Bovine  19866881422596
  misc_feature (1)..(1): n is a, c, g, or t
naaatacgttgccattagattcttctcaattgggcttggtttttctttttaatatttttatttatttatttgctgcatcgggttttagttgtgtcatgcaggatcttccattgcagcacacagacactctagttgtggcacaaggggttagcagttttgcttaggcttagttacgctgaggcatgtgggatcttagttccctgactagggaccgaacctgcgccccctacattgcaaagcagattcttaaccactggaccaccagggaagtcccaaggcttgctttaaagatgaagggggtgggggaagtgagcataaaagagatgaagaatgaggcaacaccaaactgactgactgattagaactgttaccttcatgcttttttccagattcagaagcattgccaagtcttacttcagaagagcagatggtgttttgctgctgtatgatgttacgtgtgagaaaagctttcttaatgtacgagaatgggtagatatgattgaggtaagaaatcaaaacagacaacaaaaaaattacacgggagagttataggctggatctcaggaaatgctgtttctcctttgtaaaaatgaactcagaaaccattgatctaggatctcagaaagaacctagatccactgatctaggctctcagaaagaacctgtgggaggcagggttcctaatggtacttggcagcactggtctcctcctcagtagcgggccagttcccacagaaccaaggacactaacaaagtgagcttctgagtggtgg

SEQ ID NO: 42838 - DNA, 1113 bp, Bovine  19866881579648
  misc_feature (1)..(1): n is a, c, g, or t
natttcctttaggtctgtaactgaacatgactgatggcgccagagtaacagttgcttattactgcgttcactgagctgtgattgctccaatacttatgttggcagatgtgtttccctaggaacagcatctccgagacagaggtcattgatcaaaccccctctggctgttccattatgtgcaaattattgctaaaagcagagaggctgcaagggaggtggtgtgtactcattgcagatatagcggagggaagtccaaaaaaaaaaaaaaaagcaagtgtaatgaagcaggaaaaaaattccacctaaactagaacaatgtttctataatgtgaattagtgggaaaaagggggaaattaagtgactttgagagagacacaatgggagaagagtcagattttattgtcctggggtaactctagaattgggcttgctgacagcatccttggcagctgtccaaggctagaaaggggcatgcgtgtggacacccagagcactgttgtcctaatagggtagggatgaagtaggttaagtggccagtacacagcactctcatgtctatttctggccaaatgtttaggaaatgctagagacactcagggatcatatgcagagacctcccttgtcccgcagcttctcagggaaggggtggaggtggtaatgaattgactgacttttgggaagcacttagatctagactgtcctttgctcaggctcgaaagagtgagaccactgagttttatgctcagctgtagcagcggttcttctcagcagatttctgggaaggataaatgcacccctccccgctccaagtggggatctgtcttttgctgaattcagtgagaccatgggatggctcaggtagagcacatggactggacacacagcaatactcccatggtgctgggccttctgggccacagactgctaccccacttctcacactgacttgctttttgattggtgttggcaagactcacctttctaggattgcgattcagttctctttatctgtaagatctttccttatgatgaactggatttttcctagggcttaagacattcccttgacacatattagagactttaggaacagtgtgtgctaattcatatag

SEQ ID NO: 42839 - DNA, 892 bp, Bovine  19866881797919
  misc_feature (1)..(1): n is a, c, g, or t
ncagtatatagtttagcacttgcagaatatcttgtaattaaagaaattcttcttttcccttttagttatgtcaattactatgtaatagaactttgtttaaggccagaccctggtttcatatgcttgtgttcatatattgggcttattacattgaatttaccttccaatctactattagtagaatagaacatatatctttaaaaccatcaacacatcaaagtaatagaccttgtaggccccagtaactgaatctaagagagtagtggggacagtttgtttttttcttcctttatacttgattttgtgattataaaggcatggactttaaagtggatcaataaacaaaatagactcttaaagtttatggtattgaaattcctaggtaaaatcctatttctgtaacataaaacggtgttgctccttcatctgagctcatcacttctcacagtctatggcgagtggtagaagaaacagattcccagagcattcctttaagaattaacatttgtgaatcatcacaattttacttggggaggtaggcaggaaaatgtatatttaaacaaagtgttttcaaaataagtgattatacacctgcttcagggattagcaatacctgactacagacaaattagatgtctggatcaatagcatataccgtgaagccaagtgttaagtgaaggctaccttctggatctttctgttatattacagtgatttcaaataacatggtccattctatcatggtttttcaggcataggttggccagagcaataagtatcaagccattcagttcacttcagagagcacttattggaaacatgagacattgatttgtgtgccaaacagaagtaaaagtgagtaagacagagtccctgacttcaaagagcattg

SEQ ID NO: 42840 - DNA, 1017 bp, Bovine  19866881936731
  misc_feature (1)..(1): n is a, c, g, or t
naaacatccttatggtcataacttttgggtgtttcaactggattatagtaagacaatgtattttattcagcagatttgttttaatctaattatgtaggtgaataaaaattactgcatgctggtgcatctaatgtaagttatctattattcacaccacatttacttttaatattcatgcagattccctttgacataacctactgtgtcacagttaatccaataaagataaaatatagctcagcaaaacaccagtcgattccagctttctggtaattattaaagactatttcacactggttccttcaatcaatgtatttccccttggatatgatggctctcctctttgaagctttcaatcctcccagtggattcagaggaatactcaggccccttttcagtctctggtctcagaggtagttcaaagagcactacaaggcttcacaggtttatcctcaaaggctgacactgtctgtttgatgtatggtgacttaaaaagtcgtctctggcaaagcatgtgtttgctaccagtctatcgaatcagccatttatcaacttatctgtattcacccagcacacctgctaacagctcaaaggagaacacatactgtctctcgctggactgactattgatttgattccctcctctaattttatattgttttgctaccctgtggatgaagcagctcctttactggatgaaatcaacatggaatctgtgaactgatggcctttggtggttttattcaagagccctgagggcgacagattctttacaggttgaggacagctggcctgggggagtggatttcctgtcccagcatgccttgcttttcactattatctacatctcaggtatttcactgtacatgccttgctaggaatttcagggagatcactaggaactctcaacctcatcatcagaagctggacatacccaatgtctacccaatgcatgcaaatagaaccctggcttgaagatagggatacaccaaattcctctcagtttaaccatttcat

SEQ ID NO: 42841 - DNA, 1299 bp, Bovine  19866880349430
  misc_feature (1)..(1): n is a, c, g, or t
nacttctgaatttattattttaacatgacaattaaaaaaataatcatccccacaagccctagtccgaggctgaaacaacttagaatgctgtcacaggatgtcagagagagtccttattcgagtcattttagctgttgaagtacctaatttcaggtaaatctaccggcctagctctgtagtttactgaaaaaaatgagagggcaatatgaacatgaattcactgtggtatgacccgttgtgaaaagtgtactgtaaatcagaaggagggaaatacacattatactgtgcgtattgataatttccttatttgaaaaattgtactattagtaaatgggcacttaccatagaaagacttgttaaaggaaaaattctggaagaaacaaaaacataattgccagaataaagtaataaaaccttcattaacttgaattcataaatgaaagaagaattctgaaatataaatatagaaataacttttaaatatctgttgacataaagcaaatgaagaacattgggctgtcatatgtataaatgagattatgcaacctttgttttcctctctgagcaggttttctggccagcatctgcaatcaaagtcgaagagtgcaaaatggctggcaaagatcccacagtgagtgcttaaaaaaaatccaaaacttaaatatttggtctttgaattcatgtactttgagtgcagccaaaagtgagacaaagggtgttggtgttctgaatcctctgcaggacatatggtaaaaaatgtaaatgcaaaatgatcggaactcttaaacactgtaatttaggaattcctgactgggtaaaaatttcctgctttgcttttattattgcaccctgacacttttcatgatggattttagtaataacccctgttcaaagtggatccaaccttcagaattctcagcatgctgctaaaataatgataattcaagtgtctggagtagctcccagatacgatgtgggcttttccaaagaaagattctcggcaaagggttatggttagccagcacattccagaggtataaatcaccagtaatgactggtatctttgtaattaaaaataaccacagaaacaaaaatcaagagggatataagaataagtaagtgttcagtgtgcaacacttttacaaaatgtattcctttaggtgagatttcatatagagagtcaaggaataaatctatatttatttctacaaatagcttgctgaaatggacacattaaattattcttgaatattattttcaaaatggagcaactctttacgtgcacaagtcatttaatgg

SEQ ID NO: 42842 - DNA, 1840 bp, Bovine  19866880388375
  misc_feature (1)..(1): n is a, c, g, or t
ncaacaccacagttcaaaagcatcaattctttggtgttcagctttcttcacagtccaactctcacatctataaatgactactggaaaaaccatagccttgactagatggatctttgttggcaaagtaatgtctctgcttttcaatatgctatctaggttggtcataactttccttccaaggagaaagcatcttttaatttcatggctgcaagaggaatgtaactgatggtgatagtatttggtgatgtgaagaacaaaaaggaagacagaggtgtaaaagatatagtcaaataaatgactgcttcattgagcagtagtcacctgggggtgaagtatatcaacataagtggggatagagaaaaagtcagatcctaaaataatttctgagaaagtatcaatagaatttctttaataatgtaatacatcaatctgaattaaaagtaattcaccctttttatttctatgcctctacattgatgaatacaatcaagttcaattattaaggccaatgatcttctcaagaaaacaggtaaacaggaccatggatgacttctgtcctttcttaagtaccctttgtccagagagcactgaaagtgtctggagtaggattccttttcttataattttgattactcctatttggaaggaatgatgctaaagctgaaactccagtactttggccacctcatgtgaagagttgactcattggaaaagactctgatgctgggagggattgggggcaggaggagaaggggacaacagaggatgagatggctggatggcatcaccaactcaatggacatgagtctgggtgaactctgggagttggtgatggacagggaggcctggcgttctgaaattcatgaggtcacaaagagtcagacacgactgagtaactgaactgaactgaactgatgatacatatgttatcctagtatagcatgttttgtatatctatattgtaaagttgagaaaagctcaccttactgctctttttttttcctctctactttctaatatagagatgttcatatctaatagtaagaacctgtaagtcatagtgtagctttaagaagatgtgttactagagataaaaaacactagttggagtcaagacacctcacttaaattccctttttcagtcactcgctatgtaattgaagaatagtcataatatgaatatgtcttattagactgagagtgaaatccttaaggaatcctcatatgccattcaaatccagttttttttcctcttctagcaaaattaggagctacagtattaaatgtaaaatgttaaaatattgtttgatgaatgagtattcatgccaagtctgtgttccattcattacatacaatatcactgtttaatccttatatgattatatctaatttgcctatttatttccaagacttaccctggggctaaagatatgacagatgttcaacaaatgtttctttaactgaaaattcaaaccttcctggtttcagattcttcatttgtaaaatgagagtgctggaacacttgatttctaagatccctctgaactttgaaagttctataactgagcacagggtgggagttgattagtcttaatctcatctcagaggataatattaaactcataaccaatataaaaaagatggctggaaaataagagatttaatatgagtacatgttggaacatatgaaatgcctcattaattcatctctacagatttcctcaacaatatagtacagataggacttcccaggtggtactagtgttaaagaagctgcctgctaatgaaggagatatgagactcgggttccatcctggggttgggaagaccccctgaagaa

SEQ ID NO: 42843 - DNA, 3244 bp, Bovine  19866880458803
  misc_feature (1)..(1): n is a, c, g, or t
nccctggacaggacaggtcctgtgtatggagtagagtagaagacagaagagctgtttagaaggcagaatttccctgacctggtgactgggtatacaaagtgagagagagaaagagagataagtctgggatttttcctaggtatttcgatcttgaaactgggttaaagtattccactcacagtctatttttcttaagaatgagaacaagacacttagttgaagggcaataaggacacatgttggaagaaggtataaagtgagattaaagaatattgaaggaaaaaggaccagcccacagttaggtatctacatttctttctttctctttctccctctctgtttctgctccattcccccaaactcttttaacttttaaaagagcacattatatatttgttgccaaaaatattttatttttatatacccccaatggattttaaagtcatgacaaattcacagataataagataacatctgtgcacttagtaacaacaaagtaaacacaagtcagagtagtataactttagtggcagtattattttgtacaccatttagactcactagcctaaaaacaacagactttagataagacaatttatacatgagataaacaagagaaagcaagaagtattgctctgtatagtcttttatttgctagagaataaaatctgatgtctaacattgcagggcagggtgataacaaaaaagctaaaagcaagtttcagatttaaaaattctagtaccagatgggcagttaaagtgtccaattggctacaaacaataaatgataaaggaatcttttaaaaagatttttaaagactttaacttctttacaaaaaactccaaattaaatgatctaacattgaaaatatgcctcttaaatattacaaacagaataataacatctccaggaaaacttttacggagttaagactaattgggataatataaacacatgcattcattttatgttacaaggcagtccaaagaggacttacaaagaaaatacaaagaatgatattcatttgttactttgtttatttaagctctgatgctgatgagagcaattttaagccaatactgtttttgctgtcttctgagctcctgaggcatgctgttagcacttttattttacagcctattagatttagtcagttttcacttttcataagtctgtgaacctctaaagatggaagctctttaaggaagaaaacatcttatttttctatactccagaagactagcacagagtctccagaagactaaaagtaaacactaaaagaaagatatatattaaatcagtttgtgtactgaagactgtaatatgaatgaaaacattaatatcattctaatttaaccctgacacttcacagttagcatttttactagatgtgttattaattgattcttgactctgataattaatgatttatggaatagtttcaaggtaaagaacatgtcagaggaactggtaaagtaattttttcttttgctttgagattcaagattaagagatttccaatagcacatcagtagtaatattctagattcttatgttctgtattttaggtcccctgaagacatataatatgttctttaggtgaaatgaagtttaagtaaataagatttgtttactcaaacaatctttgcttagtaacttgagtttccatatccaatatacacttgccaggctgtagacaataaaattcaataaatgggatgaagacatttctcattttaaaagtttgttttcattttaaatttatttctaagaaaggcttttgttaagctgtagtcagcagttggcctaatttgactcttcttcagtttgagaaatgaggataaaaccgaaaattttaaacttgacttactgaaaggatggaaatacaagtacaacttaatcctcatactcaataattttacaatccagcaagagaggaaaaaaataataaataaacaaacacaaataaacactatgaatattgaaacgtaaaatcagaacaaagaaagaagcaatctttgggtgaatttcccagtgaaaattgtatccttctccttgaaaaaaatacaataaaattgtatagttatatagctatattatttattatttgtttgtagtaatctcaagcttatatacctaagctacctggtatgtattatcacatatgttatctctaccccttaccttccaatttaacatatcctaacatctgaaagattttgctactatttgtggaatcactcttcttaccacctcatttcataaatgtgtccatacaagtactagtcctgtgttttaaatcacactgagaagggttacttgaaagtaaaggtctctagcaatatctgctgaggtaaccaaattttacacaggaacctatctattggactatttacaaagtctgtgtgcatctttttcatttaatttacttttttattgaaggataattcccttacagaattttgttgttttatgccaaacctcaacatgaatcagcaatgctaatgctaagtcacttcagtcatgtccgactctgtgtgaccccatagacggcagcccaccaggctaccccgtccctgggattctccaggcaagaacactagagtgggttgccatttccttcttcaatgcatgaaagtgaaaagtgaaagtgaagtcgctcagtcatgttcgactcctagcgaccccacggactgcagcccagcaggctcctctgtccatgggatttgccaggcaagagtactggagtgggttgccattgccttctccgataacttctctagcatcttctaaattggctgtaaataaaaattcaggtctcagagatgaactgaatagaaagtactcctagaagtaagcacttcagagcaggttgtgtaaaacatctttaataagtttaaagttcttgaactggaatcaatctaggtataaggaatcaatctagatacagtgtgtgtgtgtgtgtgtgtgtgtgtgtgtgtgtgtgttagtcgctcagttgtatctaactctttgtgacctgatggactgtagcccaccaggctcctctgtccatgggattttctaggcaataatactgaagtgggttgctgtttccttctccaggggatcttcccaacccagggatcaaacccaggtcttctgcaatgcaggcagattctttaccttctgagccaccagggaagccccggtacaacatagtcaatgtaaaaaattgataacttcaggatttatgtcacagat

SEQ ID NO: 42844 - DNA, 1497 bp, Bovine  19866880519961
  misc_feature (1)..(1): n is a, c, g, or t
ncatttgcagagaacttagaactcttcttggaaaaggcaatggcaccccactccagtactcttgcctggaaaatcccatggacggaggagcctggtgggctgtagtccatggggtcgctaagagtcagacacgactgagcgacttcactttcacttttcactttcatgcactggagaaggaaatggcaacccactcgagtgttcttgcctagagaatcccagggacgggggagcctggtgggctgccatctatggggtcgcacagagtcgggcacgactgaagcgacttagcagcagcagcagcatgagctcttctgggccttcaaagatttctgtgttgaacaggtattagttgtataactttaaaatagatgttttaaaaaaaatacgtcttggagctcagattaatagggctttaaaaatatgactcttcatggtccatactacattttttcttcttggtctggggactgtatcaaggtattttgatatatgtattactaaagaaaatacattttcaagtagtttagggtcctgtggtcacagaaacatggaaattgatattctacaattaataaatcaagtttgacattgtgcatatgtaatgtatataggtctaaatatatgtaaccctgcttaattttttttaatgatctcttacagtatttacttagcacattcattatatcctatctcattggatatgtttgacagcatgtgctattgtttagggctcaatttatttatagtattaataaaatatcaacatttggaaataaatggagcatgtaggaatgtaaataaataggggcagaaagggaaattgggaggtaagttatactctctttagctgaggtagaaaataagctatattgctaccatgatattttattttatttataaacattagtttattatatagtattattgtgatattaccttgggtgaaatttcaaattatactgaattcttttctaatgaatgagcattatttttataactttaattaaaattagatacaagtaaaaaatataaagaagtaaaggatgtttgtatactttttgattgctatagaagtaggaaatctgttactaggttatgcttttattagtagacaactaatataatattttaaagtaaaacattaatttaaccaccatatatctttaaaattatacataatgaatttataaatttagtaagctaaaggcattaataactcaatatccactatgtcctactcccaacatgagacaatgacttggaatagattcccatgcttactgcttccatttctgttttttccagatcttgtttacattttatgaagtgcctagatacagatctgggcactagagataatgacatttactacctggcatttccaaccactaaaaatgcactgaaataagctctagagggtttcaagtgcacatacagggaggggcagctagcctagttctcagtggcaacagaagattctccagagaagtgaca

SEQ ID NO: 42845 - DNA, 2031 bp, Bovine  19866880535513
  misc_feature (1)..(1): n is a, c, g, or t
ncaaaaaaacataaatttaacttaaaatttatggaggaaaaaaatatgcaatggtttgctaactttttttccccttatctatgtaaacctaataatatataggctaagtaagggctttgtcttttccaagaatctgggtcaagatctttgtaattctatttaagtttcctcattaaaacattaactgaagtctgttgtttgtggcttcaatcataatttctagtcaaggataatttaatatcacataacttatacaaatctttttccacactggggaatttgccaaaagaagtttcagtaaaacagtgaaagcaaaagcataactggagagagatcagaagaaacaggagaataggaggtaaaatcaatgactatagatatcttttgaagagttttgctttaatagcagcaaagggaatgtggggtcaagagctttttactgtacttgtttttgctttttaagatggaaatatgacattttgatagataatgatcttgtagcccttgatcttgtagggatactggacaaggactgagtggcaaagtggaacaaaatccttaagacaggaggcatgctactgggaaaagggtaggtttaaccctagcacataaacttatctttggtcaaacaagattgtgtagaaaaggatatggagtttgaattcaatggatcaaaaatcagaacaaattttaataactaatcaggaagtgggatctcagttttagaaaattaagttataatgtaacttttgataatcataagttccagaaggtaacaaccattggagtgactgaaagatagggcagaagaaaaagtcattgaaatgacacaattttaaagagaaatgaaagatcaggtgctggatgtgccagccgcatggatgttgatattgtcaagaatgatgctgtctgggcagggagaacatgcttataaggcaaaagcttattagtgagtgaaacaacaatgagtattggtagatgacataaataagaaggttgagaagttaagagttaacatgtaaacctcaaactgatggcagcatttcaagatggaggagatggaatgttatggatgactccttgtggctctgaggtcaacagctgatctttgaaaaacaaagtacagcgtacagtggtgtaaaccagatgtagctttggttggaagatcgaagcaactctgtagtgtaatcaaagatctgtaacagcaggggtatatgctcataaatggaacagtccatagtatcttcaaatgcctggttttaaaacttaacatgtgtggcagaataaaattttgtgataaactggacagacactgttgggtaaagccatggaattctttggggtgagtaaaaatcttgagagagagatacttcctttatattagtagaataatggaaatttttagttatagttgatatttctagtccattttttctaggtcatcaaaactctatgtataggtatgcacttatatattttattatacaaaatattgacaaagatcagtcattcttgatgatctcatgtttttgtcataacagaagcatatgaatgctgtgccaagcaaagtggtcagatactcacttagtgaagtgaatatttattctctatcacaccattcactgactagtcattcacagttactttcatcttaactagtttattttgaagaaataagacataaccttattaatgcttttgattttttccctcaaagttggaaaggggaaagtctctcagtcatgtctgtctgtttgtgaccccatggactacatggcccatggaattttccaggccagaatactggagagggtagcctttcccttctccagaggattttcccaacctagggatcgaactcaggtctcccacattgcaggtggattctttaccagctgagccacaaggggatctcttatttcaatgtaaacaatttattgctaagagcatttgtcacttgtattttattatgcatgttctcttgattcaccatggggaaaatacattatgcatctgttatgaactgctatt

SEQ ID NO: 42846 - DNA, 2552 bp, Bovine  19866880594959
  misc_feature (1)..(1): n is a, c, g, or t
nctgtaaatccttgtagtgttacctttccgaaactagcttaattgactgtgttaaagtatttgtcactgagtcacgtccgactctttgtgatcccatgaactgtagcctaccaggtccctctctccatggaattctccaggcaagaatactagagtcagtagccattcctttcttccggggtcttcccctcccaaggacaaaactagggtctcctgcattgcaggcagatactttaccatctgagacatgagggaaggccctcaattagctcaagttatttcccacctatgaggacagggtcaaaaactgcatacaagaaaagtggcactggccagcagtgtttcttatataagtcctgtcaaggttttttaggcttctaagtagtttgggaaaagaggggcagagataaatcttattatggtcacctattgaccctcttaaaatttcactatatggcccaagtttcagtcaaacatgagaagtaattgtgtccttgtgcttgaatctgacttgactaatgcctatcaatattttcatgactcattttgaggtgtggtcaacggtaaatgtctgagtcctgcgcaaatactattaatgtctcagtactgggcaaatactgttcagttaaatacactgaaagaagtttattcagcaaagaaagagagaatcatagaacaagtttcatagactggttaaatataagctatttgtcataccctctaaagccttttgaaaaattgagatgattcttgcagctttagtaaagtgagtttggtagtaaatttggcatgcatttcaccttgcatttctttatcttggttccctgtgtaaatatattctactttgcataggtttacagattgctactgctaagtcgcttcagtcgtgtctgactctgtgcaaccccatagacggcagcccaccaggctcccccgtccctgggtttacagattaatcagtgtctaatggggcttctctggtggctcagcggtaaagaatctgcctgtaatataggagatctgggtttgatccctggaggagggcgtggcaacccactgcagtattcttgtctggagaatcccgaggacagaggagcctggtgagctgtagtccatagcgtcacacatagtctgacacgactaaagcgactaagcaactgcagcagcaagtgtctaatgactccacattttgaaattaaggattatacagtttgttaatgctcactgcattcttcttgctaatgatttattctttccctccctaatttacaaatgctgaaggatatatacaaatgcatcagtaggaaagtaatagtgatcactataactcggatcttaatcagtttcagaagtatttcagagaaaaccacgcatagtgtttactcatgtttacatctggtttctaatactgtcagatgttttgtcagttaaattcattattacagacatgtcaaggagctgctcacatttttatttcactaattatcgcaaaaataatttaattgtattagatttttttaaaagaacagatctacttaatttgaaatttctttcataaacatagtttgtgtctgaagataatattggccatggaatataatttttgaatacaagtttgcattcttatttggcataatcccttcgtatctcactgcacagaaaaagttagcgccataacatgtctacataagaagtggtgcttagatacatgaaagatgtgtcttaatcgcttcttctcttcctcctagtgagatttagctcagctgtcccactccatcaaagattttgcactctcagaagtattttctatgatagtttataagaatttagtgatctaacttacttcataaagaaaattatgagaaacacgggtggagaaattacactccatgttctctctgtatagtgacatctactgggctgtagctcacagtgatttttaagcaagtacctgctcattttatggaggtggaagctcatttctccccaagtacaaatatctaattaattgtgatccagagaaataattctcacttaaacatcaacgttagttccagaatttaacaaggttacctgaaggtagtgctggaaatatataccccttgatgtctagattcataacctctgttggcataattcaaaacaggcttcctctacacaactgtgaaataatttcttataactatgttttgggagtatcccggaaagtagggtattgtatatgagtgactgtggagaggtcgacaaagttactgctttggggacattaaggaagcacagtaggaaacaatacctattaaaaggataaacttctgcgatgagactgttttatgtagaccggttttagaaaacgttccacagggaaaggacgagactcatgccttttaaaaacccatctatttgccttaaaaggatgctgtgatccttttctagcaaaaactgctttgcactttgatagttaaggccaagcttaatcctgaatgccttcccagagcagccggtaacaaacaaaaacctggaacacaccctgtaagtgctcactccaccgcgga

SEQ ID NO: 42847 - DNA, 1848 bp, Bovine  19866880658406
  misc_feature (1)..(1): n is a, c, g, or t
ngtagcttacaagttctgacatgatttttttctgccttaaatgaatatatctttgtagactgaatcgacaggaggaaaaaataggaccagaaagacagtacatggtgaaagatgaggaaaaaaggcatagcaaaatatcccatggccaaagatgtccataaaggtgctgaaaaatagagggcattacatgttgtagcttggtctaggagaaaacatgctgattaggggagtcagtatgatcactgagagtcctggttgttaggaaagagttttaattagtaggtgaaaattaaattcagattaggaaggtttaatgcaagatagggaaaataggaatataaaagctgaaaaatagtttactagtctgagaagttttgtgataaagtaaaagagagtgaaaggagagggttggaaaaaagtcacaggaagggaaacctactgttagagaagaaaaaaagagtaaatgcaggggaaaggaaagaagatgtaaaacagtgatgaaggctaaagattaaataactttattagtgagaaaaatgcacagcttttcttctgacatgagaaaaactacaataaaatgaagaaaaagaaaagtttggtgattaatttgctttaaaaagcacaaggaataaattgaatgcctgtgatattcttgattggtcaaagttatctgattgatgagctgcagcatcaggagcttaaacagtatttattcacttatgggaactgatgttatagatgcatctgataaaaccaatcagagatgagatgtaacattttaagattgcacggcaaaattaaccaataattgtttcttattaatgttttattcattatttaaagtcatcatttacttgtgtcactttatttttcttccaggaccagaagacaggggataaaagagaagaaccatgttaggaatctatgcagcaagaactgtagactctttgagaagcatcactgaaggctctaggaaagcactgactcagttccacaatataatggaagggccatagagtctaataaaagtatgtgatgttccaaacatcaagcagggttatacaatatcctttgagaaccaacaaattgctattagacagacaggtaaaaaggtggtggacagtgtctcagaaataaaatgtaatacttaatgagtgtgccaccctaaccttcattttcaaagtggcttcaagtacaagaaacatgccatatcttagtacaaacaggatgttagcagtaagtactgcctctgatcactacaaaatacaatgttagtgatgaataaatagaactctctcaaaatacaatgttctgcatcatggccttttattttaaactaaataaaataaatacattaggtgtttgataaaactgtgcattttgtacttgtattattaattacgtattatagatatgtaaatacgatgtggaaaaacactgacttaagttgactattaagtaaaacatataaagcctaaaattttataacccttttcacacttaaatatgctcttaagatatttaaagagattaattaatggaaatgctttccctttgaaacatatcttttgaagtgagactgaagtagttcttatttagtaaagtgattaaaatttgtttcatgctggttttccaaaggagattactttttggaccaactttcctattaaggcttgaagtgtatgttgggcaatttgtacatgggaaaatgattttacttaaaaatccgtcctctgaaaagtgctatgctatcactggcctataccatgactgcacacccttctcagtggagtttctgacagactgcagatgtctggggaagtagtttatttaatcagtgatcacaga

SEQ ID NO: 42848 - DNA, 2787 bp, Bovine  19866880921093
  misc_feature (1)..(1): n is a, c, g, or t
nttccccgtgtttgcattcattgctacacattcctctcaaggttctatttctccttgatatgtcattctttctagatatattacagttcttggtaaactcagtaaatatttgtcaagatgaattgaaaatcataactatatccattgcttctcatacaatgaaaagaattcataactgattgcagaaactaatttttgtttgcttaaaaactgttttcaaaagatgttgtcttcatataaataactacaatcttttagccttgattcagatcatctactgtggagtttgcattttttaaaaaaactttttttcctgaattggtcgtttagagttacacctgtccttaatgtttcataatacttaggaaaaaatgactgttttcttattttccttttgaagccagtcttaaaggtggacccttttcccagttttattgagatataattgacatacatcactgtataaatttaaggtgcacaacataatggcttgacttatctttatatattgtgaaatgataattgcagtaattttaagtatccgtcatatcatatagatacagtaaaaagaaagaaaaaatacatttttccttctgatgagaactcttaggatttactctctgaacaactttcatatgtatcatacagcagtataactatagtgcatcccctaactgctcacgtgtaccttatatcccaagtacttatgtgtcttataactggaagttttcacttcatttaattcttcctctccccacctctggtaatgaatgtggtttttcattttgtttttgcttttttgttccatatataagtgagagcttagcataatgccctcaacttccatccatgttgtcacaaacagcaagatttaattctttttatggcagaataatattctgttgtgttttaaaccacacttatttttccttttttaaaaatgaattttgaatgaagttaagttgctttacttcatagtgttgttaatttctactgtatagcaaaataactcagccatacatacacatgtatctcttcgcttttggatttctttcccattcaggtcaccacagttagtacgttaagtagagttccccaagaagaatgggaaattgagattacggcgtataccctattgatactattctgtagaaaccatgtagctgtagacggacacttaggctgtttccatgtcttgtctcttgtggatactgctgcagggaacatgcgggtgcagatatattctactgttagtgtttttgtttcttaaagttggactctgatgccacattcaggttgttttttcatgaaagtctacataagatatacaggtttcatgggtggaattttctagtctttaaaaattgtccaacaatgttcatttagatagaaagcagtaagaaacatgcctttgcacaagttctttgactttttttactacataaaaagtgtctggcatctttactcggacatttttatattggtatttaaacacttgtgtcattttcaaaaacagtttttaggcatatgtttttaattgtagtgggaagctccactaatcactgcttacaaagccacataagtctcttgaagattgtattctaataggaaaattcatgctgtgaaatgcctctgccaagagcgtctttctggatagatggtaactcacttaaccattgaacctaatcctcatggttatatcagatcacattgtaattgatttcaacttacttgaaactctaacaaacagtacattgttatgaaatatattttctacctgagtagatcttgaatttctggtgaaatttcttcaaaagaaagttctctatgtttgtttgctactgaaagtgaataaaatagccttttctgaaatagaagttgggagaatcatggttcactattcccagaatttcttaactttctgtatctaaatgtcttaggaaggattatagtatgtcttttgtgttgtcaaatccccaggtaccaaatagccctttagttgttattaataagtaatgatgcttcaattattgccacaattaagcaagcttctctcatggcttcccttttctctggatcttcatgaagaattaaagggaatttgatgaagatattggttgtcaaaaaagttgccataggaaaaacttatgggacaggtcattggaatgcaaacaggatatcttataactgtatccactttgaataataggaatgatttgtagttcacagaacttttatggtagttgtgcaggctgaatgctcggtaacttgctgctgcagctgctgctgataagtcgcttcagtcatgcccgactctgtgtgaccccatagacggcagcccaccaggctcccccctccctgggattctccaggcaagaacactactggagtggattgccatttccttctccaatgcatgaaagtgaaaagtgaaagtgaagtcgctcagtcgtgtccaactcctagcgaccccatgggctgcagcctaccaggcccctccgtccatgggattttccaggcaagagtactggagtggggcgccattgccttctccgtcgataactgttacacttagtctactatagtttactattctggctgaggttgagaggctggtattctggccttctacttttctgggactgcctgattattttttgtgtactgtgagctgccacaataaacaaacacatacatacataggtacatgtacaagtcaataaatgcaatgaagggaagaggaagggagggagaaataaaagtaaattttgtcctgtcgtcttttat

SEQ ID NO: 42849 - DNA, 2732 bp, Bovine  19866880940480
  misc_feature (1)..(1): n is a, c, g, or t
nagtggaaaatggaaaagtgtttttattctttctagctagtcccagcagagagaaacaagttattaattttccattactatcacacacatgtatacacagatgtatctttaatgtcaggattattttaaggaaataattgattagggtctgagctggatcacatcacaaaactgatctgaattcagtgatttttcagaatgatgatttggacttagtttaaggttgtttcttcttttgcctggtactcaaccacccaatgagcagtgaagtgaatatacacaagaagaaagctatagatgagtagactacttcctcagttcagttcagtcactcagtcgtgtccgactctttgtgaccccatgaactgcagcacgccagtcctccctgtccatcaccaactcccgaagtttactcaaactcatgtccattgagtcggtgatgccatccaaccatctcatcctctgtcttccccttctcctcccaccttcaatcttccccagcaccagagtcttttctagtgagtcagttcttcacatcaggtggccaaatcattggagtttcagcttcaacatcagtccttccaaagaatattcaggactgatttcctttagggtagactggttggatctcctcgcagtccaagggactctcaagagtcttctccaacaccacagttcaaaagcatcaattctttggcactcagctttctttataatccaactctcatatccatacttgactactggaaaaaaaaacatagctttttggataatttaaaattcacttattaagctgttcatttttatatgaaaaatgcatgcttacaaagtatttatgcatgtgtgcttagtcatgtctgactctttgcaactccattaactgtagcctgctaggctcttctgtccatggaattttccaggcagtaatactggagtaggttgccatttctttctccagagaatcttcctgacccagggaatgcaccttgtctcttgtgtctgctgctttagcaggcagattctttaccattgagccacaggggaagccctataaagtgtctaggacagttcaatttctttgttgactccagtgttatacagatcaaatcctctggcaagcactgtgtgaagaactcaaatgtaaaattatgtaaaatgtattgatcttttgatgtttttgtcttttagacattaaagaaccagcaggatatgttattatttaatatacttcaaacatgcttcataatttgtagtaaaaaaaagttaatttgcatgtgacttccagatatagttgattttttcatgcccttttgtattgttgaactatctcagtcatttataaactgctcctttatacctagttgacctatgaaatgtgagcttataaatatacctgagctctagagtagaatgttcttgccttacttatttacatattcataaatagtgctcagatggtagagcaacaaaatttaaaaaggcagagaaagagataaagtgaaagaaatagatggaaaagtagatcttcaatgagtattcacttgtaactagagacagtgcccctgctacaaattagatggggcagggttgatccaatctaataggacttcttccttttctttctttttttgtcttgggtttcctttctgcatctctcttaaggaaacttcccaaatcaccacaaaaatcagaacaaaagaaaaacagttttaaggagttcaggttatcatatctcatttatcaagaatatcaattccagactttctcctacataatacagggatccacttttgtttttgccattatttaaaatatattggggtgatatttcagtaaaagtgtatgttggattttaagtagaattactcttcatagaaatgtgagttaagatgcatagatatccccatgcactcaacgtctcacactagtgtctaagaggtacatgaatgtgattacagaatcctgaaatatatgtacttttttatacttttatttgttaagtgtacatttattttggctgcttctagtaagtttgctgggaaataagaatacaaatatgcataagacagtgtttttccttcagaaacttgtgattcaatggagaaaatggagactatttaacacattttatattaaatgatttataaacagaaagagggtaccatgaatttacattatcacttgaggtatctagtttacacttatcaattaataggctttttgaaggaagagatactcgagatggattctgtaggctaagtaggaattccccctagacgcaggaagagctcttgtgtttagaaaaagcatgtatagtgagaccagagggtggaaatatttcaacatggctgacagaagattatgacacaacttgtaaagtatgttaagaagattgttctttaatcctaatgctgtttagtactgtagcatatttatatttgcatgtaaaaacaatcactctttggcaagagaagaagtgatctaaaggagagtaacagcagataaaacaacatcaattaagaagttttccatggcacttaaggtaaacaaatgtcggtggcttgagtagcttctgaacaaatggaacaagtaaacaagttggggagagcattaagaaagacaagtaaaatgtgattccaaagtaaaggctaaccaggaagatagaggtggtggttccacagaagtagatgtgaaatcccagaagatgatttatttttaggtacactgaagga

SEQ ID NO: 42850 - DNA, 2213 bp, Bovine  19866881012096
  misc_feature (1)..(1): n is a, c, g, or t
natggtgctcagagtacatggtgctctgagttttttgtggttttttttttcaaacaagtcaagtaatgttacaggcgtattaacatagggaaattctatttattttggcattatacccttctgtactttgcttcttgtttttagtctgtttcaaaatgcatccaagggtctgtgggtatatattatgggttcctgctgaaagttctcttttaacttccacatctgaaataaatcaccgtcattcttctgatagcaacagctgtatgtgagctccaatgaaggacttgcccaagtgtctctgcatcgctgccacatctacgggtcagcctgtgctgactgctgcctggcaagggatccttactgtgcctgggatggccattcttgctctaggttctatccaaccggaaagcggtgagtactcaatattcaactgaaaatcaaaatcagtatcatcagacggttaagcaatgctccacattattggaatcagttctattgcagtatcccggaaaaatgacactaaaagtagtagctatgttcagcgccatatgtagtcttcaaataaagaaaacagccactcataaaaaacaaacttatggctaccaaaggatacagagggctgggggtcaggggaggggatacattttaacttgcggttctcacaggaatattagagtacagtagtttggaaaaattcctttttcattttaaagttcctctgcaacacaatcctccacctgcaacccctaaaatatgtcaagcagcattttaactttcacatttatccaatgtttatcttttttgttttatatgcttcagatatccttaactctaactttcctagggtttccttgtgccatttaattcctctgtaatcaaatgcttgtcccagttcaggcaaaaggagctcgctccagaatggataccctgaatacttccaaaacctagataaccatgctttaccccctacaatggtgtgtgtatgattattggttagattaagaggttcaggtagtctgaggcacagtgccttttagccaagagaagacttaggaaggaaactctgaaccaactttcaccaagttggaaggaaacaccagtaatgaaattataaagcaaagaatatgcagaatttgggatcaaagtcacagctattttcactcaaagtttattatgggtcatcatgagtgacaaggggtcatcaggagacagcaaatacgactagccttgagcaccagtgatctttcaagtaaagtcactggagtgatgatgttttataactcctttttctctgttatagatataggtatttaaggacttgacagattaaaacaacctagcacttctgcatatcaagattattctgatccttttatgcattacttcaaaatatttgtattatggggaaagtatttgccaggtagtattctagagctaggcatataacataaaaaaagaaaaaaaaagttacaaaaagacaaaaatcccttcctttagggagaataagttttagagggggaatacagacaattatcaaggaaaccctaggtatatcaaataataactttttgaagggcagggaagagagagaggggctgtgaagtgggggactgcagtattaaatgggtggtcaaaggaggcttactcaaggtatatttgaacaaaagcttgaatgtgaggatgtgtgatgaggatgaatgtgttatgccattatttgggagaacagcattttagagagaggcaccagaatccttagagctggagtgtgccaagattgtccaaaaaactccaagactaatgaggctatctgtactggaatgagcagggggaaacgtaggaagaaatgggctcaaaatgccagatgacacaggatttagtaaatcagcaaaggattttcatttagagttaagtggaaaactgctgaagggtttttgaccacaggagtagtattgtttgaattttgttttaaaaagttcatctggtgggtttggctgggatcaaagccctgggatagaaagaaaatgtgaggagaggaaatagaaggtgcaagacagttagactactaactgatgatcaaagtgagagaaaatggtgacttggtagagcttggaaggtggtcaaaagtcttctgattctggatagggctcacagaatctgctaacatattacatgctggggatgttatagaaatggaggactcagaaataagccag

SEQ ID NO: 42851 - DNA, 843 bp, Bovine  19866881077507
  misc_feature (1)..(1): n is a, c, g, or t
ncttacagggtcactaccttgctgagtacacattaatcaagcctgaggctgaatattgttcccttcacaaagtcattgttctagcaatgtttaataatattacacattagagacaacatttttataaagaaatatgtcagactcagtggttttcagatgggtgttcatacagtgtatttttttctcttctaggtaccacatactttactaatattttataatgcacatttatatattattaaaaagttttttaaaaattgccaaaatttaaagtcaatattattttatattttctcatcattttctcctttgatactcattattacttgccagcaaatatatgcttattttcatatgtagtaattgtatacatatatatgtttctgttatggatttttattattaaataatcaatcaccaactctgctgttatataaatttaaccttacagagcagactatattctttatttttattttaagacattaagaatttttgtcatatatagtgtcattgtatcttgacacctgtttatagaggtgcctagaaactgactacatactgcagctgaaatgtgtttctctggagaaaaatcatagatgaagtatggtgtatatacagtatgtctatgtttaaaggtatatgtgagcaatgagacttgtgtttattttttttcatatccaagttcagtcattctgggattctgtacataatattttcctgcaaaacatgaatttgattcaattctattgatgagaggttatgtctgtttcatcttgaggtttgcagatttttccattatgaattattggtattgggataaagggaagaagtcactaatat

SEQ ID NO: 42852 - DNA, 2145 bp, Bovine  19866881107730
  misc_feature (1)..(1): n is a, c, g, or t
ntattttgctattttgtacttgggagattcctattctctctgtctcttccttttcctcacctctctctctgttttggtcaagttccaaagaagcagaccatgagccaaggacatatgtgtaactgatttattaaggaaatgaccatgagggatactagttaaagagttggaagcagcaggagagagaagggaaggaagccaagcaacagtgcagactcggtctaaggcataagtcctgcagaagttaatgtcagcctgatcatgcagggagctctggagttatatacattataccttagaggtaccccgactgaaggcaagaaagctggttttcacagcatctgtcagtgttctgtcattgtgaaggaggtagaagataggctgttgaatacacaaaaataattaacactccaccacttccacacagaaaaagtaaaaaggatccaaacgaatgtgtgaagagcccccacactgatgactacatacttctcaggtattcagtcaactctgtgctaaaatttaccatctgcttagtgtcctctgttgctgttactactctgctgtgctgtgctgtgcttcattgctcagtcgtgtctgactctttgtgacttcatggactgtagcctgccaggctcttctgtccatggggttctccaggcaaaatactggagtgggttgccatgccctcctccaggggatcttcccaacccagggatcaaacccaggtctcctgcactgcaggcagattctttaccatctgagccaccagggatgcccaagaatattagaatggggagcctatctattctccagtgggtcttcctgacccaggaatcaatccatggtctcctgcattgcaggtggattcttaaccaactgagctaccagggaagtcccctaccactctactaggtcctggttaataaaccaggaacacttaaactagctgtgagcagttgttctggaaccaggagttctaggattgtctcctctgagaatcttttgatatgaagaatcaatacatagaactatatctttatcacatacacacacaaaaaactgagtttatttacgtgtgtggaaattcactggcactctataagaggtccctggaccaaaagcagcctcgtgggaactcccatctcaaggctttgtcttaggcagaactggaatttttagcttgaggaaaatgataattcctttacttagggacagctggaactttcatggggaactaaatttaattttacagctagaaactgatcatcttttgattcataaataggaattcattgttataaggagtgtaccaggaacaggcagaaaggccacagcaaagccaattactgttttatttcagagccataaagaacttgtcacatgagccttgacatacaaattcctacctactgaagatcatgcaactattgcccaataaaacagaatgactgtatttggccttaactgtccagtttctgtaataagaaacaggcactgaataataccatgatacacaactgagagacacattttttaacttcttcacaggcaagactgtgaacacaatcctgaaataaatatcaaaccatcaaaaccccaatgcaaaatacatattctctagcatattgtatcacttacaagaaaaatttatacaattgatatccttgacaagtgatacaatgtcatttgatacaatgacaattgatacagttgatatgacaatacaatgacaattgatagacaagtgtcatttatgacatacttctttcattctctctgctgtgctgtttcatcactttccttttctctcttctctttcctctccctttccctccctgtccaagttagtatttattgtttagtaaacaagtttatatatcctttagttacctctttgccaccagagatatctcacttttcaactgcaaaaattaaggtatttttctaatgaattcattctaaagagaaattctaaagtccactgattaaataattgttttcaatgtgtttcaaataaattgatgatatttgactaagttattgtaagcagaagacttcttaatactgtagtgctgacaaaaagtaagtttctataatcagattgttattaaagaactctgattctgaataaaaggactcagtttt

SEQ ID NO: 42853 - DNA, 1858 bp, Bovine  19866881132426
  misc_feature (1)..(1): n is a, c, g, or t
nttttttatttggtggacaatggaaagcaattagtaacttaaaccactctgtaatatatgtcatgatctaataagtagatttttaaaataccctttaaaacatttgatttgcttttaattttgttgacatttgctttttcatagatgaagagcttttctctggaatgtatatagatttcatggggacagatgcagctatttttcgaagtttaaccaagaggaatgcagtcagaactgatcaacacaattctaaatggctaagtggtaaataacactttattcattttttgagaatcagactttaaactactttgtttaatttcataatgaaaattacattaaaattgttaaaaaattatgagtgacaacagttttgtactctgtgattttaaatatttaggctaaatatatgaatgaaatgatccaggtttcacattgtaacactttattaacaattatagaattatcgtaggatatattaataataaaatgacagtgatattcatcatatgtacctatagacaagaatcttctccagttgtttaattgtaacatattacaatgaagtgtcatttattcatttggtctgcttttatattttaatgccaaatctaaattttttcctaaatttatgacagatataatgagtagggcttatttggaagctcttcctaattgttttatgcttagattctaaagctataaaagtagtatatactatttttctcacaaattaaccaataatttgtggaaaccataagtatgataattttattatattcagtattcagatgtttctaatttgagggtcacatggaattcacatgatgaaaagtgctcatttgactttaatgaacagttccaaaaagttgctattgtttagaagaggaagaaactgctaagatctttgccgtttcaccctggggatagtttaaactgaccttaaatttggcaattcactcaaccttgcacagttaagcatgaatcactatagttgagcatcctattccactcttagaccagcataagaaggcattgattgtccatttacttcttcaaatttttcctccagtacatctggaagtagagtattctaaaggtcgttttgttcttgaaataaggaatccttctatgctttcaaatgactgcattttttgtcttgaaaagtttctccttcatttcctatgctgtattttaagaaaaatgtgtttttcagatcttggactctgaactcttcattctgctctgtgaatttgaatttatatgcactagattgaaagccacacatttaaaaacaaactttttttttctgtgaaatggctatcagatcccatgggaaatggctggtagaaaacttcaattttttaaaactcatcaaggcacgaattttgcaattactgtactttcagaatgtattgcaaacagaggaaaatagtttaagctataatattatagctgtactttgtggcacttgacattccaaatgcagtatgtttagggaatataattaattgcttttagattttttgcctgtgaatgttgaattgttcctttataccaaagatggagaaagcacgtgtctgtggtctacatggatggagagtagaagggttttcatcatgactatatatatcatctttgtatttttttctagaacctatgtttgtggatgcacatgtcataccagatgggactgatccaaatgatgctaaggtgtatttcttcttcaaagagaaactgactgacaatagcagaagtacaaaacagattcattccatgattgctagaatatgtcctgtaagtattaaagttgttctaatttgaagagtaagaaattaatatttcataaacacatttt

SEQ ID NO: 42854 - DNA, 1757 bp, Bovine  19866881149198
  misc_feature (1)..(1): n is a, c, g, or t
nagcaaaaacaaaagttataattggactgccttcacagatccaagtactttatgatctttcaaaggacagcaatcatgtcttatgcttagtacaacaacctaagacagtttagacactcagtgtttttgttggcttctgaagaacagagtaggtaaataattatctctttctgggagattcaggcaagatttcacatttgtgatagcattcaagccaaatcctaaaactgacaaaaagtggtattgtgagagaggaagttatttcagctacagggaagagcaaatgcaaagacatagagacttgaaagggaaccacatgttataacaatgagtgatttagagcactctgagcttggaacccactatatggcaagcaaagaaaaggctggttaaggtcaccctggaaagctcttttaccatgccagagtgtaaattttatattctgggaaatggtatgccatttaaggtttaaacagagaagtggaaggctcagggcttcccaggtggcgctagtggtaaagaacccaactgccaatgtaggacataaaacacttgggttccatccctgggttgggaagatcccatggaggagggcatggcaacctactccagtgttcttacctggagaatctcagggatagagcagcctagtgggctacagtccatagggttaaataatcatacatgactaaagcaacttagcacacacgtatgcacgtggaatactcatatatattaaaaaacaaaaaacttggtggcatttcgaagcatggactaaaaggataaatggctacaattactcaagcaagtagattttatctgtaaattaagggtgaagttcaggagggagcagttctagcagctctagaacatttgaggggaggcggaagtggggggcaccaaatgaagtgctcaaattagagatagtttagaagttaacatcgtctggcatgttgaaaaagataattagggaacagtgatatgaagcagttatgagtctgaaagaaaatttgtttatttctatcttttggttttcatgtagatatgactattaggaaaataggggagaaaagaagagttattggtgcattctctctacaattcactgtctccaacatctttttattacattttatactttctattctcacatgactatctttccagattggcagtatcaattttcttttggaggcttttgtggggtaaagtagaatattggttccagggaaagaatatagtattttcagaacttaactaatacactttatacatgaatcataatgttatttcttaaatcagaaaatgttcattcagtaactattttgaatcaatttgtttaataatcaaaatcagcaaacatttatttactgattatattatctgagtaaatactcaatgccccaagagggaaaaaggaaaagaaatagcataattcctcccctagaaaagggtgttttccatattttcaaagtaaaattaactacctagagttattctactccccagctttccaagccaatctaataaccactacttgctcataggaaggaagtggttccatttagggctagcagccaagaatttgcattccattctattcactgcttcagtaactgatttattgagtaatattcagtagctattctgcaaactttccttttatcctctggagtgggcatttcactggaaatgccaccattgtggacatggcctagggcatgacagagaaatgggtggagactagaaatacatct

SEQ ID NO: 42855 - DNA, 1726 bp, Bovine  19866881200358
  misc_feature (1)..(1): n is a, c, g, or t
ntgcttatcatcacttaataaacagaaaggctaaaactagaggaaaacaaatacctgaaggagaagtttaaccaaaattacttaatgactatttgtagagcaaaattatccttcctatgaatgagacagccggcccagttaatggacaaaggcttccaccaggctcccccgtccctgggattctccaggcaagaacactggagtgggttgccatttccttctctattactttatagtagcatgtgggtattaacattttcttgaggtttcaatacacatgctttcatatatcacaaggtgagggatatgttaattgcatcttatttatacttgacagttttatactgagcaaactcacaagtccagatagtctacaaagggtaatcaatttcgttcttgtcacataactgtcattcattctttgtcttatctgcaagatttaggccatgaatcaatgggaaaaatcaattattgactaaaggaattcttctgtaattttgaaaataaacttttactaggagacattgtttccaagtaaaaagtttgtttattgtgaatataacataaaagtcccacatggagaacatttgaatgaatataaaataattgatttcagttgatttatttgggttacctatttaataactggccttcctggatggttcagtggtaaagaatttgtctgacaatgctggagacccaggataccgagatgcaggttcaatccctgggttgagatgttcccctcgaggaggaaatacccactccagtattcttgcctggaaaaatcccatggacagaggaacctggagggctacaatccatagaggtcaccaagagtcagacacgactgagcaactgagcacacacaacatttagtaactatagttgtgagtaactgaaacataatttttagcttaatttcagttaccattaagtaaaaccaggaaactagacacgtgtaatttaataaaagcttatgaaagtgattgctagctggagattatagaaattgcctagtaatctacgctaattttggataatccttgaatttataaaaacaatacttgcaaatatttaaggagacagctcaggaaaccatcctttaagtggtgctttttgaagggctggagctatataaattgcccgtgcacttgtactttccatgttttcattcagtgaaaattcatgatcctcatgcatcttctggttgttgtgtttccctttctccactttgtgtgacaaatgacagtaggaaatacccgtagcactacgtttttcagaagtatggaacacattcatcagtttagaatatactcacatggaattgtttgtccttgtttggtcttttattgtagttaatttataaatatgcatatttaaatataatacttttacctaaaagacaagcatatgaaccctagatgaaagtctcgttaatgggataatgaatgagaagcttagttttattacttgtctcattatctctctttagtgaagtcatttaattgctccttatgcctttctacaaaaagagaactatatttactggtcctataaaatattctagtaatgttaactggttaaagctagtctaaaaattgctttagggtgatacaattcaaatgagggagagcacattcagtttgtggagacttaatttgcaaatgtaggactgcctgggcagtaatggcccagaagcactgacattgtaggatagccattg

SEQ ID NO: 42856 - DNA, 2634 bp, Bovine  19866881232982
  misc_feature (1)..(1): n is a, c, g, or t
natattttatctctataaatctggtttatttacttattctccagtcaatctctagtgttattttctgtttcctgtaaaacttccactgacaactaccgcaaacctcccatgagaaatcacacagaaaatcaaaggatttcacaaaacttgtgattttggttaataacatgttaggtaaacaaattacaattaacagttacattgatgaagaattgatacattcagttaattttttaaatttattgagtttttccataatgaatgattcaatattagtttcttaaagacgcctctcaaatttcaaagatgagtcaaaagttcaatagaaacttcaacctcaggggttcaggtgtggaactatataatactatttatatttaaaatatagagtaaatggaattttatataagcaatactttacatgctgttggcttccaagaagcatgactcacacagagtctaaatgtgtcctttatattctactctgtcagtttgaagacctgtttcaatgttaataactcaagccaggagggatttatcattttccaagctttaaaacaagtgcatctgagaaaataaaatattttttatcaaatctcataaataataattttaatctgagtgacatgcttcaatcataaaaaagaggaaaaagacccactactttaaaaaatactaaagagaaatgttctgatatgatagatactgttaaaagcatacatttcatatttgatacctaggtagatcatttttaaataactcttacatttacataacatatcagtaataatcctttaacaaccactattaatcatttaagtcatttttaaattcaaaagcaaacatgaattttaaagagaataacatttaaactttaaaaatattattcaaattcaataaaatattttgtattatttgaaatatatacttaattgctactccccaaactacactgccccatcatatgcactatctatttaacctaaaaaaaaagtaaatactcacgtggttacgtagaatggtagaattaaacttactatttttttttttcatttttatagtcactctgctttcaccatttgcttggaatctgctattttaaatgcaaaacagtgtaaatacatgtgagggatgtagacaagatctttacccagaatgaacttgaatgattcagaaacattaggaacttagtataggacaaacacgtgtcacagagtgtgtgcctatgtttacgttgaagaatacagatgtaaaagagttggtttaaaaatacttgggaagaatctcaaagttactttcccaataaataatatttatatgctcatatgatgtgaaacgtttatatttaaagagactacttgatttgctgggacttttttcagatctgttcaacattaaaagcacagacatagaagatttttctttttaaccttgaaaaatgatctgctgaatttgtattaggttatctgcaaaactagatcagaagatgctaatccatgagaaacggtgtctcctcctcctattttttccatcctttaaaaccaagaaatgcatattatttaaccgtgcttgctttgggtaataaccagcatggggttgcaatgcatcgagtctgctttctaaggaagtacaatactttacatttttaatgcatcactgagcagaggtcaaatagagtagttctaacaaaacacatcagagcacatcaaactacccacactatagtaactcaatatgccctgtgtatatttctcccacattaacaagtgggtcatcaatctcagccaacataagcccagctctaaatttatggtattatgcttcctgacatgttcctgctcagtttttatgattgtctctaatatatgatcacttgacaaaaaaaaaacaaacagatatttatttttgattgccagattaacctaaaatgattaatgagaacttgggtaagccacataaactatcaaaaatagtgtttgtccaatagaagagttataattattcatctggttttctttaaatttctttagagctgtttaaataaattggtaaccagggacatcatcttgagtagatgtaattcatgtcagatggtagaatttacataatccctaaattgaaaattttaaaaatgcacaaaagcaaataagataattagaaattctataactgagaaaataaatatttcacttagtgtacatgataaatagtctatatgtaaatattacctaaaggtagttcattctccttgctgtttaatatatgtttggagaaatttatatatatatatatatataattttaagaacaaaactgatatcatatttcaactacaaatgagaatatttgaagagtctgtggcttatttgaataattctctcatagatatatgattatattttcatacagcaaaattttgggtttagatttttattctatcttcttttcaataaatctgagcatctaacatgtacatataacatctaacacatgtaaatatatgtttaatttaaaaacacatctattaggcaattatttaataacatttgagcattatacatgttttgaggatatgaaatgagtagtatatgaatcctagtttaaagaactttcagtctagtgaggaaataatatt

SEQ ID NO: 42857 - DNA, 857 bp, Bovine  19866881368719
  misc_feature (1)..(1): n is a, c, g, or t
ntaaaactggagaataagtctaatttccactctgacacttctctaacctttaattctattcattaactggagtaaaaatgtatagctatattctcatgcaaaaggattttattttttttatttttattttatttttaaactttacataattgtattagttttgccaaatatcaaaatgaatccgccacaggtataccagaatatcagaattcaaacatgtatgaaatacacaaccattttaaaaaagcacaagcatattattacttatatataaattatacaagtacttctctctgtcggtctctatgaaacatatacaaacacacatacagaacacactgatctatatatcatggtggattcaatgaactatatgtttcagcagtgcacttaggggtaagaaagatttaaaaactacttcaggagattcatgagtagtacccagatcattaattcagaattgtaaactgtacaaactctctttcaaaaccattttaaatctcacatttacgtacctaattcatcaaagtgtgtctctgggccatcttcatcggttaccgagcacaccagcctcgcttttaagaaagttgtccacttgttgacaaggctgcgcaggtccacctgtgtcattctgaaatcattttgaaaacatatttcagactgcttaaatagacactgaaatgtatttaaaatttacattggattcttattatttggggatttgttatcacctgaaggatgaaaatgttaaccaaatctgcatgtcaataaagaggaatagttgttatatgctgctgctgctgctgctgctaagtcgcttcagtcgtgtccaactctgtgcgaccccatagacggca

SEQ ID NO: 42858 - DNA, 1048 bp, Bovine  19866881474707
  misc_feature (1)..(1): n is a, c, g, or t
naataatttatctttagaaagtaaaaagctggacttccctggtagtccagtggttaagaatctgcctgccaatgcaggggacatgggttcgatgctggaagggaagatcccacgtgccgtcagggcaattgagttccagtccacaactactgagcccgtgccctagagcccatgcccctccaggagacttctccacgttactaccacaagaagtctgtgcatcactgggaagaggagccccacctcgccacaactaaagaaagcctgtgtgcagcaacaaagacacaatgctgccaaaaaaaattaattaatttaaaatttttacaaaaggaaaaagaaagtgtaaggctataacaagggaataggaagtttttcaagaaagaatttaacattcgtttctttaacattattattcctaaagagacttatgattttctttttgcatgatcagcagtctgatcctcttcttagaagaaatatcaattaccttttgcaaaactatattgctttgactcctttggtctagcagttctgtattggctagagacttgacattagttattacattatatatatgattcaatataagcaatcacattcaaagtctggtacctggtaattttttataagaaaacagtttcagcaaagtagtaatttaggaattaattacatagaatattttacatttttattatcaagaaccttaagtgctagaaaacattaaagttgagaaaggcaagaatatttggcactttcattggcatcacttcaagtcagatcttaagattatttaaatgattgcttccttctaagataatacatagaatactctcttctagggattgataaaggagaaaatataatcctgatgtacacagtacagcaagtgaaactcctgactacaagagcagtaactcagagaaggcaagacaaagaaagtatgttcattaacttacttaaattagaaataaaaatatgaagttttagtatttatgtattgcctcaatcttttcaaagaaaatttagagacatttttatatactattca

SEQ ID NO: 42859 - DNA, 1711 bp, Bovine  19866880361330
  misc_feature (1)..(1): n is a, c, g, or t
ngagagtctcttggactgcaaggagatccaccgtccttctgaaggaggtcaaccctgggatttctttggaaggaatgatgctaaagctgaaactccagtacttcggccacctcatgcaaagagttgactcattggaaaagaccctgatgctgggagggattgggggcaggaggagaaggggacgacagaggatgagatggctggatggcatcaccgactcgatggacatgagtttgagtgaactccgggaattggtcatggaggcctggtgtgctgcaattcatggggttgcaaagagtcggacacgactgagcgactgaactgactgactcaataaagtaaaatttgctttgacagaagttaaaaacttagacgtcaggtaacatggagaagtatgctttttacaaaacaatctgcttattgacatggcgaacagaaataatttaacgttttcattttttccatgtatttcactataagttcagacacataataatacacaccagatagacacgggggcagaactctgggccagagccgtgctgcctgccctctcctcacagaagaacaaaggagcagtgtcgtcgtaagtgcaggaatattattatgggttttttaaatttcctactattttaatctcctgtgttccttcttgatctttgctaaatagttgcaaagaatgagtcgagccttcattaatctttttttttttaattctacctagttttaatggtttttctttctctgaaaaatagtgacttgttctttctgaaatctgaatgatcagatgcagctgcatttttgttgctatttgagtttagggagagggaggtcgagcactctgaagggacacagagattagagtaactgttaggctgacagaaggagaagaatcacctattctttgcctagtttaagatttagagacagtagagtgggtataggtgaaaattgtagaaggaaaataaaccagatggattaagatttttttttttttattaaagtgttactacatactgaagaagatgacgacgttctaccattagaagcaataaaggaaatcgcagaggaaaaggtcaataggctttgactacttaaaaatttagaactactttaaaactttttattgcttagataatgcatatgtgcttagaaaaccatcggaaaacaatagaaaataaaaattccctcaatcattctcccaattggcagctctattgctataatgacattttacgatcatcctcccacacttaaaaaaatttttatgtaagggaaattaaatgtgcaaacaaataaattggaaaagtggtttccagcacagacaaagaattgatggctttaaaatatgtaaagagcttaggaaaaatgcttacattctcaaggcaaagacaggcatccgttccattgtacatcattcagcagacgttgagtgcctgctgctaagttaaaggagtgcttactgtgcacaaaaacagctgttaggagggacagacatggcgttttgtcatctgttttattccagcgttttgagtcataatcaagatataagtgaaactatatgggaaacatttttctttacactttcaaaaataatgtaggtgagtgtgtgtataaacttgagatggaaaaccatttcttaagcaagactccccacaaaactaactatagaggaagagatccataaattgagctgtgtgacataagaact

SEQ ID NO: 42860 - DNA, 4680 bp, Bovine  19866880367659
  misc_feature (1)..(1): n is a, c, g, or t
ncgaacccctgtgcagagttctaaccccagagcttaattttactgcttctggactttatataaacggaatcacacagcatgggctcttccttgtctggtttctttcactcagcattacgactggaagattcatggtgtttcagtagacttttactgtgttactgcccagaccaagatatcacatgaagcacgcaaaagtttccctcctccaaaaaaaaggccatgaggaaggagcttacatgggaaaccgttcaaggcatgtcattccgtgaaaaaggcagggacaaaacaatatgtgtaaagcaatccctgttttgctgggggaaagagttttccttttatgtggagccaaaatgattctagaaaataagttatattttctctcggccacagtgtactatgctgctgctaagtcgcttcagtcgtgtccgactctgtgcgaccccatagatggcagcccaccaggctcccccgtccctgggattctccaggcaagaacactggagtgggttgccatttccttctccaatgcatgaaagtgaaagtgaaagtgaagtcactcagtcgtgtccgactcttcgcgaccccatggactgcagcccaccaggctcctccatccatgggattttccaggcaagagtacctggagtggggtgccattgccttctccgagtgtactatgaactctctgtaaatcgaaatagccattggatggagggacttgccttgtatttgaggatgtgctgaagaaaagataggatctgcccactgggctcacctgagctatttaggtcacgtctctctccctcctatccccactttggccctgtgctcatggcgaacttaaatacctgtatcatgtgactcaaccctggagtcaaggtttcatggagagtctccctgcatgctggggatgacaggtggattttatttttccttatttgtttattctaatttgtgtagaaagaataagaagtcttgtgtgttagataatagccgtggcagtggcaacaatctgacagacagaaaggaagccttttccatccatagttgatgctgctggtcaggctgagaaaagggatgtcagctgagtcaaatgggaccggggacggagcctcgatccccctcgtcacggccggaggtgtggtggagcagcactcatggggtcataacggaatgactgtcaccagacagactaggatttgaattctgaccttgccccttgctagctggggagtttggctgctactgctgcgtaacgagcacccccaaacttagtggcagaagacagccattatattcttttggatttatatcccttagatcctgtgggtcaggaattcagacaagacacagagagatgtatttctccattctatgatgttggctgtctcagctgggatgacttgaagacggggggtgacttggtgcctagagagcactggtatcacgggaagtcttcacttgtgcagttggcagctggttcctcttcagggctggcgggaggacaccctgtgtgtgacttctccatggagtctcttcacttgggctggttgggcttccatataacatggatggcggtggggctcccagagcaagcgttccaggagatcacgctggaagcgcagggcgtttcaatgctctgggctcagacgtcaccagggatcatttgtgttttgtccgttgatgcagtcataaaggtcatccgagattcaagggaaagggacaggagaggtggcgagacctccctactcaatgggaggggagtcaaagtcagtttgtaagaagagcctgaggaggatatccggaacctggaacctcacacatggctgggcggagtttagcatgaggcagacattttggaaaacagtttggaaaagcacttcctcaaaaggttaaacatggagtttcaccagtcattcttctcctgcgtaaaatatatactcaagagaagtggaaagagaagtctgtcagcagatgcacggataaacgaagtgtgccgtacccattcagtggagtattgttcagccctgaagagggacacagtactgacacaggctgcatcctggggaaaccacagagacatgccaggtggaagaagccaggcaccaaaccccacagaccgtacgattccattcatccgaaacatccagaagaggcatgttcacagagacagaaagtgggttactgacgccagagtctggggaggggtgaacggggagtgtgctaacggacagggtttcttccgggggcaagaaccatgttctaaattagtagtgatttttgtacaactctctgaatatgccaaaatccactggtttgtacactttaaaaggattctgtggtgtacgaagtatatctcagtaaagctgtttctcaaagaaaaagcaagaaaagtcatgagggtgggcgacgcggctgtgaacctctctagacgatacactgggtgaacaggagctcatattccagtgcctcatctgtaaaatggggctatttgacaatcaaatgggctcctaaggtctttgggggattaaagatacagccctgaggctgcattgtgcaaggacaatgcggctgggtcagggtgagtgaggaaactttctcatacgtgccaaaaagagcctggacacacagtgattgtgacccgaaccccagctcttcccgcacctccgtgccagcgccctcgtctggcccccttaccttgtgcctggactactgcagtgggtcttcactgcctccacgcctggtccccaccccgccctctacacacgcacacatgtacacagtcccttcatgcagccacctaagagaggggcgtccccgatgactctaagtccaaccatgtccctcttctgcccagaaccttccatggctcccacctcaggcagaggaaaagccacagatcctagaaagccctcaagatctgtaccctgacgcccccctgacctcacctcctcactggccccctcaccctgcagatgcaccggcccctcaccgtttctcaggcacacaaggaacggtcctgcctcggggcctttgcactcgctgctctttctggctggagcattctttccacagataccttcaaggtttgttcctcacctgcttcaggtactttctcaaataccaccttttcagtggggcctgcctcaaccacagcctcacagtccgtacccactttggctgcattgtttttctctggcatttcatatatttttaacttccttttttgttcatcatctgtgttcccagctggaacataagttctacgaagtgggggatgttcttctgttttgttcacagctatgatcccagggcctggcgcacggtaagcgctcagtaaacattgcttgagcgaataaagtgtgaaaacaagcagcgaatgaagcagtgccgacggagggcagcagggagtggtggagactggcacgccggtaaccccggtcccatctgcaaggtgcagccagcactcggctctacacagcctgacgtttccacgtggggacatggacccagtatggccaagtgccgagtgtttcgagggaagccagaaacttctatatttatgtgaaatgttttgattttgaaaccactgaacgactgctgatcaaaaatccacaccggccgcctatatggatgtgtgcacgcaagtgcgcttacttgcttggtcatgtctaactctttgcgacccctcggactatagccaccaggctcctctgtctctgggattttccaggcaagaatactggagtcggttgccatttcttcctccaggggatcttcctgactcagggactgaactcacatctcctgtgtctcctgccttgcaggtggattctttaccgctgagtcatcggggacgcccctctctaggtgggaagctgccatctgtgacctctgacttaagtcacaaatgcttccaaaggggtttcacagaaccccagatttccgggaaagctgacaggacttctgagagcggcagctgaagaagtaaacgtggcctttgagtgtttctgtgaaacgaatggcattttcttatttaggttcttgagacgattttattttagggtgagttcctttctcttctcataactctcaattccaccctcacatttatgccgtgcccgggcatctttccgccacgctggagcaaagatcaaaagtaaatattggcagaacattggttttactgtgacccagataaggaacagcctaaaacggaaatagcgagattttattgttcctcccacaacttccctcctcaccgggctccctcaatatttaattatgaacttcacttcatacaaagtcttggtgttaatttggttgccaacagggcggggcctgaacaactccaggagctccaggctataaataaccccatgaacagcgccccctggagttgtgccatggctgcgtacacgtgtcgattcatatcatcatctcattctcattgacggggcagaggaatcttttttgcttcagcaaatgtttcctgctttgtgaaagaaacatgagcacacagaaaaattcagacagggtaagagggttgtggggcaaactgtcttccttctggcttcacctgatctttcccagttcctgtctccagaagctccaactgttgctcgttttttgtgtgtgcttttaactgtgcgtacgaacctctctcactgtctccct

SEQ ID NO: 42861 - DNA, 774 bp, Bovine  19866880475790
  misc_feature (1)..(1): n is a, c, g, or t
ngcaggggcaggacagggatttgaacccaggccgaccggcgcccgtggccatgccctaaacccctagactccacggagccctttggtgtcagtccctccccctcgcctggaattctctcacccaggctcgttttttgaactcagctatttctgatcatcccaagggagaatgtttcctgcctctggcagaaaaatcaggggcaaaatgagagccctgtggtctggccctaaactcagtttgggcaagcttggccagatgagaattctttccttctctctttttcctttcccttttctctttcattcttccttccttctttcccttttcttttttccttttccttccttccttccttttgctttccttttccctctgtccttccttcctctgagataaaacactgtttactccagcccactcctcacctctgcctgggtgacctccctcagccctgctccaggctggctggctgcattagcccccgtacagcagccgtcagcagcccgcattcaaacgcggaccccaggacctcgcggatgcaggtgtgtttgcacacggggttgggggcagggcgggtggcggtgaacacccggaggaggtttggtaattcataggacaggtcctatttggtaattcataggacacgtcctgagagtgccctcggaggcccttgaagatcaaggttgaaagttacgggagaggggcgggggctagggagctaccgcctctgaactggagtggactgaggctgcggccctaaggaggggccctcc

SEQ ID NO: 42862 - DNA, 1698 bp, Bovine  19866880532200
  misc_feature (1)..(1): n is a, c, g, or t
ngactgtgagcgaacagacacagtccctgccctgaggaaggagacacggattaaacaaataaaaatataatatgacagcgagtcaggaagaaagaggggctgagggtgacactggaggtggcgcttcagcagggtagccaggggaggcgtcccagagacactgagatgagctctgaatggtgcgcgggatgcagctaggcgacagagctgggggaagagcattccagatgcatggaacaagggcaaagccctggggttagaccacacccggtgtgttggagagaccgcaaggaggcaactggagtggagaaaagtgagctaggaagggagagtggtgatgcggaggtcagaaaggcaacggggccgacgaggcagggccctgcgggcctcgggaagactttggcttgtgttctggacgtgagccatggagggttctaagcagaaggacaagatctgacttaggatccacctgggtttagcaggatcctttgggctgtgcggagaatggcgagatcagcagggaggtgctttgaatccaggtgtggaagggggcaacctggttgggtctggatgtgtttcaagggcagggctgacagaatctcctgccaactattgggtgtggggcaagagatgaaactagtgaccccaaggtttgagcctgagcacctggaagggtggagccatcatttcctgagagtggagagctgtgggtgggcccagtggccacgtctgccctctgcccactccctgaaagccccctgctgactcccagcccaccccagcctctgctgggtcagggcacggagggagagagtgagaactcggctccacccaggcctccaggcaggaaaggggcacccggggcctggccgcagggtgacacaacagttaataattttgccgctgagagttttgcaatgggcactctttatcgactgctaaagcgagggggattttgcaaccatcccaacgggtgatacggctaatgccaggccagagggacacgggaccaagccacgggcatctccttgacccacagggactgacgctccaacaggccatccagggctgagccatcatggcaccacgaagggctggcagcgagctttggcttctggatcacgagattccaatctcagctcgtccacttggccggggaccttgggcaagtcacttcccctctctggacctcagctcttcctttgtaaaaaagagagcaattaaagggattgttttcaaattactttaaaactattacccaacctaccatttaacctttattgaacattgactgtgtaccaagacccatgcttaggcacttcctctacatcatctcatttaatcctcatgtcttttaaatcttttaaactgccgttttcctattttacaaatgggaaactgaggctgagagagagggggtgactgctcccaggtcagccaacctgtgaggagcaggggctcagacccagcctgtctcagtccaaaccccagctctgtcttaggaagtcactgcgggcctctgaggctgtttcctcatcagcacactaggaagcacagagtgagtagaatcgagcagtgttgccctcagtgggttagtgtccagtgcttgggccgccctgagaacacaagggccattggcattatcactaggattgctgtgagcaccacccctcaaggtgcccagcagctgggatgccc

SEQ ID NO: 42863 - DNA, 1621 bp, Bovine  19866880601786
  misc_feature (1)..(1): n is a, c, g, or t
naaacccctcagtccccggcaagccctcattcatcttcacaaacatatatggatttaggtactgttatcactttaattttgcagatgaggaaaccgaggaacagaaaagttaagtaattcaccccggtgtcacacagataagcatcagagctggggctcaaatcccaactgttggattccagaggcttctaggttgcccttcatagggtcgagtgagtttcagagatgggtttaaacgtctttcttccttgatgaaatacatcattttatctggaaacagaaagtcctgcctgtgtcctttaccccttccccgagacaatcctacgggtgaaaagtcagctaagagtcaggttgcgagacttgttgcctcctaggagccttctagaaacccaatagcctccaggggatcggccccacggccccagcatctgatcagaattccccatgagattttttttcagggggagggagagtgtggttcattatggagaggagtttccaaaatgaaaataaaccagcaaacaacccaacttgttaccggagatccagtgacttagccttattaagttcagtgttaaggaaaagagaacgaaatcgtttatagaaaccctcttctccctcaggagatatttaagaactgaatgtattttaaaaaaaaatttttaaggcatgccaagtttatgtaaaattataccaatgatgaaagaggctagagaacaacaacaacaaggccagccagagtcgtgcccacgtcttaggctcttaggaaacacagaggcaaaccagaacaaggaaactgggagcgtgagaacagagcgagccgggggacggctggggagcccagtgcgacgggcagctgccgcgcccgagctggcacctcaccccccgagcctcatcttttcaaaggtgatccagagtagctgcctcagacggctaaagattccaccagatgacaaatatgtctctgaacactctttccggcatgtgtcaagtattgaatccatagtaccagtcactgttccaagaccctttgggggttgtcccttttggtttgtgagcaagaacccccaagctagggtttgaaggctcaggctgggtcaagcctgagctgagtgcgctgcacacgtggtggcatttatttatttaaatatttggttttattttatgtgtttgtttggctgtgccatctcttacttgcagcacatgagatctttggttgtagcatgtgggatgttggttccccaaccaggggtctgaacgtggacctctaggtagtctccatcctgtgatacttaaccctcaccttaactcaggtacggggcttctcaggcggcactattggtaaagaatccgcctgccactgcagaagacctcagacaggaggggttcgatccttgggttgggaagaccccctggaggaggaaatggcaacccatggcagtatccttgcctggaaattcccacggaccgaggagcctggctggggtcgcaacagtcacactgagcgactaagccaccagcacctgacttagggactgttgttattattctctttgcagatgggagataggtggaggtggggaggagaaaggtttgcctgtaagctttacacagagaggca

SEQ ID NO: 42864 - DNA, 1164 bp, Bovine  19866880643126
  misc_feature (1)..(1): n is a, c, g, or t
ntcgttgctgcccatgaaggttcttctagcgagctggcctccacggcctccctctgcccccgtagggcctggctggtgctcccagggcccgtgcccagtggggctggcgtgtgcctccatcagccaagccgacaggggagggagaggaagtaaacagggaagggagagagccaggagaggaggccgagtggccgggaagctggccaaatggcagagggctgaatgggctacatcagcttctgacagcgcctcagatatccccgatgtcctgtcccgctgctgcctgaatgccaggggaacacaaaacccctctgcctggtcgtcaccgagaattcataaatgttgctttttaaaacagcacgtttagcagagcaaaatgttcatgattttgaaggacgaaaagctagagacagaaggtgaggtcaccttgacgtctcttaatcaagttgtgaagttcaagttcagcctgccaacttcttgttttaatcatggttagcgtttttcctcttttgcaggatttacgcttgaatgtcgaagactttaggagggaggcaagatacaagactgatgatgcttaagatcggactggggggttttctttccctctcctcttttagccttgcaaagacaaataatggttaaggatggataaaatatttaacagtgaccatgcataatttattcctgagttgttgcttatttccagctgaatagttcgctctcaattaggacttctcagaaccgccgtgtctccttgacaaactgacattaggcttattttcactcttttcttcctaaagctaattgtttttaatctgtgttgtggttgttgaagtactcattcctagatgttctttttatcaataacaaaaatcaaaactggaggcaaagtttttttgtttttttttttttaatatttattcctgggtcttactcagcttactcagagcttcagagacaatctggcaaagacaaaagtatacttgcatatataactgcctcttctgtgtgcttagcagctcagctgtgtccgactctgagacccagtggactgtagcccaccaggctcctctgactctgggattctccaggcaagaataccggagtgggtagccattccctgctccaggggatcttcccaacccagggatcgaacccaggtct

SEQ ID NO: 42865 - DNA, 778 bp, Bovine  19866880690413
  misc_feature (1)..(1): n is a, c, g, or t
ncagtgccgtgctggggcggcatgccgagacaggaggtgctcccgtgcggagtgtgtgtgcaggaggtcagggaggggctgactggttggctgggccccctctcccatccccccacctcacctaggctttcatccggccattccgggagcatcacatcgacccaacagccatcacccggcacgacttcatcgagaccaacggggacaactgcctgctgacgctgctgcctctgttaaacatggcctacaagttccgcacccagagcccaggtgagcatgccagcgggggagcctccaggcagccctcggggacaggcacacacacccgcctcccacgagcctcccgtagctggtgtgggtgtttcgcccctcggtgttataaaagtttagttagttgccctcgtataaaattgggatatttgacataaagatctatgtttccaacttctctggaacaatccgacctggccacctggatcctggctcccacttggctgcactgggccggagctgagctgtggggccccccttgcacaagaggcacgctctcccgtttgccgcagtccccgctgctccctgcagtcataacctccccccgcctcgttcatttgaattcacctgcctggccctgggggcttctgatcttgctgcctgggcttagtggaaagagtatgtatagcctgatccaaactcagtcctgagttcagatctctgccctgcctgtttggggaagggaacctgtcccaaggcgagtcccatcacctctttgagcctcagt

SEQ ID NO: 42866 - DNA, 1787 bp, Bovine  19866880814684
  misc_feature (1)..(1): n is a, c, g, or t
ntgttttagggcagagtgagagacctgtcacgcaaacattgttaaaactgtgctaagcaagccactagcatggacatggtcttcaattaaatttccctcattgttttaagtttgtctaccaccttgaagtcccatgagttacatgttgagatttctctagactcataatggattgccacatttctggaggtggtttcttttatcttagagaattatccactcaggctttctcacctttgcagtacagatatttctcttttacaaaatcgaaaattagaagctcttttccttcttatcgttaaaagtgttaacagccaactgtggcattttaaaacaatgtagaattcaaatgaccttgagtttaaggtggcagattttccaaagtatgtgtcaatgtaccgaaaccattatttttcagaaattcaaagaaatgtgtttatggttggtagaaaatggaagttaaaaatattttgtggcatgtcacaatgaaggcaactttctaccaagccactttgagcttgcttagtctattgtgatttttaaaataatacgtaatttttgtaaacaaagcagtgcagttatttctcactatactaacttctaactagaacaaaaagatgtagaaactcggaaacaatgggaaaagaacaaaggatgaagtagacttttacatgctgaggaatgtggcggcttaggaaacaaatgtttcaagcaaagattctgtttgtcagtttgataaagtgagtataactggttttagtcgttaatgctaataaacagcatagacattaataagcatttaggtctctaaaaagtcagctctgaaagcatgtgcaggtggctttaaaagttgttttctatcacttaaacggtcgtatgtctgggttgaaaagtggaagtaatacatagcgggccctgagtgctcaagagagaagagacgggaaagggattggttttggagccagaatgagaagagtgggcttgaatgaatgaaaatcggaaaaactatgcacttgtaatttaaagctggggtcaggtattttcactatttctctcatctctgattctttgattctgtgacactgttcacaacttttcagtatgaatgatttgattgtctcagataaaagagattgcaacaatagcttgtgactcgaaggcaagatttattctgtgttagaggcaggctttgtaaaatgggccactcttccaattgacatttgtttttatagctgctttcattgtgaaatacgacttaatgcctgactgtgttaaaaccatgttatagcagtagtccactaaaattccttactgctctatacttgttgtgtcattatagtctaaggtgaatattaaaatttcctaataattttttatgtaaatctatgctcttcagacaaaaactgtgctttgtgcagaggaagagatctacgtactatgactcacttcagttaaaaaaaaaaaaagacaaacggaaataacatggagagcttgggaagccctcgtcatcttgagtgacccattagatctaaatgttctcttgtagccctggtttgagtgcactaaatttaggtgtctgatccccactttggaaacatgcaaaggcgcttgtagttgtctggactcctcttagattaacagggggcacaagtagaaatagtggaaggaagaatgtttcgccgtcactctttgtttgacaccaccgatgtatttataggaatgctttggttcttttggaagcacatcatacaccatgccagatggttctaaaaagtcagctggcgggt

SEQ ID NO: 42867 - DNA, 1671 bp, Bovine  19866880815532
  misc_feature (1)..(1): n is a, c, g, or t
ntcattaaaaaacgagacagagaaaaaaatctgaagcgaatcaccggggcgggggtcaagctgaacgcatctctgggttggatctgggcgctggctgctgccttgagacccttccgcgccctgggttcctagggatacctacgccaccggtacctgggagaggtcgctgtgggaggtgataggtgggtcccgctttctgggccctcaccacctgcagggccgctgggccgtgctccggcgctctgggccatagtggttcgttcacatcaccccccctcctccgggaaaggctgagcgctagtggcagggcagcaggcagggcctgttgagcaaccagccttgtgaaaacaagggcttacgtcatccgggcaggcagcctccctgcaggacacctgcagaggcgctggggtgggaatcgccactgatcccagcgccgggggcagcagggtgggaagccaggggctcagtgtttggtaggtgagggcgagaccccgatgggactgaatctgtccttgggggctggtccccagggcctgggtggccccttgactcactgtgtaacccccaaccgcccttctctgagcctcagtttttccactcggaaaatggggctcacatcagacctgttatgatttattacaaacccaaaggggaaggctgggccaggaagacgttaatccttcccacctcctgggatgtgaccttgaacagaaaccctgagctttgcgcagcctcagtttcctcatctgtaaagcggggatgataataggacctgcttcttaacaatgatcaggaggattaaatgagttagtatatgcaaagggcttaaaatatggttcagggagcgtgaaagactgacctgagatcacacacaaatccttcaattagctgcagactccccgtgtctcaccgcatctccccagaaccccgagaggtgggggcgggtgctgagtctcagagagatcacatagtccagttaacggggtgtggggggaacctcaccatctcctcctctaccttcatttattgagcccttcctgtgccaggcactgttccaggcactgggggaacagcagtaagcaaaacacacagcaatccctcccggaagtcagggagggctttcagaggaggccacctgcgggctgagccctgcagagctagctgtcttgggcagagctggggaatccgtgttcttggtccagaggtaacagcaaatgcaaatgcattctgttccccgtaaattttgagcatgcctgacccgcgattccccgtacttgagggccagcgctcatggagcgggtagtctgcagggggaccgaggcagacaagacgaggatcatggtggctgcagataagggctaggaaggaagttcgccggcaggtggggctgggagggcctctgggggcagtggcccttcagctcagctctgagtgtcccattttgcagctcgggaggcctggctgggtggccccagggccttaggtccctccctggcccagaggctgctgggaaggcccagaaagccagcaggctgggccagtgtctcaccctgtccctccctgccccccaccccccaagggcactcagagatgtcatttctccagctctccggggcggaggtcaccccagctcagcagataacgctgaaagttgagcaatgcccgcctgcc

SEQ ID NO: 42868 - DNA, 1518 bp, Bovine  19866880889554
  misc_feature (1)..(1): n is a, c, g, or t
ncatgaaaaaaaaataaatatatatatctcgcaagcttaaaatgttattgaaatagtagtttgataattcatataaactttggtgggttagaggtaaattcaagtctaaaacaaaggggcctttgctactgaaaatgatgtgcttttgctattttgtctatagagaactggatgttagcacatttcccagaactaaacaccctaaggactagatcatttccgtttgaagtggttgcatatttaacctgctgtgcagagcctggttaatttttcccttaactatattttttaatttctaatgtgaagaagtctgtcaattcggtagtttggggaccttggctcctatatgcccatattttattttgactttttaaatgttgttcctctgttgctaattgtaacagtttttccaaatgcttccccgcctcgcctcattttctaagaaatcaaaccaactgttttttaggggctgcttcaacttacaaagcgctgaagcaatgttcctgaattaagaaactgttaacaatcgatcagatctgcgtttgtccctcctgtgacttccacatttacaaactcattccattcaggcatcccttagatgtcatgaaaggcagttccatcgcccctgctgatgtgggagactctctcccatgtcttcttgtcctcattctgaatctcattggaaatcattcctttcttgtttgtgtattttgttggtctgcttttatacccttttaatgtgtttgagtagtgtgaatgattttcattaaaaaaaaaaaaacacccaaactaagagatttttatacacaggacagccttgtgcactttttatatgaaagttttgggttttccttagtggggtttgtaggaacactgcctacactttatggaaagcatgtagtattcacctttgacaggtagagtgtatctcgattaatgttaagaggctatttattactttgtgatgcatccacttagaacaaggtaagagtaaggctgctaacttttcgttccttgcctggtttcgttgtatgaggtgcacaggcactaccgtagcttgtatataaagactgagaatagtatgaactacgggagttccctggcttacggatgttgtgctcagagttatttattgattaattttatggtagggctagaatggataccttataacaattctgtgctagtaaaacaatgaagaatcgaatgactccgttttgaaggatattttctatggtaaaagtatatgaagtaaagttgattaaatgaagatcacttgactcagaatacttcaacgtattttgttcacattgtaccactaaacattatcactaaaccattaactgcacaatgttaggtaacacagtgtactttttgttgaattcatagaaattcttccacttatttaaccactattttttaatggcattccaggtttaacattctgttgagttttacaaacttaactcttgaatggcaaaatgttagtaagtagaaggttacatttcatttatatta

SEQ ID NO: 42869 - DNA, 985 bp, Bovine  19866880901615
  misc_feature (1)..(1): n is a, c, g, or t
naccaccatttttattgcccagaagaactgaatccagagcagggatcgagcagtttttaattcattatccattgatgtcattttgaaaagtttatccatttttgttgtcttgtctccacgatgcatgacgcaggttctctgtatgtcttgttctagcttttgctctgcatgcctgcaggaatgtctgaagccgaagaagcctgtctgtggcgtgtgtcgcagcgctctggcgcctggcgtccgagccgtggagctcgagcggcagattgagagcacagagacttcctgccacggctgccgtaaaaatgtatgtgggagtggggcggagcagtcggcgtctgtaagatgggtaaaacacagagcttgccgccttgtttctgaacttagagcgtagctgcgtgagcagcagcacatgtgcatgctggctggctgtggccgtggccgtgctgttgcattttggtaacctgattggttgtgtggtttggttttttcttttaaataattggtttagcatattatatagcttagctttgaaaaccatagaaatcagttatcccagtttttttctgtaaaagacccatttttcccaaagcagcatacacagatttaattagaataagacagagtgatatttctccattttttaaagtataaaatgtagtcagtgcctcaaaactacctgctgcagtgagtctgaggggaaattttgtgatgtattcacgacagatgtaaaactggttcagcttttggcatttggcaaggagggattctagtacaaaggtcaatatgaagacatttcacgatagcgtgtccagtgtttgaaacgcatccgtgttcttttttttgtatgaccatattagagtcaagaatatttattttaaaataattataactgcataggagaaatgctattgttttattttcaaaagagatatatacagaattactgggttttaaataattgtatttcatattccagacagca

SEQ ID NO: 42870 - DNA, 901 bp, Bovine  19866880921163
  misc_feature (1)..(1): n is a, c, g, or t
nccattcatccatacatcccatagatgtttatttaactgatggctactatgcccaagcgttcagatcactgtgccttgagccaagagaaacatacctaattaggtttctgtttatttgctgttccaggaaagctaattgtggggtttgtaaacagccctttgatggctggagagttacttaagaggacagttaaataaaccactgctgggtggaaacagtccatgctggtccagagcaggtccagagccatggcctgccttgcacggcaggaggagggctgagctccagagagtgtggaggctctggggtcagaaagaagtcagagtaatggacagtgacagtaacacccaccaagtgtggaatgcctacggtatgccagatgctgtgttaagcacagttcttacagaaactccacgtgatggaaactatgatcccatttaaggatggggagactgaggtttggggagggacatccatgtgctcaaggccatagggctgggaagtagcacagtcaggacatcaatctgtctgtgtgcagcaatgatggtaataatagcacataattatataccattcactagattctaaggcactgtcctaagaatcccactaaatacacaaccctatgatgtcactgctatcatcactaccattttacaggtgagaaagttgaggttgagaggcttaaactaatttgaaagaaattactcagctgctagaatttaaaaaaataataataatctggacttactcttcaccatgttatgcagtggattacgccttctatgcatttaacttgggaagatctagccatacacgatgggccaaacactttttaaaaatcattttttcattttttctgttttatgtatctaaaaatactgtgaaattataacttgt

SEQ ID NO: 42871 - DNA, 1812 bp, Bovine  19866880935547
  misc_feature (1)..(1): n is a, c, g, or t
nacttttgtctttttaaattcgtattaatttttttaatccttggagattctttttagtttaccctcactctagtaatttttgaagcatggtttccccttctgtgcctgctgttagttctgtttcctcgtcctctgacgaggcgtgtggtttgtaggctgtctgcctccagctgcgcgatttaagaagatcgcgttttagtgccccgttctccctgtttgacctcagaaataatcaatggctgacttgaagagtaagtcactccccactcccaggtgttacttagcttaaacaggttattgttgttatttaattgggtgcagcattttaaaatgggaagatttttttaaacgtaaaaatacaagactctctgacaagctggactggccacacagattcctacagtccttgaagagaagctgcctggagcaagagaagccacacccgttatcgggtcaggcgcgctcagctttgccagagccccctacctgttgtgtctgtctcggctcagcctctttgaaaagtgggaaaatgaaagattaagaacttgcccagaaaactgagggagagtgtacttgcagaagaccagaattctgtgtttgatacacgttcatttaatttcattatgattttatgtgtattatccattacacttaattacaggcggaccttggatatattgtgggttcaataaagcgattatctcaatggagtgagtcacatgaatgttggctcaaataagtgcattatgtctaaaaaaacccttcattttaaaatacctttttgcttaaaaaaaaaacgtaacctgagccttcagtgagtcatcatctttttgtggtagtgacatcaacgatcacaagtttgaaataccgagagagttaacaaactgtgacccagagacacgaaatgaacaaatgctgttgaaaaaaaatggcattgatagacttgcttgatgcagggttgccacagaccttgtttgtttaaaaaaaaaattatctgtgaggcaccataaaagagatctgcctgtacagtctgcccaacctctaaaacaggtacttgagcttcagaagtgtccaatttcatgtcattaagtcaaatataaacatgcaaattggagggttttgaacaaatgtagggaaaatacagtgtaagtaacttgttataaatggtgtcgagaatgtgtgtgtgaggcttatcagagattcatttgccgtatttaatgtttcagtccttgagcttcataaaacctaacgtcaacttctggtaatttcacggggactatttgagagggccccctagtggtttttcctggcacagcgtgtcttcctactgcactccgttttttatctgatcagatcaggtcagatcagtcgctcagtcgtgtcggactctctgcgaccccgtgaattgcagcccgccaggcctcccgtccatcaccaactccggagttcactcaacgggctaatatttaacgagttttgtttctgtaccaaatatgttttgagttgccctttctgtacagattccaccatagataaacgtgtactttcacagcattcctataattattttattttatttgtttgaacagaagaagcagactacagtgcctttggtacagacacactaatcaagaagaagaatgttctaaccaacgtgttgcggcccgacaaccacagaaaaaagccgcacatcgtcattagcctgccgcaggacttccgacctgtgtcttccatcatcgacgtggacattctcccggaaacgcaccgccgggtgcgtctctacaagtacggcacagagaaaccgctgggctt

SEQ ID NO: 42872 - DNA, 2038 bp, Bovine  19866881063828
  misc_feature (1)..(1): n is a, c, g, or t
ntggatgccgatgtgctggtctccgtgtctcgggggtcctcggagctgaaggagtccatctcgggcagctcctgactgcggctccgcaggccggggccccgaaggtcgccgtcggacaggcagctgaggacagagggggccctcggcctgtccagcagcaaggcctgctgtgcccgcggctgcaggacagactggagacagacagacagacaggccggccagcctcagcagctgccctggggatcagagtcagacccccgagggtggccccagacgtctgctctgtatacccacagccgcgggatgaccggggtccgccaaggcgcctagcacccggaagcgccggtgagagccaggccccccgtaccccgctcactcgctcctttccagccccagctcccgagtcagctcgcagtgaagcctcaccacacctccctgagggtggcacacttctgcccccggagaagcgaggtgcgcgcgaggaaggatggatgtgcgggcattttaatccaggccagcatacacgaactctgaccccctctgctgtgccctccccctcatcaaccagaccaatggctgacgttcctacagcaccacctgtaactgccaggcattccagagagcattcctcatttacaaagtcacttatttaaccctcacaaagccccgtaggggcagagctgttagtttcatttctccgatacagaaacagaagttcagagaggttgagtgacttgctcaaggtcacacggcagatgaaaggcagagatagatagaatttggagcccaggccatctggcttcagagtccatgctcttgaccgtaaatgactttgtaagcaaagtacgctgggaccaccctggctggacaaccagtttcctttaaatgcacaagctgcctggctcatctaaagctgccttccccacctaaggtccagaggagggcgacagggtggtcccgctccgcatgcctggaccctccctgggcatcgacacacacagggtgacgtgtgtaccaggtcgtttactgcccgcttgttggtaacagcaaaaactgagcctcagtatcttgttaagtgcagtttttagccaagtacgagatgctgcatggcgccaacatgacagagaaggtctccagggcgtcaccagggcaagggctgctgagggacacaggctagagaggctgcatctgctcccagatggcccagagcctctctggaggaccacggaggaagctgagaagagtaggggcgctaaggaggggacccaggcccctggaggtcacaggaaagaggtatctatctcaccacaaacgaagtcaatctattacctactggaaacacgttccaagtgcgaaacaaacgagcccgaggctgtggccggggtggcagaaccatctggagaaccccacccagtcaaggccagaaccgaatccagaggccgcagaacagagggcaggcagtgaaaaagaaaaggtaccccaaaacacccccaaacaaggaaggctgagcccaaagcttgctgcagctggaggtgcacgtgctgaccatgtgctgacccctggggagtcacaccccccacccccaatcccagcccgcccaccacatccccacccagggaggctcactcaccaggtagtatctctcccggaagctgggggtgtttgggggtgtccagttgtacaaggagcccttcctgctgcctatggagaacttgcccggggggctgggtgacaccaggaagctctcggtatcaaatgggctggaggagagcagaggccagggtgtcatcgacggccggaggacatcggaccacagacaggaccaggggacttgagacagaggctcagtgtgggagggcgtggacaggcacagtggagggactccaggtcccccctctgaagcctccctgaaacgtctcagatatccattgccccgagggtccttagccaaatggggaggggcagcgattggcccctttggaggggctgatgaatgacccccctttggaggccctttgagaagctcagcagagcagca

SEQ ID NO: 42873 - DNA, 707 bp, Bovine  19866881071835
  misc_feature (1)..(1): n is a, c, g, or t
ntccccttcccctgtcaagcctccccaagtcaggcacagaaatagtcccagctgtgagacgaaggctccagagtttaaaattgcagctctgtactatttatactccagccggaaagaggtttttttgcgcacccgtttatttggttgtggtagcgacagcctaggctgcaggcggcagcttctgcactgtataaacatttctctggggacaagtcggcgctgagggcagccttcaggtgagggggcagtgccaggcctgcccagaaacggttgggaacacctcccctcagcgagcaattcggcctcttaagccagagaaagtacttcatgttccaactgaacttccttccaagatgcctggttattaggggggaaaaagacaaaaaagcaggtattttatttgtcatgaaaatagtacatgcttgagggggaaaagggttcaaactactcctttatgcaagtcattgaagcagacccttcatgttctgttttgcttggcccatgaagcattaaaaaggaaaaacaatttttaaaaataaatgtgccactatttaaaaatcgggacattttctataaagttaaaatttctggcttctcttgaaaatggaagattctggcaaccctggcctcacgtttcctgatttctctgagtggctggctgctctcgaactaggcaagtgcttctcgagtcactccgagccccaggg

SEQ ID NO: 42874 - DNA, 1151 bp, Bovine  19866881125028
  misc_feature (1)..(1): n is a, c, g, or t
ntgaggaaacagagcctcagagagctggtgagacgcctgagattccagagccaggccaggccccaggaggccctgcccgaggcctgggaagtgctgcttctctcagggtgcggggtgtggcccagacaagctgggaatcctcgcctctggggcctccccttgcccagacccgtgcaggaggagcagtggaggggttcagaccctcactttctgccccacaaacctcagtccaacctgctccctgggatacagctgctccgctggggtgcctgaggatcgttacagtcatctttagatgagcaagaaactctcattataaattacatcattaaacttcagggctctaggatgttgaagcagctaatatcactgcgtgtgtgcgtgttcagttgctcagtcgtgtctgactctgtgactccgtggactgctcagtcgtgtctgactctgtgactccgtggactgtagcccgctagactcctctgtccgtggaattctctaggcaagagtcttggagtgggaggccgttcccttctccaggggatattcccaacccagggactgagcccaacctgtgtctcttgagcctcttgcattgcagacagattctttaccactgtgccacccgggaagcccagatattaccattaaccccatttgaaacctgaggactgaactgtcagggtgggggcggggggttcactgcccgaggtcacacagtggcaggactggggctcggactcccagatcctcggttccaggggctgagctcttgtcaaagacgcagaatgaaacaggctgcccagaggttccactgagccccacagatgaggagagtggggacaatgaggccaggaccagctcgggacccgtcctccaccacacagagacccttgagcaagccagagaggctgcttcccacaagctgggcggctccgggccctacaggaagttgcccgggctaggacaggcccgcagctttgatcagctttacgagccgtggctgtttatggaggcccaggcccccacctcctgccgcctgggactgggtcttgtcaccggcactctggatatttggcagtcccccgagaggctacccgcccggggggtcttggccccacttcctccagcttggcccctgccctgccccttgg

SEQ ID NO: 42875 - DNA, 1787 bp, Bovine  19866881125548
  misc_feature (1)..(1): n is a, c, g, or t
ncagtaatgcagggattttcagttacctaccattgggctccaaggtctctccagtgcattttgcattttagcacaaatagctctcccaaatctattttttttaattctggtattaagtaacgtaattaatgtatattgaatttcatgataaatctttaagtttcctgtagggttttttcagtctctaaaccgcgaaataactgcgtctgccccgtgcctcccccgccccgcctttttcctttttctgagctgtccgttctctgatcctttggattgcggagtccttttggcagttttcgtcccatgctgtgctcttaatggcatgcgtttttcatcagcttacctgatggcgtgtgagttttgcacaagctggcgcccctccctacagtgtttctgttaattcgttcgtggtaagcagctgatactgactgcagagaggctgggcgtgtttccttgtgctgggaacaatgggaagtccagctgggtctttgtgtccaagacagtggagtttggtaccagtcattgggtgcacgttttgaatatccaagagtgctgggaactttgcagtggttcttgattcctctgccacatctcattgactgatcaccatgacatgcttcctaccatccagtggtctcagttctcagattttgcctatgctgctaccatttctggtttcacatgacagaaattctagtgaaaccagaaacatactaataaggcccctcaaccatctctccacatcttcccccgccctaccggatgtagtcttcacattgtctctagagtagttgtgttaaaaacagacctgagcctgtccctcctctgtttacttctacgctgtcgtttatctgtgaggtccagactccttggcgtggcagccaggctccagccttccccctccctcccacacaccttttattctggccaccctggaaggtgcagtcttctcagacacccttctctctcattaggaacagctaaatcctgtgaggaaaatatgttgacacccttctctctgtcccttggctcaacactctgtttaggctgccagtcccactctttctggctcagacacatgcccctcacgctagattttggccttctcatttgtctgcatccgtacaccttcacacccatctctttcaaagccccgtgctctcactggagtggtttcttcgtatctgggctcatctcctgtagagtccaagctatggaagtcagctcttccatctttctcattcatcttggtgtgctttgcaccggccatagagtgccttaagaaatgttggggttgaatggattgtcagcagtttgctctgggccctgacaatagacgagtcatggttcccaactcacattctcagggaggaggaatggtagacacacacattaatagattagcctgtgtcggtactgatagcagaggccatgcagagaaaaccagcacggtgggagccatggcttgatgaggcagtttggtcctgcctactgtgctggcttggaagaaaagcttgggttcttacccagtaggagttcacaccaccagtgtgtttcacaggaactttcagtttaacaacagatttgtccttggcctggggtgaacttaataggaaacttggaggtagtatatttgtctctctaaaaatttttgaattactctcttctcatcactcttgacttattctcacatgccttctagaagggcttcacatgtacctggtttgtaaaatatgtttgactatgggggattaaaaataggttctccgtaaagaaccctttaaaat

SEQ ID NO: 42876 - DNA, 669 bp, Bovine  19866881224136
  misc_feature (1)..(1): n is a, c, g, or t
natttttttttatgcctatcccagatacttgttagaggtatataatgcttgcaactagccaaatttacagagagtctccgtggcatcctcgttcagaagacattcaagccgtgatggtctcatagtgtgatgaccgttccatcttcctctaagagtttctgatctggagcacgcgtttcgaactcggtgccggcgccactcgctaccggtggtaagctcacttcgttggcagggatgaaaccgttctgcccagattcgaaactgagctctacctgcgtgagcgactgcaggctctcggcgctgggcgctgccctggggatctgccgcggctccccgctgtcctcgatgacgatgtcctcctcgtcgtcgctgtcatcctcccccggctccaggctgggctccggcggcggcgcgcagctggggaggctggtgtcggtcgactggccagagctgcccgaagtccgactgttccggacgacgttgttcctctggttggccggccgcacggtgatgatgaggttgcggctgttggcgatcatcatgtcggtgacctggtcgaggctcttcccggagacttcgatgccgttcacctccaggacttcgtcattgacagccagcagccccgtgctctgagccaggccccccggcacgagtctggagatgaagatg

SEQ ID NO: 42877 - DNA, 908 bp, Bovine  19866881463842
  misc_feature (1)..(1): n is a, c, g, or t
naggtagggtgtgtatatttcagtgccagacgaacccataaccctgtgaacgctgtatcgggagtgatgacagctgtctaatatcaaatagcagacgtgtgttctttctgccacttaaactccctggctttgctctgagcaaaaagtaacaaaaataaatgcatatttgctgaatttttgttgaattctatttggattccgactgttgagatataatcagttcttttatgtaatggatttttaaagtatatacttgaatctttaccttatggtttttagcagctatggaaaaagccttaaaatatttttaaagagaaagaggtggggcaggagggagggatgtaagatacaattgtcagaatttaagacccagtgcaaacaaacctagctggtgacagataggaattctgaaaaggcggaaaataaaagggggatggtgcagccaccagcttgctttccacctgagtgtgtatgcaacctgtgataagcagaggacgcttgtctgaagggcaacggtgtacctcggacttctgagatccttctgatgtggtatggaaaacagattgcataggtgcaagggcagaagcagagaaatcagactggaggctactgcagtagtccaagcgagagatgatggtgacgtggcccagggtaggaggtatgcaggtgatgagaagcggttggtaactggatatactttggagaccaagccagtaggactggatgtggggtatgagagaagcagagcagtcaaggataataccaatggccgtttggaaaacacaagatcaaggatggggttgcatctgctgagatggaagaaactgtttgatgagaaggggatggagacatcaagggatcagtttggaccatgtcaatctgagatgcctgcctgcgtgtgtgctcgg

SEQ ID NO: 42878 - DNA, 1046 bp, Bovine  19866881507263
  misc_feature (1)..(1): n is a, c, g, or t
ngttgtgttaatggtactgtgttaacagcagcccagaaaactaagatactacctcaggtctctgacctcagcagcacaaagcagtaggaaaagccataaatgatggtttggtttttccttttaatgaggagattaaaaaaaaaaagaaaagcacctcctggaaactgtacagaaaaggaactaattttaacagtttctgttttacagatgaggaaactgaggctcagagtgtgtgacttgtccaagtcatgtagttagaaggaggcagaggctggacttgaacacaagtttttttgaccccaaggcttgtactcaccaccctccctgagaatgtgtggacattgctctcacgggtcattgcagagtccccagatcctagttcccagatgtcctttttctttattgcgaaacttggtgctagctttgtccttaagggaactacctgttccgaccacattttcgggaatccgagcctctgcagatcgagccctctttcccgggtgattttcattacaaaacgggagatgcattcccaccaaaatcatctcccaatagacccaagtaagaatgtttggcaaagaaggaattaattagtaaacagcttgtagtatcccaactccagtgtctgcctggaatgttttgcaacactttcggattctgatttcagcacaatttgtttatttcaggctattaaaccacacgcatattcttcatgcttgggaatccactggccacacgctgaatggcaagaatggagaccctctctcacttcccaagggcatttgtagtggttagtagagcagggctgcaatccctggggagaccagtagggcttttcctccaacaggaagtaaatttagggctgaagattcttgcccgtcaaggctttgggtgctagaaaataaggctgttccttcgggagcaaatcctcgcaatgtgagttaaccagctggcatgaagtcacccagtcctgagaactgggcaagaaaaagtgtgaacaaaatctgacttttcctgccttcttgcctacacccaccccccacccc

SEQ ID NO: 42879 - DNA, 1482 bp, Bovine  19866881758473
  misc_feature (1)..(1): n is a, c, g, or t
ntctgtcttcttataaagccttctgattataaaaaaaaaaaaatgcaaacaaaaaattacagttgggaaaccaaggcttaaacagagaaagattgggtcaagttccagtggaattacaaagcttaaaatgaagtggtctctcattcattcaaacccttgtaagcagatgaagaactgttatctgtgtgttcttacatgcctccaatgatggggaactcactgtctaaactgttcatcatgtagggctcaacagagaggcctcccaagttgcccctagtttttccctccgactctgctcagatgtcaactgctcctctggccagagttacgctgggaggagcccagcggacaggacaggaagtgggaagcaatgtgagttatgacagagacttcctgggtgccgccaccagctccctgccacgaggccttgggacataccctctcctctgggtttcagtgtctgtaaatggcaacgctcactgctccgcaatctccttccagttcttagaaattgattgggcctcgcacaggtgcccggcgggagctggggcagtcacagggggttcaccagtcccgcccacccattcccatctcggaggccagagctaacctcggggcaggcggggcaggcaggcccggctggggataaaggcaggtgccccagggtacagccagcttaataacaggctcccagatctagggggtttgaacccaggggaataggttcaaacacaaattgagcagcccacattcttgcctgcagctctgagagccaatggttcccacacccagtgggcttggcccccactctctccaagcccatccttcccgggggggaggtgcccccttctctgtgttcaccatgcgcccagcttctcactgtactcagaataagatccacacccctggccctggcccggcccacacctgacctctcctcctccctcctcccctcagtcactgtaccgggggcctccccagtgctctgcagacaggccacgctggtgctgccttggggcctttgcactgcctgttcctcctgcccagaacatgcttcctccagatcttgccttggcagctcatccttcgggccaccactccaaggtcacctccccagagaggccctccctgaccccatccagttgctctgtctcaccatcctgccttatttcctccaccggaggcttcatggggatgtcttatcccccgagtttggcgtctgcctctcccagggtttggagccttagatggcggagccgatgactggcccagtgctgggtctgatgtcaccaggcacagcctggcacccacccatcagtgtaggttaaataacaagtgaaatggatgttgcagatgctgagcccattctggggggcggtcagtgcttcacctgcatagaccctctcacctccgcacagatgggcttggaagaatacctgtattgatacgcagactcactgtgcccctaaacacacctgcatg

SEQ ID NO: 42880 - DNA, 2742 bp, Bovine  19866880473415
  misc_feature (1)..(1): n is a, c, g, or t
naattcattgcaatctcctttcaaccactgctgtgttttgttactgaggtgacttttagaaagcccctactgtggatgctgaatcccaggggaaccaacccctgtgatgagagggttgaaactttcaagcacccacccccccccccaaacctcctgtgaggcgagaggggctagagattgagttcaatcaccagtggccaataattcaatcaatcatggctatgcaatgaagcccccataaaagccaaaaggatgttttagagagtttctgggatgttgaacacgtggaggtgttgggacctcggtgcacccagagaggacatagaggctcagcaccctttcccccatacactgccctgtgtatctcttccatttggctactcctgaattatcattttatgataaactggtaatctagtaagtagcataagtgttttccttgagttctgtgagctttctagctaattaatggcaacccactccagtgttcttgcctggagaatcccagggacgggggagcctggtgggctgccgtctatggggtcacacagagtcggacacgactgaagtgacttagcagcagcaagaaggaaatggatttatgtaacccacttatttataaacacaggtgactacctggacttgggattggcatctgaagtgtatatggggggaggttagttttgtgggatctcatactatctctagggagtgtactttaggacaaattttaggacatctagccgatgtcccagaattgtctggtgtatggaaacccaggcacacacccacatttggtattgagaagtgttggaagtattgagtgggaggaataaaggaaaaaggaggatgtgaggtttcctttaccaggtgcaaatgaaaaacgttaaaatcacaatcacttttttttttttttgagaaatcaggcaaagttcattggatcttatcctccacctttactgagtgctaatttgtgaggaaggttgttttatatgatgaataatggtgacatgtcttacctcttgtctttagggtcattaaaagcagtgcaaaaatttacttatgaaactacatacctgctgcttgatgtgataaattctatgtcctacatttctccttatgtctcaccatctctccatggcccaaccaccctgcccaaccaaaaaaatcaactttcgaattgaatatgtgaaatagttcagttaaaatgttgagaaaaatggcggtgttcagctggaatctggagaagacaagacttatcagccttcctgcgctacatttgcgagtctctccctgatgggccatatactgtagccagattggtctctgtgatttccctgatggtcagggtatttcaatggctgcagaaagaatcaatgcactacttatgtgactcacttttcacctttactaatctgtcccacaaggaagggcaggattgggctaaaggaacttattacctttattggccagaattaaattagtcaccctgacttttaaagaggccacaatattatgcgatccatgatgacttagaacagccttttctaaggtaagaagagtcagaattcagttcttaaaaagtattaactgggtttctgagaaaaaaaaaaaaaaggagtgaaggcactttaccccaacagcttcctggaaacataaagtttgttccttcagatcttgtctaagacacaactgataggtagtaataaacatattgtaacttccatagatccaactgtttaattagatggacaccaggatgcagtatcagtactgtcccattgcttgacaaatagaatattgctttataatatatatgcttcacgtctttttttctcagtagtttgcaaacagtataaagaattgcttcctaattccctgaaaggatctacttaaactgtccaactcagtgactaattagcagttagctatcgatatcctcaatcctcataaatgccaaacattgagctctaaggacatgacgttttcaacagatgtgctggaatttagatcatcccttaaacattaatattgcctttatgtcttgatctacctaccttaggctgtattcccacccagaaattaatagacatagttaggctttattaaataaggtttgatatttgttaagaaaatattttattgaaataaaatgtccctaatcacaaatgtacaattaagtaaatttccccaaagtaaacacaatgatgtgtctggaacaaagattcaaaaagaggattctatgatctttctccagttattagacaccttaaaatattcagtattttgacttccatcatcatgggttagttttgcctatttttgagtgttgtacacagaaatccatattatacatgctcatttgtatctgcaaatttctgtgttatgcatgtaagattcatgtgtgttgatgtatatagcagttcattctcattgctgaattcttactcatcctgttgtatgaatgggcaataatatttgtctattttgctgatgaatatttggatttttgcagcttgggggaagcactgtgtggcaatgaacattatagcatgcctttttaaaatgtatgtgtgttttcctaaaggaatacactaaggaatggaattgctgcgtggtggtgttggctcagatgttaaagaatctgcctgcattgcaggagacctgggtttgattcttggttcgggatgatcccctggagaaggaaatagctcccacatattcttgcctggagaaatccat

SEQ ID NO: 42881 - DNA, 1368 bp, Bovine  19866880924028
  misc_feature (1)..(1): n is a, c, g, or t
ncttggaacattttggactctcttctgatgctacaagttgggatcagctggagctcacttctctcctccactgctaaatggactttcttttctaattagtagaggacacctctggtcctctacctgctagctttccactcttccctccagcgggtctggtacaatgatgtttcctgtggatgtttacagactggggcagacactgaccttgtatattgaaataatttcactaaatccagtattcatatcccatttagactctattggttatatagttgacattgagaaaggggataaaatctggttttccaataaccagtgtaggataaagatctataattttaactgggtgatacaaacacatggagatagctttgtagagatgtttatgagaaggcaaaatatcttgttcaaaaaaaaacaaaactgatctgcatttctctgacaatgagtgacattgagcatctttttcttgtgcctcttggctatatcttctttggagaggtgtctatttaggtcttccacccattttttgaatgggatggaaggagtgagagggaagtccaagagggaaggggaacatgtatacatataactgatccacgtcattgtacagcagaaactaacacaacattgtaaagcaagtatactccaataaaaaaaaagcaaccatctctctaattcccactcttatctgtcttgcttggctctcttgccccttttctctccacctccaagtttatcatctcagcaaatgtcaccaccatctagccaggtgttgaagccagaaactccaagtcatccttaattggaggttttgtgtatcctaacacccaaagccattagcaagtcctcttatttctatcttcactatatatttcaaatgtacaccatctccaatgccatattgttctccacaccatgttatttcagcaagtccttgaccttctagttggctcatttttaattgcttttgtccactcacatccattcttcatgccaaagcaatatgtaaaccagaggatgccactgcctgtttaaaaccctaccatagggtctaccctgggagtcgagtaattaagactccacatttccagtacaaggagtgtggattaataagaggaagaataataaaataatttttaaaaagaaaataaaaagaaatatcatatttttaaaaaccctccagtacccatgattgtatttaaaatacaatctaaactccttctgttggtctgcagagccctgactatctttggttccattttgccggtctatgcttagtttgctaaattcgtttccatttctggaagatgccaggtcagttgctacagtatagtctttacatatgttatccttttcacctgg

SEQ ID NO: 42882 - DNA, 1486 bp, Bovine  19866880449531
  misc_feature (1)..(1): n is a, c, g, or t
ncatattccttttcaccaaaccccaatctctccctatgcaccaaactgcttaagagcattgttccttctgtaaacgttccctgcaggcaaaagcatatactaaatctgcattcatgaacaaaatatggcttgtggcaactttgaggctttgcttattagaaatgccggttgcttttcctgttattttataaggaaatttggttcctagctaacatttctacctaatagatgcctacagtaaagtttcaattgtgaacactttcattacaatttttcatgtataattctgcagtaaattttatttgtgcgaaatagacctatttctttcagagaaaacctactgattatacacattctctctaccttcctttcctataaaaagggaggatacatgtaaatgagtcaccttaaatgtgataggtgctatattcatatgtatttttaaaattgtttgtattactctctatttcataaatatttcaaaggaaccagaatttgactttaacccataaaaattactttataagtagtataatctaattcaattccagaaacattatagtgattctgatgaatacatataaaatacaaagcaaaatcagttcagacaatatcaaatacagttttaacttgccattgaatggcatatcagaatattaataatcactaattttaagatcagcagttcatggtttgctcatatcacattgctgtgaacgtagtaggtgtttaataaacatcttttggcagaccgatgattatgtgaggtttaggaatttaaaaatgaggtgggctgtattattcacaacagctaaaacatgggagcaactcaagtatccttcaacagataaatggattagcaaaatgtggagtatcattcagccttaaaaagcaaagacattctgacttacactacaacataaatgaaacttgaaggaatgaagctaaaggaaccagttacaaatggttcatttatatgaggtatttagagtggttaaaatcatggagacaaaagatagaatggtgactgctaggggctggtggggagggaaggttagggagttagtgtttaatgtacacagttgcagttttgtgagatgaaaagtgtttcagaaatgaatggaggtggtggttatacaacaatataaatgttttaacgtcactgaactataagcttaaaaatggttaagatagtaaattttatcttacatgtattttaccacatttttataaaaaattggaaaaaagttctaatggctataatgcaaaatgatatattttattaaagaattttctcagatattcttataaaagttggtttaagatggtgaattttctgttatgtgtattttaccataattttaaaaatcagggaaaaaatgagacgggctgaaaaatcttgatttacgtagcttcccaacaaagaacagaaccatttgcctccttagagctttctgtatcccttcactccaggactttaagtcct

SEQ ID NO: 42883 - DNA, 1185 bp, Bovine  19866880523490
  misc_feature (1)..(1): n is a, c, g, or t
ncaagtagacctcagaccagttggacccaaagggtggactcctacttacctcatcagcaacccatcagaagaaagtccacaagctgatcacgccctctttgagcaattattataaaacttgtcactatcttccccaagttgggacacttggttctggagggcattagcttgctgtgtccccctttgcctgaccaagtaataaagctgtctactctgtctccaagatttgattcggcaacagtgtacagagaagctaagcttgaggcatcaccatctcaaaacaaggatgctatggagtcacgtgtacacagtcagaaggaaagccccagccattctagcaggatccttgggcacaatgacaccagagaccgaggcaggctaggaagctggcccccctgcatgcttactagcgtccacaagacaagattgcaaaggcaacaaaacaggaaatccacatccagtccccgtattttacagacaagaagcctgggctcagcaaggtcgggtgcctccgtgccatcccccggctcagcattctttcccctgcatctcatggccctacattgtcctaagacttatttcccttccaattacagaagtgtgagtactaagtgccaagaaggtgaaatattctacaaagtaggtgaaagagaagtattaataccacaccacagcaataaccccacttcgtggtgacaataagccgtctcccggggaccctgcaggctttgccccagcctgtctcctgcttcagctctcactgactgctgcccaggtctcaggcacaagggcttggcttcatttcttcccaagtgccccgctcatacccatctcgagtttctatcatagggactttaatctttgccccaccacctcccatcctgtatctttcccacctctagctccatgacctttaattctcagctcaatcacctcttccttggagaaggctctcctgatctgcaggctaggctagcttccccttatgcaatttcctgggaccatgtattttcccttgactgtactggttagctttctaattacttctttcttttctgtcttcccttatgatgctgttgttcttttgacctctagtgtcaatcactgtgcctgccaaacagatgtttgataaatggttatgggaaggataagtattaggcagtatattttcttctctgccgcttc

SEQ ID NO: 42884 - DNA, 2885 bp, Bovine  19866880539481
  misc_feature (1)..(1): n is a, c, g, or t
ntgatttttattttttaaaaaaagactaatatgggcccggtgataaagctactcttggtgtagctaagaaaacaaatatacatgatgtaataaagcatggatcagataagcccatgtttgaattctgcattaacacttaattgtacgatattgggaaagtttcttaacctctccaagtctgcatcctcatttgtaggaaggattagttattgctgctgttgcagttattatttttatttccactaaccctcttgattagtctctacttgtattgcctcttaaaatgtgtaattcagaggagaatataatatgctggacctggtatgatccaggtggcatcgcgtgggactcacctttccttgtcctagaccgtatgtatctgtgaacacagcactgtttgtggcagagcaaataacaaccacacacgttgttggctcagttgtgatcaatacctgcaggtctttttctcaccaactgcagataagtcaggtttctccttgcctcccatccatcaatcacaattgaattaaccaaaaagtaggagcttatgtttatcccagtcaaattatatgctatttcaaaactgaggggaatgtttcttgcctatcacacatcccagctgtaccagttatctgtgaattactggtccatgcaaggaggaaagaaatttactcctcttgttcagggaccctggctgaccccctaactcatctgcagaagcattggttgccaacgtgacttggagatgttttctctcctgtatcacctgccagcatttttgtgttactattaggagatatgataaagtctgcaccatactaatgtgcccatagaagagggctggagaagtgtagactcttccttctcattccgatatcatatgcagtaatacttccatgttatttttcttttttaaaaaagtaattgtatttatttatttatgtttggctgtgctgggtcttcattgctgcactggcttttctctagttgcggtgagtgggaatactctccagttgtggcccgcaggcttctcattgcagtggcttctcttgctgctgagcacagactctagggcgcgcgggcttcagtagttgtggcacatgagcttgtagaggcagcccccagcctctagagcacgggctcaatagttgcagtgcatgggcttagttgcgctgtggcacatggggtcttcccagatcaggttttgaacctgtgtctgctgcactggcaggcagattctttaccgctaaaccaccagggaagccctccacattatttttcaatgggcaggcaggtctggaatctggctttctaagatgctacagtagctttaattgggagggcaagcccagcacaggttagtagggacatttgcaagcaagctctgtcaaagaatcctctcaaagaggtttggggactgccaatagattttttaaaatctctcccatcttttctgtccagaatgcgtcttgcttctttacaggccacatcaagtacctgggcttgcctgatggatgtgagagcccttgatccaccccacctgggctcccaagcatcaagcggcagtgactgcaggggaggggagctggcttagggcaggtttccacaccagctctgttggagtggtaattggaggggctgtcattaggtacctcttaacagcttccttaaatgtgctgacttgaatttacttagtttcaggagttctctaagcaatcataactgtattttaaatagtcatctctataaattacaaatgtcatttttctttagccgaagaatttcaatgacccaattattcaaaactaaatttaatcaagtgtatttttttttccttccacaagtgtgtgtttcctgggcctgcaaagaaacacaaagttgccatcggattggctaaatagagctgatagatggggctgtcagaatttattgctaatttggctgttaagctttgcaaggacttgacagcattggtgccttacataatgatatttactgtctggtcttgggtttgaacgtcagtttccccaagtgctggtaaacacatagctttgccctgcatttgcaatatatatcctaaacttacttgatttcctttggtgaagggcagttcgcaagtgtggcagtagtgttagtgcattctctctttgttatcatcgttcccgtgtgctgtgacttatgttggatatgtgggtgaataagtgaccattctgacagtggcactgaaaaaacctaaggatgtagaaaaaatgaaatttacaataccctattgttacttccttggttaaaggtagaaattatggctaaagtaaaagaactgcatgaatttgctggagttgtgtagtatgggaaaaattagaagtgcatttgttgttgtttacagccaagtattgagagtctaagtattaagagtctaagatcacatgttaagagctcaagtttacctgtatctgattcctggcaccatcttaccacttgtgtgaccttgggtaaattacttattctctctgagcctcattttccaagctataatttggggatgatattatatgtaaaatgaggagtgtaaaatgggaatgataatcatctttttctctgagatttgttatgaggagattatgtgaagtggttggtcattgccttctcagaacatacacacttaatgttggctgttgttatcatctgttcaaagtttgaaggtactattgaatgactgcttcacagaattcttggatgaaggtaaccccatgaaacaaagacaaggcagaaggaccaataaatgattctcttcctaccttccataagctatctttgggtttgctatgtgcatagcactgtaatggaatctttgaccttccaaaaactacatattaataatagggaag

SEQ ID NO: 42885 - DNA, 1186 bp, Bovine  19866880541660
  misc_feature (1)..(1): n is a, c, g, or t
ngttctgcattttgacatcagaccacaggaactgaactcacaataaacgtgcccttcattcgtgaatttttctagtcctgccaccactgtcttagttacaatcaggtaacgaccatgatagattaattgtatggcagtgttgtaactcagcattttccctcagctcagactcaaccagaaacaaagactgaaataattagctgacagaagttagaggcagaaaagtttgcagaatttgcttttctattaatataaaaatagacaaaactgggctagaagtggggaggtgagattagaaataaaactcagagtagagaaactggggtacttgaagcaagagtgaggaaaaaaggttatacctagagaaggaaagtggactgagagctgagcgatgacctccacaggttagcctgttggacaccaaatatccaaagtccccatctttctacaaatcccaggatcttcatcccttgttatccccagagggtgggaaagtagtaggaaactgagcccattccccgccacagtgtgagagaacagagcccattctatatggcccatgtaaaggagaatactggtaagcatagcagtatcatttcacgtgtcatttctttcaatggccttcccctttcccctctttgagccctttctcgtgtcttctccaacgattatattttccctccaatgactagagtgatctcacatcctagtgtttccagaaaaatcccagtttattcctattgcatcactgtaaccagtgtaattgtctcttttgttgttcaactatgaataataaattatcaccttatgaaagcctgtttttaagtttaaaattttccctttcttcaaggtagagcattactacctcttatggggagaattccctaatttcataagtcatagtctctccctttgccaggacttcatagctatttgaagggatatcatgatattctaccttaataaaatagtaatttgtgaatatattcttcctctgctagccttgtaaaggccaggacaacattccttttttagtgctattaccagtgatttgtatgtatatagataatatttctcaaagtggtttaaagttatatgcaattttcaaatatcataatctttgaatgtaaaaaaggaaggatagattttcttttaaagtaaaatgaattaactggcattttctctg

SEQ ID NO: 42886 - DNA, 810 bp, Bovine  19866880561047
  misc_feature (1)..(1): n is a, c, g, or t
ncgacttctactctatttacttcaaccaaatgctaactaaatataatcctgaaactttttcttattttgaggacaactctgtaactacagtttgagaaaccaaagaatgctactagtagaaagtctagaatattaactttcacaaattgggaactgtgatttcacagagcccttctgtattctatgtttgacctgatttatgattctgagcattattttttttatgttttattcccttaaactagatgcagacctaatattaggtaacaatttacttctcatggtggcacagatggctccatgacaagacatatttatcaaaataaagcaaatgaaaaaacaagtaatattcagcaacatttaaataaggctctccaaagtgctaagactttaaagcagacagcaaaatgaaaatatagttattacatctgcctctgattcattttcaagtatattttgaagcatgattaatggttttataaatacttttctcacttcatccataccaacaaaggatttcaaattaattcactatttctgacttcatccttaatggatttttaaagtctatggcaacaaatcaatctattgcagattcaaatccatgaaaaaagtgctatacttttttatataacagaaagcaataggaatatgacaatataaatgatactgtgaaatagaagtggtactatttgctctaaacaggaaaagtgacatggtcattttaagaaatttaatcactaatacccaaaagttatattttgaatttttctagacaactaataggctcgagtaagattttaaaggctt

SEQ ID NO: 42887 - DNA, 1754 bp, Bovine  19866880562192
  misc_feature (1)..(1): n is a, c, g, or t
ngtgaaagttggactgtgaagaaggctgagcaccgaagaactgatgcttttgaactgtggtgttggagaagactcttgagagtcccttggactgcaaggagatccaaccagtccattctgagggagatcagccctaggatttctttgctaggaatgatgctaaagctgaaactccagtactttggccacctcatgcgaagagtggactcattggaaaagactctgatgctgggagggattgagggcaagaggagaaggggacgacaggatgagatggctggatggcatcactgacttgatggacgtgagtctgagtgaactccgggagttggtgatggacaggtaggcctggcgtgctgtgattcatggggtcgcaaagagtcggacacaactcagcgactgatctgatctgatctgatattttagattattttctagaaggaattggtgctttaaaacaacataaacggctattggcaatataatatagtagaaagcctttgtttgggccctcagtttagatcttgattctaaaggaatgaccttgctaaccagacagatttggggattttgttactttcctcctgggtttgctgaagagattaaatgtataatgcttagcacatagtaagaattcatgaactataattatgatgagagtgtcagaagtcacctatgtatagaggattatcagattacgtttgagtgctgcaaaccaaaacattgctcatcccagtacattaatattcacggtgccttccaaaggatctgtgcaaactgttcatctgtcttcagaatacatgggaagataaggcacaccagtcgtgctaagagcactggagggcttttctctgcaggtggtcaagctgtgttgcaaaaataaaatccataacaaatcaactctgagtgaaagtacatacccatctcatcttgtcctgtcagatggagtgcaagactgtgtctcagagtagaagcagtgaagctccacaaacaccaggacgtttccaagacaacgatgtgtgaaatgatggtgaggcctgcagtcaccagactgatgaagcaaatgttttaatacaggaacctattacgacttatgagcgagctgcgagttctttccatctaaatgcaggacaaacagtatcacattttggaggacaacagtgtgtgaaatgatagtccctgttgaaatagctggagtgcagaagcaaatgcgttaaggtaaaaagcttactacggactcaggagctgtaagctctgcttccctcgggcaaaagcctgcagatctctggaacccgcaggctaattcctgccatcaggagtttgagagcataacacgtgtgcagggattcagtgaggtgtgagggccccttgtcccacagatgcagactgttcctcctgttagccttgtgctcacccccatgggggctccgtgaataactgcttgagtgataatcctcagccatgcgctcagaaagtgttacgaacggctggtttctcagaaaaatgtctttctgcgtgcatgtgcaaatggtgcttaaaatttcaacatgccaactcctcttgaggcacttcgccacttggaatattaaatacacctcatcagaggagtcaggcattaggctacttttcacacaatgtgaattaacccaccaacctatgggtcattcacacttgagggatacactcatagcaataaacctgctttacagaggttccgttgtgcatgcaaatatactctgggagagtgctttgag

SEQ ID NO: 42888 - DNA, 1224 bp, Bovine  19866880753008
  misc_feature (1)..(1): n is a, c, g, or t
ntgcatttataatggattctttatgattaatctgttcttatttcaaagatgcttattgaagaggaaaatgctaagagaaaaccaaaccgcatttatgattcttcctttgtgcaaaaattatataccacacaaaaaaatgcttttaaaaattatcttgttttcagctgccacaagtttttgcacttaatccctcagcctgaaacattattccacccaaatatttccatgacatcacatcatcatttgatataaatatttactgctctgaaaaaaaatataggtattatttttctagcactgaagattgattaacgcacattcttacagtaaaaagcaagtaacaggagaagacactaggaatacatacaactggctatgaaattactatacaaaatatataaccatcttctctaaatcagtgaacaagataagcaacaaaatagaaaactgagaataagtaaataaattttacagaaaaggaagtacaagtgacctactaatatatgaaaatatgctcaacttcctaagtctttgggaaaagcaaattgaaaatcacaataagataccattcccaacgacgatattggcaaaaattaaaaattttgatggtagtaaatattggtgagggtatgtaacaacagaaactatcaaaatgtaggcaggtaagcaaagcattactgctttggatactcttcgccatgacacattacgatgaaacttattcacattctgtttccaggcaaattcactactaggtatgaaaggcagaaaagctcttccctatgcacacaagaagtcatgtatcaaaatgctattacagctgttcttgggataacaaacacatacacaaaaccaaaactgaaaaaaaatccaaatatcatataacaacagaagagaaaaataaattctatattaatgtagcagaacattggttagcaaagaatatgaatgaattctggctacacaaatcaatgtagatacatcccagaaacacactgttgaatcaagaagaaactgtatacagtttgattccatttttagtattcaaagcaaaaaagcatttttaagtatacatgcagaaatgttaagaaccagaaaggaagcaagagagtgataaacaaattcaggatagtgattaactgtgggctatctgggagggggaaatgtatctaggacgcttctgctcataaactatttcttggttggttggtacagggatgtttg

SEQ ID NO: 42889 - DNA, 3845 bp, Bovine  19866880827035
  misc_feature (1)..(1): n is a, c, g, or t
ntagaacagtgcactttctcatactcttaggagcttacagattttttgagtatcatcatataatgtccagcctccatttttcagaacaatgaagtagctatactctgggaattaaaagatctgatttctagtacaaattctcccaactagttagctgtgtaaccttggataagttacttcaccttttcaggcacatatgtctgcaggaatccttttttgttttgttttctgcaacttgcacttttttgagtgtctactatgtgccaggtcccatactaagactttatgtgtatcgtctcatgtagtcatcatagccgtactgtcagcattctggtttttaaactcattttacaagtgaggaaactgatgcttagagaattcaaataagtcatcctaggttagctgtctagctgggaaatgatctagactaaattaaaacccagatctgctgactctgcagcccttggcctgaaccagttatcagttgcctcccttgagtctatgttgagtctatgaaacataatttactggtctgtttcaggagaaataccttaatatctgttgagatattagggcccattgcaactgagccacatttttaaaaacacagtcctgctcaggatttagaattgctatggaaactataggttgaagattttagggtttttgctgtcttttgtttaaagagtattgaatcacctttaatgcgtggctctgaaaggctcagaaggtaaaggatgtagtcactttaagcttttgagctcagtaattgtataaaaaacccccagggaatcatgttaacaagcaaacctcaactacagcccctagctccactcagagcatcgcaatacatgtattgcacgtggtgctttcaagagcgtagaggatgcagagagagagttgaggataacaagagactcatttaacaagatggtgccaacaagtttccagctgagctgcagtgacattttttctttttctctctttagggcagacaacaaactgatgggtatggggtggcttaattcctgcctgccctcaagtgaattttaaccacatttctctgtttactgactgttcattttgcaataaaataaggtgtccccatcacattccaccacctgaaagggaagaaattagttggtgaaaacagtggatgtatttagcttgcagaaaatgtttgcaggcttagggattgttcaaccctcatttacagacaagggtgagaaattccacaaggtttattttgtggcttcaggggctgtgtttgcaggaataaaacaagaccatacattgccccacaactcagcacttagtgcagaagctgacctggacccctgggacttccaagtgtaggagttagaaaaatgaaaaccaaaacacactctctagcaaggcacccccattaaaccaggctctagttagcttccaggtaaaagataagaaagagaaaaacacggtgatcattgtttgcaaaagacccgggttcatctgtggctctccatctaatttgctgggtaaacttggacaggccatttcgtctccttgagtctgagtttgcttctatatgaaagaagataagaataatactatctgcctcagagcaataatagaagagtaggatggaattaattatttctcttgctatctctctcatgttaacgattcagaatacattggcagggagaaagagaaatatattacttcctggattcaattaaggaagggctttagagagtgggcaggatttagagaggagtcttttgtagtatttatgtttggaggtagggattaatctcctataaggatgtagtgtttgctattagttcagttactaagcgctaaagtctttggtaaaattaatgagagtaataatattgggcttcccaggtggcgctagtggtaaagaacccacctgcttatgcaggagacataagagatgcctgtttgatccttgggttgggaagatcccctggaggagggcatggaaatccacaccagtattcttgcctggagaatcccatggatagaggagtctggtgggctacagtccatagggtcgcaaggagttggacatgactgaatcgacttagcatgcagtaataatattggcagtaataataactaggcacgtaagctctcatgatgaaaaaaaaaaaaaagatctcatttagccactaactaaaaaatcctttcatgtatcagggtctaagctaagctgtttgtgtgcaatatcttattacaacagcaatataaattgttactttagccagcctccaagatttacaatgatttctacctttaggtatttatatcctggtatagtcccttttcacagtgtattagcattggttgtgtgaccaatagaaagtgaaagacatgatggtatgtgacttccaaagcaagctagaccataaaagatattatggctttcatcttgttctttctgggatcacttagtctggggaaagccagccgccatgtcatgaggatgctcaagcagcccactggagaggttctcatggtgaaggaatgaagctgaaagaggaaacagacagaacaggctccatcttgaaagcaggactccatcttgggctggactgtggactttgaatatgcccagtatctatggaaatgacataccaactggaaaaccagacccccaagatggaagagccccagggcttgtacctagactctccatggcctaaaagaataccctaattatctgtgtaagcaaatagatcataaattctattatgcttattaggatatgaccacaggcctattgataattgtccactgttaactacctaggcttaaggcatacaaatcatgggtttaaggtatacgaatcatgggttaactttgattgtatctttcttttcctttttcagactagtttcagagaatctggggaggtgggtttgagcatgtatactttagggtatataaggttttcacaaaaactggtcggggtccttagctaagaggagactctgccttgggcccgctggtgtaataaactgcactccactatctgcattgtccttctgagtgagtttgtttcctggaacacgtggctacaacattcccctaccccagaaccacacccagtttactcaactttttctcatgatccttctagaattacaataactcaatgctgggcactgtggagtccatactcatccgatatccttctatagataacatgactaatacatggagatggaagagggacagctggaagaggcctgagcttggattgcagctcatatctgcctgactccagagaggcaggcacaagccttctgtatcaccctccacagcgtggtgtgcatgtgtgtgcatacacaccaataacaagtgtatgaaaagtagaagtgttagttgctcagttatgtctgactctttgcaacaccatggactgtagcccaccagtctcctctgtccaaggaattctccaggcaaacatactggagggtgcagccattcccttctccaggggatctttcccacctagggatcaaaccctggtctcctcattgcaggctgattctttaccgtctaagagttatttacactcccactgccttaggaggagaagggattctcacattgaaggacatctttgccgaatgaggagatggatttgaggacagaaaactagagaaaccaggtcacagctgaactgacctacacaccaaagtgagatggggagagtaaagatggggtgaacccggccagaagagctggagaggcagcaggacaggagatccacgtgagtggatcaatggtgcttgactggttccacaagaggcactttgggagaagggcaagaa

SEQ ID NO: 42890 - DNA, 907 bp, Bovine  19866880837440
  misc_feature (1)..(1): n is a, c, g, or t
ncttgtccttttggtctcgcttgaccgccatttctctaggaaagcctttcattaccacttccctgcattctaggttactttgttttaatcattaatacaatttcattaaaaaaaaatctcagaacagttacatcagtttgtaactacacatgtattagtatgatcagttataatctgctattacactacaccatatgtttcctaagaatagagacttaacgtgtgtcatgtagccccagaacctggcccagagcctgacaccataattgacacttagtactggctcaatgaatgaatgaatgaatgaaaagcagttgatcaaaaccacaagtaccataaaacagagtgagagggccgatactttggatactagagaaagttttcaaagttatcttttcagattaatataacaggtctaaaagtaacaggacaaaatttaagatggagaatatgacaaagaagtgaggaggtactgtggagcagatggaaaaggagtgagttttaattaactgtaggtttaatgtggtctcagaatagtgtggcagaaaagctgattcagcctccaactgcagtaattggaatgtatattcttcacacgagagataattatttccctctcctcgacatccccccaattactcacggaagattgtgcccaaatctgaagaaaaaaatatatttataaaaaagaagcatgtttagaggatggccagaatgatttttggagactcaaaatgatgttgtgagaggaagcttcaagggttagcagtgcttatctaggaggaaaaaagtgtgtcagaggtcacattagttgtctgaaaatctatgattgttgtgaatatttcgagaacataaattgcaaaagtggataaaaaaataaaacaacaattctatttttcccctttaa

SEQ ID NO: 42891 - DNA, 1220 bp, Bovine  19866880852287
  misc_feature (1)..(1): n is a, c, g, or t
naaaaaaaaaaaacccatgacattttcccaaagaagtttgatttacttggcatccagaaggcctgatcaggtctcagatcggtcccttcaggtactctcaatactttccattcttgcgacatgtcacttcccagctctctttaatgaagacattcacttatgaccctaacgtttcttactaaacgttagaaaactcaggcatcatttctctacagggcagtgcgaacacctgagtaatcttcctctggtctgaagggctgtgcagtgacgggggggtggtgctctccagagtttgagtcaaaattctggctctaagcgagggacttcttggtaccacttttcctttcctatatgaacggccgccactaaacatcaaacgagcacagaaaatgaaaatgacctagggaagactggaattaaaatctgataggaaagacctcagaattctcactactgtttctaagaaaaaagtatgtatatcttaagtttttaaatcctttagttgatagaaatcaaagcgctgctttgttccatgctagagtacatgcactgttctcgtgtcaaggcacacctcaggaacccaacagtcccatttgctgtacgcagaccacggcttactgggagaatagggatttcagaatcaatgcaactcaaaagcaaatatccttttggggttcccaaatcaatgttctagaatctgaattatattggtaaccagggagaagcaagctttctacttcattgctcaaagtcctaacacttcccttgtggattcaattctcaatttcaattaattaaagaaggaagaaaaacatattgaagtcttagactcttctagtgtcccccttttttattgtctgaatagcaaagtgaaagtgaaagtcaccctgtccgactctttgccactccttggattgtatagtccatggaattctccagagcagaatactggagtgggtagcctttcccttctccaggggatctttccaacccaaactactttattattcaggacaatagattttgcatatattatcagataaacctaaatcatttttgtgactaaatttagattattgattaagtgatacttgggggaaaaaagtttgattttggtaccaatactggaaaagatggagggcagaaggagaagatggcttgagagaatgagttggctggatggcatcactgatgcaatggacatgaacttgggcaaactt

SEQ ID NO: 42892 - DNA, 775 bp, Bovine  19866880852756
  misc_feature (1)..(1): n is a, c, g, or t
naatatccataggataggatccattggcacccatgattatgggggaatttgcatcatatggatggaaaggaatttgtaaagtcatgccatctgtttttttgacttaagcctcccagatatctggcatagtgagaagtctggaatgagggcagaagacaaaggtgtactgcttaacttccctgggcctcagctttctcatccataaaataggaatgtaaaaatgccttccctctcgttgtaaatatcaaatgtgtgaaaatgctttgaaacttggaaagtgttgaataacatgaagtaattatttatattagtagtctgttctcttcaccctctgttctcttcacctttgcaaaatgacaaaaaagatcttgctcaggagagtaattgtggttaaatactctaggctaagcctgtggagggagtgtgtgttattgacatcaatcctgctacagttattttcaggagaaaaggtataagtcctatagcagccagcagagtgtttttgattaccccatggatttgggtagcttggagatctgctgtagagctggaatctgacttcctctgtgagcatgaatttggctgaatttagtagtgagaaaagcttaagaaaacccacacatgctgaaacccaaaaggctaatgagaataaacagcttgtgtaattagaccttgtgcatttccctaaaaagaaatcatgaaatatgaacaaaatgttgtctctgaagacttcatgggtacttggtctagttttcaatttggaaactatgctcat

SEQ ID NO: 42893 - DNA, 1023 bp, Bovine  19866880889655
  misc_feature (1)..(1): n is a, c, g, or t
ngtaggtaacttgctcccatatttgaatagtacctggggaacttctgctttcactcaatatggaatagcaggtactggatatactctcctgcctgaaacaatcaaaaagtagacaaaacatagaaaagtggtttttaagatcctggacatcaggcaatgaaggacaaagatctctgaaagacaggaaacaaatgaggtgggtcctaagagtatgccagcccatctgcccaggacagttttcaggttacgacacaggaggggacacaggcagcgtctggtggacatcctgggtgaattcaggatagaccactggacagaaaccgaagagagctgcacagagacaacgctgggaaactcgtgagtattcagcggaatagtcatccgggcatgtgtgagagaactgcctatccgagacttttggaaagaaccacccaatggagagagagggacaaatgttcagtgctcataaggagctggggatagtgaaagtttccattcatcacaatggttactcccatattagtgaaatgtttgtgccacagaatggggcaatttaaacatgggagtaatttattaagggcttcccaggtggctcagtggtaaagtacccgcttgcctatgcaggcgatgtgggttcaatccctgggtgggaaagatcccccggagaaggaaatgacaacccactccagtattcttgcctggaaaaatccatgatcaggggagcctgatgggctagagtccatagggtcgcaaaagagttggacacaattgagcgactaaacaagaatactttgtaatattgcatataaaggccagatcctaaagacaaatgtcacatacccttttcacaaatggcatcagaaaatgcaaacaggcctgtatatgcagtcaggagagaagggattacttttgcaggtcatgtaatggataatcttctcactccagtcttagaactttacagggatggtaagaggcttggccaataaatgttagtagaatctagcatttgactctaaattcaat

SEQ ID NO: 42894 - DNA, 1787 bp, Bovine  19866880921675
  misc_feature (1)..(1): n is a, c, g, or t
nttaacattttgagatgcttggttgaaaggtacatcacagaaattcaaagtctaatttggcacactcattaaatatgtattcattaaacatctactacatgcctgccaaagtgctgcccatcaggcacacagtgggaaacatgaatgcaagagctctgcccacaaccccctcactgtctgctctgcatcatccagcttgttccaacagaccaaattctctaaggcaggtccacgacttgcggtccatggcattgattaacctgaaaataaagagagatctttggttatctgtgtatttacttttctaaggaaagggctcatagcttttattcatttccctgattcttcactttaaaagttaacaaccaatagtaaaagaaccatgatggaaatcaaggaatgaacaagcagttaatataagtggaggaccacttctgctcctctccctgtctcttcatcccatcgcaatctctggtcacatcttattgagaaatctcaagagccactagagtgtaactgtatgatacttgccttgaaatcgctaaagtactacacataaatactagttaatgctacggtcattattgctaaacttgtaggtttcttcttccaacattttccaaaaaagtcaaatatttcatgaccacctactatctttcaaagacattaccttgcaacgctggtcatttatgaagtaagagaagaaaaaactggcattcaagctagtgcactggccagttaagtttgatctgcttttcattttctcttcttactttctatcctgccttcctgactatgtttccttttgaaggatacaaagacaatgcaaaacttaggttttacaggatttttaaatggttattaattctgaatatttttaaatgatattagtgtatcctgatgttaaatgggaccaagtggctttatgaatacaataaataaagaaaaatgcattcccaaagagctgggaataaatacctatgttccaaaatccttctaggaactaagggaaattaatgtttttcatcataagaaccctgggcagggttcagactgcacaatggttggctagatttatcctcctcctccatcatttgtcatacaccatagtaaaaatcctcagaagaatttaagcaagcattgtcagataattgcagcctttaatggcagacacctaaacaacagccgcatacacacacaggcacacacatacacactgctttctacagcttgcatttccagactgcattgcctataaagatggcttattttttagagaaatcatacataatttgactagttttgcctttttaagacagtgtagctgtattcattgcaaaagcatttggaaatggttctatttgtttcttctagctcagctcagacagtatcagttcatcttgtgattatgatagaaataaacactccacaggaatcctctattttcaaagtcaggtaggtgggtaatgtctccaggtttttcaggattcaaagcaaagtatagggtctcaaagatgtggacatgattgagcgactaagcacacaggacatatctagagaaagtgctcctgccttgtgctgctgttaaatggaaaggaaacacggttatttggctttgcagaacacaagcagctcccttcctctgacagctcttgtaacagtggctgggatatagggtaagatcctcaggacgtgaaaatcaaattctatataatccgcttacagggggaagcaaattaaaagctatttttgttgagtttttgagcccaatacatgggtctcctctg

SEQ ID NO: 42895 - DNA, 2483 bp, Bovine  19866880946562
  misc_feature (1)..(1): n is a, c, g, or t
ngagagatctttaaaacagtaaaaacaggaggaagaaattataggatacataacatcaccatgtacagaaattgaaaattcatgcacatagtacaacaaaacacattttgtaataaggtatcaaatagaatgcacgctaaacattgaaatgttgagggagggaagcatggcgcattgaaggaattaatgattcaaggaaacagcccaatcagaaatcatttactatcagctgaagactacaactaacttaaccccttttcagggtcttacggaaacatgatctctttcacactctaagtaattctcttcacagactttaaagctactttccttgttaaatatttgacaagactcattttacacttggattgagttgtccattgttcaaaacagtgactcacaggttttcgtataaaatacaataaccagaggcatttttataatgcagatatcaacagagttatttaatgtttactttgcacagaaaggaaatatctcaaagtttaggtatttccccaaaagtgctattagcaaaattgcatgcattatctgtctcccctatgctatagacatgtatacatacatatacagtaatatacacgacccactttactttgggctgggaaaaacatcctgtaaaccaggatttctcaatcttttttcattctttcccattcccccatagagtctttttagacatattttcctagtcaacacactatcgtgaaattttaatgtaacatatgtactatatactcacatactgtggcctttgggagagtcactaactgttgtaacatcttagaatattttcagcctcccaagaaccagttttcaccttcttggggacaatatcactcccactgagaatgcataccatacactaaagccagtttttaaaccaggattcaaatccagtctcataggaggttaagattccaagaactatttccccacctttccatctgaaatccttccttcatcaattcattcttttgtgttcatcattttctattctcatcctgtctgttttctaagtagcaaccattttgaagacacaacgtattaggaatacaaaacatcattttaaaaattaaaacacaggacacctgctaagagcagtatgctttgctgaacattggaaagaattgagagttgagtcagctgcaggctcatctctcagaggagttcagaactggtggactatgagaaatgggtacaaaagagagaaggaaggtggatggggagataattagtgtgggttgaaacctcaaagtgaaaaactggaacactctgttatcaccatatcattaaatttattcagtctttcttctggcaagaggggagaaaaaaaggacaaagcagataagtttggataggagagatgttcattcattcattcattcattcatccaacaaacatttattgagaacatgccatttgccaggtcctgtgttaggggctgatacagagactcattgtacgcattgagtctttccctgtgtgcctgtccttctcctgggggagagttaacattccagcgataatagcaaaaactcctctgccggtgtcagtcactgccacactggccccagcatctccactctggaaacaagtgttgtttcctgtctcagcctggggctgtcagcagcacagtaatgagtccagcacatagtatagcaagcagcccaggctcccctgcgactgcctgacagtgcttagaatcatttgtcacacagccgaacagtgagctccaagccttagcaaggtggcaattaagaaaattcaagcatatcttcatttacccagtggagttctttattcttgacagtttgtgaaattgcagtgttaagtaaagaatgttcttagcttatttgaaaactcgttaactagaaaataatgcagtaaatttgtacacgtaaatgatgtttatagttctgtgccacatctgaaatttctttcttttccttttctttctgtcattctctgttttattttgtttgctctctgaatttcaggagttttgttgtgttttgcttttatctttgattttgaaaccatgttatgtttggtgctgtgtaagataattcacctcctgcatagtctgaaagagatggttatgaaaagtttcaactttgggtctaggctttgttgaggaactttgccttttagtattcccataattgcaactgatccattgtgggggtaatctgcaaagcctttccaattagttttgggatagaacctaacataaaatatttaaaccaaggcctctatgcccaaatgttgtatgttattctttgtgtaactgaattatattttgttcattttgtaccaaaaacctgttctctgaataaggactagggcttaaatcagctcttttttttttaaatttctgggtgattgcatcagtcagtataggctgatgacgctgcatttatgaaagacctcacatgacagcttacaaaagcaaggtttattt

SEQ ID NO: 42896 - DNA, 1744 bp, Bovine  19866881089845
  misc_feature (1)..(1): n is a, c, g, or t
nttgtgttaattcacttcatgcacataatctcattacctcatttcactcctacagcattcctacagaataggcattattatccccaggcatcagtcatatataaccagaaaaacagggtagattgattgactggttgcaaagaattgacttacccatgtgagcacttggctagacaagtagggcaggctggcaggaagagcagtttggaaccttgggcataaggtaaaagcacaggtaaaatttcttcttcaagggagcctcagttctgcttttaaggccttcagttgattgaatcaggcctatccagatgacctaggataatcttctttacataagtcaacagactatggactttagtcacacaacagacctttatagcaacatctagattatattgaataaatggagaccaagcctagccaagttaacagataaaactaatcatcatgaccctttaaaagataaggaaatagaggctcagagatgtagtaagttgcagagctggatatttaggatttttattttatgctaaaatacactttaggtattttttcaacttcctaaattacatatatttgcagcagggtccaaagaaaatatctgaattgatttaccgagagtgatctaaattatgtaatattcaaaacataatagtgaagaaagtcattcactgtatagcagccaaaagataacaagaatgacttattttttcctatttaaaagtcttatcatgaataatttttcagtttggataaaatcttgattttaaggaagtcaatgatagtagagttttcttctctaaatcttcctttaggattgcaagagacgcaaaaccttaacatttatttctagccccgaggctgaacaagtcattgttttaattatagaaagctgaactttcatctttctttaattgagcatggatagtttgtacctgtgatcagtactaaaatgtcatcaaatcacttatgacgtttcacactcttgagctgcagtaaaaataccagttattttgtacatctgtgcagtcatcatgtggggcaatggtttcaatttgttggtaattatcgtctgctcttcatgactagtgtggtttggaaagcgtcacaagaagtgctgtttcactttggtgatggccagtacatttagcgaagaggaggccaatgaggagacagatgctggcttcctgggtacactgtttgaatgacaaacagagacgaacaggtcattacttttcacagcaaggagaggaggagggagctcagaattctgaaggaaatgttggcctttggatgcttcagttgtgcattctaacgtaagaaggcaaggacatttttatttgcttttcttccctccagtcacactctaggaagacagagctattattataggctatgtctaaactcatggtctttagcaaaaaagcaccctagaggccgaaatggatactgtgcctgttttctgtcacaaagtttgatggtagaaaagagggttggagcactgatttatagcagccttggaaatagttaccagtccacatgcctagtaacaattgtgatctagttcgaatgaagatggactttatctaaacgccagtctatataaccttgaggaaaaaaatgatagggtgatcaattacttttatcccttttagacagaattacattttttaaaaaaaggatagtttgcaaatttgaagttgaaacaaatgcatattttaatagaatatgtttcccctgaggt

SEQ ID NO: 42897 - DNA, 1360 bp, Bovine  19866881114674
  misc_feature (1)..(1): n is a, c, g, or t
ntcctattctttaaggaaaatacttattttgttagtacatttgaagtgacttttgtacatcaagagccccttcagttctgcttcaaatagaggatatctttttttccccccactttgctaaaagcaggtgccgatcacaaatctttttaggtctttagcttctacttcctgaaccacgcataagctgatttttgaattctcataatattctacataaaataggtctcccttgaacataaaacacaaagggagcgtatttggattcccattcaattaatctgtcaagactaggtaatgaagtcttcttgcaagaaaacaaggcttgcctgtgcgtcagtaactgttgtttcattgtttcctcatctatcaaattttgtcttggttgtcacatagcagcgtaacttagcattaattatgatatatgaagatttcataattaatactaacatatatgaatatggtatgctattaagtacaacatacagtgtttctctttcatacagctgtggaagtggcagcatttacttaagttattttctcactggaagtctaaagatacatatgtttgaatcatctttgtttgtattgacacatttagggcctgaatttcatggtggatggatgggtggatgggtggatgaatgaaggaatggacaagagaagagggaatgagcatattttatgtctcaaacactgttagaagcattttacagtttattattgaattactatacttactgataaccagaaccttagattttagcctagaggtaagactatttcatcctttcgcatccactcaggatgtgaaataaggctctctcctagtgctttggcactatagtttttaagcatgttaatttcatttcaaaggaatgatccttaagaagtggcattttgaaagttcatataagttatatactctgtaatgctttaggaaatagacagctaaattatatcagccatgatgacttcccctgttaaaattaggaaagaagatgccagtgcttgtgtgtgtgtgtattcatgtgaagtgaaccattctttgtcgtttccagaaaattagaatgcctatttcctcatacagttggtgaaaataatcatacttcggggattttttgaaggcaactgatagtaagcaaatcatgttgtcaaacttaagatgtttttgtcaaagttggcaatagggaaaataaagtacctattactattatgactgctgttgatacgactgctattgttataaattataataatgatagtagctatcatttatttaacacaatatgtgctaaaaatagggctgagtatttttcatccattatttcatgttctacaaaaataaaagctaaggctaaga

SEQ ID NO: 42898 - DNA, 1497 bp, Bovine  19866881148368
  misc_feature (1)..(1): n is a, c, g, or t
nccctaattttccctttcttagacttgtggaacaaagatctcacacagccaggataacagccaaagaaattctcacaaaaggtgagactttggtcattttaaagttaccacatttgtttcgaaaatatctagatgataactttacaataaaatggcttattgcctagtttagaaatgccaactacattttatgggtacccttcaagtccatagtaaagacagaatcccaagtttaagtcacataagagtttattataatgatttgtaactttctgacttctagatagctcagagacagaaaaatgtaatcttggctataaccttttcttacttaaatttgactcagttcagttttacccttctgggaaagtacagcgttatgtgtttaaaaaaagtcactgaaccagcaaaaataacttaagaaaacaggtaaaatagcaaactaacatctgttacccatcccctaaacccctcccaccccactgaacttcaaaacaatattgtctctctctctctctcttttttttaacttgtattttaatgtccttttcagtgaatatatagaatacaggggcaaatgcttttcagtgaataggttcttcttcccttcaacagtgactgaggctgagaaaagatgaggccactggttggcttgtaagtaggtatgatccctgggactcatgtgcagaccacactgcctgccttttgttcagcagttgatcagtgccaggaagtcagcagtgcagtggtctgctagctactcttagacaaggcagacatttctctgtttgggggtccattgcatgagtgcctccctattcactgttctgtcctgtggccctgaaggccctcaggtgaccaggagtgtgatggtttcatctcctgcacttctacaagtttggtgcctgttactgaattgattttgacaggactatgaagatcttctagtgagatcttcctgtcagccatctacaattctcttcaactatattgtatatccctgaggatggagagcctatgcgagcaggaagtgggattactaaaaggaaaagagaagaaactctaaataaaagttgaggggtcaattcagaaattacttcaaaccaccagaagtggaattaagttaccttctgcttcatttaacacttttcctcactagctcagaacatccagcttaaatattgcaaaaaacacacagccaggtaaagatcaagcagtacttggagctttcagtacaatcacactcagagattttggctcttgaataaaagtgtcagcaagccttggaattcccaaagagaaaaactcactgagcctttattccattttcttaaggtctattgttaactaaagactccttgtcttttcaaattccttcatgtgaatggatgaggccagacatctgccaggatttgctcacatttgcatgcaaatcagagacttagggacacacatggccccagagccaacaacaccactttttaactgtagacttac

SEQ ID NO: 42899 - DNA, 2257 bp, Bovine  19866881149241
  misc_feature (1)..(1): n is a, c, g, or t
nacacaattgaacccataacaaggaccaaacataaagttgacatgatcacacagaaaggttgtccatgaaaatagactattacttttgttatattatgagcagaattactcaatataaactgtatatcttctctattttatgtatattagtcctttctcttcggctaaacttaacatcattgagaagtgaagccatattttatttatttacttatagattattagcctgctagggctgccatatcataatacagactgggtgccttaaacaacatatatatattttctcatatttctggaggttgaaagtccaagatcaaggtacaggtagggttggtttctggtacttttctttttgggttgcagatggctgccatcttgatgtcttcatatggtcattcatctgggcatgtgcattcctggtgtctctttctcttcttataaagacaccagttctgttggattaggtccccacccttatgatctcatttaatataattatctccataaaaaccttatttccaaatataggcacattggggattagggcctcaccatataaattgggggggacataattcagtctataacaatgatattgtctcctaagcagaggtctagccatgtgatgataattaatcaatatgttacacttagcaaaaccttcatggcttcactggaagaaaaagaaaaaagaacccaaatgtctgcatatgggaatggagatgggagagtattcatcagacattctatagttgaattacctgatttcatataggttactactttgaaagacaaatataaatttatagataaagcaatccccaaaatgacccaaatatttgtttctggtcaggtattttgttgaatccaggggaggattccaaaaaaaaaattatattttcaaacctattccaaagttcttattttggggaccaatctaaggcttgaaggcaaagcatactatcttttttgagtcttccagaatgttgcagtaagagtgtcatgggtctcccatcaagtcaagtgtatgaggctcagaaactcctttttgcacaacaccataaaaactgacctctgggacactgtctctttgtgctccaaaagactcaggaccgtccacaacacaaagtcaaaaaaagaatcttgagatctaccaacatcttacatcctgcacacctggtactctgataaagctgcatgagctcctctctcaggagggtctgtgcaacctttgaggagctgaaactgtttcacgttataactactgtacactctcttacctacctgccggacagttcctaggagttctactgtcactaaagttccatgagtagggtggtgagggtgggcagcttaacccccatagcctttatctgtatactgttttgggatgcaggaggaatgggatccaaggcaggattttcagaagcctgacatcttctcacagaaactcctccagcaatgatcatgcctatattctgtgactatcccatcagcatttacatatttagttttaagtaggttattttgaccttgggtaagtggccccataactaaatcattcatccatccatccatccatccatttcttagcaaatcatttattaaagttaatgactgtgagctatacccagtaccaagcaaagggatgcagtggtgagccaaagagactgagtctttgccttcaaagcagtatattaaactgtagatggcctgcctctatctggaactgaaggcaaggaaaaagtctctggagattctgtgtgtgtgtgtttccccacagggctgtgttcctagcaggtgctcaataaataactggtgaatcaagaaccagatgtccagggtcagctttgttgcccgggtacctactgatttatggctccatatggtcagcttctctaaccttctcattgccttctatgccaaggctgcatcctttttccctccgtatctataactccatttctaagagcacagaacgtactttgctttttgttatctgtcttcagatcctgaccagcccaagtagaacagaaaaattggaaggagttggaggagttttcttccttcgcttgcataggcgaccccacagactgtctgggctgtttctccagttgaaatacaaagttaaagccattctcaatcacattaaccattgtcaggaaggagcagattagttacaaagcatgatgatgcagagaaaattctaattaagagagatgagggaatctaacacatatcatcagtcattatg

SEQ ID NO: 42900 - DNA, 862 bp, Bovine  19866881161647
  misc_feature (1)..(1): n is a, c, g, or t
nattatgtgagaaaattccaccgcaagagggttatggacaagattttctttgcttcttggaagatggaagactccctgacaaggattttattttcattgtagtgggctgtcagcatagccatttatcatagcctgaattaataaggcacgaagagaagaaagacggcttgctgccaaacagcttggggacgctcggggctgcacagatcaatcagctggacacccgggctattgtctgctcatcaattcattttcattgagtttcagaacagataacaccaggcctttttctgacgcatgagcctaaactggccacctatgcttgcttcccattccacccttttaatcgcacaggacacacatcaaggtggcattctgtgtttatttatttatttatttttgcaggtttttttttttttaattttactttatttttaaactttacataattgtattagttttgccaaatatcataatgaatctgccacaggtatacatgtgttccccatcctgaaccctcctccctcctccctccccataccatccctctgggttgtcccagtgcactagccccaagcatccagcattttgtgtttagattatgctctttctctcgaaatcagctcatggcagaccactgctcctttccattgcccaagtgcacaagaaccttaagaatttttcaaaactaataggcaaaagagattagcatcaagcgcatctgagatgcaaagtcagacctctgtgtgctgtgacagcataataaattaaacaataaaatgctttctaaggtgacgggagacctgtaggccacaaaggaaaatgacaacattgatttccagggggctgctctaatggacat

SEQ ID NO: 42901 - DNA, 3311 bp, Bovine  19866881216798
  misc_feature (1)..(1): n is a, c, g, or t
nggtttctgacttgaaccttacagtggttaagatatgccaagcagaggtgagacaggaaaggcattttaagtataagaaacacactgtgaaatgtggaaatgagtacagacaggattctgtcaaggaaggttttgccaacaatgatcagtgtggttgggtaagagtatgaggcatatctagaagaggaagaaaagccaagtggggcatgaatcagagcatggaagaccttgagggctgaggtaaagagctggagacctagtggatgttgtgaacagagaaatcatttcttgctggtttgtgcttctaagccttaatccactcacatgcagcctcttcagtcctgaattcagagctgccttctcagctttcatttcctgctcttcactttaccctcatgcttctcttccagctctcccacatcatattcatctctttttgtacctttgcttatgctgaacccctcacctggaggattccctctccctctttctttcttcttaatcacatctgccctagctgctcatgcattttccatacctgtccttagcgatcctttcttccttaactccttgaatacctttcatctccatcacccagtctactcatttcctgataagaataaggtctttgaatgtagagaccatgcttttattttgctgtttcatacattcccggatacacagagagtgctcaggaaatacttggctaatcggacaggttagccacatcttcccaagagtctccttgtgtgtatcaggtcagtggtaccgtctctaatttgccttctcaaggttggtagagtaaaatacgatgggcttctcctggccctttttcaaggggttctggtgatgttaacatgtggcttttttatgaaatggggactgttagcctccaggcagcaatttgggaaaagaaactggtttattctgtgatgttttagatataactgacttgtgtgcattaaatttcagtttgattcacttcttgctttgagctagaagtgaagaaactcatttttagttttcagctttgccattaattagctgtgcgactttgggcaagtctttaccccctctctattaataatagctgtcttttattggatgtgaaataagtgcagcattactaggtgctgtaaatccactgttttatttaatcctcctaccaattttgtgaggtagacctcatgactgctcctagttccaaatgagactcagatcagaaagtaagtttcccagagtcacagagctaataagttacaaaatcagaactcaaagccaggactggctgcttgcaaagcttatgaacttaatccttatgcactatttcagttcctttaagtctaagcatcttcagccttaaacaaagagagagactgcaatctctaggaagctgtccaaatttgtgactcttctctaagagcacatgttatttcaggcatgaaattgaaatctgtaatttaccacaaatctcccagctaccacaattccaatattcctgtggaaactctcttccccgctgttagttggcagagtttggggctggggatgacctccctcatggatgtgacctaggaccaagctcatcacacatttctttcttgggccttgggcttggtcatgtgacttaattgaggctagtaataaccaaactcagaatttttattctcactttcagggggaaaagtattagtactcacttgcattgaactagatcctgggagaatgcaggcacttccccttgtgttgttgacagtcagtcatgtttctatttgtagaacacagaaattagccagcacagggcagagcagagcccagagaaggaaggactgggtcttggtgacatgtgtcagctccaaaatctatccttacctgaagtaaagccaagggttggattctccttacaagtgagccagtttgggggttcagtttgctgttacaggtatcacaagataagaggagttcatgggtcttttctttttttggcacaaacctaccaaaatcttactgaacaagcaaattgtcttgttcagattcaggcccagccagagtgcatcaggccttgaatcatttctaattatggtagaaaatatattctcactatggatgaaaaggtgcctgatttgtcatgtgataaaaaaatctgttaagtggtacaatgaaactttattcccctcttctgccagaaggcttcctgatcatttgcctgtctccagaagatgttaattgctaattgtcaacgtgcatttcaagaaagtgagctgctgcctggcatgcctgttagctctaactggtaacttgtttctgtcccctccatttctttgtaattacatttgaactttgaatccaaaaatcatttaggttaaggctgtatgacttgattgaatgaattctatctgtacttttacataagtcattatatgtcattaatcatagaatttgagggttggaagagacctttagagaacagcttttccaacccctttaatttagtagaagaagaaaatagcaggcagacatcagctcagagtcacacagtagttataggttgttaagggctataatcagggtctcctgaccacaagccagggtgattttcactatatcacacctcctctcctgaccctgtcttggtttattacatgaataaaaactacaaaagcctcagacacatgacaaataaatgcaagtcttccagatgagaattccctgcattcacggtcacccccttctcatttttaccatctcagttctttctgtacaggagactaaaaagaacatatatgctgcctggatagctaatatggtcaggaaaccacctggaagttagtgtaaagtacaaccttgggcattttcccccagaaattaaggaatttgttttggtacctagaaagtaaaagttttgttttgttttgttttttcagaaaaccacttacaatgatacaaatgattttatgatttttgagctttcattacagtagatttgatctataattctgcttagtgatattgttagactgtcgatctgtgtcattaatacccttgataagaagaagatcccacttacttgttatattctgtaggtttacctgttactccacttcaaattcactttgtgttctaagattttattaatagctatataaggtttactagagaaataaatggcaacccactccagtattcttgcctggagaattcccatggacagaggagcctggcaggctacagtccatgggattgcaagagtcagacacgacttagcgactaaaccaccatcaccacataaggtttactaccaacaagagaga

SEQ ID NO: 42902 - DNA, 1325 bp, Bovine  19866881287910
  misc_feature (1)..(1): n is a, c, g, or t
naagcatcattgaagagatattttaggtaagtgagatctaatcttcagagtgacgactggggtgggagagtgataccagagcacagcagaaactagctttactaatacagacattttctcttaccacctaacttctcacagagcttaccacctaacttctcacaaaaattccatattctacatacaaaggacacaatgaacattgctgtaaatcagaataagaggaagaggctaaacggcattcaactgtggggtgttttttttttgggggggggtgttttgagctttgtctataggaagcaaatttggggccctaaaacactttcttctactcaacttacaacaaacctcagaatgaaacacatgtattatacttgctatattgattaaatggttggaagcaagaattaagcaattttcaaacttctaccataagcaggactagcacagtagcacaatagagagaaaataatgctgaactagaaattagaagaccctcaactttgtcaatatgctgtgcaaacataggaaaatcactatctgcacctcaatttcctctgtacaatgagagaaatcgactacaaaatatctgagatcttttcaagtgtactatatatatgagagaagaggagaatagtaatcagacagagaagtacagccagggtcgttggagatattcaccagatatggggactccatgaatgactaacccacatgggcgatgatttctctggggcacaaattgctttttccatcttaacttcaaccctggtacttttcagattcacctccttttctaaaacttctccttccctccctttacctaccagaataagaaaatttaaacatatctataaccagagattaaaacaacatcaatgtcttggggatatttttcctctctgaaaaacaaaagttctactttacacataacctccctgcacttaaggagacagaacaaagagatttttctttaaaatagcattaagacagtccatttctccttttaaattatacaaacatgcatatgcccatccaatttgatattaggaagaggaactgtcttataatcttggaaagtggaagaagatatgagtttagtttgtacaagtaatatttgaaacacagttttgttctttcctataaatacagactataaatcttattaatcaaacttcatttcctccctttgcgaactaagattttaattgttctaatcccttccctgctgatttcttgctactatttcacacagcagcaggtcatctctttcttttctcagaaatacattagcacagtgccatagtcctaataatatatttttt

SEQ ID NO: 42903 - DNA, 1513 bp, Bovine  19866881289916
  misc_feature (1)..(1): n is a, c, g, or t
nctatcatatttacatgcctcttatatccccagtatcaatcaataaaactgctgggaaagattgaaggcaggaggagaaggggactacagaggacgagatggttggatggcatcaccaactggatggacatgagtttgagcaagttaagggagatggtcaaggacagggaggccgggtgtgctggagttcatcgggttgcagagagtcagacacgactgagcaactgaacaacaacatcaatcaataaaatggtgtctaatacagggaaaatgctccagaagccttttctgggtgggtgagtgaatgaagaaggaccacagctgccatctgccaccacctatatgataacctctattaatcagaatgtttaaccaaaagaacataacccctttctgactgtaccagaaaacagaatttctaatataccaaatagtgttacagctgcattaatggaatcagtaagtgcccaactgatcaggcctatatataacagaaaacaagaaaaatcacatgtaatttatatccactggaaatggaccatccaggatacagatggctgacaggaagaaacctacttaccctttcctttgagttctgcagaagaattattttattttcccccaactatgctaatgcagtgtgcttcactgtttccttcttgtgtggaatccatgaatttgcaagggagattggatctccttccctttgttgttcctatctggtaaaagatgaagctttttccattcatggaaactcacagaatcacatgtctcataaagatcataactgtctcactgagtgacatggtcagaaaaaaagctcacttcaaaatgtttcctacttgatgccagtgccccttaattctaacaaattgtgttttttcttaaattaatgtatataggtattatagtcccagccaatactattattatcatgtgtttatgtgaaagaaaatgtgcaaactactaatatgtttcccagttcctgacaagttctacatttaacatattaagggtggatttaagttttcttccaacaaaagcattttagttgtaccaaccccatatctggagacaagcactagtcagataccagcagttatttttgcttcctactcattttttgcccttcataagaactcaacccttgggagctgacaaataaagataaattaccagtctggagcattctaactaactaagccactatagtcacttaaatgaatgttgaaaccctttttttgctatgttagcagaaatttctcattgtcttgtactctgtgactaagaattacataacaccaagaaaaggttgtaaaagccaggttcattatcacactgactctaccttcagacttaatgatactccttcactggaaaagggactgctctatgcctagggaagtgtgtgataagagttttgtatcttacaagcataaaacctctttttcatatataaaaagcatatatatgactttcaattgattctagacaatgttatagagtatgatca

SEQ ID NO: 42904 - DNA, 864 bp, Bovine  19866881312668
  misc_feature (1)..(1): n is a, c, g, or t
naaatatggatatttattcttttggactccctgaagttcctcttgtctcttcttgcccacctacactctccgcgtaagacatcaccatcattctaaaggctttatatatcattgttatgctgacaacctgttttaaaatgtacccagtatttttttttattacatatatggtcaggtcagtagatgagaagacaatgggcgttagaacattgtttgtcactcattgttcccaagagaaagggcgtgtcgttgttacctggaaaggttacctggagagcaccgggtcagtcaggaggcagaagaagcaaggaaaacgtgtaggcagagggcttttttgtggttttcctaggaaggactggaggaggcaggaaggcaacttagcaggcttatgattggatagtttgaataatttaggtgggctctgagctttagaggtgggccctagttgcctggtacctaactgtgggttgattagggcagagaatggtgggtttttatgtattcatttttggcttccttaggtcttagctgcagcctgcaggatctttgttgtggcgtgcagattctccagtggtggcatctgggctctctcgtggtgcgtgcggggtctgtagcttgctgcaggcaggcctggaagttgctctgcgggcttagttgccccatagcatgtgctatcttagttccctggccagggattgaacccgtgtccgctgcatcagaaagtggattcctaaccactggaccaccggggaagtcctggtgatggtggtttgatacatgagcgcctgataaggaggtcactggggtgtgagctcttgattacttggtctgcgtatgaaagatgtgctcacaggggagatgtta

SEQ ID NO: 42905 - DNA, 756 bp, Bovine  19866881322244
  misc_feature (1)..(1): n is a, c, g, or t
ntgttaaattcacggcaagtcaaaatttctgcttaaagaggccctggtattaaattgacagttgccttggaattcaaaatagaacttgttagaacagactagagagatttcttttttgcatttctctagttatttccattacagagaaaaacacacttctgtcaattgctcctttgctctgcttacagcctgcagtaatttctgagattcttaggttaaactggaactcccatttatgccagatagcatagctcattctgaaagtctcaaaatcttagcctgaatcaaaaatcttgatatggtcaaagggtgttaaaaataaacatgaaaacaatttaatttgatgaagaaatatttgggaaaacagagctaaaaatgctcacacataaatacatgcacattggtccagggaattatttgaatccaatggtggctttattattattataaaatttctggccctctccccagaggggaacactggagacagaaatgttaagtcaagtggcagagcaaggctgatgcttcaatagccacatcatgaagaatacttcagattggggaaagcatattcctcaaaatcatagcttcattttccatttatgaacagatacatttatatcttaagaagcactacacaggtataaatattttatttcatgtgattttaaaaaccatctttccagggagagtcctattcaaaacatgaggtgggaagctacttgcaagctctggttaggatgtcaaagatgatat

SEQ ID NO: 42906 - DNA, 1600 bp, Bovine  19866881378894
  misc_feature (1)..(1): n is a, c, g, or t
ngacgcagccttggtcgatgatcccattcccttcactcttggtgttttaaatttatcaaaacctcctctctctccttcgaatactatgtacaaagagctgtggacattctttaatgtactctagaagcagtgtttttttgttttataaaaatgatttaatacatcattaatatagtaatatttcatcttcaggacatgtctatccacaaggtctatccttttgaaagcttaagccaatttgtaattaaatgcacttcagaaatattgctctaatttatcatgctatatcatagcactcaaaaaatgtttctttctcctcaccctctcaatataaaaaaacaaattccaaaaccccaaatgaaaactgttctgtcatactttttcagctttttgtaaactctttcatatagtcattaattttaaacagaatgtatacatgttatgtcatgttaaccatattaataggtccagattttctaactttgaaagatgtagagaaaatttaagcttgcatgttatcttttggggaggtattccctgtgctttgtagagtgttcaagaattagaatttagactacattaaaaactttctgaagaattaatatttacaaaaatttgagtgtcaaagtgttaagaagggacattggagctgggagctgaaggaaaagttggggagaaaatatttttacacttctaatgttaatctagggaatctttctttgcacttggataaagggggaaagctttctccttatttcacaatgcaactgcataaaaagtgatcttccttgcatatggatatgactcaatctcaaagagttttctcagccaaagttatcagcttctcttactttttcttcagcaataaaggcttttgctttctcttttctaatctccccatggtgagcttttgtcatgaaatttcttccgaaagatccaaattcccactgactctttttactttaaagtgtttacttaacagcaaatgatcaatgttgagccaaatagggaagaaatcatatgtagagttacgtttctttatatctctcagcacatgttctcctattttaaatgctaacatggcaaactatgttggataagcattctgtggtgtccatgtgttcattattttgcaacagaaagtgcagatactccatccttgaaaattgctttctgagattggatgctgcaccatgtctcctagctcatatttgtccttaataaagaggtattattggaagaatttgcttgttcttgctggagtaactctttgctataaaaatggattaagatatattgatatttattctttcaggaaacgctactctggtgtgtgtgtatgtgtgtgtatgtgtgtgtttcagttcagttcagttcagttcagtcgctcagtcgtgtctgactctttgcgaccccatgaatcgcatgcaactatttaccagttagattaactttttcagataacgctccttaaaaaaataaagaaagaaagtccagggttaagggtatggcaactctaaaagggcagatctggatttgagttttccagctttgggcaagtactgtgcttgattcctcatctacacagggagacagtcag

SEQ ID NO: 42907 - DNA, 932 bp, Bovine  19866881532902
  misc_feature (1)..(1): n is a, c, g, or t
ncttgtgcatttccctaaaaagaggggggaaatatgaacaaaatgttgtctctgaagacttcatggttacttggtctagttttcaatttggaaactatgctcattgcctgcaggaattataagaacaataggcttctggctgtttagtgaattgatgtcctcacatggattctgacatttgatgggctggccttggccccactcacagcagcagggcactcatgcaggccgagttttgctctgttctgagcactcacagcttagcgaccttacgtggctttatatcgtgacttcttgatgagccaaagtcttcgtgattttggtttcaaacacgtttattcttccttgtatgtcttgtccacagaaaacaatgaaatgttttgttttaaataaactctactgttcttctcagagtcctggtgttttcagtaaaaaggacacaattcccttacccacccaggtttgtcaaatctctgtattttgccacttttgctccatgtcttttgttatataataaatatctttatttttaaaacaaataaaatggagatgcagttcaagcgcctgtgaaatcctccccaccagattcttgtttctcttcctctcttcccagaagtggtcactatgctgaatgaagcaagcaacatgaggctcaactgaatgttttgaccaagtaataatatttcaaaatgaagttcccatcccttgtggaaatgtgaaagtaggtgtctcaaatcaggccataggaaagtcatgaaattttgtttcttctagaaataattttcttagtttctaccactttctggtataaacctttaaactttcccctgctgaatttcattagtagtacttctctttaaaagataagtaagacattacatggttcaaacttcaaaattgtttccaaataatatatattaaggcttctttca

SEQ ID NO: 42908 - DNA, 1153 bp, Bovine  19866881768425
  misc_feature (1)..(1): n is a, c, g, or t
ngagattttagttgattggatggagtctttctcgacatattaatgtatgcaggaactaactcttgggattcagacactcgaatggcattttttcacagtgctcagtcttacagaatacatttatatttgttgcaaaacaaagatttttccatttctgccaaattaaaaatgagctcctatacctgttatcatggcatttttattgaacttcttagccttttcaacatttgttactttatttttactctgtgtttttcatggaaccactcctaatcgctcctgagtcatatagtatctgcctttcaggtgtaacttaattaacactcagctaatttatcagtggattggataattgttaaataattttgatcagaaatcccccatcctctctcacctaagcaaggcaatcagaactatttattggcctgaacacatcagtttctctatatgcttgctcttaagaggatttaatactctgatagggaaaaaaaaataaaatttgaacaggattcttaatgaatcaaaacatgctcagattaaatgattagaaattcccagttaattactaggaaggaaaataatttaattatagttcagcttttacgtgggttactggagtgaatgttaagaaggaccctttcaatcacttttccattaaaataaaacaggcacactgagagatgtaattctccttttttttttttaccctttccaaattatatcatttaaattgtgttcaatgtctcagttgcttatacaaacaactgtgagcattgtaattgacttgtgagacaaaagctcaacttatgcatatggtgagaaacactggggatttataagtaaatattcaggttaaaatttatagacatcttgatatcctggttatattgccttagctgagagtacttgaggacttataatggactttggtcattctgaaggggtctttaagaaactgcctgctctgtatctaccaggataatcacaacacagcaccaacagttaaattttgtttagaatagcaaatacattttattaaacctagatatgaggcaagtcaacaaaatctcttaaaaaaaatcttaccgtgcatttatttcataatgtttaaagaataaaatgggaaaataaaggtagaggtagatgaaataaa

SEQ ID NO: 42909 - DNA, 2672 bp, Bovine  19866881838961
  misc_feature (1)..(1): n is a, c, g, or t
nccttctcactgacaatttccccaataaccaaattaaaattgcaaacctaccatatgctcctctgtcactccccatactgcttcctttccctatagtacttgtaatacatctgtttcctttgtagtgaagtgaagtgaaagtcgctcagttgtgtccaactctttgtgaccccatgaactatacagtccatggaattctccagttaagaatactgggtgggtagccattcccttctccaggggatcttcccaacccagggggcaaacccaggtctcccacattgcagacagattctttaccagctgagccaccggggaagcctactttctttgtagcacttttccttggcttaactttagtactttttattttctaagctattatgcactttactcatttgttttattgtcagtctttctccccaaagtccagtacaacataacttttacacaagcatattttcttttgttttgtggactgttgtatccacagggcctagaatagtgcctgatatatagtaaatattaataaatatttattaatatttataattataatcctaaatgacaggatctgcaaccaaaagctagagaactcctggaaaagcactaagacttttctttgtcatcactgcactagtgtgttgggccctgtacagcaaccagtgtgttgagtatggcactgtccctgccttcttcgggcagtttccccatcacttccctgtccttgtttgcctcagagcttcaggggattgggaagatgtttcctatcacaaagagagagacttgagagctctgctctggctttttttatttgccctgacaaatatgacaacctgtttttgttctttaaagcatttgggtgtctggaaagtagccactctgagaagactggattttctgtatttcaaagggaacgcgtggtctgttttgggttttgatttctatcttttgaaacagtcagcacccactgctttgttgcacttgaagcttggaatcttttatgtctgaaggtaagagggtaagagggtataaagcatgtggtctactaaggagactttcttctgtataagccagctctggtgtaagcaaaggtaaaatgaccacaagacccttgccttttcctgggaccagtgttgaggaaaaggtagagcctagtttggtctacactaatttattttgagacacagcatttggaggggcaagacagtttccagagagaatgttttctagtctgcatctttgccctgtgacttgtgctctggtgggagggcctagagcactttgatcacagccacagtttagtggccaagggccttgatgtctaagtcatggaaaggaaagggcagcacaagacaggttgaacagtctaaggtagtttgtgactaaagcctacttcattagaaatgattaagtatcttttgggtagtacttttgcaccatatctgaatattaagagattaggtggctattttattatttggagaaggaactggcaactcactccagtactcttgcctggagatttccatagacagaggagtgggacaggctgcagtccatggaatcgcagagttggacacgactgtgtgactaactttcacttttcactttcaggtggctattttaagctgacttcatctttaacatatgtccagaaaatgaatagtgttagtgactattagtaaatttaattttcttttgagttgattatcaaaatagcaatgtttctccattcccctgacatattcagtgtagctaacccactttccagtggtcatgtatggatgtgagagttggactagaaagaaagctgagcactgaagaatcgatgcttttgaactgtggtgttggagaagattcttgagagtcccttggactgcaaggagatccaaccagtctatcctaaaggagatcagtcctgggtgttcactggaaggactgatgtggaagctgaaactccagtactttggccacctgatgcaaagagctgactcattagaaaagacactgatgctgggaaagattgagggcaggaggagaaggggatgacagaggatgagatgattggatgacatcactgactcaatggacatgggttgggtggactccagtagttggtgatggacagggaggcctggcgtgctgtggttcatgaggtcacaaagagtcggacatgactgagtgactgaactgaactgagatgtacattaatcacagaatgaatcaatcaacaaatactctttagtacttatcatttatagaatgtactgggcaagatggggaagataaaggaatctgagagttcttacatcttcatcctcaagaaaatgaaaattagaatacactcacaaagacagacacatggcataatataagtgataaatgcatggtactgaagattaaagctatagattcccttctgaaagttggagcaatcaggaaagacagactttgaggagttttgagtcttttaataaagaggaaaaaggaagacaagccattctgtcagtactgagactcactcagtgaagaggactcaaccaattaggcagaaacagagggtccacattgagaagtagtaaagatagtaaaggaaattttggaaggcttgaaaaggcaagtgaaataatttgccatttatttgagcagattctcaccaatgttagata

SEQ ID NO: 42910 - DNA, 1124 bp, Bovine  19866881865170
  misc_feature (1)..(1): n is a, c, g, or t
ntgattactctgataccttatgctggcaaagactaagttccttccagtcgcattacttgctatctatgtgtgtgagccatattcaaaagtcttgtccagttgaaccttcaggttagtgtaaagtcaacacttgattctaaccatatgaaatactccaaatgggaacgtcctatctgagcctttcctaaattcctgatgcacaaaatagtaagcaaaataaaaatgattgttttaagccactaaattttgtaggagtttatgtagccatagtagccattaccctggatgtagggcctgggaatctacattttaataagatattgtcagttctgcttttgtagaccacagtttgtaatttgcactgctctacatttatttttttctcttctccttaacacataatagaagaggctagagagcaaagacatcatcccaaccttagcctctggaaatgaagcacacaccatccaataacaattggctaaggaataatcttgtgtctaatgtagatggcaactctccataatgttctgggaatagatagttttctctcacagcttggatcccctgctataccttggaatatctagagcagaaaaaaattttacttctttccatttcacccaagctgctttcttgggccagtgagagagcagaaaacaggctttgagtcattcattatgcaaaagcagtgctgtgtgtatttctggggagaaggcactcatgaatataagttaacattaaaatagtcttctaggtatatgagatgttgagatacatgagcatttgcatgcagaaagttctattttttttctaatgctttatagtcatatgttggttattcatagtcatgtgaattatgtgttacaatcattcattagttctttgtacctggtacctttcaatcccaaacctcactgctctatttgctctctgccaatcattgtagatgagagggaaactcaggggagagaacgtgtatgtcagataaagagagaccagatgcagttggtgatgagatatgaattacacacgtgggctcattcatccccttcccttctgactttaggggaaaaataaagtttaaaaatttaaaggtgtgcttcttttcaaaatctcaattc

SEQ ID NO: 42911 - DNA, 780 bp, Bovine  19866881884960
  misc_feature (1)..(1): n is a, c, g, or t
naattgaaaacttccgaatgccatggaaaacacatttttaaaaactctttcaaatgttttgacttgtaacattaagtttttacttcctgcctaattatccattctcatgttgacaggcaaaatgtgttcttttttgttatcttctctcttaaaatgagtatgagaagtaaagaccacctgttgccatttagaagtatagttttcttctaaatccacttgacattttaagacttcgcatctgctactttgtgataacattttcctttatagatcatgtggtttctaaaatggtgtcatgtgagtcgaaatctagccaggatttttttttttttaattcctaagcttagggtttttaggatttcatcccctatagggagaagggtgcatggtgattataccacactcttatctaaaacatatgaagcacatttcttctgtgtctgttctgatcagttgtgagtgcatgaactactgggttgaaattggctatttatggttgcccaagtgaagcagtcctcactgatcagggttgccttttgtaggtgagagactgggcagtgtcctggactggccattcctcctttagagtcttcttacaggtaacagaagggtgtgacttctctcccaagtatactcacattctggctgaggcagtagggtggccatgggcatatgacaatagccttctacctacctgtcctcccttttcctttcctcatttagtttgactgatgttcaatccttgttgcgttttcctaacaaagaggaataatttctagc

SEQ ID NO: 42912 - DNA, 1029 bp, Bovine  19866880401959
  misc_feature (1)..(1): n is a, c, g, or t
ngatgggaaaggaagagggcacttgaaatagcagttgaacgctctcattgttgtccaaaactcccctgaaagctttgcatttgtaaacccagttttacgccatttattcagattgtctttgcttatattatctgctagcattgacacaaagcctgcagagaaatactggttttggtgagccgaagtctgtaaaatgggccaagtctgtgaactgcacactgtagagtgtcctggtctccttactgtcaggctgaggatgtcttctaggtgcagaatagtattagagtgggagaagctttttcattaacacagaacattgttcacatgttgtatcttctctttggctctttttaacgatttaaaattgttgcagaaatattgctaattctgtatttctccacagtcatgatgaactgaagttaccagaaatattattcactctttgttgccattttatcatccattatcaagttcacttccaaaataatttattttgaaaacatacatgtcagaaaacacatgaaaaacagctattttaaattaatgtgtatggtttaataatctgtttcctaggcatgcttccagaagagcggtgcctccgtggttgctattcgaaaatacatcatccataagtacccttctttggagctggagagaaggggctacctcctcaaacaggcactgaaaagagaattaaatagaggtgttatcaaacaggtattaaatggttatttataataagcatatattagctataaatccatgtatagtaacatttaggctttttgtgctttgtgagttcgttaaaataagttaacataatgatgaagggcttatgcttaacctggttttacaaagtcactggtgccaattagctttagtaagtattctaaagaacagaagcaatatgatagtgtaaattttttctagctgcctgtacaatttttttttaagtatttatttatttggctgtaccacatcttagttgtgacatgtaggatctttagttgaggcatgtgggatccagtt

SEQ ID NO: 42913 - DNA, 1715 bp, Bovine  19866880847962
  misc_feature (1)..(1): n is a, c, g, or t
ntaatctgccttcttcttactatagagacaggacatttttttgaaaacttgtctgttaaacatgccttattttttcattgaactagaaaattttttgagcacctcctatggaccaggctttttttggtgtgcccaggctgttgcctttttgtactttgacttgcagtcaagtgccacgacaggttaacaccaaaaacctgttttggcaggcatacagtgtgcagctttcttacattgctctttgtgcataaacatgctgagtcaggttctacaccctcctgtgcaggagctgcgtgcatggagctcagtcatatccgactctttgtggccccatggactgtagcctgccagggtcctctgtccatgggatttcccaggtcagaacactggagtgagttgccatttccttccctaggtgcataaacataagtgtacagtatttgaatttttcaaatgtttagctttaaatataattcttaaaatcatgtacatgcagtgttatgatttaaagatttattaatcagtggtaccaagttttctatcattaaggacaaagaaaagttagaaaatccttgctgaatttcacaaaaactttgaagaaattcaggctttatgaggtcttgtatcataagggcaaaaaatatatactgctgtgtagactgttcactgctgtatgcaccattcactgctgtatattcaatggctgatacagtgccgaacacacatcaggagtttaaataacttcactaaataagtgattgtcaattttattaaatggaaggaagtagagaatgagttatgtttgaggcttttatagatttgtcataacttcatttgagtgttcaaaataggttaaattgtgacctggtatttgtaacctaacctgacttaattggggagtgtgggaggaagtgggtaatgtccaagaaagagcatatctaggttcacatcctttttcttgtcccgatgggacttctctttatctaatattttttcttactagcccaggagttctgtttccaaagaaggagccagatgattctaaagatgaggatgaggatgaagatgaagatgactcatcagaggaagactctgaagatgaagagccaccaccgaagagaaggtgcgagagtgtgggaaacacttcttagaactgagaacggccatgaggggagaggctgtgagaatcgtgtcagcaactctgcatccttctcaagtgctctgagtgacgtttgaacttaccctctcctgagaatttagaggctctgaacttgtgaaacactgtgaatgtttaattactctttggtcaaacctgtgtgtgtgtgtagtgtgtagtttggttatttaagaaaaataattccatgtttttctgggaaaaacatgtagacttccggaattggttgaatttttaggtgaattcacaattttaggtgaaaggttataacccatatatttttcttaatgtaggtgattttacctgtgctgtttcttttctggcaaagtatctcgtcatcacggtgaagtgaatctctcaagtataagtgattgccttctctctttggttctcacaggttgcagaagaaaaccccagtcaagtcaccagggaaggctgcagccatgaagcaaagagggtccaagctggcacccaaagtcccagctgcccagcgagggaaaacgaggcccctccccaagaaagcccctcctaaagcgaaaag

SEQ ID NO: 42914 - DNA, 2344 bp, Bovine  19866880914504
  misc_feature (1)..(1): n is a, c, g, or t
ntgtatggatgtgagagttggactgtgaagaaggctgagcgccgaagaatcgatgcttttgaactgtggtgtcggagaagactcttgagagtcccctggactgcaaggagatccaaccagtccattctgaaggagatcagccctgggatttctttggaaggaatgatgctaaagctgaaactccagtactttggccacctggtacgaagagctgactcattggaaaagactctgatgctgggagggattgggggcaggaggaaaaggggacgacagaggatgcgatggctggatggcatcgctgactcgatggacgtgagtctgagtgaactctgggagctggtgatggacagggaggcctggtgtgctgcggttcatggagtcgcagagtcggacacgactgagcaactgcactgaactgaactgaaagagtcacaaacacctcaggagcacaactgatgctcaatgacaatctaggttactgtttaaaagttcacctgtgctatattttgtttcagaagccaaaggaatagtaatatagcttaggaaacccacctagtcacattaatttataataataaaaagcaaaagtttgcgaggttaaagaaactcagttctaaaagcacctacatcaaaacattttattctgtcactatactacaggttctcacccactctgtgtaaactagccaacgaacacctgactgtacgaatcctacaaaaatcaaagtagaaagatagcagaatacagagtagtgaaaaataaaaggcaacctcaaatataactgcaagaacagtgtgacagaggaatccacgggtgggcggtcaggccctttcactcagcttgagggttgcagcctgagggtgctagtttctctggagcgcctgcagcctcgccttgcggagccctgacacaagctcccggggctcgttggctgggcctggctttctgagtggagcaagctattggatatcccttccaccttatctgaactccataacttccttatcttggaggaaatcaactttagtgatgaaatgaatctacccatagggattatcatcacagagagagcgagagagtgtgtgttgtgttggacagccagccagcctgacaagcaggtcaatctttattaatgtgcagactgcttacctagttaaggtccgccgggaatcaaactctagaggtgtggatgacgcagaccctgaaggtgctggaggttgcaaagcagagaatctgtttaaactggaagcacttgatcttaaggcatctatagatattaaggagtgagaaagaaatataaatcacatgactaaaatgcagcttctaactgatctgccttcgtggggaagggcccgtggccaggcatttctaacgagcctaaccagctgacgccaatctcctggtccacagaccatactcttagaagcactctgttagaaagactttgtatgtaaaaaagaatttataaatatttattcattacaactatctgctcctttaaaaatataactaaattatcctaagtagggcctaggaatggtaaataggggaagaaagaaggcaagcgaaaccaaaagaaaatatttaacttaaaaaatgctgtgatgtcatttatgtaaaagtatggatgtgagtttaagtgaacaatttaatttaaaagaaaaaaggtcaaaattatgtaatagaagggaaatatgggaaggttgttaacaatgaagtttaattgttatgatccaagtatgtgagtcctaaagtcaagtctctcaaaatctacttctgacatagattttgaaaactattttaatcgaattgttttttctttcgcaacaccctaaagttaaatgcttctgggtaataatattactttactcagtaatatgagtttccattttaatttggagtcccagtaacttttctaattatattgaatttgtaaaaagcaacaaaacaacaaaggaatcaaacagattaaagttttaaatagtttttgaattaaaaaaaaaaaaacttgttttaaatattcaaaatacctaaggatccacagtgaggaggaaaccctcaattatgttaagagcgggacaccaataaatctgggcgtgattagtttatagatcttgcactaaaacgtacgcttgtgaaacgactgcagcacgccagcttccggaggaaggacactcctcacttaccggcctcgctcgccttggctccaccactgctgccctttccccagctgcccagctgcgctttaggtaccagctgaattttctcatcaattgtgggctgcaacgtaagggatcacaagtcaacagtaggaactattctagaagaatagtttatctt

SEQ ID NO: 42915 - DNA, 987 bp, Bovine  19866881057042
  misc_feature (1)..(1): n is a, c, g, or t
nctcatcaactcttatctttatactccagtatattattttgctttcattgtctaacaacagcataaaggttcttgcactccttgattggaggattttaatgttttccatttaccattgtaaaaccagtcacaattttataacttttttgtatgcagctgttacacataggaaaatctctatttaagtaaggataaattactctaaaagaagaaatgatcctatataattttcccttcaagtgtcttgttgtttaaataaacttgtttgaactacaggtcagggagaggctttgaggttttgacagttaaccacagacctattcagaaaataaaactatccccacaagttcgcatccatttcaggagatttctggaattcagcaacctctctgaagtctaggttctgaatccctatcttagaaggttgagttgttttaacatgtggcactaaaaggaataaagctctcctctaaacatcaatacggtatatctccacctgaagaaaaggccgcaggcacctactgaagtagcaggacgatgaggcagccggcttcatgaaaattctgataacactcaaagtgcacacgcacggtttttctgtgaaaatacttacagcactggcagcctcgagttctttctgcttcttctcaaagacatcatcatcggctttatctttttcaaattccttctggcaacggttcagtagtagcttccggaagttcactgtgttaccaggcttgtctgccatgggtactttcagctgcatccagatgggaaaatgcaaaaggggcaagattacttaaagaaatccaatgattttctcaaaatatctattttctttattgtgcaaaataatgctgaccgaaccacaggtaagcattctacaaaagatacatgatttagctttaggcatttcatgttttcaatggttaaggagctttaaattttatatagaaaaagacacacattccctctcatataaatgta

SEQ ID NO: 42916 - DNA, 1841 bp, Bovine  19866881203959
  misc_feature (1)..(1): n is a, c, g, or t
naaagtatttgtttatttggatttgataattctctcaactacaattatacattaatttattatgtacatttattatcctgtcacatccaggtattctggcctgaagaattccacggactgtacagtccatgggactgcaaagagtcggacatgactgacaactttcacatgctacatgaatccttcgtggtcaaagggattattaactgatttactaaattactattaagtgcccataaatttggcaagaattatttataatgggatgagacttcagagaccattgtgtcaaattcctcactgcaaagtgaaacagtagcctagagactaatggcctgccctacagttgcacataaatgggctaactgttgacttaaaactcaatctccatttctaaccatttaaatattactgagtgcctgtaagtactgataagcacttaggggaatgtctataaaattaaaccacatatcacatgaatcagcaaatagttacaaaacagtatcacggctccgaaaggcctcaccagtcctcaccttttacacaaaatcataaagcattccttcataacattaaaaaatacatactgcatatgttaaaagtcaacattaagaccttgaagttaagtgtttcatttagaacaatatattctagtttgcattttctgttacttcatttccatgttcctcaccctacaccactgagcctactctcctactttagtgaggaaatatctctcactaatccgtaaatgataatgctggtacagcaaggtttctaacctcaatcatcacctgacagggcaaatatgtccctaaaaagtatcttctgtacaggggttaagtcaataacaaatcacgtaagtagtattttaacccactggtttggtttcaggctgacgttagatattttggtaaacattcagaagaaggtaaaaatatactatacttgaaatttcgtttttttttttggccatgccaatggactgtgggaaaaccacatcccctgcattggaagctcgaaatcttaaccactgtactgctgggaagtcccacttgagaggtgttttgaacctagaaatttatctctattagcataaaaaacctttatagtgaagtgaaatcaaattctaatcctaagcagacactataaattaagggtaagtcttgattatttttgtttgtctttttgtaaatagtaaatttataaagttgttccctcttggttttcaatcagtagttaatgctctttcattaacagcatgatgtctaaggatattcccacaagataacttcccccaccttccctgggtccccactgaacgtgctcactctgagtcttactttgatagttagaattggtccctgggtggttctccaggacatacttcttcagagcggtggtggaacaggtcttcggctcattcatggcagcaatggcagacaagattgcatattccatcaggcttccaccaagcaggggtttctcccctgatttcttcagctgttttccaaggaggaagagaaaagcatcaagacaacactctcccaaagcagctcaagacaagactcctctgcaccaggtgggtcggagttcctgcattagcacagatacgttttacaataaattgtcaggttagggactttctcttcccactcattaggtattcaatctaactgaggagtcccaaccctcttgtggatattttctccttctatctatccctccatccaactgaaaatagcaaaagccaacctaacccaaagagaatgacagctctactccaaaaaggaggttaactgattatgtccctgacaaattaacacttctgagactacttc

SEQ ID NO: 42917 - DNA, 1705 bp, Bovine  19866880875750
  misc_feature (1)..(1): n is a, c, g, or t
nttttggctgctgttagctgcttgctaacaaatgcctttctcttgaggaaacatcattccaaccatctccaacatcaattcttacgccaattctaaacctagcctaaggtgaataatatcaaatgcctcagtttcttatgaggcgtagaaaaaccaagcattagttcagattttttcgaacaacttctgtaaagatagtaggtcatcttcagtcaaccccaaggtgctcttctaaattctaagctgacaaaaggtaaccaaatttttgactgatgttcagtatagaaagtatattggcattagatatacaatagctatatagctaggtgacaagcatatattttagagtaacttgtgtcctatggttttgcccctttttaggacccagcacataatttcagtattcttaatgattcatctagggaccaatgtgtctttgatgacacgctactggtcatacttagtttgcatgcatgctaagttgcttcatttgtgtccaactctttacaacccaatggactgtagcctgctaggctcctctgtccatggaattctctaggcaagaatacaggagtgggtttccatgccctcatccaggggatcttcctgatacagggatcaaactggcccctcgtacattgcaggcggactctgtaccactgagccaccagggaagcccatacttaaagaataacaaatgcttatcacagatataattattatttccaactggaaaaaatgatgtgctcttatcattcattttatgatggagttcccagtaacacttgcagaaatcacgggccacctatttagtaaaggaaagatactaggttaaatcctttcagtacaaatagtcacacccaaacacgtcttctaagcttaccttttcagatgaaagatatcagcaaatgtttgactttattgtttggtctcaacagcatagtgcacagcactttatacttcactagactaccatttagacaatgaccaggctattcctttcaaaaagcttcgaagcatgtttacagaacatctgtactagataaggatcacttccaatttagggttcactgagtccattaactgccaagatagatacttaggaggtacacattccagtaggttagaggaaggaaagagacagactagggtgttaattaggccacatgaaagaaataatgatatgccaagaagtaaaaattgttcttaatgagcactttattcactggctgttcagctttaaggtcacttcgagtttgtccaccaatgaattgcaactcttttgtgaagtgaacccatgaaaggaaccagtaaacattcgttgttgccaaagatcaaccaaaaccaataactagctggttgttctcagctgggcatagtgcaaggtgtatttgcccctctcagatctctgactccagggagcataagtgactgactgccaccagctactgagctctgaaatgtagtgctgctgcactttccatcatcgctgcattttcaccaaggccaaatttctcatgggctgctctcagccaatggcagagtgtagcagagatgctaagattggttattcctgcaagacacaggacttcccccacaggtgactgggcagggatgctgtcagggaagaagcccatcctcacaaaggatggcaggtcgacctgatcccacattacagatgcaaagtagacagacttcatggggg

SEQ ID NO: 42918 - DNA, 1136 bp, Bovine  19866880921883
  misc_feature (1)..(1): n is a, c, g, or t
ncaattatggccaatacgacctggaggctcgccaggctatgcaggaacagctggccaggaacaaagagctgatgcagaaggtccaggcggcctctgagagtgaggaagaggaggaagtccaggaggaagaggaagaacctcttgtccctgacatggtgaatggggtgcagataaaggcaaatggactgaacccctggatgttccagaatcacttcattgttgccaaagaggctgaggtccagaaagacctggaaaatcctgctgagcctgaagcccaggagacttctgaaagtgaggaagaaagtgcagtggtggaggaagaaactctcttgaaagaatttgaggaaaggcgatcacttagacagaagtctgagctcaaccacatggcggagccagtgcacagacatgtaacaaaggatcctagcagccaggaggttctgtccgaattgagggcactgtctcagaaactcatcacagagaaccatcagtcagggaagcaagaactgagttcagcgaggacagctcagagagaggaacctgccagggaggaagaggagcccatgttgctgcagaggccaaagagagctcggactctggacgagctggaggagctgggcagagaagggtgtgttgaaaacaaggagcttcccagaactgcagtggaagggctgcagttggagaagaatctaagtaatcatattggcgcccccaaggagaagaaaaggaaggagcaaatgattgatctccagaacctcctaaccacaaaatcgccttctgtgaagtccttggtagttcccatgactgtacaggcgttggaagatgaagaagagagagatcaaaggcagataataaaggaagcttttgctggggatgatgtcatcagagacttattgaaagagaagagggaagccgtggaggcgagtaagccaaaggacctggacctgactctgcctggctggagcgagtagggtggtatgggcctgaagcccagcgccaagaagagacgcccgtttctcattaaagcccctgagggtcctctgaggaaagacaagaatctgccaaacgtgattatcaatgagaagcggaacagccatgcagcagctcatcaggggcaggttttccgcatccattcacac

SEQ ID NO: 42919 - DNA, 925 bp, Bovine  19866880666274
  misc_feature (1)..(1): n is a, c, g, or t
natgggtagaaaatgtaactgttttattctttgggatagggcatttggtacaatcctgctgctgctgctgctgctaagtcacttcagtcgtgtccaactctgtgcgaccccatagtacggcagcccaccaggctaatcctgctgctgctgctgctgctaagtcacttcagtcgtgtctgactgtatgcgaccccatagatggcagcccaccaggctctccgtccctgggattctccaggcaagaacactggagtaggttgccatttccttctccaatgcatgaaagtgaaaagtgaaagtgaagtcgctcagttgcgtccaactcttagcgaccccatggactgcagcccaccaggctcctccatccatgggattttccaggcaagagtactggagtggggtgccattgccttctccaggctaatcctagctcaccttaatctcaagggatgggtcattctagaaacaacatggaatttggaatcagcagacctgagatgaagctccagctctgccacttacaagctttataactttactaaagtagcttcacctatctctgagattaagacagtaatagccaaattattccttcatttttactttattttctcatatggatcctctttcagaacatttgaagcagattatgaaaaattatatgtataataatcacctgaggctgatgaaacagaaatagaaaagcagaacaaagaaaacggagaaagcatttctaactctaaaggttgatataatagccataaatatacattacattagaatctgaggttcctagaagccagggcatgaagggaaaaatgaggttacatatacttggttttcattaaggaaagtgaacatcagttcctctgaggacacatagcattttcctggcacagcattctccaagaaattgaaaccatat

SEQ ID NO: 42920 - DNA, 1247 bp, Bovine  19866880679866
  misc_feature (1)..(1): n is a, c, g, or t
ntttatgctatgcaaattctactaccataaaaacaatcactttacttggaatcaaatatcagtaacagtcaccttgagttcaatccaggtgaatgtgaacatcaaatctaatcttcgataatttatattctggcatacggttacatgagcttttcaattttctaaccactctaattttagacccctgggaggccaaaaggtatgggaacagagggacccatttgtgcaccctgatgatcagctcctcccacagtcaagcaggtgccctgtgaaacttctcaggtcctttcctgtgtgaatagccacctagaaatgtcaggggcctgccttgggtttctgacaggaaatggtgcccctgaagtgcaaattcacacggagggggagctgctgggcttaaggtgcactggcagcagagcagaaggaaccagaaagtcgcactgtgcatttcataaagataaaataattgaaaacgaaaaaaaaaaggggggggggatacagaattaatttgattaaaaatacaaatcaactactcctcaatacatctaaaggatagcctatctgaaggcttacagaggagttggtgaagaaattggaaggcaatgaaaattcaaatctattctcttctgtaagtgcatgtctttctccctaatctccttctaaatttttttgttgttgttctcaccctttcctcctttttttcctatctaattatacatctcaaagaaatttccttgcccctttaggttcaattcatccaacctatgttttgcctggggtggggaggatgagggggtaaggagcaccctgagtaaatactaagatccaacctcccacaaattagattaaaagaaagagtaagccaaggagaatagagtagttggccttaagagtaaaactcaagataaagatccagatcccttgaggccattttaaaatgtccataaaaccaaaacaatggtttccaatcctatatttggtgactggagctgcacacagagtttaaagcatatgttaatacattaagccaaataatcagtaattagatctataagccagaaatacctttaaaaaaaatctttttaacttcaaagacttttcctgtaagtagttttaactgtgagcatacaagttcatcatataaaaagtcgacaagttgcattacagtttttctttaaatgagttctaacaagatgtactttattacaactgtacaacgaattccagaaaattacaagacagaccagatg

SEQ ID NO: 42921 - DNA, 1501 bp, Bovine  19866880777517
  misc_feature (1)..(1): n is a, c, g, or t
nacaaggaaacccagtctagccttcttatcttgcctggtatcacagtcattgcatctgacaggaactgagccagcagggatatttggtagaaatcatatgattagaaacatgagtttgcatgtaactccatgaaaaaaaaaatgagggctgataagagttataatatgtggttgtttttttttaggtattgctgcttgtcagtgaaagagctggaaaaaaattccttaaataaatatacagtgtaaatatacagtgaattattttcccagttttacacattatgaaaatgagagacccttaatcaaatctattaactcagaagaatacctaaggagaaacataaaaaaacaacagtgagacacagaatggatgaaaatgttactgtcagtaagtttgacattcagaaattttggaggattatttggcttgagttacaaatgctgctgtaacataacacacttggctgtgctcagtttaatgatgtatattttgtccagtgcattttccgtaagcagttgagtggaagtgtggtacagaatacgttacgttgtatttattgatttaaatacagctatgcttcagaacataaactggatgttgggttatatttctggtcctctgggaatcttttagttttaataggctgtgaggattagggaaaacccttgacactgagttcagccatggctgtgtgtgctttacgaaagatacacacaagacttttgagatcactttgcagagttttcaaagatctgaagattgataatctggtaaaataaaaatctggtagcagcaagcatcaaatacattctgcacaattatactctccaagggtctgaaaaactgctcaaataacaggacctgttgtgatatattcatatccagatacattaaatgctagattaaacaagaaaacatatctttagggaatttagtggtagcaagtcattaaggtctctataaaatacaactcgaggccaggaaaattcccagtgtattgaacaaggctttgaagttgtaggaccttgactggtgctgtttgatagaaatataatttgagctgcttcagtaattttagggttcctttttatgttagaacataaaaagaaataggcaaaattaattttaataatatatttttataataaagtcttgccatttcaacacataatcaatataaaatgataaatgaaatattttaaattatgcttttgtggtaaaaggacttcaaagtctgctgtgtatttcacatttgcagagcaacttgatttggacaagatacatttcagatgttcagatatggctgggggttcctggagtaaccagtggaagtccttgacttttagtttcattaacagtgtgggtagagattttatgcttttctagtgtatacttcagttcagttcagtctctcagtagtgtccgactctttgcgaccccatgaatcgcagcatgccaggcttcgctgtccatcaccaactcccggagttcactcagact

SEQ ID NO: 42922 - DNA, 1499 bp, Bovine  19866880825368
  misc_feature (1)..(1): n is a, c, g, or t
nagagtctctttgggaacctaaagaaaaggctcagcggggaattttagccccgggctgctttataaaataaatacttcaacaaaaccatttgcataatgaaactgtatcatccataagagatttaggaaattgtatcaaatgaagctaaactacagtttaaggagatgttttagagggtggataagtgaatcttcttaatccacatagttttatgttccgttttgtttctttcggggagaaatctcttcactcatttttagaatggaaaatgctcattggaaaacaacagctgtttgcttttgtgtatgtaccaattttcatgatttatctgaggcagcttttaaaattcctggtgtctttttatacttgaacctttgtagttcatatatttggtaaataggtcaatagacaattagtgtctcagtgacgtccgttagtacaaaacacaagaagcatccaggaatcaccctgaacatttccccttaaaactgattgcttttatttgaagcatagattcatgttgtcacagactcaatgatgccctgccaggaaaagacagctctgtgctcagaaactctactctacatttgcttgcatttgtgctacgttccagaatctttgagatattgttccatttgtttatttttggagactaacaaatagaatgttttgacagaattcaagaaatgcagtcagaagtgtgcattctgaattttctgcaaaccataatgtaatgtcctctgggctctctggatcatattcttagttttttttaacatggtcttttgataaacaggaaatttcttgtggggctggaaaacccagattaaaatcaaagaataatagagctttaaatcttaatgaataacataatgaaggctcttatgtccaataaacattttaattaattgcctttattcttgtttcctaagaagctttggtatttccagattcctaagtggttttggaccatgctttcccaacagcatagctatcatcatcagacgtttattgagtactattgcatgcaaggcaccataattacttgagttttgaaactaatcaaggaccattttatggaattgaataaccatatctaatttgtatgtatatctcctcttccttctcccaagatgacctacctgcttttgactgctggaaagacttaaagagtctttaattctggctttctggctaagagatgatgaaggaaaatagacctaaaaaaaaaaatcacagattccatattactaactgcatgttggtacaatagccatcaatttcagtgggctatgcctggaaagaatttggggctagtatcagatataaagaagaggaagaaatacaacttttcctgatctttttcaatagtcttaagactataattcattcaaagatattcctaatattactctgagctccctatacatatactgctgctgctgctaagtcgcatcagtcgtgtccgactctgtgcgaccccatagacggcagccca

SEQ ID NO: 42923 - DNA, 1742 bp, Bovine  19866880845887
  misc_feature (1)..(1): n is a, c, g, or t
nactttacttagaggtttggactttaaaatatttttaaatagtatcaaacaattgagttattcaatttcaaacaatgaccacaggctttcattccccaagttccaggcaacctcttttgagtggcccatttgtttctggctactctggtgttttccttctctattcttccattctctttgtttccgttcacccccaggaaatggagtactctacacaaatgatttcttcccttcttgcactgatctaagagataggaggtatattgctaattttctaacaaggaaaatgtaaagtgttgattctagagtgagaatgaaagagactggtgaaaaggggtggtttaaactatactttgtttttcttgggaggcagcaggctcactatgcatagaattatggaaaatgaaacaaattacaacacagcacattggtaattcatttaaccttctgcattagaacaaaatccagaacagttaagaatctaaagcctatcttcaagagttttctaaacacttggtatctgccaataataatgtaatgacctaacaaatgcttttgttcttcttgcaaccaacgcttatataattcatacacagcacatagaatgggacagggaagtgcaatagtcctcgttccacaggacagctcacacaggaagtgctagaaagaggtttccatccatcctcaaatctactgacagcctgttcacttttcaaaccactggggcatatgcttgtttaactattccttgcttataaggatctcttcattcaaagtaaaccactttatcatctgagcctatggtgaaaagtagaaaataaaatttttgttatgcagctctgttgtcctccaagtgagttataaatatgtttgttggaggtattttacagatcatgactccccactgaattagacattctttttttcttactttattgagatattagtgacatgtaactacattaatctaaggcatacaagtagctcagtggttaaagaatctgcctgcaatgcaggagacgccagagatgcagtttgatttctgggtcgggaaggtccccaggaggagagcatggcaacccactccagaattcttgcctggaaaatcctatggatagaggagccttgcggattatattccataaggtcacaaagagttggacatgactgaagcaactgagcatgcatgcatgaacatgcatacaacatgacgactttatatatgtatatattacaaaatgattactacaataagtttagttaacattcattacctcatatagttacactgttttttcttgtgatgagaactttcaagattttctctcttagcaactttccaatattcaatacagtattgttgtaggaagggggaccccttccagggcctgaaactgggctcttgtctaacactcagaaatgaattgtctgaggtcaattatgcaggtcaggaagcaacagttaagactggacatggaacaacagactggttccaaatagggaaagggagtatgtcaaggctatatattgtcatcttgcttatttaacttatatgcagagtacatcatgagaaatgctgggcctggaagaagcacaagctggtatccagattgccaggagaaatatcaacaacctcagatatgccagatgacaccacccttatggcagaaagtgaaaaagaactaaagagcttctcaatgaaattggaaagagtggaaaaaagttggcttaaagctcaacat

SEQ ID NO: 42924 - DNA, 2752 bp, Bovine  19866880848799
  misc_feature (1)..(1): n is a, c, g, or t
nttcgggaaaaaaaaaaagaattttgaattaacatgagatattatattactctggcccatgactttcagccataagtcagtttgttagcactgcaacaataaaatattttcattcaacttactgtggttaaattctggtttacagtataaagtaactaaatggtattttaatgattatcaattatttcttccagggatattttcttttcaaaacttgtttttgcatgtttaggatggatatcatccttgtagattctcagtcactatattagctgtgtgtcagaaggctcttatactataaattctggacatcactttttgctcagatatcgagatgactttttgtatttcatcatgtcacagcaatttcagaattggtagcaagtgtttcatgcgttactattgaaaaaacagcaggaatctcagtttggtgccaaattgtagccattcactcatttgccatttggcaaaggatttcatctatcatgaatgtaccctagtgatggtaatgattccttttcaatttcctaattccaaacacttaggaaacctgggttaccatagaaattacttttccatttatgtataatttaactcagctaggttattatttgaagagattccaaatttgatcactacaatcataatcttttctataataaattcacacttctaggattctactctggcttaaagttacaactttgtacagtagtacatttgaaaatgtgagacatagggggatttacagtctttagtgtgcattctaatcacctggagaccttgttcgagtacagattctgatttactggatccaggctgggccctgggattctgcatttctgacaagcttccacataatacttatgctgctcatccaaggtaggatcacacattgaggagcaaggggatgaagaatctattttgttgttcttaagaaagtttaagtgttttaaattattttactaatactttctatttgatgtttgggaatatatcaaagtttgcttctttctgttgatcacaaattagttaatagagcacagacatatatgattatttctatttgagaactgcgaataatgtagtttaagtaacataataggaaccaccatatagtcatatctctttatcacaagcacttgaagatcaagtcagtaaatgttttcctcttgggattttaagaacagtgtttatcataggtataaattctgctgtaatggtctcttcaatacagagatgcaagaaagaaatacttctagtagataaaatgtttatttcataatacaaaaaaatgtggagttctttaagaatttatttttcttctgacctccaatttaaatatagaatactggttttcataacatgaggaacgatgctggtgtctgaatccaaaagtattctcttgatgctagctggtaaagtgttatttctacaaagctaaaaatatttcacaacacccacccctgcaaaaacaggtagaaatacacaggtatgattcctgtcttttggaagctgaatagctcttctccaaggaaacacttacagagcacgaatcaaggctctcttttcagggtaactggagagacccttgtgaagacagtgaaactgacaaataagttttaagggtctgtcaatcatggatgcctttgctgagactaaagcacctagcttacctgttccaaattcttgttttctgtaaccaagtcttcagtgactcacattgaaaatataagcaagacaatcaaaataaacagcttttgcatctcccagctgaatagcagtaatgattagacactgtttctccaatagcttaataccagtaatgtcatctcccatttgaaataatgttcttgtggagtagataactctaaagcacagaaggtgacagtaccatgggcttaaaataaatactctggattattccttaaggaatcatggagtcaaaggcagacaagtcaagcagaaaaatctgtgctttagtttcacaggaagagtaaggtggcttaggcatagcttcttttgtacccccagtccattaaaaaagaaaatcttcaacaatccttatacccaaaataaaaagaggaaaatttccacttatccatatctgtaatatattatacactcaattttagaagggtcaatatttttatgaaatttcagtttttcatttccaattgatagactttatttttacagtctcccatcattttacatcctcatgctagatctctcaaagagacctgtatttgccttttctcttcttttgactttagaaaagcttaggctgcatagaatgtgaccattcatcttggtggcacctgtctttcgatggttctccatcgcttagagtccaagtaccatagagtagcataataaccttgtcatggtttagattgcagtttatatcctcactttggcctcagtttctatcatcctcaccacaccttcttatccacattatggaagaaaccctgaccctaacacaagggcagcaaggaagtgagaggtagtgtccacacccatgataaacccatgacatctctctctttcaaaggcttcatccctagacatccagttttaatctgtattcacaaactttaaatagcgcctcttcttcttaggaagtgaagttctttggaagggaacctataaccttaaatattactggagatttgaaggtataaatcattgttctctttttaaaactcactactcctaccaatttatttacatctttttctctccatca

SEQ ID NO: 42925 - DNA, 2104 bp, Bovine  19866880865419
  misc_feature (1)..(1): n is a, c, g, or t
ntattttttcttgcctggaatatattcgaggatgaaatgaaacccatgtgtgtatgtatgtatgtatgtgcacactccatgggtgttatggggacaggatggatgcccttgaatgagggataaaggggagggccaatgaaatgatcacagttgacaggatcagtttgagaacatttgaatgccagctaaaggaatttttactttagtatgtggataataaggatctattaaaggtttgtgagcaaagacttgacattacatttgctttttttaaagtggcgttttgcagtctgagtatgggtgagagttaatcaatgctacctccatggatgactctgcctatgtgcaatgcattcctgtacacccaaaataagagagcaaaatccacatgatgtcaactgtatcattcacagaatcacctggatcaccaggcaagtccagagtgtctgagaagagcataaggaataggagtaatctgatgcttccagactggagagcttttagtacactaaatttaaaggttgattagttataagaagcacttcctatataaagataaataagtcagagagactcaaagtgattatttttcaatccccaaaatgatcatatcatgaaggagcataaatgattaatgaaaaaagttgaaggtctggaatttacataaaagaatataccttaaattagtattataaagataaaaacagttgtaaaattaagatattattccttaaattcatctttcatttttagctggctcttcattctcaagaataaccacaggagaaaagttataaaggcatagtcaatgtatatttttatggttctgccctctcttcaggtagaaaaaacactgagcttaattattctataatcattagagttttttcagtcttattgctctttgaccttctagcagattctatatggatagcttaatatcctctaccatttaaaatcaaatttcccacattgcttttatttaaaagtgtcacatagccatagatataatcacctgattaaaaaaccttcagctccagtgttaaaagcatacttcttttatcttctaatgagatgagttcagatgatcccaagcaatatttttaaactgtcacataatccttcacagttaacaaactgtcttacaagattatggtaattatctacaagtttgtataattcatcctacagaaactttttcttcagtataattgatgttaacaaaattcaggagtctttaatacaagggtaaattaacacaacctttaaaatggcactttattataggatacaaaacaaaattttaaaagatgtattttcagtttacatttaaataaagcaaacaaacatttctgaaacatcagtgcccattttgctatttgtattaattgctaagattttattgcttttgatcaaagaccatcacctgatattttatggaaggatctgagtataagttgatattttgatgaatcagcaaaacagtgatttttctaagaatagagatatataacacatcagagataataaccttataggaattatcacaacactgtactctgtaagtttaataatattaatttaactctgatttttaaacagcagattaaatatggtagatgttaaatattacatgcatatcttgttaagagatggcaacatctttccagaatgttgttaatatttcaatttactgttatcccctaccaccaatggatccagaaataatgggataaaattggtatgaaagacatgtggcttaaatatttgtgcatgctaagttgcttcaatcatgtacaactctttgtgaccccatggactgtaggtaacgcggctcctctgtccatgggattctccaggcaagaatactggagtgggttgccattttgtgctccatgtggtcctcctgaccaagggactgaaactgcatttttcacatatcctgcattggcaggtaggttctttaccactggcaccatctgagaagccccaaataattgtttgctgggccaggagagtccaccttgaatcgtggtgaaagggagggtctagcagaactccaaggaagtattgatcttggtaagttacagtttccaaaagatta

SEQ ID NO: 42926 - DNA, 1824 bp, Bovine  19866880922323
  misc_feature (1)..(1): n is a, c, g, or t
ngggtataattgccccttcattttgcttgggaggaaagagagtgatttatttcagaaacctaagagcctaggggcctgcaaagaaagagaatgagaacactttggttacagagaaatatcaggaaagctcttttgcaatcaactcaagagatgataagccctcgctttctctctatgacaatagaaatgaaggaaagtctacaattgatgttctaaaactcctacagtctatgatttctcaaagggaaagagcctgttagccatctgtatcagctgctacccttggtcaatgcttaacacacacacacagacatgtttacaaacactcaccagaataaatgtaaaaaccagtgctgattttactgagatgataagaatattagtactcaaatcaaaagtatattttaaaaaaacttccagattctagaacttgggtaaattttaagccactcttacaactagttaactgaatatcaaacatatgcatagattacatcaataaaattgcagaggtctcatttattgtaaatattaaaattggatactgttgagtttaataattttaagactcatatatcacagcacaaacccatgcagatgtttgaaaatataaactttcaatcttttatttatgattctactatttgagcatatcatattttggttattgtcattttttgaatatagtcccttaacttcctaagtgggttgaccctaagtgggttgaccatatgaatctggaaaagataaagaacccattgtgaaattagctgtcttttatatttgttgtgtctacccaaaaccaaagtacaaaatttagtcagatattccactattttgtctatacaaggacacccatcgggctgtgaagtctgcctgtatcacattgttcttctcaaaaggaatattttgcttgataagaataaaagattatttttatcttccattttgaaaacactggaatgccatctagtcttttctttgggcattaatttcaactttgtcctggaaaattatgataacatttgattctcagtttattagaccaaattaaaataagtaagaaacaaaactggtttttcctttgaccactttgagtgctccatgcaacctgtaaatctgaaaaactggcataagtattctgctgaggcttgctctgccttgatctgcctagctctgcccttgatatgagaaaaaatatggaagatgccctgtgtcaagttacaaaaattgacatgagaaaggagaggaaattagatctatgttagctatgaagactgaggaaagcaaagtgtgaaattggaaaaggcaaattttctacagcccatctctcttgccaagtcatctgtctgagtgaaagaagacctttaagtgaactcttcgaaggcctacgggcatatttcttagtctgttcctaagaactgctcatctccaaagaaagccaagtgcatgctcagtcgcttcagtcgtgtccaactctttgtgaccctatggaccatagcctgccaggctcctctgtccatgggattttccaggcaagaatactggagtggttgtcatttcctactccaggggatcttcccaacccagggatcaaaactgcatctcttatatctcttgtactagcaggtggattttttaaattaatttattcatcttaattagaagatcattaatttactatattgtgatggtttctgccatacatcaacaagaacaagcacaggtatacatgtgtcccccgcaccccgaatccctctcccacctccctccccatcctctagttgtcctagagcactgactttggggtgcctgctacattca

SEQ ID NO: 42927 - DNA, 707 bp, Bovine  19866880941036
  misc_feature (1)..(1): n is a, c, g, or t
ntgggtgtttttatttgaggtctgctgactcacttgtgttttgaagtgcattctctgtcagttctccaatgtggtctttcagaatgagaggaaattatatttttaaagataaaacttgatatttctgtgagcttgaggtacctcactacctggctgtatggttagtcagtgtttaaatgtcaaggagaagcaatcagcaaaactttctccaatccttattccaggtttgtttttctgccacagaagatttttgcagtatacaatgatgacactctccaaagatctttgagtttgttatggtcaccagtattataaactgcaaaatacttattacccctgctttatcttggtatattttaatcctttgccttttagaatgtaaagaaaataatatcatgatccctttgactgtatactctgcacgaagcactgtgcaggtcactggagtgattgacagatgagattctttggttttcatagatgttatagttgttgctcagttgctaggtcatgtctgtctctttgtgaccccatgggctgcagcacaccaggatcctctgtcctccactatctcctggagtttgctcaaattcattttcattgagtcgtgaagctatccaaccatttcatcctctgctgcccccttctccattttggcttcaatcttcccccagattagggtcttttccaatagtggcacttctcat

SEQ ID NO: 42928 - DNA, 1185 bp, Bovine  19866880975372
  misc_feature (1)..(1): n is a, c, g, or t
nccagatccctgagtacttttgcagctaacaatgcaaactctgaaaaatccccacatggaaatcctagtctcccagtcacccacaccacccactgtagagtgagggccactcagaataaatcagtgctgtaatttccatgatgacagtcccccaaacagcattttgttattgttcccttcacatccctagaattcttcccatgtgctgtcatgtctctagataactgtgcagggagatgaaatgtgagtttaaacgaacttttacgtgtgcctctatattttcttctcggattttattatttttagaggcaagtgatgaaaggctattccctgcaagatttagccagtgaaacgtgctcatcaaaaacccgaagccctgcagtgggacccagaagagagcaaagggggaaaatgttccactggggctgcagcttttcagaagagcgtgcaggaatgatgtcatttgtttttacaaaacccagtttaaatttgttcctgcctttcaagaactgcagcagagtgcatctgtggagacttcctgcatcccatatttcaggacgttagagtgtttgctgcatcaaaatccagccaatcgcggggtgtgcaggcttgccctccccaattttcctttgcctgcccacctgaagcaagcgtgtgctgcccgccttagatcgctgctcagcaccctctagcccttagaacggcagagccatcactccgtgcctcgaatggtttaaaggagaacagtgccccaataaaaacttctttcaggtcacccaaacgcattcatttcattgacaaataagctccaagaaaaggtctgtttgagacgtatgtattgtttgtgtcaaatcttagccctttgtttttgcagcccctgcagcagcattggaaccaacacaggagggttaggggactctcagaggcagaggcaagacctttaaagtcactactcacaattatctttttacagagcacacctccctttgtgagtatacatacatgatggttgaaaaataagcaatgaagcagataaagcattttacagtgatgcggtgatggagggagattatggcattggtgtttacatacaaaaataatggttaagatacagagcaaaaaaggaaagtgctggctagtgagtgtgtcattcctccttcctttatccccttcatctgtaagtat

SEQ ID NO: 42929 - DNA, 2217 bp, Bovine  19866880985633
  misc_feature (1)..(1): n is a, c, g, or t
natgaaatgcctttacatttaattgcatcacagctgattttggaataactacatatttttattgtttccaaaaatattagtgtgctatgaaattaatatctttttattattctttccaaggtgaatactctaaatttattagtttttatttagggatcaattatttgatagtataagtctatttataacccacttcagtattcttgcctggaaaattccatggacagaagtgcctggtgggctgcagttcaaggggttgcaaagagttggacatgactgaggaattcagcacattcataactaacttagaaaagcatctgagtattccactctcctggtgtttataaatcatgttgaatatttttatgtttgggcagtgtttgtatgagacgtgtcttctttccaaggcatactttccccatgtttatttcttacccattgcttgaaatgaagtggaatgaggtacataaggagaaagttgcttcctttccccattcctacctatgccaatagaaagaatagtcagaactaccaacactttggcctttgaggaaggtgtggttggcagaggtaggatgaggtatgcagactgagaaattatcttccttttctcttcttttcctgaacccttccctcatgtgtggggatttacctgcattctctatcaccctttctattacagaattactggatggaagccaatgaaatagagagagggtacaaggttaaaccagcaaaatctgtcctgagccttgagtttttaaagctttattctacttggactagctggaaagggagatgtagtctgtgacttccatcttccatcaccatcataggttgagtggctctagaagtacacttaacttcccattgacaaataggtagagtggatgataaaaatgctttcagtttgcttaggactttatcatttattttattatttttacaatttactcttaataaatttataaagtaagcagaacccagactgttagttcaactttacccatgaggtaactgagctgaaaggattattaagcaagttcacacagtgtgcaaatggcaggagcacatgtaaaaccggtgcaggtctccaagggtgcggactttggattcttctattattaatagatagagctgcttttccactttgcaaccagcaattcacttacctgggtaattgcaggtttgaacttctaggggagcctagtactgacatctatatattctgctcttatatatacatgtgtgtgtatacacatatgtacatatatgtatatatgtatgcatatatatacacatatatacatatgtatatatatgtgtgtgtgtgtatattagcaaaatgactaaaagcagagagttttagaagaagaataaaagccgtattggatggattgagaagaaatacaaagaaaaatcaagggagaaaagaattcccaagtgcttttaatttttctacttgtacctttttctttggtctcttttaagatctcaactctgtttggcagttttactatcagttcttgttttccatatcctgaagtcacacatataattaccttgttgtttgtaaattcactcattcagcatctattgaatcccaactgtatactaaccactgtatttggcctaggaattaaaaaataatttataagtatttcctgcatgcaagaagtatgtgtaacagcatagtaagcaggacacaaaatttagcagagaacatagtccttctattgattacaaataatgatcacatgcaaatgtaaaaaaaaaattaatttttccctccctctgccattgtcctttcccattgctgcttaacctaagaattctgttttcttgagtaaatggtcttttagaaaatgctcttttagagcctattcattctgaacgggctttgcaaaggcacatggttctatttacttattttataaacccagaaagagtatgactttcagtcagagaacttctacaaacactgtttatcctcttagaaaagattctaaacaaggacctacttacttatggcacatggaactatattcaatatcctgtgataaaccattatgaaaaagaatgtgtatatatatacatatatatataacagaatcactttgctatacagtcaaaattaacacagcattgtaaatcaactgcatttcaataaacaaattttaaaaattccatatctttctctgtgtaaacactgtctag

SEQ ID NO: 42930 - DNA, 1163 bp, Bovine  19866881054357
  misc_feature (1)..(1): n is a, c, g, or t
ntatgcacccgtatgtgtgtatacacacacgattccagaataggaagtgaggatatactgtacagaaatctctcttgctgtaccgtggaggcttcccaggtggttcagtggtaaagaatccccctgccaatgaaggagacatggattcattccctgggttgggaagatcccctggaggaggaaatggcaacccactccagtgttcttgcctggagaatcctagggacggaggagcctggtgggctgccgtctatggggtcgcacagagttggacatgactgacgcgatttagcagcagcagcagcagcaatgagttcattttaaatctcattcaatgaaatataattactaaaggaacaaaaggcattttaatctgtgagactgtcttagaaaagtaagtgagaaaggtgaaaagtgactctttcacaaagttggctcttattggcataacagggttttaagttttgaaaagctaattgttgtaatattttgaaattaggaacagctatcctcagtgataagagtcttattagcctagatatctagtggatctcttagaataaatgatattgaggattttgaaaaagctgataacttgatatcaaggtgagaggattaagacttaaaatgggctgttttaaacaacaaagagcaaaatgaagcaacttttgggagtccctccaaagaattaatatattcttaagaagaacgcgcccatatctgcttttttggtggtaacagcatgtataatgaacatgcatgacccttccacagtgaaggtgaacacaggtatcttgcttcagtgacaggctgggtacatcagtgaagaccacaggggtggaggaagctcagtttttgtgcctaaactgagaactttccacttgtcttgagagttctcttgatgggttttacaaactcaagactatttccccttttattatattgtgaccagttcttttgattaacctcttgtgattcaaaacaacctcaggattcccaaaccaggcagtgatagccacaggagaagccaggagttaaagcaacttgtgtaatagaggaagtgtgggtcatgctcagagtaaagtgcttcaaaattcaaaataaaccaacatgaaagagaaaatcatccttgtttcagagactataaataatgcagcaatctt

SEQ ID NO: 42931 - DNA, 1258 bp, Bovine  19866881094607
  misc_feature (1)..(1): n is a, c, g, or t
ncaaacccaattatgctatacttgcttatatctgaacatattggtttatcttacatagagtttaattgatgcaaacttgaacttcagtatgttagattttctgagaaaacaccatgcctgtggatttagattgctgtgtttttctctgaacaaagcaaagaggagccaggcaattacaccttaggtctgttcctttcttctggattcaccagccattacaaaaatagtgtttaacctcttgtcggactacctctggtgtcctttactgtccaattgcaaaatttcttccagagccaacatctgcctccttggacagatcaacatagtgtgcaaagtcggtgttagctgatcaagcgtggctttgtttgcgcttattcacagcgcaaccagcactgcgtaagtggttttgcatattaactaagtgcacagtaaccttcctttccctcctcagagctccaccccctcccaccaggcctcctcgggaaatcaacactgttactcactgaggaagctgccaagaggttgccatggcaactgttctgctttcagcagctacttttctggtttgaaggtgggggggcgggggtgaggaaaaaaacccgaggagaactaggcagctttctgatcatagttcagataaagagggtcacagtcatttgcgggcgccgcctaaaataaccccgcggatttgacagtgacagaaaagaagcaaatagacaaatccaaaaggtaagtccagtggaaggacaatcgtccaggtatttggaagtgatcttaggcggaagcattgccagcagatatcagtgcatctcatccaggatgcagttttatgagtcttttcatttttgtccagagccaaacaaagataatgggttgtattagattataaacagcaagggggtaaaacagccccagaatgggaatgtaacatctgaaagtcattttgtaaaacttcattcagcacgggaacaatgccgcattcaagcagcatgagcgaaggacgcgtggtgcgccaggtcaagccggtgacccctgagctcttctctccccgagtggcttgccaaggttggcctcagaacagtctcctttcaaagaaaggggtgggattagccagggaaaggtgtaaaaagtcaaaaaagggaaagctgggctcacaggattgctggatttcagcgacagacagacagctgtgctgaaaactgctccagacacctggttcctggggtctcagcaactcctcgtgaaatagcccacagtt

SEQ ID NO: 42932 - DNA, 1459 bp, Bovine  19866881141386
  misc_feature (1)..(1): n is a, c, g, or t
ntactcttgcctggaaaatcccatgggacagaggagcctggtaggctgtagtccatggggtcgctaagagtcggacatgactgagcgacttcgctttcacttttcactttcatgcactggaggaggcaatggcaacccactccagtgttcttgcctggagaatcccagggacaagggagcctggtgggctgcagcctacggggtcgcacagagtcggatacgactgaagtgacttagcagcagcaactgtatctgtatatttgcatattatttgtactttgatttttgagttaatagacagtgtcacacctttgtattttgcatcaatcgctgcatatttgtagtatataaggaattctttagtctcaggaactaagtagtataatataggggaataaatatatggttgaatattgtattttaactcactgagagagaaaaattagacagaatcataatattttcattctcacattatgcctggtacttttatgtctgcgtattaagatgataggtgctatagaaagggcaaataaatacaacataggaagtctgtttagttattttagagctgttatattgaaatactgtcttgtttacaattttcaactccacaaatcctcatcaattattaaatatttttctcattgaattaagcaagttgactgtattttctcaggaaaaacatcaggtaagacacaaggcttactcttaacatattaaaatgttcccatatgaatgaaattctatagctctattacacttctcagcccacccccacactaacagaaagtatacattctatttgctacataaaaggaaaaagaatttaaatttcattatttctttgaggctgaaagcagttctttcctactgcagtgacaaaataaacaagatattttctagaactgagccactgtgtatcaggcatcatgtgtgggaactgtcctggatgactcctgggtggttacagtgaagacaagtatagacaaaagtcagggagagaatgggacagtcacatcttacagtggaaaatgctatgtggtccttcatcagacacttgacaatttttaatttggggtgattatatatcatctatctgtttatccaaattactcatcaaaaaagtttggttgagtactattgtacaaagatacaatttgctattagcatccttcttcatttcattttgagttatgttcattgtttatatggcttcttgcctgctagaactgctatccacatgcatgagttcgctgggcagccgcctagacaagaaacatatggccaagtcggctgcgaaaatcgagacacacaccattcgtaattctatctctttgtgtgtgtgttgacttgtgtccattcatgcacgtctacatttaggatctgtatctcttacaatcgtgtgctaataaaaatatttatatcattccaccccaacaatacttataaataccac

SEQ ID NO: 42933 - DNA, 3961 bp, Bovine  19866881178022
  misc_feature (1)..(1): n is a, c, g, or t
ngcttgagtcatcaggatagagttggttaggaatggtgattgaggtctcacttctctatatatcccaaaacctgggtcctaccggcaacggagttttaggttttctcaacgtcaagtcagatgacagagatgaggaagatggggttgtaaatgagaggtgggtgtctctgaaggacttggtcttagaagccagccttgcactcagtcccatggtgcatttccttcctgagagcaggaaaaggggaagcatggtatgtttctgtagtggttaatacatgcttactgtgttgatcatctctcctgtgattccctacagttgctaggctattttagagttgactttacttatggaataaagagtgcttagaacaaaataataaaatgtccctgtgtgtgcatgtgagcccaggctgtgttgcatgtatgcatgcacactcacacatacccttaaatatatatttaagagtgagaaaacagtagcagagtgcttcccaggtggcccaggtgaagaacctgcctgtactgtgggagatgtgggtccagcccctaggtcgggaagacctcctgtagaaggaaatggcaaccctgcagaaggaaatggcaacccactccagtattcttgcttggagaatcccatggacagaggagcctgacgggctacagcccatgggtcttaacgagtcggacatgacttagtgactaaccaacaacaatcactgctgtaaaacaaacaaacaaacaaaataacaacaacaatacaaaaactcagttaattttagcgtttccagcctttcagtatatagaaaatacctcgtgaataagagtaagtgggtgtgtgttgctggcttttgtatcttgcagtggtgcttatgatgggtttgtcacatgaggcaagaaagaacaatttcaaagtttaacaaggcattcctcctggttgaatctttgctgccactcttggcattattaaatttatgtatgcaatagtgaataatggtatctggagttgtagcctgccacatgtttttaggaaaatatttgaagaaatgcattctgctttactttataaatgaaatgatgttttgttgtcaagattttccctcacactgtgtttccccctcaacttttatacttttttatttgggctgtttggcttatttattttgttttgttaagagtttattctctggacaggtgtggattggcatgtgccttttaaagacttttgtttgttggggagctagacatataccaaaggagcttctgtgtagccgcctttcaaacaaagcttcctaatttcagtgtcattgagtcagcagctggtgcagctgaattcagaggaacaaacatacttattgagtgttttctctaaaaaacagcctgaacaaagcatttccttaagcaatgctgagcaggatctggaacttcctattcctcaaaaaagtctcagaaaggtttgcggaagtgtagaggtcaacatgactgcctataatacgtctcctctacacccaatctgtggtaattgactccttttaaaaatctcgtcttttaaagtcgtaagatcagtatttgtaaataaaaagcaaacagaaaaacaaggaaacctactttaccaaaaaaaaaaaaaaaaaataggaataatcagttattggtaataatcagtaaataccatggtcatatcagctagatcattgttagtaatgccagagaagtgcatgacacatatgctggttaatttaaggagaatatttaaaacattgtagcttatactatggtgtgatattttcacatatgattgatttattttcttgcagatagttaaggtgattaattgtctacataatttatatttcttctataaagatctttgaaatggtagaaattaggagttaggcaagaatccattcatgcatttaaaaaaaataagcattctttcattttatataaaaatcatactttcagtctttttttttttttttttttttagggagtactctcatataccagacactctattagtacttacaggtagaaaatggtattataatatgcaaagagttaagtaataataaaggtaaaataataaatgtaaaatataatttgggggacaaggtaagtggcgtagatatgctttcatccattttatttccagataaacttctatttcaaggtaaaagttttttttagcaagaacttaagagttcataaggaggagccagacatcctggagtgtgaagtcaagtgggccttaggaaatattactactaacaaagctagtagacgtgatggaatttcagctgagctctttcaagttgtaaaagatgatattgttaaagtgctttagtcaatagcaaatttggaaaactcagcagtggccacaggactggaaaagatcagttttcattcaatcccgaagaaaggcaatgccaaagaatgttcaaactgccgtacaattgtgctcttttcacattctagcaaggtaatgctcaaaagcttttaaggcaggcttcaacaatacctgaaccaagaacttccagatgtacaagctggatttagaaaaggcagagaaaccagagatcaaattaccaacatctgttggatcatagaaaaagcaaggaattccagaaaaacatctatttctgcttcattgactacagtaaagcctttgtggatcacaaaaacctgtgggaaattcttatagagatgagaataccagactacctcacctgtctcctgaacaacctgtatgcaggagaagaagcaacagttagcactggacatgaaacaacagactggttcaaaatggggaaagaagtacgtcaaggcagtatatcgtcaccctacatatttaacttatatgcagagtacatcatgagaaatgccagacagtgaatcgcaaggtcgaatgaagattgccagaagaaatacccagcaacttcagatatgcagatgatactacccgaatggcagaaaacaagaagaaactacagaacctgttgatgagggtgaaaggagccagtgaaaaaaaagctgtcttaaaactcagcattccaaaaactaagatcatggcatccagtcccatcacttcatggcaaatagatggggaaaaagtggaaacgatggcagattttattttctttggctccaaaattactgcagactgtgactgcagccatgaaattaaaagatgcttgctccttggaaggaaagctatgacaaacctagagagcgtattaaaaagcagagataacactttgccagcaaaggtccatagagtcaatgctatggttttttcagtagtcatgtgtggatgtgaagagctggaccataaagaaggctgagtgccgaaaaattgatgctttcagaaactttggagtgggtaacctttcccttctccaggagatcttcccaacccagggacagaacccaggtctcccacattgaaggcgggttgttgaccagctaagccacaagggaagcccaagaatactggagtgggtagcctatcccttctccaggggatcttctcaacccaggaattgaactggggtctcctgcattgcaggctgattctttaccaattgagctactagagaagccccctttggatagcaaggagctcaaaccagtcaatcctaaaggaaattaacctgaatattcattagaaggactgatgctgaagctccaatactttggccacctgatacgaagagctggactcattggaagagaccctgatgctgggaaagattgagggcaggagaagggacaacgggataatggcaccactgactcaatggacatgagtgagcaaactctgggaaatagtgaatgacagggaagcctggcatgcttcaatctatgggggttgaaaagagttggacataatttagctactgaaaaacaacaatgaggtttgaatactgcccctattttctgtactttgtatctaaggtcaatagac

SEQ ID NO: 42934 - DNA, 1209 bp, Bovine  19866881222020
  misc_feature (1)..(1): n is a, c, g, or t
ncttctaaaatttgatggttagtgcagttgccactctgaaactacttagcctgttccatcactgtgtgaattattctgtctgtaatgacatttataactgactgttcttcatttagaatctcttgttatatctttgtttattagcttctgtgggagagagacatgtctttaattttcatggttattttcctgaactatgccccaaatgaccccccaattttttttttttaaaggaattcaacacttctttggatgtactataaaaaaaaaagaccaagttttctaaacctttgcattaacataaggaaaaccttgcagcaggctgtctcatcttgttaaggccacctggctctataatacctaactaaagtgattgagagagtgaaagccttgaaggcagtgttcatgtttgtaggcagtacatagataatacttgccacacgctacatagtcggcatatatttatagaatgaactttatagaatgaacaaatgatcctacaatagagcgcgttttactaattcacagtcacctgtgtgcccatgtgttttctgatgattcctttgtgatgttttggttggagctggtggagaggtgtcacgtcgtcatggctgcgagacggcagtgctgtttggatgttgctggtgactgtgacagaggggagaggaattgaggggcaatgggagcagagtgttagtgcttttctgtctttttggagcaagttcctgcaccccttttagtggaaccatcttaaatcagtgaactgcattatttcattagcccggtatccagagagtcatacgggagctcttcctctgggcataaatcttgtgtccatagggcactgaagcagttaatctaaatgctctgttttagaatcaaagtgagtgcagacctagcactgagttatgatactgggatgtcagaggctcctactttccttctagaatagtctcttaactagcatgtattcaatgaaaagggaagtaaaaaagctctataagggaacatgataaacattaaaagaaaatttggtaatctcatacaaaagatcaccttttccactgcatgaaataccttgtgcttctttttttaattttgaaatctgtttgagcattcatcactaaagcttgccgtggttgcagaacatgctttgtagaggcccttagtcagctttggttgattaggggtagtggtgattaattctta

SEQ ID NO: 42935 - DNA, 1504 bp, Bovine  19866881273615
  misc_feature (1)..(1): n is a, c, g, or t
nctgtaaagcaactatatttcagtaaaaattaaaaaagaaaaaggggctcctagccatctcctaaaagatcctacgtgacctgcttcactcccccggctgaactcattttctctcatgtctcttgctccacttccactggccttcttgaaaaaagggttcccagcacactgcatgcccctggcactcatggatcctctggagccctcttctcaacagtgtctcccttgttgatgcagggtttcagttctgtctcactctatcagacaagccttctatgaacaccccatctaagtagagacgtcttttactctctggaacctctctggcctcttatcttttcttttcctgatagaaaatctcaacttcactccatagaaaatctcgacttcaatccagtgtcactgtgagagtaagtctgcaaaatagttgaagaccttggctgaggaattatgagaagaatgtaacagagcaaattctggatattctgggccagaaatatttttgaataattaataaaagttttgcacctctgtgacctttttatcattcattcctccttaattttgccttcttagaacctctcccaaagcatgtggaaatgagaaagtctgtttttatgtgagaaacatcaaattttgaaggttaaattttatgcctatttggcctctataggaaaatgtaaaaaggactctccctttttttattagcctctgtataattttatgtcattattcatatatagaatgtgattttctattgtgaatagaggttgtggagtacataatttaattaaatttactttgagtttatgcttttccaaaaccagatataaagtcagtgttactcttaaaactcctgaggagtcttaagattcatgggagagatccattaacaccttttcaaatttgaaggtcaagagaaaatgccagtcgagttattattgtattattgagaagttctttatgacagctaaaatatctaagaaaagtagcaactaaatgatatatagcaaggatttattaactagatacacatctgtttgtggaaaaaaaatacccagaacaggaaaggatatatatcaaacaatgattttgtatcaactaagctgctgtatgttttatcctaggccacctgactttttctgggacacaggctaaggtgtaagagtacttcaggggagaagtgaattaacacaggactattggtagttattcctggttaacagcctagcaaacttttctttgcttttggccatgtggaatctcaagttacccaaccaaggattgaaccgaaggcactcagcaataagagtgcagagtcctagccactgaactgccagggaattcccaaactttttccttttttaatctttgcctctatccacatatcacacagtaaactgtgatagggaaatgtttgggggagaatatgtcagcagcatatcactgagtatgaagtagtcatttttttcccaactttattacctatgttacataatcatgc

SEQ ID NO: 42936 - DNA, 1675 bp, Bovine  19866881298614
  misc_feature (1)..(1): n is a, c, g, or t
nttgaccaagatagggtgaaaaatatcatgctagcatcacatgtctcatattagggaatgatacagtggagctgccctggaggccaccaggcaccctgcccagagacggggctggaggcatggaccactggcggaccgaaagaacacatggctgccctgccttggcaggtcctgtgagaaggtgaaacaaaagtggacaccatccatatggagaactccacgtgactgagggcatgagcagtaggagctagcccgagtcagatcaaactgtcgagtgcctctcatgaccatcttctctcccctctcacccctcattcccacctattaggtggagggaagggtgcagaaaccaacactgccctcctcctcatttcttgagacacattccaaggagaggaataagatgaagttaaaaaaaaaaaaaaaaatcttttttttaacgattcacttccctccaagagaagcacttacagttggatatgaggttgaagtatgaactggactgtaaatttttactctttgagtaaccaaaagtagtgactatactaagttataacttattatagttacattataactatatattatattataactatagtaagttatagaaaacattggagatgagatgtcaattaaaggatacaaaggggaaatcaacagactcaggaaaaaatgtaaaataaaatatcaggtttatatataccaaattcagattgttcagtaaacatgataggaaatctcagtcatcaaaaagtaaaaccatctaagataataactggctagagtggaattgacacctaataagaccacatattaatgacaacatttatttaagctattccataatattcaattgcagaaggaaatggcaacccactccagtattcttgcctggagaacctcatgcacggaggagactgtgggctagaatccacaagatcacaaagagccggacatgactgaagcgacttagcacgcacgcataatactcaatagatgaatcattctgttgccaaccacctctatcttcagcaagttttattaaatgctagtcacaataactattgaaatagatgttcaccaaatatgagaacatggcttaaacattttaaaatttttttcaatttaatgtattatagaatgatgtaaacatcagtgaaattctttcagagttttatgtcttactgggatgattacatggttttcaaatactataaagtcttaagcaactacattagagctcatgaaaaatctcacttaagtacatagactcatgattctgaaactataattgaaaactatagtttttaacttctaaaaaactaatcatacatggtaaaaaaaattgccttttgtaacatttcaactgaaatctcattcttggaaaaaaaaagtgaaaatattcaattgtgcagccaaaattaccaaatttctacacgtctccccttttgtaaaaacattctatcggcttactagatatactgctcatgactataaatgcaggcatacctaacacttcacacatatcctaatcagagtgagatttttgttggcccatcagctttaaactgcatgccaacaatcaagaaaaatcttggaagttctaagtcctggttgtaaaaacagaagataaactctgaatcacagactgttagcccggaagaaaatgcca

SEQ ID NO: 42937 - DNA, 1048 bp, Bovine  19866881519681
  misc_feature (1)..(1): n is a, c, g, or t
natttacagttaacaaggcagcttgttaggtagaaagtagaaatgtgtcgatcacaatttaactctgattctctctctgaaagagagaaaataaaaacatggaaaggggactcactacccaggctttgcttagtaggactgaggttgaggcatttgtagagttggggcatgggtgtcttgtattttgcatctgtgctattttttcaatattacagtacaatttaatctattgatatgatattatgcctaggtgacatttagttgttctatgtcccatgacacagaaggcaatggcaacctactccagtactcttgcctggaaaatcccatgggcggaggagcctggtaagctgcagtccatggggtcgctaagagtcagacatgactaagtgacttcattttcactttcactttttactttcatgcattggagaaggaaatggcaacccactccagtgttcttgcctggagaatcccagggacgggggagcctggtgggctgccatctctggggttgcacagagtcggacacaactgaagtgacttaggagcatcagcagcagcagcagcagcatgtccaatgaattaatttactattcaaaacaatatcaatcatttttagcttatttacaagtcaaatggctttttaagaaaagaatagagcaacaaatttacttgaaaataaaagttgggatgatgtcaaattctgagtgggtctgactgtgctctgagcactgggcattttctgaggattgatgaccagtttgaaggagttgatggtccttggatgaagctcgggccattaactccaaccagtcattaattgcctggaaatgtcctgggctgaggtcattattgctattataaactgaattaatgccctatgcttcagccaataagattatttaaattatctttattctccattcagtttataattataaaaatgtaccacaggcaatcagaccagacaatagattaatcacatgcagaattatattttaaagaattgtttttattcatacagctacccaaagcacgggagaag

SEQ ID NO: 42938 - DNA, 859 bp, Bovine  19866881595568
  misc_feature (1)..(1): n is a, c, g, or t
nttgcccagaggccaggaatacagcattttatcagagccctgctcagtggagtggaggacgcatatccagatggcagagtcacctgcttccaggcaatgcatagaagcaattattgctctttggcttcagtccagagcaaaaataaagagtttaatatattaggtccaatcactatatcccagttgatccaggaagttttagataaatcatataatttttttaagaaagggtttcattttgaactatgatggtaaaaaataccatcaatacttttaataataatcttactacattattattttgaaatctggcaattcttcaaaaaaaacccctctaaatcagtgttctctaatcatagtttagaatatgtctttgtgtcaataaagacaccaaaaatgcaaacaagagactgatctataagacaaataactgttgttagcatgggtatgtccacatttggaaaataggtcatttcacctgagccaagattcatgctccttctcagtcatatctgactttttgtgatcccatggattgcaacctgccaggctcctctgtccatgggattttccaggcaaaaatactgtagtaggttgccatttcctcctccaggggatctggccagggattgaacctgcgtctcctgcattggcaggcagattctttaccactgagccaagagccaaggttacatgagaataattcgacatttgtatagctataatccctgtcttactaagttaattaatgacaagtgaatggaagtttttcttaacagaaaattatttctattagacttacaaccatcaattgcttattgcttcccacataaagtataattctttaacataattaatg

SEQ ID NO: 42939 - DNA, 998 bp, Bovine  19866881605350
  misc_feature (1)..(1): n is a, c, g, or t
ngagattagctctggaaacttgaatagatttaggtacacagtgttttggctgaagtacttagggaaactgtgggctatgtgttatatcttatcagaaggactaatgtttctcgttttctgttttcaattgggtagccagaaccctccactggaaatttccaattgaagtttcatctaatggtttcatccactgataattgttgcttggatcaattattttcttaagggttgcaaaatgtagtttctattaatatcttcttaccatatattttagctgtagttcaacttgaaaaataactttctcacatcatttaggactatttggttaccctgaaatacagtttatgcagaaaaacaagacaaataactatttctttatcacctaattgctagttttctgaatagtaacaagtgctgctaaatccactgttagtcttaacttttccctccagttccattgacaaagcccagttgcactattgccataacgtcaataggagtttctttctctaaattgttctttcactctccattttttttttaaactactcaaatggtgcttctaaaatttgcaatagattcaaaagaagcctgaaccttatgttcagaagaaagatcacagtcctttgctaagacttttggaactccaatgattgctcatggacctgcctttctactttctttctttttgtgtactgaagtgaaagttgcacagtcgtgtccgactctttgtgacccaggccagaatactagagtggggtagcctttcccttctcccaggggatcttcccaacccaaggactgaagccaggtctctcacattgcagcaggtttctttaccagttgagccacaagggaagcccaagaaatactggagtgggtagcctatcccttctctagtagaccttcccaactcaggaactgaaccatggtctcctgcattgcaggtggattcttttaccaactgagctatcaggggaaggccctttctttttcta

SEQ ID NO: 42940 - DNA, 1224 bp, Bovine  19866881916653
  misc_feature (1)..(1): n is a, c, g, or t
ncttgatagaattttgatttgttttgttcactgataagtctgcaactcctaggacagtgcctagcatatggtagacagttaacaagtatttgttgaataagtaacagcatgactagaatacactaattaatattcttgaaagtgaaagtgttagtttctcagtcgtgtctgtttgcaggactatagcctgccaggctcctctgtccatgggattctccaggcaagaatactggagtgggttgccattcccttctccaggggaatcttcctgacttagagatcgaacctgggtctcctgcattactggtggattctttaccttctgagccaccagggaagccatcataatgcactaattatctaagaattcagtacacaaaacaacagaattatgttaaaccattctttctcttcttattatttcaaaaatacacccagaccttatactacgtcaaagggacagcatggtaaacatcatgtttgttatatagacttttttttttaaggaataactgtcattttagtgagctcattaaaaattcacaagtattacatttcatgagcaatgttaagtaattgaattttcttctggctacgccccagccttcagcaattctcagcaccttaggactgacctggcttgggtctgtcagagtctaaaaccataaactgtgtcagagttgggatcatgtcaaagtcagatggtgcccaagcagcttagcatatcactgtcagatgccagaatgagggtttgctgagtcatcctggcacctccagggagcagggaaatattatacaaactctctggcccccagtcatccctggggcaaatcaaacttgggcaaattaattaagttttatgtccattcagtcattcattaaatatttacttactgtctactatattcccaatggaaggctgagtattaaggctttctgtataagctccctactaacaaccaaagttcatcagtggttactatgtacttagacttctgcaagaattttacatgatacctcatttaacctcacagcaaccctccaagatgctactctgttgacccattttacagataatgacaggaaggcatatgaggttatatagtttgcccatggccacagtaagagatggcaggcttttatccacattgactaactgctgagcctacagtcttaatctcagcagtaatggactctgccctccctagatataaacacatacat

SEQ ID NO: 42941 - DNA, 1703 bp, Bovine  19866880437220
  misc_feature (1)..(1): n is a, c, g, or t
nctggaaggtcccggttcctattttatctaacattgaagcagaacttacaaggctgaggggagaggcaaaaagagggaggaagaccagcatgtcagacgagatgtcctcatacctgccggtcccacccaccatcattactgccagacactgaactgaggacaggagcctgcctacagcagggcatcccaagtcctgccaaaggaacacacgtccaagagctgctatggaagagggttgttcagatcaagcccagcgcttctggtccaaaatctggccactttacccaacaaccagccccagcctctacctgagggctatgtattcacatgccaatgatctcccgcagcccctatgtctactggagtctggccagtacagcctctgttcccagagcctgccgtccccacccgctctggtgtctgcttctgtctacccccgtctctgctcacctctccagagaagggccagggtacgtgagagtcagaggagccaccagggtggctataaccgacccttccctatttacatgccttgagaaagcctgactgtaccagactggtgccttaatcattttgagaagaggcacattctcctgtaaaattaagccataaaagttccctttgtacttttattcttgttcaaagttaagccattttccactaaagataaaaacaaggcatttctgagcagggagaactgtggctgtctaataagctgggattgatggtcctgataaagctgactgcatcgatccctgcacacagaggtggtatggggacaggagcctcccaccagagctccccaggacggttttgagctgttcatgaggcaagtttatgtcaagagctttagtgatgccattacctgcgagaggcagagaggcagtaccagactaagagaggccaagtcaggcacctgggaactgggtatcagccagggcagcagccagacccctccacagtggagggatggattcttcctgtgactcaggcaaatctatgagctcccagtgcatcaaagcatgactcgtggaggctgattgaccccttccagtgtgaagatcaaagtagaatgtgagctgggggctgctggccagtgtgtatggggaactgggtctaactacgcctgggttctgggagtgcaggagggacccacctagaccaagcagagagaagataacacgcccctgaatacccacttccctgagtgtccccagcccctcctttctcctagatagcgtcgagggtctcccctatactgcggtcagcacacgatggttcagctgtactgttgacctcctaaggatggcaccctgggatcagcagtgtcttcttatcccttcacggccatctgtgtcctcaccctggcctccaccctcccacctgcacccacaggacttgtttgatcctcctctgacttcacttggttacacttctggcttcttccagaacttttcagattagacaggttcccagcctgccagcattcagtctgctggacttaatgagacccaaggatgagagcagtgtgggggttctcactgggcacgcatgcaatcaagacttccactcctggtggctggcatctctatctctgtaacctctggagctcagagactgcaccgtgcttgctacccctactgcccagggactccatacagaatatcttaagtaacaacattaataatttccacctactgagt

SEQ ID NO: 42942 - DNA, 2291 bp, Bovine  19866880522721
  misc_feature (1)..(1): n is a, c, g, or t
ntccttcctatgtgccgagtacagtcctctatctgaacatccccatggaaatctagcagtgatttaataacacgtcataaggctaattccatagcaaataggattaaaatgctatgttgctggctccaagtgctgtcctctttctagtaccctaggctcctgccaggaggtgtgccaactgcctcctgccctttcctcactcctaatgggctgcctgtctggcaagacccaagattggacaccaagggacacgcagggctcagcccacctgggtctgtcccagagcctgggcatgggcaggctgggaagatgggaggcggggcagttggaaatcaagtcctagggaagtgctgtggttggaagtgggtgaatgcggcccacttaggccactgtctgggaggaggggaggtgtcatactgtgttgcctgagcagctatggaaaacacgatgaacgtgctgccctgttctgctgctgtggggtcatatgcggttatgaagatgcaggggaattggatgttcagccaggcccagggacacccagcaacaaattgatgccagccacttacacagctcttggtcatccacttcctggaaagatggagttctaggcaaggagtgggtctcaagctataatctttgtatatggagctttctctggggattggggaggactgatggagaacactggggaagaaggaagaccctgaacagatgagaaagaatggggcttctgaggtcattagacctggcttgaactgaacgccaactcataacttcagggtgttggacaaactgatcaaacttcagagctggattttcccaagggcctgttgtgaagattaaatgcaccgtgtgtgaagcaggtgaccctcttcatgttgctgggcataataaatactgttttcacctccgtttttctccacaaagctgagctgtgttggccatcctggggaattccaaggaagacccggggaggggaccggcccctcctgcctctctctagggtcagctcaccctggaagggtgaacgtcgtcatcatgctaacagtgcattttctccctcacagaggagctgaaggagaagctgacagagtacgtggacaaggtgaacggccagaagccaggcttcatcaaggtcgtgcggcacagcaagcaggaaggcctcatccgctccagggtcagcggctggagggccgccactgcccctgtagtggctctctttgatgcccacgtggagttcaatgtgggctggtaagtgcccgttgggagctgaggaagttgagtcccagtgtggtccagggtgcaaagcccactgggatctctgtcatgatggggaaaggagtcagcatctgggtgtgcaggtgcccaggcaccatgctggcccttcagggtgggaaagggtcagggatcaacaggtcaaaacacagtgtctcaagggttggtggcataagggccgacgtggtcctctaggagacatgatgggggagaagagtaaatgcctggggcagagcgagagttccagcccaaccaaggaccaggctgcaacccccgggaaaggggagctggaccagacatgaattgaagcccagcccacagacagggccaagaccaagagagcaaagggagctaagtaccctgggctccctccagattccagatcagaggtagcagaaaatctcagattcattccactggtaaaactaggtcttagagcacctttctttctctggccagggctgctcaggtgctgagtggggcaaagcctcagtggcttcagccaagaagagacaaggtacctgatgctgacatccctgcaggccaaagggcatgctgtgtggtccactgggtgtggctctgcagagagcctgggggtgggggggcctgggtgctggggatggccaagtgtaccgccctcttagccactatgcctggtagcattggggtctgctgtccctcttgaactctgagcaccaccctctgcctccccagagtagagtgaggagggtcctttggcaggagggaacagcaggcatgcacacagcatactttgacataacaggtccgaattaaggctgcaacgcagtcattttttatagctgaagtccctgcttgccatttgtgactgtttaaaaagcattttcattggatttatggccaggagaagagagggacacttactatttcaagcagatttgaataaacaattatgcaacaaatgcattattaatgagaagcttatcattcctgtctgcaaacattttgctcgcctggtacccaggggggctcgggct

SEQ ID NO: 42943 - DNA, 959 bp, Bovine  19866880626084
  misc_feature (1)..(1): n is a, c, g, or t
nttggtgtgtctcatcctgaatttgcaggaaccacagtgtgggcattgagtcaacaacctcctgcagtatttccgtgagctgactttcttaaaagttgaagggtgctgcctttcttccccaattaaagaaccagactatcccaatgatggggatcacatttgtgaacatggtgagtttgttttgtcattttctcatccaaaaataaaagtcatcttaaaatgccaatgaagtagcacacacaattattacagaaggtctgcttaaactttaaaagtaattgacttgaaaaagaaagtatctctttttagtcttttctacttctacactttccataacctttactcttttttgctgtaaaaagaatcaattttctttttttggccgcaccaggtcttagctgcagtgtgcaggctcttagctgtatcacatggcatctagtttcctgaccagggattgaacctgggccccctgcattgggagtgtggtgttttaaccattggactcccaggggagtccttgaaattttggaaaaatacaaaacaccataaagaaaaaagataaaagaagtcagtaatctcattgcccaggaaaaataaccaaaacctttttctatgtactccatacgtatttctttcattttatgtatttctttcacttttatgtatttctttcaccagagagaaatatatttatttatattggtatatgtatattcatagatacatgtattacataaatatatgatatatatatatatcataagaggggggaaatacatatacaaagaatgtttttaccaagttgggaatgtgccgggtacatttttaagcctgccttttttacttagcactgtatcataagcagtttccaagggctgaagtttttcttccaaattgcctgaagagctggctcatcaacaaactgataaatttacaagctgatgtcaaacataactaat

SEQ ID NO: 42944 - DNA, 1271 bp, Bovine  19866880632413
  misc_feature (1)..(1): n is a, c, g, or t
nattgccatgatcttaaatttccgccagagcatttcagttgacacctgtactccctgcattgtgattcttgcaaaagacttaattatcttgaggtgccccccaaccgtaaactaaggatggagccaagaatcacctacttctgattccactatggcttttctctacataaaaaaaaagaaaagaaaagaaaacttagcacagaacctgtatttcactctcagaggcattttcaaatcaaaagtcacttactggtctgctgctgggtgggtaggatttctctctacacctgtagataatttgttgaccttgaaattctccagtgtgatgcagtcaaatcattccagtaccataaagggacaataattattattcccaggtggctttgcaattaatggatttttactaagtaaatgtccacatgagtttcattcaatggaactgcaaacagaaaccaatgagcactgtctccactacggtggttcaccaatgagaggtaccagactgtgagcaatgaaatatttaaaccccttcaagattagataggtagatagatatatatatatttttttcatctcaagtctaaatgtatttataaaaccatattttaattttctttgtgttgctttctcaaacagatctttctgagcttaagaaattcctccctccacccctagtcttgcatgaccccatcaagcaggcatctgcaataggctaattcctactgcttgatagacactaattattatctatttgtttgaactgtgaaaggtaaaaagcctggcaaagtcaggcccccctggtcaaagacagactgaaggctccctatagtcaccactgcccaaaacactgacatctctagtgcaaggcaggctggtggctgagtatttcttggactctttctacctgccggacactgtgctaagcactttacctgggctgtctcatttaatcctcatgacaacccccatcaggtagatcctatgattgctgctgctgctgctgctaaatcacttcagtcatgtccgactctgtgtgaccccctagatggcagcccaccaggctcccccgtccctgggattctccaggcaagaacactggagtgggttgccatttccttctccaatgcaggaaagtgaaaagtgaaagtgaagtcgctcagtcgtatccgactcccagcgatgccatggactgcagcccaccaggctcctccatccatgggattttccaggcaagagtactggagtggggtccattgccgtctccgaagagt

SEQ ID NO: 42945 - DNA, 1458 bp, Bovine  19866880646068
  misc_feature (1)..(1): n is a, c, g, or t
nagttcctgcataagatcaaaccagatatcagcaagatcaggaaatggagatcttccccagagtcaagattctctgggaagacaagagttctaagtcatcatcatgtcctgtgtagagtccgccacccatgcctgcaggcaccaaagagtaatatcgaaatgagtgtgtgactctccacgtctaaatgaatgtgttgagatcactagagtgaaaaactgcttaaattagtaactgcgtcagttattattttcatcaaagctctctcctcagtcttatgataattatcattgtcactccatctccacccactcaattttgcaattcattatgtgccaggctagatgttacatgcatcatgtatgccatcttatttcatcctgaaaacaccttatcattttatagatgtggaaacatctataaaggatcagaagttggtttgttctgctcaagatcacacagccaataattgatggggttagaatccaaacccagattctgtgtggtacaaatcctcttctcactacagtatgtcgccttctttccctctgactacagaaattgcattgagagatggagtagaagtagagatggtagtcattttttaagttttcaggcagaaggaactcctcctaatggcatttccataattagaatgcatttttttctgatagttataattcaggcaattgcagtgacattcagctgaaacctggcatgcaagatgttcatttctcttaaaagttcacttttaattggcctcagttctttccaactctggaagaaatacagaatgtatacttctgacgtttccaacattgaaggctgtttgacataaggactcaatccctgaagtttatgctgaattccctagtaagagagggagaacttgatgaaaggcagacaaagaggaaaggaggaagggagaagaggaggtgcttggtcagagcacactatccccaaagcgattctagaatctggaatacattctttaaactatgtggagtaggaaaataccctgcaaaggagaccgcactctctcactccccacagacctctagggatgtgtgggctgcagcgagaatgaccctagtttaacagtttgaacagtccgtactgggtcttcttccaccatgataaagtatgtaccttcaagagaagctgagctgtgttcagtcaagtgagagaagaattaaataagactcttctagaattctcagtgcttttctgagattaaggaatagcccacattccaaagagctctgctgctactgctgagtcgcttcggtcgtgtcggactgtgtgcgaccccatggactgcagcctaccaggcttctccgtccatgggactctccaggcaagaacactggagtgggttgccatttccttctccaatgcatgaaagtggaaagtgaaagtgaagtcgctcagtcgtgtctgactcttagcgaccccataga

SEQ ID NO: 42946 - DNA, 1521 bp, Bovine  19866880695588
  misc_feature (1)..(1): n is a, c, g, or t
ntcgtgaccctacatgaaatatttaaccactcagagtctcaaattcttgatctatgaaatgggataataatctctcctgatatggtcattgtgaaacttaaatgagtttcacaatgtggattcttggtgtggcagagcaggtgcctgcatagagtagctgaatatgtcactggatgttaatgcctcctcctgcccacgctggcctgtcctctaactgcatctggctaaagcagcatcttgtagttcatgtctttggagaaaaccattggaatcatatgatgtgccatcatttagatttttctcttagttattccaaacccaagccatgaaaccagagtgaggctttacctggaacccacagcctggtgagcagcaacctggccaaagaccccagaatcactgccctggccccaggttacatgcagtcacggcaggaggagtgtggtgttagagaagggcagcatgtacttacctacccaggctctcatacatgccaggtatcctggccttccagaaagaaagagaaaacagatagccagatggttcaaaagaaaagcctgaagtcctgactatctcttctttccgggtgatactgggttagttgctgcacatgctctgaaccatagtgcccacttctgtgaaatggaggtcaggtcactcctcccagtgttattctcagtaaactgatattgttttcaatatttgagactgatattacatttccattatgctggtaacttattttctctaggatatttgatgacttacacaaggacccttaattccctgcgagattcatcttcccgtcttcttttctttctctttccattcctttcctcccttccatcatctcatagcatctgctatttgccggacacattgtgctggctgctaggaaggacgtgaggaactcgtgatctcatagaagataacacagggcatgagttccaaagggtgagaagtacattcaactttcgcctgagaaaatttgaggttatcttaccaaatgagacttggattctggaaagagaagagactgggcccagggtctgccatctctcatctagcctcttcatctacccctgcttaggctggagaggcgagagggatggtcttgcctcagatgatcaggaaaagctttagtggagtaagtccttgaactgggccttgaaggctgttgagaattttggaaggcaaagctgtgggatagagagggcatgcagacacagcttgagccagaggtgtggcagcctaaaagcagaggctgattcacgcctagcaaatggctctggagtagaggagcagtactttgacggtcccctccccacccccacacagactctgcatgactgttcagtgcctcacggatgcagtgaattggcttccaccctctaatgccctgccaggaattaattgtattcatgataatgagcttagaccctggacaccaggctggcttaaataaacctctcttaaatggggatttatgatgcgttttgtagaatagtagcagtaactcga

SEQ ID NO: 42947 - DNA, 794 bp, Bovine  19866880732148
  misc_feature (1)..(1): n is a, c, g, or t
nagaggagtctggcaagctacagtcactggggtggcaaagagtcagacactactgagagtgcacacacacacacacacacagaataccttggcccctgcaaaagtccccactgaagccatttctaaatctcacctagataaggtgcctgtatgtgaaatccatgtcagacacgattctggaaaaccttagtcattgccctttcatgggtcttggcctcatttgccagaactgctttagaaaaatgttgaaagtggagaacaataactccctgttaacagacattactgttcaccagatttcagttcacacgtctgatgatgatctgcattgctgcacaaattttgacaaattttagagtcactgtagcagagtcaggactggacagggcctcatttgtcaggctaacatcaagcaaggaaaaatgaaggaggcagtagcagctgtagcagatgtccctcaggaaatcatttctattatgtagcaataataaaaatagctgtctttttacagaaacagactcacagcagagattgaacttttggttgccaggagggaagaatgaggggaagggttagttagaaagtttgggatcaatatttccacactgctatatttaaaatggataatcaacaagaacctattgtatagcatgtgaaactctgctcgatgttgtatggcagcctggatgggaggggagtttggggagaatggatacatgtatatgtatggctgagtccctttgctgtccacctgaagctatcacattgttaatcagcctatactccagtataaa

SEQ ID NO: 42948 - DNA, 1449 bp, Bovine  19866880807736
  misc_feature (1)..(1): n is a, c, g, or t
ncctttgtccatgggattctccaggcaagaatactggagtgggttgtcatgccctcctccagggaatcttccagacccagggattgagtctgatcaagtctcttatgtctcctgcattggcaggcaggttctttaccactagcaccaaggcctggagtcctggctccatcacctccttgctgagtgactctggtgtgttccagtcagagggaagagcatatgcagaggcctgtgtaagtgtatgctagcatgtggggcagagtgaggggctggaagggtcttgaagaccataccaaggaatttggactttttctggaaggcaatcagctcccctgagtggattataggctggggaggatagaatctatgtgtatactgctccccctgggtactgtgtggaagatgagctagtggggagtgtatggatgcagggagacttgtgaggcccctaagcaccctggtagcaggggctagaggacttgcttggacacacaggatcctctgtgttatatggagaaactttatcttaactcctcctgcctttttagttgggtattggagaggagtttccctgtagcttgggatgtcagaggttgcctttcttttctttctttttttttttttctgtttttctttttgtggaatgggagcatgcctggcaactttgcagaggcctgagccctgggcacagcctgaagctgcatgagagccctgggccttcaggtggagcaggccctgctggagagagccaccccgagctccctgtcccccaggcctcattatctgcagttggctttgagtgctctttccatcacttattgtctggagccttgactgagcctaaaattacacaaagtaggccaggcgctcctctgtggctaccctccaccttcactccagccttcaggaaagattcatctcaaccagaactaggggaggctggggcacctggctcttgcccactgggaggcaaaggagcttacacataggtgctggttccagcagcagcggcagctactgtatattgtatactgactatgtgtcaggcacagggctaaatactttgttttctcatttaatcttcacaacagctctacggtgtaggtattgttattctcatctttcatattcatcagtttaaaagtagaggccaagcaacctttctgagaatgtctgatcaggctacttgcctcccagggacacatcggataaagacgacaagagcagataagagattcctcatccatctgtctatccatccatcacctactcagctacctatctgatctaaaatttcactcagtgcccactctgtgccaggccttccaggagtttataagacagagggataaagacctgggaagaaacccataacattcaggatatctactgcagtagataccatgaaccatttggggaacagatgtgtttacatggctagaggttgga

SEQ ID NO: 42949 - DNA, 1627 bp, Bovine  19866880817666
  misc_feature (1)..(1): n is a, c, g, or t
nttttttattttggcaatcatatatgctaatttcccaagagctctttcttaatctttgagtgttttctgtcttagtttcctgctgtttaatgtgcttgtttctttttttttttttttcccctgtatctgacagggtaataatttggagcaaatcttttcttcttctttgtattatctgttagataaagtgttttttccctgtgattgttttgatctttcacttctatgttagaggttgttctcaattatttttgatgagccttggctcttcatatttaacagtaagacacaaaagtgtgtgtgtgtgtgtgtgcgtgtgcgtgtgtgtatagcgtgtgggagtgggtggtggggttcacttaaaagatagttggacaagttgttggtcattttactggttctccccaaatgccagagaagagacctccaaaagccaaccagggaagtgcctgattaccggcattctgcctggagtccagatggggacaaaagaagacttggatctatcacttcattttacagactttcaattaatctttttgtcattaatcctgctttctacctcctaggtgcctctgaaacctgaacttctgttaattttgccaaagaagaaaactcatatcttctacctggcaaagaagtaagtgggttgggaaccaaatgccttgatctaggtgttctggttcccctgaattcttagtctttccagggttttatcgaacaaattgctctttttttttttatcccctcctctggttttcctttatcttactaagccagtaactattcctccaacaatttgtagtcttctaaaaatttattatgctctctcatatactgatgttccctttcccattccttttgtggccttaaagagttttcctttctatcacattattggggacacagaagaaataaacacatactagcaaacagccatttttgaccaaaattttagcttatgtaatttttattgatattgcaataatgaaaactttcttgtgtctatagcattttttttatccttttgcatttatggattagtatagaatcaaaggcataagtaagaaattagatttaaatagctagaaggacatttatcccacttttctgaagctgagaagagttgtagagagaatttgagcctattgggaagaaagaaagctctgtatcacatgttttcagctccttctttttctttgttgatgagctcaccagtaagaaacagaagtgtgaatgccttgactcttgaagtaagtaggagggtctagagcacttttctttgagaagtaaggagctttataagggtagttttgtcaaactcagttcttggcctggggcaggccagttggcagtccagaagacttaactctccaaggaaataaaaactctactaagaagcccaacgtgttagtcctgagggccagacatctttcagagattacacctgtgtacgccaaaagtctatcctcccagaccccatccccagtgggccatgtgtctgtggagatcccacagggtggagacagggcttgcagggctcattcagcaggaaggaactgctccacaagtgctctgtgtttggggtgggaccagctacctacacaagtcttctttcaatggagaa

SEQ ID NO: 42950 - DNA, 1860 bp, Bovine  19866880828235
  misc_feature (1)..(1): n is a, c, g, or t
nctgctacaagaaggaaagagtatcttgaagagtctatgtgaggggctagaggtccttgagagggtctttgtggcacaacctttgatattacccatcttttatattgggtaggcagcttccttctttatgtgattgagtagggggcaagtacaacccattccagtattcttgcctagaaattccatagacagaggagcctggtaaactacagtccatggggtcacaaagttgaacacgatggagtgactgagcacagcacaacacagcaagtaggacttcttacccccaagtacagccaatcttgttgtcgttgttcagtcactcctttgtgtccaactctttgcaaccccatggactgaggactccatgcttccctgtccatcaccaactcccggagcttactcaaactcatgtccattgagtcagtgatgtgatactatccagccatctcatcctctgtcatccccttttcctcccgccttcagtctttcccagcatcagggtcttttccagtgagtcagctcttcgaatcaggtgaccaaagtattggagccactctgccatccccccaatactaagcctacattcagaatgcttttgataccagggttggaaaaaccagtcattaatggatcttaattaccagttgatgaccttctgagaagggtatcctgacctgaggactaaagaggagcaggagaccaatctccattaatggcgagtcattcatcagagtgctgtcagtggtcatctatacccaccagatggcagcaccatgcaacaccttggtaccaaaggtgccaaatgggatttgggggctgcagggggaaaatgagcctggacagtggaaagtcaatttccaggcagggtacgtgggaagtgggttttccaggtccctgggagaatagggattactagggcttctggcagggagggatgcaaggttcagacacaaagactgtggagaaacaacagatccaagactggattctgccaaaccacaggactgagatgttattgacagaaaaggcactcttctggaggagggatggtgaacaaagagagaaatgtttgttcagtgcttacgttgtatccagtctagtatttttcacatgttgtctcttgagcaaagactaaggaatccagggagctggattcatattccaggcctggcacttactagtatgatcttgggcaaattacctaaactctctgttccttggttttttatctgtaaaatggggatgataataataatatctcctcctaatagggatgttgtgagcattagatgaactcataaagcacactgaaggcactatatgtgcctagtcactcagtcgtgtccgactctttgcgaccccatggactgttgcctgccaggcacctctgtccacagggattctccaggcaagaatactggattgggttgccatgcccttctccaggggatcgtcccaacccaggaatcaaacccaggtctcccacattgcaggcagattcattaccatctgagccaccagggaagcccaaaggcattatgtaagaattggctattgttatttttaccatctctgggcaccaaagtatttgaaagttcacccagaaggaactttcctctatctaggagcaaaaggtcctagaaaccagctcttggcttctcctctttcaccttgttgaaggacccaaagcaactcctagaggaatcacagtgtagcagatcccaactgaaatcctgcaactagagccatctaacgctctgtgtctacttattcacctacagagtatttttgagtgcctgctctgtgctagacccagtgcggctgctgctaacacagagatacttatagacatacacc

SEQ ID NO: 42951 - DNA, 2182 bp, Bovine  19866880867562
  misc_feature (1)..(1): n is a, c, g, or t
ncagtaggtatagcaacaatctgtggtatttgagccacgacctactctccccttgaacacgaactcagtgagacagatctcttctctgtgcagatgtggataagaagacagggctccctttcccctccagcttctactctaaggctacagtttctccctaggagagtcaagccactgtattttttatcactcccaattttgtgttacagaagctttattgcatgcaagcctggccaagcagtctatgactttctgccatccagtccccatttgtagagagcaagttctatccttggccacgaatactgggccctaatcatccacaccctagtccacacatagggtgaagtttccatgccaggagaggcaatccaagatgagcagtggtgccatccaccctcggtacaccgctaagggagcagcgatgtcaccgagagaagtggactgccactcccactcttagctccagcgttgtggtacagagatcctacctggggggagaggtgggctgtaagagcacagagttctgtagctgtccagtttatttggaacaaagtgtgaggaatttcaagacaaaaagcatttggtgagtatttaagaggaggttagtagctccataatggcgatgagagagacagcagcccagctagacattttacagagagaaccagagaatgaattatctgagaagaaccctcttgggagggttctttccaaagcaagctttgaagacttggctccaagacagcccctgcataggagtctgaacttaagtggatcagactgtggagcaacttatgcctcaaagttctgttgaaaataatagagcaatcagatagtaattagtggaagctaacagcttggtgtaataccaatagggtagtccatccggaagcttaatagggagaaaagtaaaagagatagttaaaaagaaaaaaccaacctaagaaaacaactgtcatcccaagagattaaatagcgggactcacagggctaaggcgatgcactccaaggactcacatcatagactgcacactgtgcagctaaaagatgtgaactactccatttatgccactgaacaaataagcaaataagtaaacaaaaacgagtcctggaggggagggcagaggtaatcgtcagtgttcgaagaggctaacatgtattatctaaaatgtctggttttcaacaaaaatttataagacagcaaggacagaagaacatgtagcccataaagaggaaaaaagcagacaacagaaattatctttgagggtacctggatgttggaattaccagatgcagacttcaaagcagttattataaatttttccaaagaactaaagaaaacattgctgaaataattaaagtataatgacagcaggacttccttggtagctcagctggtaaagaatccacctgcaatgcaggggactccagtttgattcctgggtcaggaagatctgctggagaaggcataggatacccactccagtattcttaagctaccctcatagctcagatggtaaagaatccacctgcagtgcgggagatctgggtttgatccttgggttgggaagatcccctggagaagggcatggcaacccactccagtattcttgcctggagaatccctgtggatggaggagcctgggggctaccgttcattgtgttgcaaagattcggacacaagtgaacgactaagcacttgatgacggcatcttatcaatggggaatataaataaagagaaaaattatgaaaaagaacaaactggaaattttggatttgaaaatatgaaaagtgaaatgaaaagttcactagaaacatttaaaattagatttgagttgacaaaagaaagtatcagtattagcaaacttgaaaatagatcaatagagattatgaaatctgaagaaaagagaaaaaataatgaataaaaataggcagagccttggagaaatgtggaataccattaataaaaaaaaaaaacccaccaatggcatatttaatgatagaaaatgaaaaaattttgaaagcagtagcagaacagaactacttgtcacctataagagaaacccagtacaattaacaggtgatttctcattagaaacaatggttagaaaaatggtacagatgaacctatttccaggacaagagtagagacacagaagtagaaaatgggagatgtgg

SEQ ID NO: 42952 - DNA, 1218 bp, Bovine  19866880922829
  misc_feature (1)..(1): n is a, c, g, or t
naaaggaggatgcagatgcaacaaaattccagttgtgggattccatgctcatagtcaatatcagacagctggaaggcctcctaaaccagtgccagacccagcaccaggcctcgcggtaaagggcacaggtctctgggattctcctgtcctgaccgtgctcaggggagcattgtctccaaaacattttcagccagtccatatatccgaacacctttcattccttcaatgcaagcccacttctgatactcatcttgctagtaaacaggctatagttttcaccaagaagtcccatttgtggcatgcaaatatgcaaattttcagagtctcagctgtcgatggaaatacaaataatagaagtgttgacaacagttgcttgtaacacatgggctttctcttgggtgtgttgttagcagctgtccccaggtctgggggttcctgattagggcaacagttctgaaaactgaattctactctaagctgaagtattggaaagtaaattacacacatcataacaaggagccacaaacgggagaccttgtgaccctgccaatcactgagtttggagagagaaagtaatttactaaatcgtatctcatgtagagtcctgatcccttgctagagattcagtccctgactgagttcacaatcccagatacggaccccaacccccatcacttgctgaccactgaccctggcacagatggagccaccatgctctgcagagcctggacccccggcaagtctaacgccagccctggaggcgagctggcatggagtttagaacagcgtgtgattgtaactattcaggccacaggataagccttcaagcctgaaagtccctagtaaatttagcttggtttgaatattctgtcagttgctttcctgggagagatgtggattttcacctccttaggatacaaaccactaattcaggcctctgggagttatttcattgggggctttcacttcctataaatgtactgcctagatttttggcacatctggggactcagagtcagtttagcattttaaagaagctaaagaatatgtaaaacgtcctaataaaaatatagttagagcccaggcgggaggaatacttattatattaatgcattgggctcctattcccaaaggcaattttgcttatttaaaatctgtccccctcaccttccaatccttgttaactggtctcagggaatgacaatgtatttacatttt

SEQ ID NO: 42953 - DNA, 751 bp, Bovine  19866880985131
  misc_feature (1)..(1): n is a, c, g, or t
nctttctggacacacagttgcctgacaatcttctattcaagctattgcatcccaaacttcccacagcaatccaggggtgttctgactcaggttcaagtgtcatgaaaaggtcaacagactttctctgagaagcagcttccaccatccatgacctgcagagacagactccatcagcctccaggttaagacccacgttaggctcacttgtgctgaaatacatcagcaagatgcttggccgggaaaacagtcttaggtgcttcagggactctggtgatgggagagtgttggagaactgcaggggctgaaagagagcgagactgtatctgtgcataatcagactgcctccacaaatttatgtcttgggggagtggttttgctatgcttgtagcttttgctagatggtaacaaaacaggtaagccggaggtgttctgccactctgcacatcctacaaagactgacccaaagaacaaaggcctcactttacatttggctgttgggacaaggccaaatgatcaggaggtgtattgtcttataccatcaagaacatagtgaccttctggtcggcactggacaatgatcgggatggggaatctgctgctccaagctaccatgctaggtagcttgcttccttccctgaatcctgtccttttaagagtcagtcttttctgataggcctggagccagcaggctgcccttgaccttgttgtcagcagagaggaaatgctgaaagggtaggcctgactctcccag

SEQ ID NO: 42954 - DNA, 939 bp, Bovine  19866881033378
  misc_feature (1)..(1): n is a, c, g, or t
natgggcaacgttcatgaacagacaatttaccccccaaaatattgaatggttctgaagtttataagaagtcattcgactcataaaaagagaaatgcaatttaaaactacactgaaataccatttatcttctatcaaaatagcaaaaatttaaaacttggcaccacattgtactggcaaggctgaggagaaataaaccctttcatccactgctgataggaatgcaaaattgtgcagccttagggaggggaatttggcagtatttaacaaaactatatatgcatttacctttcgttccagaaatccacttctaggaatttactttaaaaatatacctgcaacaatacaaagtgatatatgcacaagtctattcactgcagtattatttgtaattgcaaaatgttggaaaccacttacatgttcatacacggaaggggagttgaataaactaaattgaattcatacggtggagtactgtgtgtgcagtggtaaaagacaatagacttgctctctatgaagtgatatggagtgagttccagaacatattttgtaagtaaaaaagcacacagcaaaaggctatatatagtattcttaattttgtgtgagaagaggaaataagaaattttcttgtgattgcttacttaattgcaaaaggaaattgagaaaagacaaaccagaaactaataagagctgtcacctacaggggtggatgggaaccacctggataagcgagtaatacttcagtgagagtaattttttacgtagttttggagtttggaatcatgttaatgttttaaacattaaaaaaaataagtccacctgtggtggattcattttgatatttggcaaaactaatacaattatgtaaagtttaaaaataaaataaaattaattaaaaaaaaaagtcaaatcatatgggatgtcagtttgaaaactctaaa

SEQ ID NO: 42955 - DNA, 2717 bp, Bovine  19866881068876
  misc_feature (1)..(1): n is a, c, g, or t
naacacaacattataaagcaactatactccaataagaaatttaaaaaaaaaaaacatttttctgccctgcctatagtttcgcacacacacctccttctgaccaacatccatccaaaaacacacgcacacacacaactaaggccgaactgaacgaaggatgaccacctgactccaaattagccagtgtgttgaaagctaaaaaagtgaaaatgttagttgttcagtcatattctactctttgtgaccccatggactgtagcctgccaggctcctctgcccatggaattttccaggcaagactactggagtgggtagccattcccttctccaggggatcttcccaacccagggatcaaaaaccaggtctcctgcattacagccagattctttacagtctgagccactagttgcctagaaatctgactttgtgtgaccttgcaccaagagaagagcgaggctgaacagattctatcttgagaacttaatatgagacataagattgctgacagttggtggtgaaaaagtcttgtaaactgaaaataatggcaaacgtttgcaagttgatgagtaaaaggcggaagctgttctgcagagaaaggaaaatggagctgacaagaaggaaagagcagagaagagcccgtggcccaagagagagaaatagaaccagtagccagctgcttctgttcctctccatctcccctgatgctcgactgcacttgatttcatgtcctttgattctgtgagagctctgcttccttgcaataaacactattctttacttgagtaactctgagttttgttttcttgcaacccaaggaactataacttgaacaatttcatgtctttttaattgcctcccaacattgcatggtaacttctttaatgttaatcagtgtcttttatttcatctgtataacacagcttatagtcacatgacttgaattatataaatgctgataaggttcacaatgaattaattcattaatctggttactgacacctctaccaccatcagaatcatgaattgcttgttttgtctgctctatcgagtcctttgtgaatctttttttttttttttccctctactccctttggctctagtgggactaagaatctcaggcttccaaccccctcccactgaagcaggcatatggctctcggtgtaggtcagtcgggctctcatttggaatctcagtcatccgatagtagtttcctaaagaaatgttgatcacttgagaaccccggagctcccttgacaactggcctttcgggcgtctgattgttcagctttttcttcagtcctagggctgttcactatccttccaaccccccccttttctagtttaagtagtcagagtccatttctactgcgttcagcctgattcctctctgatacaggctggttcccaaagaggtcagtttcttccctggctatatagaataactggaagaaattcttctttttggaaagagcagctaattttgaagcacgctatctttgaaacaaataaaatatttctttattgatcagttgccccactgctgtcttcttttatatatcaccaactcagcctctgggttgccttttctgcaagaggcatcattagttttgcctcagttgtttatactcaacctcatcctcatcttctaaagctgtctatgagtgaatgagtcatgaacgtgaccctttagaggtgtcatatgcatttgggaaaccaggcaacagaggctaacttcacttagccaagttagcactttttctacagcaatataaagcagagttcattctttgggtctgaaggatctgtaatcaaccaagaaggcatctcccaggcttgaatctggtgtcccagtttccgatgatgaacccactgtggccctttgaaccaacatccctccttaaagagaagcaacacttagggtgttggctctgattcttccaagacctcaagttccaaggcagtttgtctcctctcaacactctgactcattatcctattttactgaagtacttagaatgagagctctggagaagtgctctgtgcaattacataaatgaatagacacatttatttgaaacattttcagatttcctagaaagaaattttatggtctttccctgacactaatttctgaaactgggtaacagtcctgggggtctccttgccctgcccagggacttgcatttccaaggcaatataaaaccctgtcattagctgttcattcattttgcaagccattgttgagcatccactgcatgccaggcactgtactgtgagtggggtatatgatggagaagaaaacaaacacaaccctgccttcaagagaacacagtccagtggaggagagagggaaaaaatcatacacgagtaattgcatgtgtacgtgtgtgtgtgttgctcagttgcttcagtcgtgtccaactctacaacactatggactgttgcctaacagacttctctgtccatgggattctccaggcaagaacactggagtgggttgccatgccctcctccagagaatcttcccaacccagggactgaacccatgtctcttgcatctcctgcattgcaggcagattctttacccactgagccacctgagaaatatcaatagcattagaagggaatattagatggcagagggcagaagagtctccctgaaacctgaagaataagaagtgaggagaactagaattaagtagacggagtagcata

SEQ ID NO: 42956 - DNA, 2281 bp, Bovine  19866881114369
  misc_feature (1)..(1): n is a, c, g, or t
nataacgtacagcaaaatctagaataatgtacagcacttcaaaagtgcttaatatataattgctgaatgaatgaataaagaacgggatggattgatgtaaagccctgagcacagtgcccattatatagtgagtgaagggaagcacccacagaaccacagcctttctgccttggccactggaaccagtgtgcttggctgacctggaccgctgctggctgatcatactttccagtctttgcacatctcttctgaacttaaagtcagtatcatcaggtgagtagcctgaaaccagctatgatgggagagtatttaaactacagacattggaagatgttataaatcaggttttcgtttgttgagagggagagaaaaagaaaaacagagagagagatggagagttacacattgactggcacccaacacacatccttgactgtccaagggaccatttatacatcatccacctcaatcatctttagaaaccagttctgaccattttgttgcaagatccaggatctttgggaaaataagtcatttaggagcagataagagactgttaatggatgctaagagccttgggtttggagacctcactaagtgaggagtacatatttcatgtgggttttggtgatcactcatgcctggctatgatacaaaagagtagacctggaaacaaatggctgggtctattaataggtggtaattctgggacttggaatagctgaattaaagcctggaaactcggaagattgtgacaatctgcctggaccctgtgaccatattttatatgctgtctgtgtggctcctaggtggagcctttctctaagtcctgagtaaggagaaccattaaaggtcattccagagctacttcagtatcaattgactttgaataagtgaagctattaaaggagtatatgggagagaagagggaatggcatggaaggcatttgtaaactgcccagggtttgaaagcctgtccagagtgatcttaaagaaagagcaactcacaaaaaaggctgctcttgggctggagtctcaggctggtctattcttctagggttgaaactgctcaagcccagctcaccatcattaatctcaggaccgtatgagtccacagtctccctctatattctttaggggtggcgggggaggggggtgggctggcattttcttttattttttagatcccccaatgagtggatgagcagctaggtacgacaaccattgcatccaaatgaataatttctcttttaaagggttttgacacatcattggtgtttcaatggccctaaatggctttagaggaaagccagttaatcttctgatctgaggaagatcagctactgttcacttttggaggaataaacagaaatgtgctgtgcttttaatcttcagattagcatcattggcaactagcaattattagcacttgtcagtggggtgttcaccacccctcccaggcacctggagggagggggtggcaactctaatctaggctgggctttggaggacattactgagctagtggcaggactgggtggcatgaaagggtgcagatggggagagggggcaaacaagagtgtgccttgtgcagagggcagcaggggacctacagaggactgtccaaagcatttgatccaaagatgactacgcagagaaaacaactgccaagtgaaaggcctgccgtcggaagcagccaggtggagcccatgggtttgggagaatgaaaaggacaactaactatccagccaggtcataggggagactctttcagactctgaccctctattgtgggctgaaaccacacataattctagaggaggctcctttcccacctgttatagccaatcttcatttatttcagttgttaccaatcttggctgcccgtcagaatctcatagggagtttatacctgttgctgagccctttttataggagcagctcctacttggttccgttgctgccaagcaagattgccttgcagaccaaagaaatacagatgtaggaccagagctgccagtttgaaaactcatgcacgctcggatttccagaatgggacctccgttcattaagagccctgcagggtttctcaaactcagcactgctgacactgtgaactggaaaacttttgattgtggagggctgttctgtgcattgtaggatgttcagtggcatgcatgcctgtagcaccctctccagatgtgaccatcaaaactgtctgcagacactgccaaataccccctcaaggggtagaatgggcaaaaaaccacgggctccgaaa

SEQ ID NO: 42957 - DNA, 1524 bp, Bovine  19866881155921
  misc_feature (1)..(1): n is a, c, g, or t
nctttgatcactaagaagagctatgtaagctagcttcagtttaggtgggtaaggataccataagctctcttacaggcccaggaactgaagtacagctggacccaggcactcgtgctgggaagccacgaaaaccacagtgggggcaggatcatctcttgtctctaaatccgtctgcctcctgcttcatccccacttcatcacagctggatttctctgcttgcacaagcccaacagatctccatgcccgatctaaacggccccacaatctgagaggccagcacccactgagcacactgtttggtctctcatcaggactcctagggcagaataagaggatgatgagattgtcacattccagaaagagaaggatggggagagaggaggaaagaaagagaattgtccattcattctaaactaagagttggtgcctgccctggtctcctcagctgtggcgtgtaagcagggccacgtgaaccacaagctgccctttccaagggctgagagtgggctaagccagaaggggacgttgacgatcagctttcctacccagatatgctaagatattggttcataggacttttgtactgttgactggcatgtgtttgtaggtgaggataagagacacctctcccctctcctattccctctctggtccccttctctcttattcacccaccagaccttccttccactctagggaaacttcatcagctgggtccccactggggcctggccagccaccactggatctggaggagacagagaaggcctgatcccaggggacatcccaggcccccaaacagctgacatgttcctcacctcccccaaccctcaagaacaaagtcttctatccagggacttctgttggccattatgccacccttgtgcaaaaggagaggatgagaagtgtagtaccatcttgtgtgtgtatgccatatttttacctagaccctctcagctcccaaaatccagcttgctgtttaacagcgtccaaaatcttgtccttctgaggaggctgctctgccttcagcacctttaatgcaaggccaacgctgttggtttcttggtattagttggtacttgttgatttctgtagtattcagggttgacgaaagcagagttgactatggaagcagagcctgtctcagtggaatgattgtttctcctgatttaatgcttttatttctctgcctctcctatggtgttcagttgcagaactccctgaagagtgatttgtgtcttgatcagggtccagagacagaaaatgttcctattgtgtacatctgccacgggatgacaccccaggtgagtgttctcacatccccgtgccgggtgtgtgcatgtgtgtgtctggtgggaaaagagaagctcaactctgtcgtggctactctgggcccatggaccttgggggcttttcattagaaagtatcctcatgagaagaaaagacagtcatacttatatgtctggaaggagtctaaaggagcagaggctgggatgccaggatcccctgggggggcacaagg

SEQ ID NO: 42958 - DNA, 2467 bp, Bovine  19866881300916
  misc_feature (1)..(1): n is a, c, g, or t
nttttagaacacattctggctcttaaactcctacctcttagctatcacctctaattttcacttcctcccagccctaatcaacactaatctatttttgtctctatggactgccaattttggacatttcatgtaaacagaatcatataatatgtggctttttatctggcttctttgatttagtataaatgtcatccatgctatactataaattggtacttaattgctgtttattgatgaagaatattccactgcatggataaaccacattttatttttccattcagttgatgggcatttgagttgtttccattttttggctattatgaataatgccacaaaaaaaactattagaaataataaccaaatatagtaaagttgaatggtacaaaatcaatatataaaagtctgttgtgtttctatacaccaagaataagtcagcataaagaaaacataagaaaacaatctcatttaccatcacaacaaaaaagaataaaatgcttaggaataaatttaaccaaggagataaaagacttgtatactgaaactatgagatattgctgaaagattaaagaagacacaaaaaaactggaaagttattccattctcatggactggaagaattaacattgttaaaacatccatcttacctaaagtgaaagtgttagtcattcagttgtgcccaactcttttcaaccccatatactatagcccgccaggctcctctgtctatggaattctccaggtaagaaatattgtagcaggtagccattcccttctccagggatcaaactcaggtctcctgcactgcaggcagattctttaccatctgagccaccaggggagcccatgaacactcctagctcctcccttggcttttaaggtaaagtcaaacctcctgggcttaattttcaatgaccattacctgcctccaaactgactctgtgtcccatctctctcataccccaattctaaattccacccacagcgacactgaatttttattcctcagacataccctgcctttttctgcctttgcccatgctgagcctctacataggctgttcttcctttctacacctgggaagtatcctgcaactttcaagatccagatcaaacatgtctcgaatgtgaagccttgcctgagctgtgcagacagagcccgtcaccctgggcttccagaacactgtatccatccccctcatttctgctcttgccatccagttttgttatgtgtttatacacccaagagctcctccagggcagaggccgtgtctgattcatatctgcatccctcctgcccaaccactgtgctcaataaatgtttgatgaatgactgaaggaaagaatgttcatcattggaaaattgctcatcagagccctgtacatcagcgttgctgagagatgttttcatcaaatgtggtttctcagtgtcagtatctaatgctgttttgattcatcctgaagcactggaaattcagaagagcgtgcaggggttagaggacaggcattttatttgttaaacagaaaagcaggctatgagatggagcactaagatatgcaaatactatcttctttgtaggagaaactgggagaatcacactagattattttggaattaattcagcctaaatgtctgtggagtttaaatgcagccctcaggagagtaaataatgcagaatgtgaaagtgagaagaagatttgaaatgcaccagtaaaatctttcagcccaacttctgcaccagaacattttagttggtagaatcccattgtaatttgcaaagattaaaacctgttgcaagaaaattagcccaggtcataactttaatcatttaagaggcttccagcttcctctggcctcatcaacagtagttcctaaacagtaagggcttgaggacagattccaggatgcttgataaacattgatcattttgcatgaaacaaaaatttcacaaacattaatttttaaatatcaagtgagagtggctgctctgggtttgcaaattagggatttaaaaatattatttccaaacagtttccttggtagaaggatcaaagaggtgatgccagagtgccctggggttctaattagatttatgtataaggagcaaaaaactgcccggtcctcagggctgcacatgctaacatggcctgcttttgtcagagtgtccctttcaagcatgagtgtgtggggctgcctgttcagggctgtgtatatgctgagatgagtgaaggatggagctggattttggaggaatattcctctctctgcccaagtcagaaaagggcagatgagatgagggccagctggggcaccaaggcctctggatctgggcatgggtgggaaggccatctgtctgcgagggctggaaaggagctggacatgcctgtgtgcagagatgggatgtcaaagcagtccaagttcagattcaaactgcatgaggctaggcacagagaggccgaagcccca

SEQ ID NO: 42959 - DNA, 851 bp, Bovine  19866881314070
  misc_feature (1)..(1): n is a, c, g, or t
ncccagggcagctgctaggttcgtgcatttacgtatcacgctcactctctcctcaggactttttttctttcttaattaatttttattggagtatagttgatttacaatgttgtgttagtttctgctgtacagcaaagagagtcagttctacacatacatatgtacactctgttttagagtcttttcccatataggccattacagagtatagagtagagttccctgtgctatacagttcctcaggactttcctgcacaactctctgattttttgctcaactgaaagttcaatgatgacagatgctgtatctgctttgttcgcaatctttattcccggggactagcaaagtgtttactatacagttagtgcccaatacatgtttatggaacgaattcatgagtcaacacatcaatggaaacaaaacagtttcaaagaactttccacccaaccatggtgagcacctgtgaaacattctgacctacaacaggaaggcttctctagatcaagaggctctgtctgcctgattttcaggccctcttccctagatgatggtgggcactgagtaacaaacctagtcataaggggctccaccctgaaagttcatcgcagaccagctttctctattagcaaggctccttcaagcatcgagttgccgttagattccagctgcagccaaggtaatgcacataaagaaatgagattttccagcctggctgaggcctgatagacttggtactctgaaactcctttttactgcctgccttttactaactgcccattttatgaactctcaggacatttctagagagcacagctctcattccatgatattttcattcttcttaatttca

SEQ ID NO: 42960 - DNA, 1188 bp, Bovine  19866881327789
  misc_feature (1)..(1): n is a, c, g, or t
nccttctgcttgggtgatgatggggtgagggccattgctaggtggatagagaagaagctggttttagaagaaagagggattccatgctgggaaaactgatcttaaggtgcctctgggtcaccagggggagatatccaacaggcagggcctgggtggctggtctgggttggaattcagcagtggtcttaggctggagcaacgtgccacacagctggaggggccaggaactgaaaggcctttcctagtaagcatgattgcggggctcatggctgtgtgcagacacccagctcagactgtcacgaggaaatttacattaggtgaatcagcaagagaccgagtgggttgcttctctgctgagagcatcatcttacacaaataacattaaattgttccattgcacactgctaccacgtctagcccctgtgcagcatcttatcagctggtggctgagaaactggaggagaagagaaagaaaaggagaaatgaagaatactcagtgatgagaaaactgtcactcaagtgcaaatggactcatctttgaaattggaaactcatcaaggtggagaaacagctattttgcaggccatttctttggagaatgctgatgcaggagactgcttaggtagagactggtgctttggggtccctacccctcctgctttcaaattcagtcagtcagttcatttgctcagtcgtgtccaactctttgcgatcccatggactgcagcgtgcctggcctccctgtccatcaccaactcctggagtttactcaaactcatgtccattgagtcagtgataccatccaaccatctcatcctctgtcgtccccttctcaaattgcagccttttattctgaaaggactcagcttccgcatgaaggcatccagggcagtcagtacaacccaatccattgctcctttaggctgagttctggtggggggtacttgacctgcccttagaggcgactgctaggggaaaggttccccattctggctgtgcatctctgaaagaagttccctagcctccctgaacctctgattccatatctatcaaatagaatcaactataacctcacaaggattaaattaaataatataaagcacttgaaaacctctcgtacataactggaactcaaaagatcatttttaaaagatgcacttgtacactaagaagcccagagaatcctct

SEQ ID NO: 42961 - DNA, 1996 bp, Bovine  19866881390878
  misc_feature (1)..(1): n is a, c, g, or t
ntttccctgcacgccctgggcttcacatccagaacctgctttgggtcccgtccttgccttggtttggcaaccttgttgagttcttggtctacccaccacagttctttgtaaactctgggccctgctctggcatcactggtacctttagacttagatgatgagacccttaggagagaccctccctcctgtttcctacagccttttctgatgctgtgaaatcccagctccttcattcccatgccttggcctaaccaccaaaggggcaatgcctaaaaatgactagtgcttctcctgtggtaccttttactgaacatttaggatctcttgcatatctggaatttgaaattagccagattcctaggattccaaaaagcttaaagatcaagcgttaaacctctcaaattgtggttctgtaactacctgcatcagagttaccttattaacaatatggattctaagccatcatcccagacctactgaattgaagtagattattagattaggcgcaacaaaaattttaaattactgattgaatttaatctctcagattccagttggtatcccatctaagctattttaagcatcaaagaacccatctggcctagctgaacttgaaagagggaggttccataagacatcagactgtgaaagaaacagtggtgctacatgtatccactattttcacaaaaaccatcaatatatttactgggaaaccactttgcatagaactctttccaggcacagtaggggtactagctgactaaaacactcacacaagcagtggctctaaagtgaggacacattttcacttgtgtctaaggtaaatagagacagtcgggtacagcttgcaacaagtctcaccttgtcagagtgcagctgccaactttggcaggtaagtctgttctgatggctgtggtaagtgaacgtccgtgtggtgaagaaaaagtgggtcaccattttgagattccaaaattggcatacaattttatgtgaaagtaaatctctgtaggggtgggcagtacccataaaattaagagaagttcatggaaattaagtaaaattgaaatatgtaaagaggatagggaagatagccagagtattggaagaatctgtgtagactcagagatttctgattgtaagggtcctcagaaatgaaattttcaattttgtttttagcctttggacccatttgtcaaacaaaatcttaagtagaatttatgtatgagagtgtgtgtgtgtgtgtgtattagtcagcataggctaggttacgtgcagtgaaaatcagcctcctaagtttatcagctgttatgaaaaggcttttcttgttcatgctgtatgtctgacatagatgggcttgggctcaggtcataattccactccaggacaccagaggatgaagcagccaccatcccagtattgctggttgccatagcagaagaaaagagacaactttgaagagtattgcattggtaattaaatgctctgatatgacagtgacccacaaaactttttaggtcacatggatcaaaaccagccgtgtgatcctactcagccacaaagaggcccacaagtgagatactgccatatgcccagaaggcattttctagtaaaattgtttggtggaaaccaccactgattatcacagtgagtgtgtgtgtgtgagtgtgtgtgtgtgtgtgagctctccctcatctccagtgttatctctagttacctccaaagaacgcctagattccatgaaaagtcatttgaaaactatttgagtcagatcccttattttataaatgaggaaattgaggttaagttgcttaattaaggtcaagtaacatcaaaacctggtccagagtgcagatttggctctcagttgaagactatttctatttaagatctaaagatcgtttatgtgtgtgtgtgtgtttgtgtgtgtgtgtgtgtgtgtgtgtgtgtgtgtctgagagagagagaggtgactcaagagttaaatgtagataaagat

SEQ ID NO: 42962 - DNA, 1106 bp, Bovine  19866881398345
  misc_feature (1)..(1): n is a, c, g, or t
ntggtcctccctttacagggtgaggcccttccttgcatcccagatcacacttctgtcaactgccaaggggtcgaatgtgtctctcagtcatggggaaggcttccttttggagttaccttttcacaggcccagagaaaggggtcagtgccttggaaacattcctatatgatgagaaaataaatgctgcctagtgtggactcacaccacacattgagagctgcaaagggccctgtactttggggtaggatggtggatatctctggagagtgatgtgaggcatgtacgtgcctgagggtctgaaccacgttgggggtcaggaacctgcatggcgtgagcctggctgtgctctgctgtttatactccgcgagtttatttctctgtggcactctcttgacaaagtctttaggaaggttctgtgggccactgtggaggagatggagaataacagaaaccccgaggggaggtaacagtgaagagaagcggctctgagggtccctcttattcacctccctgttcctggagctcccttttgctcactccctgtgaaacctgcatttggtttcaaaacaggggtttatttccttgatttgggagatcaactctctcatgtttccacctcagcaaaaacagtttctgatgttcttttcttcctgaaaattctagaggccccaacctgtgtttctatcccatccctagcagccctgatcacatatgcatgggcctagcggccctgatcacatatgcatgggccaaggttagggacttggacgttcagtatcagtccgccaccgtcaagcctaaaccaaatttctgcaccccctggactcattcacccactggggagctgagcgaagccttcctggtgagaaaccctgctcaccctgatcccgagctcgacattttcgcctccgtagacctccatgccttcatccagcaggccgatctcctggaagtactggcggtccacgatgaagcagccgatgagggcagggctcctgcagggcatggagagatggagggcagttagcagaggggccgtctcatggggggtcaacagaacaggaagcacagtgctgccttcctgccaggagggtctggccttctcc

SEQ ID NO: 42963 - DNA, 730 bp, Bovine  19866881777101
  misc_feature (1)..(1): n is a, c, g, or t
ncacacacacacacacacacacacagaatctgtgaatgaaaatctcttaaaatctgtgggcaaactagaaatgtcaaagtaaggtatggtctgcatccctctgggaacattatgaatcaccctggggcaaacactgtacttctactgctgactaattgtcaatctggacccacaggaaggaaaagaacaagtaagaaacacagcaacaggcacatcagagagataaattggtctgctatgcaagcccagtggcaggtaccaaggagagttgcgaagcagaggcgtcagagccatgaacttgttttaaagtcgtcagtcagtcaggaagcaccatggatatgtatacctctcctgcactcacctgaacctcccccctgggaaggaacttttgtacataccgggaagcaaaccaaatgtagagagcagctgtccccaccatggcaggggcagcagatgcaaggctggattctgacaaccatgtgtaaacaaatgagagtgctcctgggagagaaacagtcaaccagatacgtgccaaagtctgcctggttgacaggtgaactaggctctgctggcgctgtcctgcccttaaaaagctgacaagcctggtagaaaacagggcgaacagaagcaaagaaaaaagaaatgtgaacgtgagagacgggcatgtgtatgcacactctgacctgtggtgcccagccggagctctctatctgctgcctctgacagctca

SEQ ID NO: 42964 - DNA, 1305 bp, Bovine  19866880699230
  misc_feature (1)..(1): n is a, c, g, or t
nttaaaaacttacccaaacccaatatgtgattcacttttaaaataatcatggaagccagtttaaggggggaaaaatttctcatcctagttgctccttgggaagaaataaatcttcatagcattgatgctaaaaggaactagaggattctaaattaaacatcttttaaagtgatgtctgagatcaaagggaccaatatcactctcactcactcatgagagacaacctaaggcatgaagaaaagaaacggccagcctttccactgggctctcacaggggaagaggactactgctcctcattgcaaaagataccaggactgcacagcagttctcagtctcagcactgtggacatctggggacagataatcctttgttgttggaggctctcttgtgcattgttaggaatgttcagcaatattgctaccacctccatccactagattctagtggcaccttcccagttgtgacaaccacaaaacattgccaactgtctcctagaaggctaaatcactccctgtagagaagcactgcttttagcacaaagtcaaatcactaaagcaacagttatttgtaagcacaacgacacctcttttcaacccatctgaaattctagccctgtgctcctgacagatttgattttgaccctactcagcatgatgaggaaaattttgggccatctctgcaaccacaggaaagaattaccaaattctcagcaaatcagtcacaaagcaggtacttctgagcaaaggcagagagaacagtaaagtgaaaaccatttggaatgctagttgagtttctgaataagatatagagagttaatgagaaaacataaagtgaatacttggctttactaaaatcttacagacaaggtaatgtctagaataacttcacaaaatcagaattttaaaaatctaaattaaacccaaggatgctgatggaaaccacattctgatctttaaaatttgcctctcctatgtcttctcacttttacactcatgaaataaaagactatcaaacaatatgaaagactgcttaaacagactacaataaaatacagaatttttttctaacaacaaagagcactgtgagcaatgttgagataagtcacagaccagatgctattaacaacataaatatcagtatatccagaatacttacacaaacacttaaacatgaaaagcatcattaccacagtcaaaactggcatcattacttcagaaatctgagctgactcttgaactattcccccgctttctgcaagcactcaacttcattattccatattccaagaaaacatcgactaaca

SEQ ID NO: 42965 - DNA, 1249 bp, Bovine  19866880811909
  misc_feature (1)..(1): n is a, c, g, or t
naactcgaggttaaggctctgcctggctactgttggcctcccagaccaggggcccccgagcagcagggtggggttcaggacagctccaggcctcagacaggtatgaacattggctgtgaaaccttcacaaccagagaggctgaggcttggggatgactgttttacacacacccatgactcttgcccccgccatctagcgaagcacctcagctccagccctgactcctggccatctcccactcttgtccgcagccccatgaacttgatgggcaccggccgccattcatcgtcctccctctcctcacacgcatctagcgaggctggaaacgtggtgatgctgggcgacagctccatgggcgaggctcccgaagacctgtaccaccacatgcaggtaccagcgcggcccaggaagagcgggccagggcccgcacctggaggactcggctctctgcttgctggtctggcctgaggactggtgttgctgcctagttcttcagtttctgaattcagaacacccagagctagcagaatggccttccctccacacctccctgtattgcacttcccaggccttatttcccaagaaggaaatctgcctttagtcctggctgctcttagagatcccatgggaaagctcctctgccaaattgccctcctgcctggcattcctgatggctcagtccagtctcctctgtgggtgccatcgctagagtctacccagcaggcctgtaccatcagggttatagctgacccttagtgctggccatcagcctggccttcatcagggcaagggtacagcatcagacattggatctgggcacctggtggcatgaagaagccaactctgagccagtcctaccatcctggccgtttggacctctatcctgctaatttttctccctttgcagctcgcgtatcccaaccccaggtaccagggctcagtcaccaacgtctctgttctgtcctcgtcccaggcaagcccttcttcctccagcctgagttccactcactcagcaccatcccagatgattacctctgccccttccagtgcccgaggtaaggacggcagggcgctgcttgcagaagggagaggagagagcctcatgggcgccccttgtcctgctctcatctgtggctatgtctttcaaagtggccctgagacttagcaagtgctcacctatgcttttagcatcagggactcaagggctcctacctccagatctttttctctggcttcagaccctgctcg

SEQ ID NO: 42966 - DNA, 2138 bp, Bovine  19866880923023
  misc_feature (1)..(1): n is a, c, g, or t
nttcccaaactgtgaagggtatcagctgctgacagactccaagggcttgtgtgtttgcattagaccatgctactgagttcatccctggataaaggaactgttgtaaactttatgtctatgctttgcctccatccagagtcaagtcacttgtcaatatttcatagtaatacactatactgttttccatttgtgtaatctttattaatcatatgagttaatcagtatcactaacactttaaagtatcattaacacattaaagtatcactaacgctttctggtgtttgatctggcctacctttccacaaatgtgggtctctgcagattgttgtccctaacttactgcggtgaggccagcctgtcttctcagagggatgaacttgacagcccttaaaatgagccataagttaaccagggcctggagctcatatccaggtcaagcaatgcttgagctggggtgtagagcttgaaaatccagtcctgactgttctagatcattttcatcgtatgtgtgtgtgtttgtgagagagagaaggacactaaccaattctcaatcagaagcatcattcccttactttttaattaaatgtttgtttttatcacagcagtatgtatatataattttaaaagccaaagcatcttataaagtgtgtaatataaaactggttccttggctcaacctgaccacgtctacccactactcccgcaaagcagccactttgaactcttcttttgttcttcaagtagcttctactgccatttaaatttttaaaatttttagttattgtttattttcttcttcccacagaaagtgaggctgattctcctgagtcagcaagcctttcattaaccagtctttgcactattctcattgctttcatggagaagcacatttttggagatacttactcatctgtccctgaagtgcttctccagtccatgtgttcttaacacccaagaaaacaagttcttacaatcaagtgctcaggggccatcccccacagattgagaccagtggactcagttgtcagttggatgccatgtctgctggacctcctctgttttggcctttaggcactgggctgagcaggtatagcactgcatctcttctccccagtttgggactggcctggggcagtggccagacctcactgccacgcagccctctaagagaaaagcaactcatgaagggagccagagtatcacccactggtcccctccattctcatgatctagaggtcagagaacctgttgaggaggtatgtgctgcagtggtagaggtggcgcctcacatcagattttcctctcggcccaggaattcctgttgaagattttctgcgtgttccggaacctgatgaagatgagtgtctttcctcgggactggatggtgatgagacttcttacaagcaagtgagtgtggaagggccctgtgccagcctccatgcagctgtccccagaatattacatgtgagagaagaagctagatggaaacttgtcaaggtcaaagctgtagggacagagaggagagggtttaaatgtgaaagtgtttggaagcgcagtcagcaggactttgccatttaccaaagttcaaggaggagaaatagtcaaagatagttcagaagtagagtctaagtgcccggcagatggtgtcatggtaagggtaggaaaggaacttttatgaatgtgagctgtgataccagaggagggctcctgcttgaggagggcctgatcattggcctctgttgctctgtggtttcaggcagcatcccaagccctcctcttgacttgatttgtcttttctgccagacactgctcatcccccacagctagtgctaattactcacccaagactgtgaggctctgcccacctctgacactggccacagaattcactccaaggttgaccctgcttgtctgccccattcatatttctgccctgtggctctcactggcaaagcgaacaagtcacgtgggtggtagggtgcttgttgtcgggtccccttatgctcaggagaaggccacttagcatccactctctagcctactgcctcctccctctgatcggccttttacatcggcattatgcagaatgtagtgaaattatttgtgttagatttattagcaaggtgtcaggaggtct

SEQ ID NO: 42967 - DNA, 898 bp, Bovine  19866881038984
  misc_feature (1)..(1): n is a, c, g, or t
ntgatgtcaagctctgttctaagcagagtgcatatatatcaagtttaacctcagggaaactctaaagatacacactgttatcctcatattacaggttaggcacagagagggtaggtaatttgaaaaaagtcaaaaacagtagaaaggtctgaagtctgctgttttgagagtagagagtccaaaatagtatggtctggacatttctggtcaagacttaaagaaatgattgaagtcaggagatattttgttaggtagagctaataagaagtactgcaatggggaaagggagaaaaaggaaggatttaaggatgtctcctgggcttttggcttctgaggggatagtagtgctgttttttgagacaggagagttggagagaagaatgaatttgggagtggaaattgtttaatgagatggttggttagatctttatgtttgtcaggacaacaccctctttctaattttttgcttttattttgtaccttgacggttgcgttgactattgtaggtggtggtacatctttttttttcgtatgcttgtttagcattgaccttgtcttccctttgtattaggatgtctgaattgattgaaaaagaaactgaagaatatcgtaagggggatccagacccatttgatgatcggcatcctggtgagatctgtgttttcttaattctggctctaattttcttacaaaagaaaactgcttactataaggactatttttcagttgaaatagaatttcttaaaatattgctcaagatgggggcagcaaggaaaaatacattcctggaaaaatggaaatatttttaatatttatcaagtacttaaaggaattagattatatagatatacctcattagttgaaatgattacaaagatttacaaggaagaaaaatgtt

SEQ ID NO: 42968 - DNA, 1662 bp, Bovine  19866881044694
  misc_feature (1)..(1): n is a, c, g, or t
ntgataaaaaagtaaatcagaaactatctcaaccataatctaaactagaaattagaactagagattgcatctctgcccagaccccagagatgtactgatactccacagaagatggacccatacgaaaggaaaacattagaggcagaacagaagctgtagattccaggtaagagtgaatatgcgcttagctggttgttgcttcacactccttgctctttcaaagaaataaaaacactgaagacctttagtactaacacattcctactgcaacagaatgtgagatttggataaaaaaagaaaagattaagaaaggacatggaaaatattgggggaatggaagaacatgctttagtcaaatagaagaaaatagaaagagagagggagagacagagagagaaatagaaaaggcaaacccaggccagacaactcacttggcattccctgcccctggtttctttcttcggaaaatgctgagtaaagtgttggagcggcagggcagcttgccatcgccaacatgcatgcggaccacgtccgaggtggtgaaggcactgcggacattcctctcaggtttggcaataatgatgtacatcttgggggtgaacatgcaccccagggccaccgttacactgaggctcactgcgaagcaggtagtaatgatcttgtagttgctcccaaagtaaatgggcacgaaagccagccagatgatgcaggtggtgtacatggtgaaggcaatgtatttggcctcgttgaagttggcgggcacattgcgggtcttgaaggcatagtaggtacagctcatgatgaggagcccattgtagcccaaaggggccaccacccccaggttgctggtattgcagataaggtagacttctttgatgctcgggtaggacaggatgggcatgggaggctccatgatgatcagggttatcaccaaggttagctgcacgctgatcagaattgaggcaatgatcacctgggcccaggcgctcataaacctgggcttccgggtacagatcttcttcttgctgccagccaagatgcgtgcgatgcggttggttttggtcactaaagcggagtagcacatggcagaagagaggccgaccaggagacgctgcaggtagcaggaggtggtagtgggcttggcaatcagggtgaaaggacacacgtaaccaaggaagatgccagctaggatgatgtagcagagctcccggctggaggatttgaccacaggcgtgtctcggtatagcacgaagatcagggtgacaaacatggtgacaaggatgcccaagcaggaaaagacgatggctatgatggactctatgttgctccactcaaggtagcggacaggaatgggttcacatcctgcgatgagaaagatagttttaaaatgaatccaagattttgctcatcagtaacaacagtgcttactggttgcaggggcatagctatattcacagcttccatgatgtatggtgtttacttcctttttaaaaatgcctcctatcacacaaataaagatataccattgttttctctggacagtcatgctcccagatctaatctcatctcaagcctaatgtgacatattttagcctataaaaatagtattttcttaaagtgttataagtggatgctgctttgcggatggaactcagttctaca

SEQ ID NO: 42969 - DNA, 1119 bp, Bovine  19866881265917
  misc_feature (1)..(1): n is a, c, g, or t
ncaggggaggagggtgtggggatgaagcattttaaggactttcttcctttatgcctgggtcaccccagaggagcccttacccatccccaacttctagtggctcctgagccccatagcaggaggaggggaccatgggagcattctgctacctgctggggagccctgagatccatccaagcctgctcctcccatccccagtacaccctccgggccaggtcatctgccctcttctggagcagcctctcaattcatctcctcagaccagaggcaccaacaacggctgggggcggcaggagaggcagagagctcaggcccactgtgtgtaggaattcagaccgacagagggtggacatgcctcccttccggtgggagagggagggggcagcagtcaaacatcacagaaggtgaggggtggaccagcttccacagatcctgtctccatggtgatggagccccaagcccggcacagctggggactgcttggcatttggacttggcttggaactttcactgagcctcagctggggctcagggtgggtatgtgtagggggtctgcttcctaagcctcctcagcccccagatgactctgggccctactgcaggggtgaaatgagccctgcaagggccaggttgctggcccagggccctcatcttgctggggcctcagtcctggctcccagggtggaggcattcaagagtgagccaggacagctccctgagctgtgggtggttctctgtgaccctggggaaggacagcagtccctctttctctccttaaatgactggtgacccagaggctgcaggcctgtacggagcaagagagggataatttctccctggccccattgttaacctgcccacacagccaacggctctctagggacccaggtgtggggacccgcctgcttgccagctgcctgcctcctccctctcccagccccttggctatgggtgatcagaggaggagcccagggctgccccttcaggccagtctgccaggggagaacagcccctgggcacaagtggacatcctaactaaggagtgcaaggtagggaagggacagccctccagctccatcggggtctgtgcaggaccaagtctgagtcctgggcctgtgt

SEQ ID NO: 42970 - DNA, 1563 bp, Bovine  19866880140020
  misc_feature (1)..(1): n is a, c, g, or t
nccatgaaattaaaagacgcttactccttggaagaaaagttatgaccaccctagatagcatattgaaaagcagagaccaccaaaggtctgtctagtcaaggctatggtttttcccgtggtcatgtatggatgtgagagttggactgtgaagaaagctgagcactgaagaattgatgcttttgaactgtggtgttggagaagactcttgagagtcccttggactccaaggagatcccaccagtccattctgaaggagattagccctgggtgttctttggaaggaataatgctaaagctgaaactccagtcctttggccacctcatgcgaagagttgactcattggaaaaagactctgatgctgggagggattgggggcaggaggagaaggggacgacagaggatgagatggctggatggcatcactgactcgatggacctgagtttgagtgaactctgggagttggtgatggacagggaggcctggtgtgctgtgattcatggggtcgcaaagagtcggacacgactgagtgactgaactgaactgaactgaactgattctaagtttgtcagtggactccagtctgttttaaagcctaaatcaaaacggcagcaaattcaccaccgccatttagtttcaaagaggaagtacagccaggccccagatgatgaattagcttaataactagtcattattacttgcctattgaatttctttgggactttagctaaacataaaccagaacaaattgttttaatttaggagacagagaaataaacaaaccagagctaattttttgaattgcttttcaaaaatggcaagaggaccctgtgactggcagaataacaactcttctccttccccctaaaatgtccatgattttaatctctgaaaccaaatctctgatcttcaggatcttgagagagatatttttctggattatctggtgcagtgaaagaggtttttcttttttaacttttgtttttttcttcccattttgaccgtgcagcaatgtgggatcttagttctccgaccagagatagaatctgtccgtgcccctcgcagtggaagcatggagccttaactactgcaccaccaggggggccccggtgacagtttctgtaagaggaaagcaggggtctgcatcagagaggtgatgacagagccaccttggacacagaggaagggtcacaagacaaggaagttcacaggtccctctagaagccggaagacggaaggaagtagacctcccactggagcttccggaaggagcatagctcggctgacgtcttgattttagccaagtgaggcccatgtcagtcttctgatcaccagcactggaagatgtaaggtaacacatttgagttgtcttgagccactaagtgtgtaacatgtgttagggcagcaaaaggaagccgacacaagcctgcatagcactgtacaagactcagcctgaaaagtgaagaccctctgaatataccctgaactcagacttaaggtagatcgagtttctcctcctgtccatcaccgatgccttatggagactccgagctaataagaacat

SEQ ID NO: 42971 - DNA, 1668 bp, Bovine  19866880657800
  misc_feature (1)..(1): n is a, c, g, or t
nccacacacactgcaggcggggaagcggagcggctgacttgcccacgcatgtcacccgtccagaaggggcagagccaggactggagcccggggcagccagggactccacaacagaagctacagggcaggaagggctctagaaaaagacagaaagaaagcccctggtctggatactagcaggcctctctctgcaaagctccgggcttggggagagaggttcacgctggctgggggttgaggagggaattgggggcttgggggctcacagggtggagaggcccggggatccacgtgttcaagagcagaagctccaaaacacagggaggaggccacgtcctggaggacccgccatctccttattcctcaaccccacagcggcaaaacacgcactcgcatggtataatcacttgattacagccataatctggtacgatttgactacactgccagcttattacagtgcaagaaaatacaggaaacgtttcaattacgcctcgtgtaacccatgtataaaggaattgctgtccatcatggtgaaccttaaacgcctatttcttttaagataagcttgcaaagtctttgacttgcagagacttaaagactataaacacccttgatctcttaagcgcacagatgcggtctccatgtgttaggagtgtctgctcatcttgacaatgtcccagaaccagctagtttgttcagggaaaaaaccctcaagctggttcacgggagagccccacgggtgagtgaacatgtacagccttacgtttcatgaaacaggagaaaagtcaagctcagaggatataagagaaggtgcctttcagcctggactggcaggcagccccttcctctgcaaggagaagcagcttaggttcaaacctgtcaacagtttttaagtcaaaggcctttgtttccaccttaatcactaagtcaattacagctctaatccaaaaaaggtatttaatgggcctttatttaagttcacagatactctccccaattactgaattagcagtgttgtctttttgtatcctgaccagacaggcagacggcaagggcctcagaaactgcccggggctgtgatgagggtcaaagtcggcgcagcagggagcctccaggtcagtggaggggaagcccgagataaggggtacctcactgcacacctggatccactagggagagttcaaagcaaccccaacatgtcagccaccctccactgccccaaatcagcgcaggagatctgtaagcccccccactgcccctcaacagctcctggcacaccccaacccccaggggttctcaaagtcactgttgagagttcagaattcaagacacacagaaataacacccgaaatgctggctaggaccccacccagcttacagaggcctctatgggccaaaaggacacagaaagactgtgtccaccccaagaaagcaaactggaaagtggaccaaggttatacgatgacgagggcggcccagcagcatccagtctggggacagctcaccttggtggcctctcccctcccacggcctctccacggggcctggaggccacaggaacagcgcattttttaaggcagcactcaaatcctgtgtgccgtgagtctgatccataacttctgtgacttttccgacaagacaaaggaactctgagtgggggggggg

SEQ ID NO: 42972 - DNA, 1540 bp, Bovine  19866880841861
  misc_feature (1)..(1): n is a, c, g, or t
naaactccctaactatcccttcctccctccttccccctgcctcccccagcaaccgaaagctctttttctaagtctgtaagagactccagctttctaaatagttactgtttgccccaaagtcccaaactgccattttaggcatgctgagcatcaccatagggattaaaaattataatggggataaaacttttagtattttaggagacagggggttgggaaagtagtttacaatgaaaaggctttgtagtatttatcatcctcagagctcaggcatcagatctggaagcgagggaggtgggagatgggaagcgtcaaatggggagacatgccacatggatcatttggagcaaggacccatttcactggtcatttgtgctccctgtggtttctagcctgaagagcttcacatttagagcaggaagaaaagagaacagttctgaatggaccccccaaggagcatttggggtgaagagcctgtgcccacccagccccctgcaaaaatgcttcttttttcctctggagacttcattgtctcatgggagtggattgcacaacagggaatattttcccaaatatgtcttcagaacattttgcaaaatagcctcgagctggttttttgacagatgctagctgtttctttgggggtatttgagagtccagctgcctttgagagagtcctcgctctccatgcaaatgcctggacctaactgaaagatgccagtggtcactgggaaaacggaagaacgtctacagtgggaacttcaggcctttacctttcatagtggtggcaactgaaatggctcctggacttccccttcatgaactgcttcacaattaaaatgtaattatactgtcaaagaataattccacagtgactctaacagagtgatttgcaaaatcactgtattgtattcttaagagaattctgaaagttcttctccacccggccttgctaaaccatttcataattggtgcctttctgggcatctctccagaagcttctcagttgtcacatttttaaggtcaactgtacaaatattagcttatcatccagtcggggcttctgaaaacatgatattagttatccagagagatctaattatggctttgtttggaaatagataataaattcccagtgcttctgagatgctgcacattccaggagctctaaaccttgtcataattcctcaaggatggaagattaccaactctcccttgaggttctgaagaatgaaaaactaggaagaaagaaagaagttaaaatgacagaagaaattaaggaaggcaggaaggagggagggagggaaggaaaggaattggctttgctttcctggctccagggtcaggcttagatcctcctgggggtaatacgtgcccccttctttgccccctcctgttcccccagttcccccttctttgccccctcctgttccccagttccccctgcctccagtcccccagttcccatctttggcctcctcccttttttccttcctgcatgtttctcccttccttcctctttgccccttattaaccctga

SEQ ID NO: 42973 - DNA, 1777 bp, Bovine  19866880923034
  misc_feature (1)..(1): n is a, c, g, or t
nggacgggggagcctggtagactgccgtctctggggtcccacagagtcggacacgactgaagcgacttattagcagcagcagcagcccagcaagttgtcctagtttgaagatgctgcctgccccctgctaggacctgagggatacagcctgggtcataatatttgaaagagtgcaaattcaagccacatgaatatgttgatttgataacttgcacacggcttttggaaaccatttatatgttaatgactcctgaatttacatctctagtccattcctttcctctgagtttcaagatcatatatacccacttgaatactggctattaccttttggatagttccatttctgtttcgtttcagaggcacctcaggctttgttcttgtggcagatcccatctcttctcttgtcctgtgtcccacctgctccttctcaagtcatcctggccacagcaagtcacaccaccacccacaagttcactccagctgtcacttctatatctcaacaagcgccccacacccaccgaaccgctcagtgcagtgtccctgcagagtctactacctccagttcattactgtgggaggcaggttccactccacagcagatgtggaatctcttctgttcttcccattcctgctgacacccacctagttcaaggaccaccgtggacctgaatcacagcaacgacctcctgaacacctcctgtctctcctctccagtcctctccatacaaacatccaaagagagagtttgcacacctagcttggatcacatcactgccgtctaaaatctgtctgtactctcaggggcatccttgccctcacccagcactttgtgctgagccctttcccacctccctccttcccatcgacgtcccctgcgcctggactgatcttttccccagagcttcacaggtctgggttgtttgtgtcttttttatccagttctcagttcagttcagttgttcagtcatgtccaactctttgcaaccccatggactgcagcacaccaggcttccctgtccatcaccaattcccagagcttactcaaactcatgtccattgagtcggtgatgccattcaaccatctcatcctctgtcgtccccttctcttcttgcctttaatcattaccagcatcagggtcttttccaatgagtcagttcttcgcatcaggtggtcaaagtattggagtttcagcttcagcatcagtccttccaatgaatattcaggactgatttcctttaggatggactggttggatctccttgcagtccaagggactctcaagagtcttctccaataccgcagttcaaaagcatcaattcctcaacgctcagccttcttcacagtccaactctcacatccatacatgaccactggaaaaaacatagccttgactagacggacctttgttggcaaagtaatgtctctgcttttttaatatgctgtctaggttctcagcagttttcagtttggtgggaagttcatgatcccatctcttaatgggatgagcaggacagtcatcttgtgaatggtgagaatgtcaggaggcatgaaggactgtggccactggtgaaactcccatgtggtggacaatggtagaaacaggctgacctgggtaaacggtctccctaggaacagaaggaccttccaggtcccgaagtcattctgggctggcgaccgctcctcctgggttccgctgagaagtgactgggctgttcctcccaggatgggaggcaccggcctgtggggtagattctatcagcactgtgtccccac

SEQ ID NO: 42974 - DNA, 845 bp, Bovine  19866880967899
  misc_feature (1)..(1): n is a, c, g, or t
nacgactcagctagaaatttgcatcccaaagaaaataggactagttaatgcattagagtccagctggaggtgggatgggcatgtactgttttagaagagttgatccaggaagtccactgcgaggaggtgaggaggagaggtcagagggcaccacccaggccaaggtcctgccggaggaccagctccatctctttgggaaacagcaaggtttgtgtggccagaatgtgcagagccgcaggagatgagctggagggccagatggtggtcagggtccgtggggtcttagaggccgtggcaagctttgccttttattttcacggtgtgggcagccctttggagggcatgctgtagtttgtatttggaaatattttctgaagtgtccttgaatgccttattatgtaactgagacaaaagccagaaggcagaaggttggagggcttcttttaggtcacaagcttttaggggcaggctttgactaaaatagacatctctaaatcctcctcttgtcaagccggaaggcagagacctgccttcctcctctcctgggatgctgagaggggagcttggtaatgcatgcagtcttatgtacattctgtatacggcgggaggcaaggttgcatcatgtagatttgtaaagctgaagctttctcagtgcaagatcatgagttttccaacccagactttcattcccctcagcatcctacttgggcttcctaggaaaagaaaaaaaaaacaaaaaacgggtcacacataggaaacaggctggcatccaacagaaaatctgtttggtttcatccgatggcccatgcgtcacgtctgcagtagctacatccacaatctgaaat

SEQ ID NO: 42975 - DNA, 678 bp, Bovine  19866881059971
  misc_feature (1)..(1): n is a, c, g, or t
ntggattggatggagtgaagtgaatgaatggagagtgagaacctagaggtgtgtgtgtggacacgtcttttgaagagctttgccaccaagagccatggggcaagggcagactcggggtccagaggtaactgggcatgttagaaccgtttggagatcccacccctgcccagcctactgcttgtctcctcgggggatccgtatggctcatgcccacggaaacttgacctagggcaggtgctagcgtgcatccttggacttaaatgagtgcctcgttaaagctgacacagcagcggttaatgatgcctcatgtcccgattcaaaacccctgactaaaaataacaacactgccaagcccttgcccagtgctttgccagctaattagctcatccgtgccccttaatggtttgatttatgtgtttcctccctcagcgaggtgggctcccaggtgaggaaatgctgagatgctggtaatgtgcacaggggtgtgcagagccctgggtttgccaagccaggtccagccctccatcgccttcctgctgacggcttcttgggccgcagatggcccctgtccccaatctgtttcaggctggatggtcgggaagccgtccttactggggagcgggaagatgcttggacattctgggtgctggagttgcaagggcgagtggggcagagagg

SEQ ID NO: 42976 - DNA, 1196 bp, Bovine  19866881060111
  misc_feature (1)..(1): n is a, c, g, or t
nttttttgaatgttgagttttaagccaactttttcactctcccctttcattttcatcaagaggctcttcggttcctcttttatttctgccgtaagggtggtatcacttgcatatctgaggatatacatactttatatgtatatacatatatatgtatgtatgcatatatgtatatgtatgtatacacgtatatgtatatataatatatgtacatttttatatctgaggatatacatatactgcatatctaagcatatacatgttttccacataggtctcctttaaatttgaagtagctcttttttttccaagatagcctgctttgattttaatggtagggtcttttcaaaccatactgagaatatgtgtgtgttaattgctcagtcatgtccaactctttgcaatcccatggacgatatagcagcccaccaggctcctctgtccatggaattctccaggcaagaatactggagtgggtgtccattcccttctccatgggatcttcctgaaccaggcatcgaatctgtggctcctgcattgcaggcagattctttactgtctgagccactaagaaaaccctgctgagaatatagtagagtttaaaaaaaatgtgttcttctccttgcagcaattcttttactgggcttaactctgactgacatggttgtccctttggaactggcaaatctcttaatatgctcagtaatcgtcttctctctgttgacacttgttggggcttagtggctgagatgggctccatcagagactgtctaggtcacggctctcatcttttaggcactgtcaagagggaaaggtttaggttggttgtatttcaccttgactgtttaaacaaccagccgtttttcctaagcagggggcagagctgtaggagagcctgccaactgtgctgtggggagcctgccctcccagcaggctgagcttgcctcctctagcagtggcacatgggtccactccaccacatctctgctctgcttggagcatgagggtcatccctgcctcttgcagccccagggagcaggcttcaggctgttttccaggctctcaggttagcatacggggctgaaccaacatgtcctcaatttgcagtctttccaccttcaactgtggatccgcccttattcctccttgtcattcgcttcatttgcaatcctataactgtagacagtcaggctcct

SEQ ID NO: 42977 - DNA, 2712 bp, Bovine  19866881127918
  misc_feature (1)..(1): n is a, c, g, or t
nctcttcttcatcagcctgccctccccaggtccccgccagctgcgggagatggggttctggggtggtccattcctacgacccaccctcccagagagcctcagcgctctgcctgtgtcccacagtcctccctgtctggtaacccctctgcccccatctgtctagcccactctggaccagtgcggcctcctgggctagttcccactgccctgggagaggcactctgggggcacccgtctgcctgcaccccagaagcaaaagacagcgcccgcccagtccgcacgcgatagcatctcacctcccaggctcctcacacgggctgcttcccacgcttgctgaacaaagtgaggggaagcccagccctcccagcccccatccctcaaaataaatatttgccttggtatcgccactggagacttcacagggcacacgcccctctctctccagcccccgggtccttacacacttcctgggttgagtgtggccttttttttgggggggcaggggtgcagggcagctcccaggacaaagtaagaggaacaaagaaaacaacctcttgagaataacagagagctggcaacacttagctttcttttccttttgtgtctccacataattgccacaaacagcagagactgaagagcgctaatacgtagccactcagaccgtacatcagtttgaacccacagtcgcagaaggcgtttcccttcagatagcaacatggacaggagggcacccgggtgtgagatggactctaggggcaggaggggcggtctggactcagccaaaagagcccccactgaccactgaggtcaagcaagaaccagggagagccgcggggaccctgggggttgctccgcattttcaaggaaaccatttcctgctgaagggttgcaccctcactgctccatgtataaagctgcaactattccactaaccaggaatgaagagcccatagacaacgctaagtctaaaatctaacgtctgagacagtgccggaaacgtatcaggcacttgactgtttctggcaaacagctggaaagaaggcgagggagggaggcaggcagtgatgcggtgtaaaccctgaacagcaaggaaaggtccctccagacagggccgccgacaaagtgggtttgggagcagcttcgctgacctgggggaagggctaacaggacactaaccaccgcctcaccaacagaacagggacaccagaggtgtcctctattaggtgtcctaataggcaggcctattcccatggccccgaacaggaaaccacccaaatgcccatcgctgggacagcaggtgaccaggcagaagcagccacctccagccacacacaacacagaggagtcttgccctgtgctgaccaacttcgctgttctgatctgggtgtgggacataccgtcagtttgtgagaacaccctcccttaggacctgggcatccttctagatctacgttctatgctccccccccccaaaaaaaagagtcccaaaaagctaccatgtctaaagtggtctcaatacctccaacccccaaactcctaacggtacaataatatacagaaaattggagatccaggcttgacggtccaaagtaaaactgaaacaactgtctgtctgtctgagaccaggttcaccagcctgaactaacaggagcggtgtcgggacaggagacaggagaccgaggcactgctcacggcagcacctggatccacagaaaccgcagcgaagggcggggcgggcaggcgggctggcccacggaagtgccctccctggaaaatgggccaatcctcccctccagacaaggatccctggaaacacaaacagccgaacgtcagcccactccactctctccagacccacttccttttatctcattacaaaagcgtgcccgtagtcaccacatctataacatcaactcttgctgcggcagcagtcacgtggagaaggtgaaggaataaactcaggaagtgaagggatgccttgctttgctgcaggcactcatgcaaaaaatttctaactccttcaagtatcctcagtagacctggtatagcatgtccatattaactaaaaacgtattgaattaaggctaaacccacttcctaaaagatcctgttaccctctttaagactattatctgagaatctgttaacaggagctttgtgtgctaagctggaaagcaacatggttctatttgcaagagcctgctggatgttgacatttctaagaccaaacataaatcgtttgtgaacatggccggtaattatttggaattcttctcccagaaccatgaaaagtgtttcccaccctttcaaaaaataaaataaaataaaaggcagcttcgaagcatgatgctaatgacaagcagacagagtgagcagtttttaagatcacacagttgcttgtgtagaaacactgcacaaatactccaacactgcagcccaaaaaaagacaatccgaatcaaacagcgagaaaagtgtgaaaattgcaaatgagcccctggttaaacaaacacaccaatctgttcccagagagctcagggtggccacctgttcgggctggtggcaagttctgattaccagtgggagagacaaaatgggagtgatgacagccaccccaccccagccctagctcgggtcctgggccccaccctccagcctatatttagtctgctctttaggaaaatgtcccaacctcgcacacagacagctat

SEQ ID NO: 42978 - DNA, 1093 bp, Bovine  19866881226400
  misc_feature (1)..(1): n is a, c, g, or t
nttctttatagttcttcctgcctccctccgccaagcgtacaaaataccttcccaaagcactggtaagcaagtatggacttgtgagttgagatttggggtgttgtaatgaggatcccttgggcttcccaaatggcacagtggtaaagaatctgcctgccagtgcaggagacacgggttcgatccctgggtgccatctctgggtcaggaagattcccctggaggaggaaacggcaacccactccaatattctcacctgggagattgcgtggacagagaagcctggcaagctacagtccatgggatcacaaagagtcggacacagctgagcacaaacggggattgcttgctaagggtttgtgatggacctgatccagcgtgcagactttaaaatcctcacaaaaaccgtgagggtttcccttttacaggacaactaccagaactgaagtcgctcctccagccttattgtccagtaagtgctcgagctgggatttaaactcggacctgcctgaacccagagctcttcatcacatctccccgtgtgcctaaataaaagaaacaagtcacacctttgggagcgtgaagacacaggcatggaaatagcagagtgcctacctcctttacacagtgataacaaaaaggtggtgaaatcttccaaacctgagaaatctttgcagcctaaatggaaggcagtctgtttgcacctttgtcccccagagggccatgcccttgcaccctatctacaaggtaaagtttgatgtatttggaagatggtgattttgaagttggggacagctcagaatctgctctgaagtttgtccttgtaccatgaaaagagggtattctgggcagatgaggtcactagaataagattaagattataggaaggctgttaagtaaatgtaagataaggtccaccttccactgtacaatcaaataaaggacatactaatgagattattcttatctgctccacgaagcctcgtcttcagggaactctgagctgatgcctggtagcccagctcttctgaaccaattgaaaagaatcctttctggaaagagtttttgggttccaaattcttattaaatcaccctt

SEQ ID NO: 42979 - DNA, 751 bp, Bovine  19866881334658
  misc_feature (1)..(1): n is a, c, g, or t
ntctatatttggaaaccaagtaaaattgaagaacagaaaagcagtccttctgaggggctgttgctttgtgtatattcagaggggacagcaaagggcacagtttgccaaatgtattcaatcctaaagtttaacagaacccctgaagatattgtagcaaataatgtataaaacaaacaaacacaaagcaccagtgcaaagacgcttgtgaaaatacacggcaaacgtgttgagagaaaaacaaaagtcggtaaacattacggaaaccctccttgcagatgcctgaacagatcctttctaaatccgttacttggttttcatatgatccaggagaagattatgtaatttcaaaactgtctgtaaactactcattttcatctgatttctcaatgtctaatttgttcatcagtcacagctatgtgtacaaaaccagctttttaatcagctcacagagtgtatagaagcacattatatcttgcattttatgggagaagaattcttgtgctcagaattattatgcattttacactcaggtacacagaagaatgatttacacacgtgtgtttctagcttgtgcctctggaaacatccagtttaaaacctgctgcacacccaggctcggcgtcctgcattctcacacccccaggagctgacatgcacacgaaacagggttttctgtgacgcgcatgcagaaaagggctggagcgggttgctggggagaatgaggcttccttgcctttcatcttcatttgga

SEQ ID NO: 42980 - DNA, 5192 bp, Bovine  19866881351692
  misc_feature (1)..(1): n is a, c, g, or t
nataattatatccataatcaattacgaatatcatgcaataatggtattgattaccgacttctccctttcaggtctggaacttgggagtgggatggagaagttcccccagactggggaaagtggaagcaaagcaggtgggagtcgcctgtggagactcgtcatgtagttggtgaccatgaccatcgtcgtctttccccagcttgcttctcacagctctgggagcacgcgcctctccatcccttgtgagcttcggtgtgtgcaggcctcttgtgtgtgatgaatagtttctattgctgtttgtctctcggttacttgattgtcctcctgtgcgttttcctcgtctcttcctcgtcggccgtgccgatggtttccaagccccccttgctcaggaatctgactcagtgtggggagtggctccaagccccgcccttggggccgggttgtgagaaagcccctctgttgctgtgtcatagttagaacactggtccttttatgtcgtgggaagcaattgttgtaagtcctctccagggacctcgtatttctgtacccatatgctggagctggctctttgctagtggttgtaatagctgcaatttagtgggcatctactgtgtgccaagaattttatgtacactggctgcctgttataatgatctataaaatccccgctatcgtggcaggtaaggagtaagagactcagagaagacccatgtcatgtcaggttctacagatggttgatggagaaaccctaggcttggtatctgggtgtgcccgaccccagagcccacggggtccactgcagatggtacccgtggggcccagggcagagatggcacagccagcatcccactcggcagctccgggcagtgggcgccttaggtttgagagctcgagttgagccctcatgtccgagggctggaagcggatgatgaccctccgcattcagcttgttctcattattgtgctaacccgtctccacctgggatcccctgtgtgaggcactcatacatttgcacgtgtgtctgaccgtcacgcgtctgacctgtgagtcggggctgtcagccatagcaggagtcgaggctgagcggtgagggagagaagggaagctgggcagacggatctccggtccccagctgcctgcctgcctgagcaggtggaagatcatggaactgtggtggttgcagtgatggggccgtgtggaggctgtgtgtgccttactgtatgatgggctgggtttcaagaatccctgtcctgtagggcttgggaggcgtgtggcatccttgcactaagcctctgtgtgatgttgggagtcaaatagggctgtggaggtgagactctgcacccaggtactgccggcagcccactggcgatgcgctttctctgtccagacgtttatcacttctctctgaagtgggcagagccagaagccttgaagattgtgtcagagaaaggatgtgagctgtaaagtacctctgacataaatctcactgaagtactaccggggcttccctggtagctcagatgggaaagaatctgcctgcaatgcaggagacacaggttcagtccctgggttggaaagatcccctggagaaggaagtggcaacccactccagtattcttacctggggaattccatggacggaggagcttggtaaactacagtccagagggttgcaaagagttggacatgaagtgctactggaggagggtgtccagaagatgcaggtccatctacaagacgcagtagcatctgaaagatgcagttgtgggccaaatagctgccaggttaccgagctgtctgcagtgagtgtggccggttctcagtgttggtctattggtcttcatgactgaggtcttctgcaaagttacgctgtgctttactgcacggagcgagtcgttgccaggactctgacggggcccctcgtgatcttggtctggtattagtttcctgctgctgcagtaacaagtcacccctaacttaatgacttgacaacacaggtttatcctcttacagctctggaagtcgaaagtcccaaattaaggtgtcggcaggctgtgccccgtctgaaggatctagagaattcgttccctggtcttttccagctcctgcaggctacctgcactgcttggctcctggctcctccctccttcctggaagccagctgtgtaaaaaccttcagatctctctctgaccccctcttccatcctcacatcacatcttctctcccttttccgagttctcaggaccctcacggtcattttgggctcatctgggtaatccaaaataatgcccctgctgtacgattcttaatcacgtctgcagtcgctttgtccccgtcaggtgacagtctcaggatgtgggcgtctctgggggtgggggggggcggtttttctacccaccacagccccctgctctatttcctaccagggtcagcgttcctgcaggtgattcttttcctgttgtgcagaccgggcatcaccagactcagccttcctggggctccgctgttcacacagggtggggtgggggcaccactgagtgtcaggcttcctggctctctatgccagctttcactgcagttctggaggcagggttagaaaacaagcattctgggcatccgtgaggacctgtgagcacgtggggaccatacaccttgactcagcgtgaagaggctggttttggaacctgagcttgtccttgttgtccagactgaagcttctgactgtcctgagctgactgggggctcccctttttgctggggagacagcgttcatcttgcaggagcctcgatccccagctcctcagtgtgaagagaccctcttgcgagcccctcccctggtccctaggggccaagactctggacctgctcccgtcccctcccccactcctacaggaacatctcttatcctttcggggtcccccccgggggctgtgtgtcttcatctcctggacggtcttctcttctcaagtcctgttgcttgtgactgatcctctccacttgaccactttctgctcttgagatccgtaatgacccctgcatgtgtcctcctgggtgggacagggttagagaccttggttctagcgggggagacctaggtcctctgcccacctttgcctctaggtaaggtacgcaggagccctgaccctgggaagtggtattgttcacctggcggatgcttgcctgggttttagacttttcaacaggaagaggagaaaatggaaaagagagttgatcaccaagaagagaattcgcatgaatgaaccaaccctttttctgattattaatgtgttacacgctcagtatataaaatggggaaatgataaagaagaagaaaaaaggcccatgatccctccatatggaggcagctaccgttactttggggaggtttcccttttccccaccttggggttttacaggggttgatacgtgtcacctgcacagtggtgtgtccaggaatctttgttacgatgacattgtgctgtgtcctcaccttttctaaaagaatctttttcatggctgcgtggtatttaagtacatggatgtattggaattgactcatcccagagttcatcccaaagagctgggtttgatccctggtttgggaagatcccctggagaagggaatggcaacccactccagtactcttgcctagagaatcccatggacagagcagagcctggtaggttacagcccatggggtcgcaaagagtcagacacaactgagcgactttcactcactcactcactcatcccaaagtagcttaaaaaaaagttttgagcgtgttaagtgaaaaatgacaacaattaatattttaaatcaggtaaagagaaaccccggagcccctgcccctgtttacctgcctgtctgcgggggccaggctgccccctgctggccccgatgagtggacagggagccgtggtcctcagcgtggcgtgtggacggcgggctctgcctgccgctcagagctgctcctgtgagttgacagacgacgtcgctttccttggtgcagttctgtcactggtgctgcaggttagtcatggcggaaattgaagcggaggggaaagaaacatctctggctactgatttcacaaaggaaaacaaaactgaacaaaaaatatttgtggggcacccgtatagtgagaacgaagggagatacagatgagcagtgagtgagcatcagaggcagaacttccctggtcgtccgggagccaggactctgcactcccagtgcagagggtccaggtttgatccccggccaggaaactggattctgcataccgtaactaaagatcctctatgtggcagctaagacctgggcgcagccaaataaagaaatatacatgaaaaacaaatgagcatcaagcgaatggagtcacagccttactttggatgtctttgctttgaaagaattgtttttcaatctagtaatagtctattaaatatcagaaatggtcaagctcattaaaaaccaccgtcaagtcgcacgctgatgagaggggttttgcctctcttcctcttagaactaatgaagatccaaaagtttgttgcaggctggaaaccaggcggattttaataggaaatgatgtaagaaagcttcacgcctgcttttcttttctgggtgcgccgagtggagcgtggtctccgggctgtgcgagcgcccgctcctcatcggtttacgctgttgtgattcccgtcgtgtagaagcatggcgggtagttagaaactgggtggccgtttgtgctgagcatcacttcaaaggttctgcttggaatgctgagcaaaaggacgctctggctgagctgaaacacatggcaagcatcctactccagtttttaaaaatcatcaggcgggctttggtgtattttttgggtctttgttctttggtcttttgctcgaatgagaagctcagaggatggccctgggaggccggcacggaggccgctctgggactttcttacgtgtgggaactgatcggccccaatgcttcctcctctccgctctttttaaaaatttaaaaacaaaatttttttcaagtgtcttattgatttctggctgcactgggtctccgccgctgcacacgggcttcctctagttgtggtgtgtggtcttcttatcacagtggcttctctggttgccgagcatggtttctagggtggggggcttccgtagttgcagtggggctctaggg

SEQ ID NO: 42981 - DNA, 783 bp, Bovine  19866881361516
  misc_feature (1)..(1): n is a, c, g, or t
nctgctgctgctaaaagggcgtttccctaagaaggagagcgatctgttattagcagcttaagagggctgttgggggccctggaggaagtgactcaggagggagctgcagcctccacggcggagcctggagccctgtttactgccacctgtcttttttgtccaaagctggctttttattttgttaagactgaaatcccttattctgcatccttttttcccctgtgtgccctgcaggtgtttatcgttggtgagtctcactagggctggttttaactactgatttggtcccatctcttgtttctcagcgttcaagcaaacccctgagcccctgccccccacccctggcccaacactctggattctttgaggcctaagtgattgagtttggcaaagccgatcaggcttagttatttttaaaatccagagtttggggctctgatcgggtgcttagccacgtaattcctccgctctgttaagtaccttgctctgagaaggaacacgcatcctgtagatgtttgtctctaatctctgcagcatctgtgattgtcctgggggtctgagcaccaggcctcctccatgtcacgtccttccgggagggccaagggggcactttccctctcctgttttgtggtgtgggaagcctgcacacggggctgcagggatgacctgtccaggggcagggctggcattgtggtgggtcccgtccctgccctgtgcctgtgcccatgactgacccaggccaggaggggcttacttgcacctgggagctaaggagggaaggag

SEQ ID NO: 42982 - DNA, 690 bp, Bovine  19866881617369
  misc_feature (1)..(1): n is a, c, g, or t
ngataggataagatcttcccgcctacttttttttccagtcacaggctccaggaatacaaacaattttttgtttccttgacacgtctcatgaaagtgtcacataaaaattaaaaccaaatgataattaaagaaagctggccggctattaaaatcttgttagacttcctcaaaagttatatccctattacattcctccagaataattcccttacagtaatatttttttaaattaaaaaccaaagctattaagcaggatgtagcctgagaaaatgtatcagtgcaaatgaagaataaaatggttttacttaatattccaagctttcttcttaggagaggagtggctacagacttcacttaaggatgaggctcatttgatgggagaccgcaccccttccagtcgggaccctgtggaggtggaccgaggggtgagctcccttctaagacctgcctctttatcagtcgagtgctacagacacctggggacaagaggctgggacttccattaagtccgatgcaggaaaatccctatcgaattccatcttaatgaattctggagagtgctgcccagattcacaggtaccttgatttttaatacaaaaaaatatccctgggtgtcaggaggttcaacttactgaataatacatttcctacccttctgcctggttctatataggaaaaacattatcaggt

SEQ ID NO: 42983 - DNA, 1111 bp, Bovine  19866881663975
  misc_feature (1)..(1): n is a, c, g, or t
ntgggtggtgttttgcatgccttctgcagggccgagatggagagagaagccggcagtcagctagaccactggctcagaggggattggctgtggtttgggttccatgccttgtaaaaatgaaggtaatgattctcaatctgcttctcagtgcaccataaaaattaatgggtggtttgcaaagcatttctacatccttgcatggacagcggctgtacttttaggggctaggaagcatttcattcgtgtcctttgcttccatcatcaaataaaacagtctacctgccacctggtcatcccgactaggaaacgggagtgtccagtggagtctggagaaggttcccggctccctgctcagcactgtctttccaggccgagtctctcaggaaatgggggggggggggggcggtgctaggcttggaaggagacagaacccccttatcccttccctatctgctttgtgcacatgggcaaatgcccagagtgaaagggggctttgacattaaagccccagggttcacaggcctgatgccgaggccacgctgatcttaggggaaacagttagttctgggagaaggactcagacagtgaacaaccctggcttcctaggcatttgttttacggcactcttgtttaccaaatgaacaatgacccgctcagatctgtggtgcctgagaagcttctgtgagctttcatttttttcctgttgtcccaagactctggcaccatgctttaaggagcctttgaaagcaattgggagggactcggatcatttgttaatttcggatactaaaagctggagccagagccatctgaggtgccacacaggttgccttttgttcccctggcaaagcagccgtgacggaagcgcctctttctgtagtaggtctggagggttcctgtcatttgatagtttcatttttttttaattgtcactcccaccagcactttgttctgcccaagggctaggagctgagcacagtccagacacagggggcttttcggaaggacccagaaagtgggctggatgagttactgataagaatccttccaggctcctgggctcttagtgttgtgcccagaatgttctctgagttgggaggaagggggagtc

SEQ ID NO: 42984 - DNA, 1457 bp, Bovine  19866881907101
  misc_feature (1)..(1): n is a, c, g, or t
ntcctcctcaggccttactgaagatggactgccagggcctggtggtcagactcatccaagacttcgtgctcctgaccacggcggtcgaggtggcgcagcgctggcgggagctggccgagaagctcgccaaggtgtccaagcagcagatggacgcgtacgagtctccccaccgggacaggaacggggtggtggacagcgaggtgagcccggctgcccttccctccacctgtcaaatgcagtggtgacagcgtctacattagagcatttttaggaggacagatgatgaagtgtgaaggcaagtgctcagtgcagaggaggctcgcgatgagagggagcatgtccatccttatcgggatccttagttggcagccaggccctgggtggtggtgaggctgctctgctctcaggtgggacattggaacggcatcctcggaactgccagtcccttgctgatcctgatcttaaattacctttggcctgattggaggacgcaggatgatggggctctgccccacacagggaggggtggacagatccttgtatgttgccggcttcagccaaggctggttgggtccctgctcagagagtctgttttctcacttgttttgtggaggtcactttaagcttctggaaagacagaaaggctctcaagacctaggaagcaggaagtccccaggataagggcatcctttattgacgtggcgagtttctaaataaatggaaagtgctatggggttggaaggaaagaggccccttctgttggcttggccagtacgtggtactgatagcttacaatgaacggtgttggattcataatctccgaagaagaagatttagggaccaggcaccaggcttgatcactcaggagcttttgtatagcaaagttttattaaagtatgaaaaggacagaggaatcttctgacatagacttcagaagggggacgaagagcgccccccactcactagtcttaccaaggccatatatacttttaccagacccactcccaggttaagacgagagctgacaacagcaaggccttaaccagacccactcccacaataaacatcttaagagaacaagattagtcagagggttcttgttaggaagaaacatgaacttgagcaggatactttgttatattgactaagacaaagcaaagtagggaaaaaaaaggttgtccttttctcctagagagcctcagacccctctctctttctcggggaccctggacttcttatcaacctacctaggaattgactctcagcactgcccacctgctctcacgcaaagtgccttcttccctctgaaatgtgctggcccaggacagggtcgactgctttggggttcatgatgcttggtgctaggagaggtaactcggaccagctctctcgctggctcctaatctctgctctctctcttggttttcgacgaccgcaccatccaggccatgtggaag

SEQ ID NO: 42985 - DNA, 2695 bp, Bovine  19866880036926
  misc_feature (1)..(1): n is a, c, g, or t
ntggtgactgcagccttgaaattaaagatcttactccttggaaggaaagttatgaccacctagatagcatattgaaaagcagagacattactctgccaacaaaggtccatctagtcaaggctatggtttttcctgtggtcatgtatggatgtgagagttggactgtgaagaaagctgagcaccgaagaattgatgcttttgaactgtggtgttggagaagactcttgagagtcccttggactgcaaggagatccaaccagtccattctgaaggagatcagccctgggatttctttggaaggaatgatgctaaagctgaaactccagtactttggccacctcatgcgaagagttgactcattggaaaagactctgatgctgggagggattgggggcaggaggagaaggggacgacagaggatgagatggctggatggcatcactgactcgatgaacgtgagtctgagtgaactttgggagttggtgatggacagggaggcctggtgtgctgcgattcatggggtcacaaagagtcagacaaaactgagccactgaactgaactcaagtaatcatttaaagccaccaagttagaaagttggttgttccacagcaataggtaactatgacatcactgtgagcaactgtagaaacagacagggagtttctttcagcctggatgtcagggcaaggaggaaagagcagcatccctcaaaatacatactaagaataagagatcatcctttgtcttttaagccactgcagttttgaggttgtcctttactacagcataacctggccaatcctgactgattcagaaattggtaccaataagtgaaattccaccctaatagaggaaaactaaaaggtgaagtcagggaatagaccaaaggaaaaacgaccatcagaggctgcaagaatgacaatctctaccacacagtgatatagtatctagtaaaatgctcacctgtgaaaacttcaaaggcaaaaatgtacaaaatgaatatggagctccaagactgatgaggtcatggaacaaagtcccacggccccaccctccaatgggcacttagcctgagcaagaaatagacctccatctttaagacactaaaatgtttgtggttggctattatcaggacatgtcctgacaaacacaatctctgagcccttcctaacactaaagtggggtctgtcaacactgaaagaggaaagacacccagtcagagccttaccgtgatccacagggaaaagttcaccaacaaagtgagcatgggaaatactgaacttgaacgttaagtatttggctccataatactgggaaatggaaacaaccagccaatccttcaaaacaactcaaccttcttgcgtaaaaccatcaggtagcctgtggagtacagagctgcaagtagggagaagcccagtgaaaggagggaaaaaaggtatgtttgggattttctcctcttttaatagtcttatgtcctgacagttgggaattctttgttacaagtgacatcactggagaaaacatagcccctctcttctcctccccaaccccacaaaaaaagcctaaacctttaattttttgtatcagtgtgtaaggctggtacagtcaaacacataggtattatgtagaatgtgaatcagcataaaagagatggttttcttttttttagttggattcagagttagtttttgagaaatgtgatttttgcaaaactgcaggacacagaggagctggtaaaattttacagtgattctttagacctacccaaagctttcctctgatatttttatagacctgacctccacgcaacctttcttctttctggaactgcaaccaccatacttgaagtgtgcaaaagaggacttagatatcagcaggaactccaggtgggagagtgagattgaagtgtaattgatatcaggcatcagataaatctcaaccaagggaatgagtctgtcccttctcgagcagcaggcttgcacatgcctggatctaggattgatagatgtgtgccgctgtttcatatacaccaaggtgacctcattcactcagccagccattgcagtgattcttgaataaatgtccccaactgagaaagaagtgaaaaaaagtgattctaatgagccagactcatcatcagaatcaacattctgggttccaatgactgaaccaacccaggccagccctggggagcccaggacttcatgcagcaacaaatgagaatttcccctccaaagccctgcagatgctcatggaaatggacaccccaatataaataccagctgggcagctaataaagcaaatctcagtttttctaagaaggccattagcattggctacaagtagagaaaagaggcaagaatgaaggaaataaatccaagggagggaaaatgtaacatctctgaagaacaatgagcagaattgtcattatttacttgttcagtcatgtccaactctttttttgacaccacagactatagcctgccaggttcctctgcccataggatttccaaggcaagaatactgccatttccttctccaaggaatcttccttcccaacccagggattgaacccacgtctcttacattagcaagcagattctttaccactgagccaccagggaagcccatgagcagtatacataaggctaaatcatttgaacattgaactgggaaagagtgaatcaaagatta

SEQ ID NO: 42986 - DNA, 2395 bp, Bovine  19866880168968
  misc_feature (1)..(1): n is a, c, g, or t
ngagagtctccggactgcaagaagatcaaaccagtcaatcctaaaggaaatcagtcctgaatactcatcagaaggactgatgctgaagctgaaactccaatactttggctacctgatgcaaagagccaactcactggaaaaagatgctgatgatgagaaagattgagggcaggaggagaaggggatgacaggggacgagatgactggatggcatcaccgactcaacagacatgagtttgagcaaactctgggagatagtgaagaacagggaatcctggcttgctgtagtccatggggtctcagaaagttggatgtgactgagcgactgaacaacaacaatctgggtcaatacagtcactctatatttcttttttaaatttaaatttttttctatattctctacgtccaacgttagcactacattcattacagcttgactggcaaccaacatgcaagctcagtcactaggttgtgtctgactctttgcaaccccacaggctgtagcccaccaggctcctctgtccatgggattttctaggcaagaatactggggtgggttgccagttctatctccaggggccaacataggcttaaccaaagtcttggccctctgataaatagatggaaagatacatgatagataatgatatgtagataccacttcagaaaaccccagaatcaatcatttctgtattatctgtatggaagtagatttggcctctcttccaaagccaggccagagtatcaattcctaatagtggtgctaatttcacttctatcacttaaccctgaagcagcactgtttgtgcctctatttcactcttacagaagggaaatgaagcagaataactttaaactgttaacagtctatagctaacttataatattgttttgtcttataaaaaggtggccctctcttacctgaggtcaaggcatgaggaatccttgaaaaccgttgtgaatcttctgggaagttgaaaatacaaaatgtcatttacctttgattcttaaactttatttctcttcctctccctcgtattgaagaattccagttcctagccctaatgacaaaggagctaggggaaatgcagccaactatcgccaagtaaaatctgaaagctttcaagttttcctatcacagagatggtactcaccactaaaagaagctctagagataaaatcatcaggctgatctaatttaattaataaatggcataatctggaagcccattagagaagtcagaagggccagctatacccacaacagtgttaatcaccatccagccaactcagtgtaactctagacattgaaccattaaagtacagactggaaaaagcctagttcctgatgactctaataatctaaatctggttattgacctctctccttccatttctccctcaccagtccccattatactttataatggccaactcgttggaaaagaccctgatgctgggaaagattgagggcaggaggagaagggacaacagaggaggagatggttggatggcatcaccaactcaatggacatgagtttgagtaaactctaggagatggtgaagaacagggaagcctggcgtgctgcagtccatgggattgcagagtcggacacgactggacaactgaacaactaaagtttataaaaatgtgaaaatactaatggaaagcatttgcagtgttttttaagcccaccaaaataccagcttttattaaggttaaaagaggcacctgaagccaaaaggggctgaactagagcaagtgcttccagccgcgtcacgcctctcatcccaaacgctctccctcccagacttttgaggctgcctcctgtccaaaactatggcagaaaatgaaacaaaagtgaaggccgcaatattttgatgtttgcatttttattacaatggaataaaaaacataactaacccacttcataaaaatgaaaatgaatctgcttttcaagcatcaccttgctcctcgctcctgacagcacccatctccgcccacctcagctcataacaaggaactgtgtttgttagtggcgcgccagacagaaaattaatgtagtcagccattcgcttgccaattaatttagtgaagcagcaactaaataaatccaattctctcaagtctgaacataaaaatatcagctgcatagttgatcctagacataggaggaggaagagaagtaactagcatttgtaaatattcataccttccacgttttaaataccttcaaacacattggtaggccctgacaggcattctttcatgtccaaccttacaagaactctgcaaggaaagaattactatctccactttacataaactcgctttatatagggaatttaaataaccgtcccccacgtcacagaacaagtttgtggcaaagctggg

SEQ ID NO: 42987 - DNA, 1186 bp, Bovine  19866880279736
  misc_feature (1)..(1): n is a, c, g, or t
nttctgtgtattcttgccacctcttcttaataaattctgcttctgttaggtccagaccatttctgtcctttatcgagcccatctttgcatgaaatattcccttggtatctctaattttcttgaagagatctctagtctttcccattgtgttgttttcctctatttctttgcgttgatcactgaggaaggctttcttatctcttcttgctattctttggaactctgcattcagatgcttatatctttccttttctccattgcttttcacttctcttcttttcacagctatttgtaaggcctccccagatagccattttgcttttctgtatcattttctacttcacccaaaactctgtctctgaggtttgatatggcattggtgcacagagaggctaagctttcataatactattagtaaattaaattctgcctccataccccgccccacctgcccctgacatgtcaactgccccctctcctttttccctagcaaaactgtgtgttagcacttaggcaaactaaacaacctgattttttgctggcattagatcgtcaatctctgagctacttgtcagtgtaaataataaccaatttatttcattataatcaaactttgctgtagtttgataagacctctgtgtctataccttagaaaaaggaaatgtgattttttttgtgtgtaactgaatctcctcctcatttgcatacccacccctcagatgtctggaaccaatttgatagtactccaagttgtattcttaaactttacattagctggtataataattatagggaacacacacaaaaacaggtaattctaccaaagctttatttaaaacgaatcacagccttcaagcagataccataatggaatgttaccagccacgagaagctctgaaatgaaaagttccacccttgaaaagtctatctgcaggacactttgtctggaagcttagtatcaaaggaactgctgggttataaatgtaatcacgagttaagactgtgtgccttcagggccacatagaattatttacatcagaattgagatccttccttgccaatcagcagatttccttaaacctgtgtgaactgactgggaaattatttttcgtagcagcaaatacaatattattacatagggattctaggaaatgggattaccagccattttcaaacattttatact

SEQ ID NO: 42988 - DNA, 1237 bp, Bovine  19866880344577
  misc_feature (1)..(1): n is a, c, g, or t
naaaactggtttagggcagtggttctcaaagcttggtccctgtaccagtaacagcatcagcatcatttgaggatgtattagagatgcaaattctcagacccctcaatccaaacctactgaatcagaaacccagggggttgggcccagtgggctgtgtttcggcaaacttcggtgattctgagatgcaggctaatgtttatacccactagtgaagggactgctgctgctaagtcgcttcagtagtgtcccactctgtgcgaccccagagacggcagcccaccaggttcccccgtccctgggattctccaggcaagaacactggagtgggttgccatttccttctccaatgcatgaaagtgaaaagtgaaagtgaagtcactcagtcatgtgtgactcttagtgaccccatggactgcagcccaccaggctcctccatccgtgggattttccaggcgagagtactggagtggttgccatagtgaagggacagagtgagacatttctgggcaaatgaatgcagattggaagctggaaaacaagtttttgggtgaaaacgaactactcctgggttgtggtttgcatagaggtgcaggagaccaacagagagagcagatgagtacaggggctgagaaccggcttctgtgattggccaaggtacaagatacgcatctgtttactctggaaataaggggctagagactgtgtcccagtgtgacattggcagcacctagagttatttttagtgctgctctttgtttcacaggtggaaaaagaaaattttagaatgtttccaaagaatgcagtatctaacacttcttagaattcaggttttcttctcatcatgcgagtcagaaataaagggtgcagcgtgattgattgcactgcagcccatcttacagtggaggcgccagcctcacctgcaggtggcctagcgtgcaaagctggggggtgtctagggagcctcacctgatccccctgagacggcagctgggggtccatgtgctgtctcacactctctcacgggcaataggattaccttatcaacatccacgacacccgagggccaagcaactcaggtcacgttttgctacataactacttcttatcttcgttaagcctggtgacagctttcctaccagtaggaaaacatgccttagcccacgtttgaggactccttgctaggtcaagttaagcaaaatctggactttcgaaaaaatatatagtagagcacgtaaaa

SEQ ID NO: 42989 - DNA, 2809 bp, Bovine  19866880359946
  misc_feature (1)..(1): n is a, c, g, or t
ntatgaacatttgtagactaatgtaatctaaatgataatgtaggatcttccaagaagtgtttcccagatgtgcaaaaggtactcttttctatacagatctcatttctaccaattcaccaaacagaaactgctgtagccatcttataaatattcctttcctttccttcccaattatttttcttctccaaaacctacatatatctgagatttaaatgaaatatttattatcaccacaagaaatgaacctgatccaaatccactaaaaggaaacatatattacagtaagtcataacaacctttattcatctgtgtaggttctagatatcaggaaaattaaaatttatttagattttaactcatgtaaaaacacattttagtctttaagaaaaaacataatccagctcaattaactgattttaaacaaatctatgtatattaacactcttattaagttactatgagccagagcatttttaaataaattagtatattgtagtctccaagttctgcatgccttatgatgaataaatatggagtgttctgattatacatgtatgagcaagtagttttcattctgaatttggcattgcttttaaaaaaagttatatctgaatgttatatcttagagtgttgttctgtaaagagagccaagaatagctacactatcctcttctatatttttagaagtaatatggatttcagaagtaaaatgacttttaaaatccatgagacagaatggaattaaaaacaaaatgtaagatgaacttttcagtacttttagtctgtttcagtatatttattaaaatttccttttagtgttgaagaaaaataaatctaaaaaatattatcaagtattcaaaacctactttcataatgccgttaaagtaattgttcttttatccagactttgtatatcctctttttcaatattataaataatcacttttttttttccaattatttttatttgaccgcactgggtcttagttgcagtatgtgggatctagttccctggccagggatcgaacctgggccccctgcactgggagcacagaaacttagccaccggatcaccagagaagtccctaaataatcacttttatctctgtaatgcaaattatatcatcacccctcagagagttcaagaagaaaataaaatctcttaaatggattatattcacttcctatttggattctttttgccatattaatttaaattaatgaactgttgaccattaactgtataaccagtaagatctggtaaacaggctctggtgttttaatgtgaatttaaatttctactgatataaatttggcattgtaattttcatttttccaagtttacaatttactaccaaaatcatagtttttcttattttttttgatcaaaacattttccagaaatttcaatcggttctattcttttttattcaacttaaacaatcacattttttctgttccattagttctacttagttatgcccctgtaataaaatcagttacaatatctacttcaaaatatcatcctgcataatactttttataagtgctcttcttttcctcaagaggaaaattcatctccgccactaaacttgtagcttcagactggaaaactctccaaactctcaaaaaaaaaaagtatcttcctgccacttgcactgtaaatcaagtatcactccacactatagccacgaagtctttatgaatgtttagctatctgttttaataaaatgacttgattaccactgtacacagggtttgccggcacggctgtcatcactgtacctccaaagagcaaggtaagtttcaatccctcagctcaacaaaaaataaaagtgtggaggaagaacagatttaagctggaggaagctaatagtcctagggaatacaactgggcctcaacaagcagaaagacatcaaataaaaatttttaatcatgagattctgctacatttaaagaaatttatccaaagtactagaaatttttactaggactgtaaaccaaatacaaggatttcttttcctattaactaataaagaaaaattttaatgtttattttataaaactgtcactataatctttctggtaaaaaaatccttttttctttagggtcaatggcaaaaaatgaaaaggtttctccaagaattatacataccaatgcccaactaaacatacagttatctcaccacagacttattgaaataccaaaatttctaagaagaccaaaaagtaaagagaaatttgatacactactacaaagaacttttgagctagagaagaagaaatgatactgctctaatgctactggttaaaagaaactctactctgctatggaatgaggatactttatttttttaattaagaaaaatcatatactggtctactgatgtctacaaataaataacaactagtcaatattgccactcccaggaaaaaaatgacaaaaatagttttattattatcggtctgtaatttttctttagaagtcaatgatatgagattgttgtacctcaaagaattattatgtagaacttcatatataaactctcttaagaaatgtttcactcgtttccaagctatactaaatagcattaaaaaagagattttttcagtatattattcaattggcaataattatgttgacacttacaaaatgagaaagttaaaaataatgaacattttatgagatgtctacctgtttccacattctccgtctcaacttcttgttcttctgccacatcttgcatcatataagtctcatcatcataaaccagaacctgggctgcatagccctgctctaatctggca

SEQ ID NO: 42990 - DNA, 1233 bp, Bovine  19866880406837
  misc_feature (1)..(1): n is a, c, g, or t
ntagattattttgcctttctcattctacctccgaatcttatcactgagaatgtatggcagttggcacaaaggaaagagtaaaacccaaagggaccagcatgataacttggagtgggctcagggatatggtcctcagagttggaccttgcactacaaatttgaccaccttggattcagttcacggaaaagactagaaacaataaaatacaacccccacctaccctcaataagctgccaacaatcttccctccaattcagtcaaggcagctaccaacatttgctttgctacaccttacgagcttggtagaatgattaaatcctttaattcctgtttctgctggatatttaaattcatagcctgggcacgaatgtttcctctcatctcactgccagtctgctcgggattcaagatcagaatagtaatttgaggattatgagaatgaggctggtcagtgttatttttcagatgcttctgggatttctttcaaatcttatttggtttttctcagacagggcaaaggaaaggagtgagatattctgctctttgggtgaaacaaaacaaacaaaaaatcaagaaggaaaaaaatacatgtagttgtagtccatcctttcactgctactattgtttgccctttcaaagaaaggttgtgtaaatcaagtttcttttttacccataagattatgatgggttgccacatgctgcgcatcatgcttcatcatgataaagaaacaggtagcttcaaatgaaagcatttgatgatatttcaggcatttggcagttgatcaaccccattgtgaagggacagtaatatccttgctttgctgaggctgtttaaagaatgtgaaatgtggatcatggcactgaagttgttgaaggtaaatcagatttgatttcccctctgagagcacaaaatgaaccttgtcgttatcaggaagagaaatgaaatctttaaatatttctcagtgttttgtcatctctgcctgtcgaagggatttaacataaatttccccaaagtaggaagtgcaggtattatttcattttatttcaagagataaacttcacagttttttccgtataaattacttgaaaagcccccaatttacaattgtggaggtagtttaagatcaatggcattttaaaataaaatattattagtcaaaaatgtgtttcatgttttgtctcctccaatagcctacagtccctgaatataatgatatcttagcatttatgag

SEQ ID NO: 42991 - DNA, 1268 bp, Bovine  19866880411401
  misc_feature (1)..(1): n is a, c, g, or t
nattgtatcaacttttagagacaaagaattaaatgactttcatttgttatccttcaagtgttaaatgcaatcaacattaatcacattctgtagaaggaaatttcatctgagcttggctcaattagaagggaaggacagagatgggggaaaatctagggcagagtgcagaaggtggggatgtgcattcacaagatgaaaaataacacatgttgacattttgacaaaataaatacatctcaaacatctgctggtttgggaatgttttgagtactccacagtcttgttgacacagttctagaagtaaacaagaatccaataccaactgactccagctcctgcctttcaacaggggccagaaaacagtacttttacttgcttgaaaattaaaccactttaaattccttagctgcaatgacactccaagttttttttttttctctccattatgattgtccagtctttactgcctacttggagaataattaatgaaccacaggaaatatcctttctcatgaatacatagcaagaaatttcatcaggcaataatctctcgttcttggtatctcactataatccaagtagcacagggtttgaaaacataacttctaggtttgaatccaatcaaatcttgtggcataacactatctcctttccctctttatttttcaccataatatcactttctaacatccactatcatggatttattcatcttgtttattgtctttctttcccattagaatctagaatataagttccaagaaggctgggatatttgtctatggattcactgctgaattctatgaagtagcacaatgcctgccccatagtcagtgcttactaagtatcagccagacaaatctcactgttacaagcctgtaacatgttggtgcctagtttactagatggtgatgatggtgaaaatgataacacatgtgatcctctggaatatctcagtaacctgaactcagaaactttctttagggattctaacacctgcttctatccaagcagaatgaagttagagtaatataggtcagaaataaagcattcattttaccttttctcaggatttactattctgttacttatagttctttgattctttatctacagcattgtcttgggttggaatccagtgagaaatttgtactaagtagggatttgggaagaaccttttgctgcttgtcaagtcaagttattcagccagtaagcaaacagaattattgttgcctggcattcggtgcaaggagaccagaattcaagat

SEQ ID NO: 42992 - DNA, 1306 bp, Bovine  19866880431176
  misc_feature (1)..(1): n is a, c, g, or t
nactacagtatagcacagggaactctacttagtactctaacgagctatatgggaaaataatcccataataataataaaaaaagtggatatatgtataactgattaacttggctatacaacagaaactaatgcaacattgtaaatcaattatactccaataaaaattaacttaaaaatggatagatatgtgactggtggagagagggacttgacttcattgcctggtaagacctaactggctccttgaatttgggaggaaattgtccccgttagctataactacaggaaagtgcattgagatttgaattccagattctggagggatgcacatgtttttgttttgttcttaacttcatatagaacatggtaaccaaacattggacagccttgaaaatcttgtttgcagtgtgacaactattcctaggcagctagggttcaggattcattgagaaatctacatcttgcattgtgccaattgtgtaacttctcaggaatttatcttgggagctgtgataagaaatcacaactgagactcaaaacattaatttcaaatgcaaagaacaactatttcagagctatcttcttgaggaatatttgactttctaacattttaaaggaagctaaaatctctaagcaagaagttagcacttacataaattttatcaggtcatgcaaaattgtgttatttttgattttttgaaactctgggggtagacattttttctaggtttacatttttctaggttttctaggtttacattcattttattaaaatgactactgtttcaataaatgataaataatattttctgttttcaactcatccctaaaagacaccctaagggatctctggttgaatgaaattaacctaaaaataacattcttcccattgactcattatcttgatcattgttgttcagttgctctgtcgtgtccagctctttgtgatcccatggagtgcagcacaccaggcttccctgtccttcaccatctcccagagcttgctcaaactcatgtctcttgattgagttgccctttattggtttggcagagtcatctttatcttgggatactgggaaggacttttattcttggtttgaaaatctcactgatttacagaacaaaccttcagcctgatctttttccttttgtcagttacgtaagtcgtgctgtgtgaactaacatcttgtcacttattgtcctaaagcaagagccagacgggtgagaaaccacctactgtcgaatagaaacaggtgccagaaggcaaccgctccttgctgttcagctgtgccccgaggtatcaaac

SEQ ID NO: 42993 - DNA, 1567 bp, Bovine  19866880434549
  misc_feature (1)..(1): n is a, c, g, or t
nctcctccctagtttggcttcctaagcagagatttgatgtgtgcacaaaacacatttaagttcaattggcaaatcttcacccagaggtctcagggtcctgggagtaaagacagaagccttcgtggcatccagggtcagcctttatgtcccattttagatgaacctccatttcacgtcaccccgccccctactccttccttctcacaagaaaaattcctcaaggaaaagggaaaaggctctcattttcccaccaccccgacactgcagcagaaagccctgtttatatagggtttgttctcaggagaaaatgccataagctatatttatctctaactaatccatttctctctagtccaagattaaggaattaatgactgctacagctgctgtccttagcacattaattactataaattggctacagcctcaaaaaaaaaaaaaaaaaatccactcaatgacaatggtgagagggcaaggtttatgcattagatatctaacctaaacagtagatcagtatagcatggagcccaagaagttatataccagcttgggcactgggtttccacccgcaggccgtaagcatggagaaggggtagaggtgggcaagagagggaaaaaatacattgtatatacacaaactttcctcaagacagatcaaatactaaggaaaattgctcttggatccataaaagcctgcatcatcataaatttccttaggtcatttttcgaaacatggactatttagacatttcctaaaatccttgcagacgggacaatgattatagacaatgagcacagatgttcagaaagacttgtctgccctggtttccttgaaaatccccattccaaggctcacacaattccatcttcaaaatcatctcatcttccattttctctctctgtgacacatcttccccttctctgccccttccccatccagcgtttcacagctcttatcaatgtcacctcctctgggaaactgttggagttcctctagctgttacaatacacttcaaggagcttacattttcgttccctagacccaaggccatgagcaccctgagggctagacttgggtcatttatattaacacacagttgctcctcacaagtctcaacatccccttgccccacccagctcttgtccttttcttcatcgtcaaactccccctcacccactcctttcctacctcactcctctagattctggcttcttgagcccatcactccaaaaaaaaaaacaacaacaacaactctaataacagcttgctaaatcccaaggcccaccacagacgcaaacaccccaagttataaacctagtgttaggccgcttcagtcatgtcagactctgcaacactatatacaggctgtagcctgccaggctcctcggtccatgggatttcccgggcaagaagactggtgctgtgtttagtcactcagtcgcgtcctactctttgcaaccccatgaactgtagcctgccaggttcctctgtccatgggttctccaggcaagaatactggagtgggttgtcatgccttcctccagggaatcttccccacccagggat

SEQ ID NO: 42994 - DNA, 982 bp, Bovine  19866880459408
  misc_feature (1)..(1): n is a, c, g, or t
ngacattaaactgtccatttcaatgcccaagatatatgaattttctacttcatgtttttagaagatatctcagtaatattcatataaactcactttgtaaactattacatcatatttaaaccttattcctaaacccctttaaatgtaattagcttccagtcttatataaagtcatactaccttctgaagaaaagaagaaattctgaaactcaaatatccaatcctatcttggtaaagaagacattattctgtgcattctggcactattctgtgaccacagcactagacaaagtgcataatttacctcacgatacagactcacagttaaaaagaaaggcaaatctgattactaaacaccagattactgttctatcatcactggattaaaatttaaaccacacagttgaaataaatgttgatgaacacaagataggaggtgaaattcatagttgtacaataaagtgttcacctcttctttcatgaagtacgatgaacttaaaggctattctgcagcgtagctagctcctacaaaaaaagagcccaggatgctggcacatgagaaacgttagaaactattcaatctagattactcttggggtaatggagtattttctccgtcctctattgacatggaataaaaatgctcaagtagagaagggactcggctgcccagctcgcaaagctgctcaggcagtcagttccagccctagccaagccttcaccgtcctcttgccgcgtcccccccaccctccaatacccaggaacacggtcccggagggccagcttcgcgaagagaggctccataaggcggtcactggacgcgcgtgttacagagcccgtttttgttttgtttaaaaaacagattcctgtcagagcccagcctccccactcccgcgggaacagggggaagtggcagcagggggccggtgtggagtgagagaataaaagaatgaccgagtacaacctgccgtgccagctagca

SEQ ID NO: 42995 - DNA, 1051 bp, Bovine  19866880505793
  misc_feature (1)..(1): n is a, c, g, or t
ncgcaggtccggaggaagctgctgccgtggatagtgctgaaggtacaacggagaacgaaagcccctggtgaatgtgctgaactggaagaaaattctccagttgagtcagaatcctctgccggggaggatttacaggaagaagcctgtgcaggttctgaagccgcctcagcccaaggctaatctcatgctgattgacacctcagcaaaaaaatgccgtagaggggctgataggtgtttttgtagttttagtaaccttagattgaaaacaaaaaaaaagcttcttttctggaaaatggtattgtgccttgaggatttttgtttttgttatctactgatcgatttcagaatggagagatttgagattttacatgtctgaatagttttctgctctctgggatcagagtatgacatagcagaaaagagcttaaagaatttcatctgtgaatttaaattttatgtgacagagattgagctatctttacaacctgcattcacattaattttgttataattctacctttctttaatgtatgtaaatctaggttcttgagttttaatttgaactctaaataaatttggaaaatctttagtgcttctattattattcactcacatctatatgtatgaatagtatatattaacatgcacacatataacatcacatgaacattgcagttttatcaaagaaaacataatctatggaaaactctgtgtacggcaatacgtctatcctttctcccatctatgttacatggggactgttccaatattttccatatcagcttagttctctttgagcaatgtttattgaggacttacacttcgtgctagggatcattcattcattcctatattcagcaagtattaactgagcacgtataatttaccaggcactgtttaagtgctgagattaaaaaaaaaaaaaaagcaaaaattcctgcccttcccagctcatgttctagggtatatatattaataaatactctgtgctgtgcttagtcactcagtcatgctcctctctttgtgacatcatggattgtagcccaccagg

SEQ ID NO: 42996 - DNA, 1548 bp, Bovine  19866880516022
  misc_feature (1)..(1): n is a, c, g, or t
natgatatttgataagaaaagtccctttcatatggagtgttcttagttggatacccttgatttagggttacttagggtcaacaaacctagatgttatagatttataaggcgtgattcctgaagaagatcatgttatctatacacctacccgagtataaaaatgaggatgtttcatgacctaaaatccccttgatgtgtgaactgacacgtcagcctcatctagagacccccatatatcattattctgtccagagggcatgtgtctgatatggaaagaaaggacctggggtaccaactagggttggttgatttggggtaaactcttggatttgagtgagtataatttgacaacctgatcctttaggctagctcacttggtttgaacaagagattacagggcaccctagccctccgagcatcacgtgtttttgtgacctcttgctctgtgtctttgtgtcatgagatggggcatgttgcatagaaggaatttttctagaatcccactgatgactagacacagagaggaccaataacttcttgggtggtgctgatattgccattctgagttccatgttttgagaaccagcagtttaaaaccgtcagttggactctctgggtcccagtcccattttggggtttttctctgatgacagtctgggaacatttgaaacctcactttccaaatactgcttacggttgcttctgggtcttgccttttagtacttaagtataaatctatttgattccacagaaccactgaattaccagttttctagtcccagcctctctcaatgtcttttagcaccatttaagtcagagacatttaatttccaggggccccagtgggaacaagtacttgacagaccctcagcaaacttctgctgtttagaaacactgattgtaccacaaggctgttgaagacacagaggacccaagaaatagcacccttttccctacagccctgttgttcagaacatcattttggagaaattataaggaaattactgatgccaagatctagtaataaaatgccaacctcatagagataccccgaaatggatataaagtttctcccatgatccaattcctagtgagaaattaaagttcaacaatcaaatcttgaaatttcaagtccaagtatgttaaatccaaaggatataaaactagaaatatatatctgtcgcccttgagttaaacattctgatattaaattggagacaaatcattgtctcccgtttctaattctgctgagtcactggaaactccattccacccagcacacataccaagtacaacccagttcaagaggcaccacctctgctgagaccgtcttcacggttcagagcttcagctgaaggccaagtggactacaccctttgtaaccgagcaggaccctatggggccttcccaggggagatccctcctccatagtctctgctgtatcgcctctctgaagtaattagataacagtatctggcccccatttcctgagtcattttacagatgctgaaacccccaccaaacgtaagaaattaactgcggaggatc

SEQ ID NO: 42997 - DNA, 2001 bp, Bovine  19866880524116
  misc_feature (1)..(1): n is a, c, g, or t
ngtggggggaatgagggaacagagcgggtgttgggagtagagactatccctgacagttaaagtggaatcaatacccatttcttcttgggacgcaagtgcatcatttaatttctgtgcatgggcagatcccaggcattccaattaacagtccgtttttttttcccccatatagagtgtaataaagtaaacactgtatatttgaaaagagagagacaaaaaagaaaaatcatgaaataaaatgtaaaaggcagaaatcctgttgccctaaggctagttaggtgcttttattcaaaacaaaggataaggtaaccacaatatccaaagtctaaaatgaggctgcttttagagagtcaccagcttgtgagaggatgctagggaccagagagggaagtggtgagtcagggactgggatccctggccccagaacttctctggaagctgtcaggaggactcagtgtctcactgggacctgttattccaaggccaataatcctaatttgtggatacccactaaatgctggtgactttagtgacctctaatccttgcatagtgacctctatatcctgtgagatgggtattattttcatcatttcataaggaaggttatggaggctcagagaagttaagaaacctgcccacttaattgttaacaccaatggagcccttatgcaccggttcaaattgtaggcactttgtatgcagtttaatcttcactctatcgctgtgacgtgtgtgtgtgtgagtcagtcattcccaactctatgcaaccccgtcaactgtaacctgccagactcttctgtccatggaattctccaggcaagaatactggagtgggttgccattcccttctactgtagacagattctttaccatctgagccaccagagaagtccatccctgtgataaggccactcttattctctccatttcacagatgagaatattgaggcactagatgtaaagggactcttcccaagtcttgtggttggtaaatgggagggcagggattcaaaccagccttttttatttttccttcctcaccatgtggcagctctagaagctgagagagggaattccctggtgatccaatggttaggacttggtgctttcactgttgagggtccaggttcaatccctgctcagggaactaatgtcccacagccgtggggtatggtgggaaaaacaagtgaaaaagaagctgagtgatactacaaacctcatgaaattcagaaaataacgaactatttttattaatttattttctaggatacttttattttttcctcctacatttttgggcagcacattttgattgactctttatataacaataactttgtaatatcaatgtctattgtgacaacagaaagataattcattccttcctttagcttgagtgatcaaatcttttttctaaaaaattagagttgagaatgcatgaatcatgtgatgtcacatatagacaaacttgtttagtacagctatagaattttggcctctgataaaggaattatgatacattctgtttcgcgcagttcttgaaaaaaaaatctactgcatctatagttgtataccatgcattgttgcatctattcctgacagaaacttttgttttgactagccttcaagcgaattgaatcttccagttacaattttacatgtctgaagactaaaataattttccacagactagcttctggttccctacatttcaaatcttgtttctcttctgcaacccacgtactttcagtgctgggtgctatagagcaggtgacaatacattctggtttatttaggtcagtcccagtttatagctgctgtcttggcgtaattactaacagggcccctttttgttagccctctcaaaagtgccttggtgggggaggaaaggagttaaatcagctcatttgtgatctttgggtcctctgattcctgggggaatgcttttggaaaagaaaggaagtggcctggttttatgtgcctgtaaacatgctcttggg

SEQ ID NO: 42998 - DNA, 1098 bp, Bovine  19866880529536
  misc_feature (1)..(1): n is a, c, g, or t
ntcttatgaggagagcatcctgcctctcactttacagatgaaccagctgagtctcagacacacataataaatggtggagtcaggatggaaacccagattttttggcttatacccatgttcttttaccaatatcatgccatccaatcaggttgtcacaatgataaagtatgatatgacagaactattttttattttctgtactatatctcaaaaattggagctgctcttcagtaattgaaactgaacaacaaacaaaaaaatcaaaatctattattataaacacaatagagacatacggaatttgtcctctcttggtttatgtactatctttagctgttagggaatttaatttttatatgagagaagcagcacattcaaccaaagggatgtggattacatagaaatgagctatgcttaaaagggacccaaatagccagagaaaagggaagaagaggacaacattaatacccgcagcttcagtaatcacctgcatcatttattatgactactgtctattgctgtgtaaatatatcacatatgatcttatacaagggggatttctgtaagaagtattctgcttaagcacaattggatttcagataaatcccatatatctgtttcatatcaccctttgttacaggatttcaaaatgcttgtgaaacactaaggaaatgaaatgctatctagtctcttatcaaaagagcaagagtattgcattgatggttatgagaaacaggagcaaagagatatttcaaaattgcgtgtatgccactcagaaccacaaccctgggtttcagaaatcacctattgttagatattttcctgggaaagatatatttccatgatctgttttgctgtactcaatactgttttaacctcatttttattgttcagagtaagcattgtattttttatttccatgataccagattttgggaaactttacaaagtaaattgaatctatctccataattccaggtcttggtttttttctttttttccctataggatgaaggtaatggttgtcatctcaaccctggaaaaatgccaaagtcaagtggctttcagaataaagagagcctgtttcttgtgactgat

SEQ ID NO: 42999 - DNA, 817 bp, Bovine  19866880828346
  misc_feature (1)..(1): n is a, c, g, or t
ntaaatgaatggtaatgtagtctgtatatatccttgcatgagaatgaggttaacttgaacttattctaataaattcacaatgaacttgaatttggaggcacacattcagttccaagagctgctacatcagtagaatattcagtactgctttttgtgataaaatttgacattggagattacattaaaattgatgttagtgtttgtacagatatttttcaacattaatcaaacacatgatgggaaaattttgcaacaagttaagaaattaagtagttgaggagtgataatacaaccaaagcaagtaatagaaaccttagtatgtgttcagaggggaatatgtattcaatataaacaaagctgctgaatctactttcaaattatcatctaccttctagaaccataaattgtaataatttacaagtgacctaaaaaatcctcaatccaacctttgaacagcataagaattcctataataatatctagtaaagtggtcctttagccacaattttcattcctaagaactatttcaacaccttacaatcattagaaaattcctattagtaataataatgatattaatagctatcttaccctgaggttctaatctgtgctgagcactgtgctggatgttaaatatacatcctctaaattagctttcagagaaaccataggaagtaggtgttagttatctatcttcattttactaaacagtaatagcatgcagacaagtagccagggcagagagaaattaaaaaaagaagtccaatggtcagtagctagcagttacattctttacattcttctctcagtgactgca

SEQ ID NO: 43000 - DNA, 3388 bp, Bovine  19866880835883
  misc_feature (1)..(1): n is a, c, g, or t
naaacttgaaagagcagctcctactctaaaaaatacatgagtagaaaatactgcgttctgttgcataaaactggaataaaagattctccctttctgaaatagctatgtgctagggaaaagggtgactgctggaaaggggcagaggaattcatcacccctgaaaacctttcactttcacagcacaccatctcagaacgcctgtatcgttatgagatctcgaacttagtatttttttttaaaccatggtttccactgaaatgaatgggctgcacaaggaaactcaaaaatgtttaaagacatacccaaaaagcagacaaacttctaccagagtcactactgaggccgggaaacatgtgcccataaatgcgttacttacttgtgcctgccagcatatcacctacaagtgctatctttaggcggggaggggaatagatacagaagaaagggtggctgcggttttacccacatcagtaaacaacaggaccatctaccagaaccgcacaccccagggctcccggataattgtcagaccaacttttggcagctcgttatcaattcagtgtgggtgctgttttgtaaacacatctaatttggttttaaattttaatccataaagtcattactaaaggactccaggctgctgaaatgatgaaccaactgcttccaaagcagacagaaaggcaccagcgccagccagggctgcctgtcctcccttctttgcctccggattcaccttgtctctcacctccttcacagcaatgtgcatggtctcctactcaccgcagattttctgttgctacccaaatgctctctctccctgtctctctctgtgtgcatgtctgtctgtgtgtgtatctgtctttctctatcagtctctgtctttcagacagacagacacacagacacacacatatatatatacacttgcacacaagttgtttgtctctttctgatgcagtattccaatccctgcctcctctactcttccagtttaatctacttctctaacataaaaattgttctttaacaaaaagatcagtctgaaggaaagaaactgtcttaaagagttaatggcagggaacatagctgactgacagatggactgaccaaccaaatggccccccagcatctcagatatcgccctcctttgagaattggttctcatgggtacttacccacaagaggagagggttttttcaatgtaaagatcaaacactgaatctttcaaaacatggcatatgataaaatctggtttctctaacagattatgtaccaaacctagttctttggaactcatagattttaacctgtatgttcacccttcataacaaccttgggaggacggtattaaagctcctcttccctgtttcatgggagactgaagcacatggaggtcaagtaacttgccccaagtcacacaagcagaaagtgattgtcaggatttccacccagataatttgtctccagagtctgcttttaaccactactctctgctgcttcttatttgaatgactgcatttttatctaattaacagagaggaaattttgcattcactttttatgcatctatcattagattttctctcattagttttctctagcgaagaaaagagatgactgatttacctagtggcgaattattaccctatttaccctattaaataaatatttactctgttgtgcagatcagtaattgctcaaaactcctgtttatgactccccaccattaaccagagatattctagtaaaccttttaccttccttcacctcactccttttgacagtccatatacctaaccatggggattccctggtggttcagatggtacagaatctgcctgcaatgcaggagacccaggttcaatctctgggtcaggaagattccctggagaagggaatggctacccactccagtcttcttgcctagagaattccatgttcagaggagcctggcgggctatagtccttggggtcacaaagagtcggacacaactgagcgactcacacagacacacacctaaccatatccaaatccctttctgaaaagcagcctattaaagaaccactctcagggacgtcgctcaactgctcagtgggggttaatagcatgtcagagcaaccaagcaaatattgccctggagacccaaaactcaggccgggcggcttccctggagaagaatccgtgtggatctagaaattcttcatgcgctgtgctgctctgcaatagcctacctcacttccttgaattcaaagtcaaagtgggcaaaataaactctccaccacttgggaaagccgggagacagaatacattcttttctgtaatcatattttcagggcttccctggtgactcggtggtaaagaatccacctgccaatgtaggtgacacaggctcgatctccgatctgggaaaattccacatgcctcagaacaactaagcccatgcaacacaactactcagcctgtgctctagagcccaagaaacacaactaccgaagcccgtgttccctagagcccgtgctcccagcaagagaagcctccacaatgagaagcccacacgctgcaatgaacagtaatccccgctcgccacagctagagaaaagaccgcgcagtaatgaagacctagcacagcccaaagcacatacataaaattataaataataatgttttatgttctgcaggactggtgtttttcgtgctgtttttcccaaagtatgcttcgttttaggatctgaaaacccaaaggccccaggatttttttttttttttccttctctttcaaaaatggatggttctgcttttcatttaaggtgcagtttagaaagaagcagcctgtgaaaccaattaactaattggaaatcacttaataactgtggcagcatttcggatttctggcatgggttcacagcagtcaagagaaattgctttccaatattatgataaggtaagctgtggaggtctcaccgggggtggctgaaggctgctgtgagcaacaatcagctctaatctgcccaccaaaataatggagacattataacacggaatccagtgattggaaaggaagcacgacataaaattccaaagatatgcggagatctgctgagaagaaatgtgcagctgaagttcctggctatgatgtttgagagcttccaatcttcatgcagatattatgcctttgaaatggctctcagagagacagccagacatgtgggggaggagacgtgacaggaggaaaggaaaaaaaaataagagtaaatgttcaccctagcacaattgtccaactaattgttttagtatggagagaatcattgttcacattgaggaaataatccagttaattgctcaagagttaacagagccagagaaaataaattaccccaaacacaatat

SEQ ID NO: 43001 - DNA, 794 bp, Bovine  19866880923276
  misc_feature (1)..(1): n is a, c, g, or t
ntcatgtccaaatctttgtgaccccatggaccggaccaggctcctctgtccatgggattttcccagcaagaatacaatattacctgtaataagtcaaattacacacaggaacttcctccatagccccaaatatgtaaatcagagacagaagtaaaaacaaaaatcattaaatcttttaagaatctaatcacttaagagagaatattatcaccccaaatattcagtggaaatcatccaattgaaagacagaatgtgtatatgtgtgagtgagtgtgggtggtggcggggggagatggaggaagagaattcggagacagcatcagcaaaaagaaatagaagtggttttcatgaataaaactctgaaaacacttcactccacttgtgcaagaattatggagagcagcattattttgctgacccagcaagatacttgcttagcaaatctcttgactacctaagaacactctgtcaaattatttaacttgttaataacttctaaaaacagaaaattcttggcagcctcttcgctaagaggcatcgctctcatttcagagccctcttcgctgctctcgctgcagttactactcaccctcatgctcttcagtcttcctcttgccaccgtgggctccaaatcccagtctacctacttctctctgttcaagaacctgcatcacagctcttcattctcatgtgtccttgcccagactgaatatattcagtggttccctccaataagcctcttatctcgccccctataatttagaagaggaattctgtgcaggtttaaatgtagt

SEQ ID NO: 43002 - DNA, 1472 bp, Bovine  19866880956911
  misc_feature (1)..(1): n is a, c, g, or t
ntctcagactccaaagtgcatacaaatatcctgtggatcttgtgaaaatgcacatactgattcaacataaggcatggaggggcctgagattctgcatttctcacgagctctcagggggcactgaagctgctggtgtatggattacactttgggtagactgcagactgctgtctgcagcaaacctctgaagccatcttcagttgggtgatgattttggagcctgcccctctgattctgccagaattcatggagaatgcctccttgtcattttttggtgaagagtcattatttatgactactgtgtatctcttttctccaaagaggaggtctacctgcaatctataaagcccatatatagcaacgcatctttttctcagagtggtgctaacattgctggtggtgaagccctaagtacaaacctgttttaggaaagaaattcatcttgttagagggagctgagtacttacaaggcagataacgttctgcagttgctgaattgatgaagagaggcaccgggattcagacttaactatttttcattctttgaatgaagtctatcttctgaattacatgagctgtgtgaagcggggaaggagagcaatggttctggaaacaaaaacagagttcttatcttttaatacaggagagaatgcctcaggatattattatttgtgatttatggggtgcatagcaatatgaccggtgtctctccacagcagacagaggactctgaccctctgcctttgatgaactcttgtttcttcccaggggcaattttccactgtagaatagctgccgcatcacaaaattttggcttaaaaaaatcatactgaatgagctgcttggaaacttggtttttgttttcagtcctgctactgactttttctaactttgtctaaattccttttatcttctgccctgttagtaaggtcaatcactcttgctatcaaacatttgcttttgaaataccctgagatgtttattagctaaattagtctcgagtatttgtgaaaactcgatttccttctgaagatacatcagattcctctgacaagatcaaactgtgtaaatgaataaaaccaactaaacaaacaaagcagaagactcctggaccatcatttgtgaggaaggagtagaaggcaaggcaagtttcccccctccctttcttccttccttctgtcttttttaaaactttattttgaaatatttcagatttatagaaaagttgcaagaatagtataaaggttgcccaaatgttaacatttttaccatgcttgctgtcatctctctctttccatctatatctatgttttgttgacccaattgagagtaagtgaaagacaaaatagatgctccttatgcttaaatacttcagtgaatattctaagcatgtacgtaaccacagtacagttattaaaatcaagattaaactgacaacactattaaacctatagactttattcaattttgaa

SEQ ID NO: 43003 - DNA, 1332 bp, Bovine  19866880970842
  misc_feature (1)..(1): n is a, c, g, or t
ncagcatcctgcaggtaagcctaatgggatttgactgccagtacgcctcagtgtccacctgcagccctttgagaagcttctgattgggcttggtgtgctcttcatgggggtgtcaagcctcactgtaccttctccagcaatctcctgtggttctgaggaaaaagaaacatcccttgaaaatggaggcacattttacacttaatattcctcaaatcactcttggcggcttatctgcttttccagcaattttatgatagatatcactgattattttgttaccagctacctacagttggtgattttttaaaataaagatcataacatgagtgacagtatagcgttcactatcttgtctccaaaggtgttcacatacatctatctatagatagatctatatgaggatgggaaatagaccaagttgacttgtgattcctttcctcaaatttccctgtgtcatggctctgatcttaaatcttatttggcaagtcacagaatgtgccagtttatcaaagagataaaaaagtagactttccccctgccttctgaatttcaatgaaaggagtattcgtctttactattgatctcttccattgagtagtccttgtgatgattaccacttttctgtatttatggagaatcagcacttcataaatgtcaaaaggcactttgctttacagaactgtcagtgttctaacatctcacaaagttagcaattatcacgagaaaccacgtgtggaaactggaaaataaataattactaaggaaagtaattttttccttgatagaatcaggaacagagcaagcccttcattctctgtcttgttttgattgtccttatccatggaggcattgtgatccaggaactttcttgtctccctttcccacttgcttctctgcatcagagttcttctcctacagggtttgaatatcaagtgggctataaaaatctcctgcaatgggggatgcttgtattgcaacagaggaaattacattttgatcctaggaatcagaaagggcaaacttttggggtccaatgtaattattttattaaggtttataaagaaatttctccatacttttattgagagcataagtgaagatttctgacagttttcaaaattgggggtggaggttctctaaatgaatgtcctgactatttaccctccactgaattggcttcctctttcatgtcctgtagacataatctgtgcttggaaggtggctttttatttttttggtccctagtaatgctacttgaaaagttgtcatagcaacactgggcacggtctcagataatataacaggggaggaggggcctccacggacttcagg

SEQ ID NO: 43004 - DNA, 901 bp, Bovine  19866880977699
  misc_feature (1)..(1): n is a, c, g, or t
ncctatcaaaattctaatcagttctatttaaattacattttttgcactgcattgttataaatgctaatttatgcctagaatggaacagctttatttcgtacctcctgaagaaacggatgaataaaaacatacttctacagggcataaaagattatcaagggttcaacaactattggatttgcacttgccaaaacacatcctgaaactcagagctgaagctttaggagacaaggacatttggatcctcccaccacaaagctgtccccgttatgaggcagaggattgtcacagcagcatctgcaaccacgaccagggacttcctgccattggggacgagagcagctttcagggtgaggaatgaaaagaaggggacattgtcactgctgagaatactgatctcccacatcttaaaagcagatggttatttcagaatctctgggtaacttcctcgaattgagtagaatttctccaaacctggtaccccatctgctttttaaaagatgtccatctccaccagctcgcaagaggtgactgagttatcatagcaaatggtaactccatatctccttttacaattagtttggcctcccaaccttagtacagagtgccactctaagcagtgagacgtgctccagccaagaggagaggaagcacagttttcagggaaaacactaaaaccacctgccctggctgggcaagagagttgccacttgcatgaattattgttgcatgaaactgactattgttagtttgttactccttgcatgaaactaacagctaccaccaatggggaagaattcgggaaaggtcaagaggagagaagaactgccagcccacatgtcctacagacctcccagattcattctcgctggcatccatcttggctgagcgatgcgtacac

SEQ ID NO: 43005 - DNA, 2446 bp, Bovine  19866880979860
  misc_feature (1)..(1): n is a, c, g, or t
ntgattcaaacagaaaaaaagaacccactcaggatgctggagatggactggagcattgtgttcactccccacccccccaacccccaggatcagatgaacacaggtttcagcaggagtcaaagagtaagtggaaatgctctttacccaatggtgagtttagtctcctcagaattccctatgggcaatcttgatgttttaaggccaaagatagtggggaagaaaattgggctttttattttaatgcccacaaaagagtaggaagataaggttatgaaaaacagagtcaagaatacttttaagttaccaagtacctaaaaggatcaggaagtagaaaaatgtgcagtgactccctgatcttccttctgtgttgttcagtcggtcagtcatgtctgactctttgcaaccccatggacccctttggtgtatcaagctcttactataatctcattttggggcaactacttttagggctcaactactaactcctttaaacactatgaacatgttaaaagacacaattaaaaatctcaattttttgagaatatctaatcagtataacattgatcataaatatagcatatatttcccatctcccttgatggagaaaaaagatactagaaacaatttcacccaatttcccagaaatttataaatacaccctaccttttttctttttcattggttcatggctatccggtgatgtaggaataggagaggtatccattggttcagattcttcagttgacacctccactacagtttctgtaatgacatctggcctcatagcagcatggataaattctggagttgatacacaaggagggacaaacacttccactataaaaaaaagttgaaaaattaaaatttcccacccctatcaatgcctcttagcatggacaattcaatttttagcaaaggtgaggttactaagaattcatcaaagcagggtaagaacttgaggctaatttgttgaatatacgatatgatctaaagtatgtaagtaaatagatgcaaagaaactcgacctgaaggaaatgttaatcttcggggtaaagagggagatcatgagagtcaaccctcttgcttcacactttaggtactttcaagttcactgtaaaagactgtatcattttgacaactgggaaaacagttgaaaataaaacagtataacagtgagttaataattattttccttctacttactcatcattattctctaacaaggtaaaacatacacctggtataacattaaaataatgaaagcgtattcagtgaaagtaatcacttatggctctctctctctcttttttttttttaaataacttttggctgtaccctgaggcatgtgggatcttaagtttgcccaccaggatcaaacctgcaccttctgtattggaaggctgagtcttaaccactggaccaccagggaagttcctacagttcattttaaatatgaaaagaaaacctgctcattatagccaaatgaatatcatctttcaatcttttatgtaacagaacagtccctaatattttgggtcactgaaatggcgcatacatatttttagtattctattacgtacaataatgttactctggcttcctttcaatgcgcctgagtaactaggatatgacatttccatttcaattaatacatactactatagattaatacactgaccaatgtgcactaattttcttctcatattcctgaataacacacaggattactactctaattaaaaagtacagttgatcttagtatttactgtaaatccctaaaagaagggtcaatcttaccgtattaagtcaaattaacatttggacattaaaattagggacaaaaagattctcaaaggcaatctgtaaagagagaccaaaaccaatggaaaacctgaggcctgaagggagtgtgaagagaggtggacagtgcctcctgtctcttccagggagtggtcccagaactactgcccgttatcactgaaggaaggactcgatgtggccatgggtggcaacagctcccatcagccattctccagccatgctcttaaggtttcttattcacccaaagttaaggaaatgagacacaacagtaggaacagcaatttgacatttatctgtctacagtgggcatcttctgactcaattattttgaaaattaagtatttaaaggatttaagacttgtgaacattgacaggtaaagaccagttactgctgtcatagatatttatgtacaatagactctgagaacaacaattcccttggattaaaaaaaaatttttattctagatacatgaaatgatatatctttaatataataaagaacagttcacataccagggcttcttgaatctctcaagcaggtaggagattccatatgaagcagggcttcagcagcttcaattgtcttatctgtacagtgtgcattactgctatgaactgatgctt

SEQ ID NO: 43006 - DNA, 815 bp, Bovine  19866880993069
  misc_feature (1)..(1): n is a, c, g, or t
ncaacatgagttgcctttcatgtaccacataccccaggcagaagcaaaaatgcccagcacaggagagactgtagacagtgtaactagggtttcagtttagttttgcctgcaaatggaaaacaatttaagctgctgctctactggttcatgaaagtggtcagagctactagcacagaacatagtctcagatttgctgggtctaagactctagaacagcatttttcagacattttgtaatagaatcctttgttcagatggattcttaaggagagctcatgacaacagagggaagaggagcagctttagttgaaacagagaggggaggcctgcctgctgctcatctcccaaccagagagagtttttgatgaagggcagtttaaaagccaccctcagattttaattcactcagaaagagtagctcattcattaactggccaggctgatatattatgaatatattacgaatatttaaaaacctaagaaacttttagattttcaaaatatgagactacgaccttaaaagatgaaaagaaagttagctaagcagttgtcccaattatttgctgttcttttgacaagtgatcccaatactttaatggcttgagataacaacatgcatttaatttgtttctgaattgcaatttggatgggcactgctctgctccagtggcctcaggctggggcaacttaacaaggactggaacattcacttccaagatggtttactcagatggctggcaggttggtgcgctattagctgggagctcagttggggctcttggattggagcctgattagttttcacagaaatctct

SEQ ID NO: 43007 - DNA, 1565 bp, Bovine  19866881002329
  misc_feature (1)..(1): n is a, c, g, or t
ncaattcatgaaagtgaaaagtgaagtgaagtcactcagtcgtgtccaactctcagagaccccttggactgcagcctaccaggctcttctgtccatgggattttccaggcaagagtactggagtggaacatagcactagcttttaattttgtcagattccttccatacatcaaatagcaggacatataaagagaatttttggaacaactcccataaattctacatagctgtaagttaattagaaaaattttaaatattaccaaaagtgaataagactaaagttcatgaagagtatactgagaacatgacaacattcagagctgtcacattttataactgtgggaatgacattcgtgaaagccatgtaagcgtcgccctctggagttgtgcagtgtacaatgtgcgtgaccatatgttgaggtcctgatgtcttctacagtgttgtcgcctacagtcttgttccaatatgttgtgtcttgacaaacagtcctactttggttttggttttccaaagagccttgaagaatctaataccttaaattctttcccaaactgatagcagacaatgttgtcacactgataagcattatgaaattcagtcttaaataagcacaattgatactctcattctatttgctagaaagatcagtgtctaggcctgtatatgtaaattatgttaattgaactgggaatccacaaaaacagctgaatttaaaaactgtatttacttgagaatatcaaaagagctagtcaactctttcaaaactttgtagcaatatactgttgttgcattatactttgtgtgtttgctgatgtctatgggggaaaaaaaaacataatattttcaagaatacaagaaagaaaaaccacttcatcaactccaacagcgtcctatctcaatctccagaaaactgctggtttattcctctccttccaaagcacctcattattggtcccacggcatccctccactacagctattgtgtcttaattttttatttctttttttcaattctctaacccacccagttcagcaagccgctgttgatcttgagaaatcctttgttgcaaatcccacagagcttccttctgcagagaactgccccctttgaagacttgccccaggggtctttgtgctagctgcttcagtgaaggaagaaagaggtatgccttaggtaagagcgtttgcaaaaccatttcaaacggtatttgtataccttcgtagtcatcatagattctctgctgaccgaagagatttgcagctttataaaggctgctgcagatgcttagaatatttgttaatcttttttttttcttttgaaacaggcccaaaaagaaatgacttgtgggcaaatattgatttcttttccaaagatcaactattaagtacaaaggacacctaaacgtgaaaccaaaaggtttacattgtcagaccgggacagaagatggggaagcgaaggctgtgctttcctatttcaaaacacaagggctgaggtacaagtcacaatataatgcctgtggcatgccctctgagagtctactctggaagctgaagggaaataaat

SEQ ID NO: 43008 - DNA, 1452 bp, Bovine  19866881033205
  misc_feature (1)..(1): n is a, c, g, or t
naattgatagttggctaaaaactggttagttaattaattattcaaaagactggtctttagtaagaaaaattacaaaaacaaagcattgaaagccttgccagaactctgaaaggaattttcatgggctgaatacaggcaggcagtgggcatccaatatgcagaatatgaatcccctctactttttttgcaattttctttggatggtctcaagattcagttttgtatgcagaccaggagtgattaaaggcagacattgggattccagggatgggaaatgcactaaatctgacataggaacatctgagtcataattctgtgtttcttcgggcttctgatctgtaaaatgggtaatatgcgtgctgccagctatataaaattgttaaaaaaaaagacaaaatgaactactatttcaagagcatgctgaaaatctgttagagacagaaaaactagagtacattgtggtagagtaggtacaggcaggggaatgccgagagtaaaatgcaatagaaatggatccaagttccttgaggtaagtggttactctaggccagcagttcagtcctgaccacacatccccagtgaatgctttaaaatatacagatacctgctgctcacctccagggtttctgctttaaatgttctgaaactaggcccagttacagatttttttttttttttttttgcccaaattcccaaggtaattctaaagagcaattgaggttaaaaacccctgctgtagggtttctcaaacaaaatgtgcaattggggcaaaatggacacattgacatttttagtttgaaaaattaaaactctcttcttacaaatgggtctaatgtaaatgcaattcatgaagacagtgttgacaaaaagaggtgaccgctaatcagaaatactgtcatacgtacagaaaatgtctttcatagttggaaggtccaaactaaaatgaaacaaatgtacttattcaacttttacgataatttttcacattaacgagccttaaaagtcaggttcttggagttccaattactgaaagggcttcgaaagtgtgatatcatacatcatgagaaaatataataactctattaaaaagaggaccgaggtaataaaattatcataaacaacttgattcagttatgctacagaacatctagtgattaaaaacttctttccctgtagcctcacaggttaaattcaattcacttatatttctgccctgttgctaattgtactatttgaaaattcaatgatatgtaaaatataaaggtggcaatttaaaactaaacgtatagctgctctaggatgtctcaacttgatgcttaatttgaataatttagggactgttaggaagttgctaagaagaattagtataaaaacatttggggctattttccctcaaatataatgatgcttaaaatagaaaagtgatcgaagttggtaagttttatgttctgg

SEQ ID NO: 43009 - DNA, 1050 bp, Bovine  19866881066069
  misc_feature (1)..(1): n is a, c, g, or t
ncgtgtgagtggccaagtgcactcagatggaagaggagcaaaggctttaaagaatttggggcatcagagagtatcctcgccttgctcccaccccctgactcttcccatgcggaagctctctcacccttttaacagcactctgagtgtacggcgcactctttcagtgcgctggcaagtggagtgggcaggcccacagctctatcctcggatgctcggccacgctcagctgggcattgtgcttgaaggagctattagcttccaggcacttctggagaggcacccttcctcacttccatcgctgactcagaaagggcaaaaagcctgccaagagatcccaggctcagtacttggggtgttcgtatcatttcctgccatgttcatccggtcctctctgtgtactttgccagctagaacaaaacagcgctgctatggaaactgcaaacaccaggcaatcctggcccctgcacttggcagcccagccgagagagagataatggcttttgttgttatctattggatgctgatgctcagtcggttgtcccctcaggccctaactagggacacactgacactgcaccatcagcttctcttgttaactttcgcagcctccggatgcagcgatgcaggtctgagataagcaatgcagccattattctgacgacaacttggggctttacgcttccctgacaacttctgtggtctcctcactcgggtgacctagaactctcaaaataatctgcccaattctgtaatttacccagctcaactgattggcaaatcttctgtcctggtgttctttctttttttcccaatactaataagtacattctcctggggacagttgtgactcagaggcagtgtgtcaacccagcaggaacaactcatggcactcagaacaggtgactggatgtttttcttcccagaataaacacaagtcccagccctctaaacacatttaatatgaaagtccaaagattatcaaaacttctctgttggctgcaacatttaataagagtcaatttactatgtctgacattaattgtgatgatg

SEQ ID NO: 43010 - DNA, 1280 bp, Bovine  19866881085868
  misc_feature (1)..(1): n is a, c, g, or t
naggcagtgaggccttcctcttctgtatttcccaggaccttgttcaatcatgattctatatttattatcggatgactataaatatttctgtttatacaatgtctcacccaccaaactgtgagcagactttgttcatttcattatttagctctgtcgtgaagactgacacataatatgtactcaacaaatgtttactaaatgaatttgtaaacatttttatttatttttggctgcaacgagggtttcatcactgggcaagggctttctctagttgcagtgagcaggggctactctctagctgtggtgtgctggcttctcactgcggtggcttctctcgttgcagagcacaggctctacggcactagggcttcagaagttgtggcacgtgggctcagtagttggagctcccaggctccagagcacaggctcaatagttgtggcgcccgggtttagttgctcccctgtatccctggcaactcccgggaccagggattgaatctgtgtctcctgcatttgcagatggactctttatcattgagccaccatggttggctaccagtcaacctggggatttagccaccaacccccctaaatgaatttgaagtgaataaagtttttatttatatttttctgattgtttaaagtatacagtatttagcatataccaaaaataatgctgctgacccagtttcaggaaagcatgctctttgaatcccttttaataatgacagtttatattcaaacagtacttttaatttttcaaagcacttttatttcaacaatttattatgatatttccaaacatatgcaaaagaaaaagaactgtgagtgaattcccatagaccctagattctaattcaacattttgctatatttgcagaacactttttatggactagtttgatcatcaccttttatttgacctaatgactaaggtatgacttttatagataaggaaagtgagacttagagatctaatgatttgccaaggagggtgtctcccagtagttatgagcaaccctgtcagctgacacatccacaccctctgctcttaaaaatattttgaatatccttagtaatgaaaagtttccaattccacaagacagcagactcagcaaaatcatgggaaaaccaacaagaaagcatggctaggtcataaatcattcagagaggaaccgagtcttgggcatctctcccactcaccccacttcctgttctggttagtcatcatttcctgcccaagctatctgagatatttcttccattcattcttttctagt

SEQ ID NO: 43011 - DNA, 702 bp, Bovine  19866881098849
  misc_feature (1)..(1): n is a, c, g, or t
ncatgtgtgggcattttgctctgcctgctaggagacattagcagtaaatattcattctatttttgcagtgactgagaacaatttttcatttctgaggattgctttccttgtgcttcatttttactcgttagttcacttctcttttctggctcgtgactgctctacctccacaaatggaagttcaggactttataaaagaatccagtattgcttacccaaagccattctgaagggagaaaggagggaaatcatcttccctgagtgcctgccccatgctccatgtaaaccttaccttcttagatgtcatgattgccattatcatggagagggatgtggggcttggagagggtcagtgtcatgctgatggtggctgcaaaagaggtggggagtttgggaatcagtcttgggtctggagatttctaaaatctgtgctttccttccctcccttccttccatctctgtaatacttaaggacttattaaccactttgggttttggggtgaagttacatttttcatggatacatgagctttattttgcactcaagacttcgcttatattctcaaataagtcccagcctctcctctgggattcttatttaatttatttattttcaattgaaggataattgctttgcagtattggtttcgtttctgtcatgtatcaatgtgaattaaccatacgtgtacatgtgtcccttcc

SEQ ID NO: 43012 - DNA, 699 bp, Bovine  19866881104569
  misc_feature (1)..(1): n is a, c, g, or t
naatttcttttgtgtgcactagtcgctcagtcatgtctgtctgactctttgcgacccaagtggcttcatagtgctacagccaatcaccacaagtaatctctgcaaatgtacttgttggacatttaggtgatattcaatttttcactttattagataatactataatgagcattttttaagcttttccagtaattaaggttattttcttagaattgattatgcaaagtgaatatttttaaagctcatactaagttttgccaaattaatttaaaaaagttcttctatcagtatgtgagggtattttctttatctcacccttattagtgcaaaatcttcctagttacaaagatacaagttttagaggtgaaaattatgtttcattcagttttccctgattcccaatgatgcttataattttccagcactcatcattattcatttgttgagtgtcctcttttctgaattgtttgcatgtatctttggctacttatttatcacaatcctagtggtttctattttttacagaattgatttggcagactcttcatatgttgaacattaatctttgttatatgtattttgaattcttgcctgttgtttccctttttacttgggttatttttttcttaaaacacaaccttgtaaactttttggtagtaagctcataattccccaactttcttgggaattaaaaatatt

SEQ ID NO: 43013 - DNA, 1157 bp, Bovine  19866881134221
  misc_feature (1)..(1): n is a, c, g, or t
ntagatacatttagggcccagaattggaaaataacaggcttaggagttggaaagaccagaagtttctgcattcttaatctattactaaagacttgggtctctaacttggcctctcttaacctgaaatttctggtctagtaattggtgttaacaagcctgatctcagagacttgtttagagaattccatgaaataaccaatgggataatccatctcccatgatgattgctctgtaattattagttcccttcccttccttactcaacaaagtatagatcatcaaaaattggaattagcagaaactagaggttacagccaacaaattctagcctaagaatcccagatgataagaatggcatatgaaagatgctatatttaactacttttcccactcatttttattaatcacacacttctaccaaaaccttttgatacttcaatgaaaggtgaaaaattgtaattagatgggaggagttgtacatttagaattaagcatgaggaaagcttgtaagagcacagatggatgaatgctaaggatcctgtttgctaagtgattcactacgtgagctttggggaaatggctcttctataattttcagtagtttgtgatttccccttcaaagcaggatcttcaaggggaacagaatataacctctgtctaattccactcagtatttcatttctcttttgtttgcaaggtattaattattaaatgtggctcatattgataattatactgcatcttatttattaatgactcactattaagcttaaacctaatatctccagaggttctcaggtctctatttatgcaggtcattgcactttttcactttcctggactgaatgctgagaaggtttcaaatgtgggggcttaaggtagatggatcttgatggtataattacccatgacatagttcattcccacgaatggagtcatccatgcagccaaagacagagaagtgggcctacagaatagtgaacaaataggcaataaattattacaccagggagggcaatcatacatatgagcaataagtgaccagagcacaacagaaaggcacacactttttattttgcacgaagtatgcatgttttcttttggttctttttcagaagaaagatttcattttcaaatacaaaggtttttcctttttt

SEQ ID NO: 43014 - DNA, 733 bp, Bovine  19866881140954
  misc_feature (1)..(1): n is a, c, g, or t
nccttgaagggtgaatgcaaaaatcctttcactttgaggggaaaataacaaagcaatcaattctgggagtgtggatgagggaagaacaatggttttgtgaaattaaaaaactatagtggatttcaaattcattctatgtaggatgtagagaattcgaaatggaatacccagtttctaacttcttagtaatcaggaattaataaagactcttaattcagttttgttttcaaagatcatttatatctccctcccactattacctattatctttccatcctattgctccttaggtccattctgatagttattagtttacaagaaattgtactttctctttctcacaagcagtaaagtaagtcaaggcacaaggaattagatactgcagaaaattcagttaactcatcactgtacgtataaacagaaatgcaataagcagcatgcggagggaagaaagatgggaaggaagaagtgagagcgccccattcaaagcatctcactggttcttagattactgcacctgagataacacttctgtttcttgtcagcttcctgcttcattcaaatatgccaagattattctatgttagtggtggctcagttataatttgcttcctcctccctccctctctccaaagtttcaagtctatatctcttgaagttggagttccagtaaccatgagaaatacgttgagtttaaatctcagctctgccctacaataccaagtcatttaaa

SEQ ID NO: 43015 - DNA, 1115 bp, Bovine  19866881166387
  misc_feature (1)..(1): n is a, c, g, or t
ntatgtctcctgcattggcaggcgggttctttaccactagcgctgtgaatatataaattacctaaacagcttgattcggttaatatttaagcttatatgcctatctatctggctctgtacataaggtttcctaggtggtgttagtggtaaagaacccatctgccaatgcagggacgctcaatgcctgggttggaaagatcccctgaagaaggaaatggaagctcactccagtgttcttgcctgggtatatatatatacacacacacaaatgcatacatacatatatatataaatacagatttatatcagtatatatatatatatatacacacacacatatatacacacattcactcatgtttatattttttacaaaaatgatattcaactctatttctgtagcagcttttgagctctcttccttgaacgtgttggtgctggtagagatgctgagtgtcagtattctggagtgagttgaggtcatggtcagccatccagaagacatggcataggttgagaagcaaagtgagaagtgaggagaagcctcagctcggggccagggacgaccagacgacactgcaggcccatctgcgtgcagtgtgacagcagtcgggctcttaaagggggtaaagcatgggttatagattcagtagtttaaggcgacgatgccttgcgattacttgggataatatgagtaattttctttctttgagagttgtggttctaccagagtctctcatttgaaaaaaccaaaattttgcctgggcatgagtcctgaggatgggtccagagctggctgtattcttattttcagacacagagatggctgctgacaaagacagctgatgcccaccctcctctgtcttccctgcttccttctttagttttagatcttgtgtctcttcaacacccaggcttgtaaagtcagacactcagcagtaaaattcatctctttggccatgtctctgaggagagcctatcagagtaatgcacaagacctcagtggtttatgaatgaatacaaatcaatgagtagattcaaccgacacctgaggttggagctcagtgaaagtatcaagtttttcagaatttcgtccaagtacaacattaaaatga

SEQ ID NO: 43016 - DNA, 1591 bp, Bovine  19866881175816
  misc_feature (1)..(1): n is a, c, g, or t
nttgttttctgtgtctctgagtctgtttctgtttcataaaaaagttcgtttgtgtcatatttagattgcaatgtaatatcataatgccatataatatatggtgtttttctttttctgacttactatgcttagtatgatcatctagaggtccatccatgttgctacaaatagtagtatttcattctgttttttacctatgccacttattgaatgatttatttcccccaccaagttgaaataacgtgattataaatcttacagataaaatcctcatgtatgtgtgggtaaacttccagactctattctgttgccttgtttttgtattttgcatgataccagactgttttacttcgtggaatgttttaatttgttttgctatctataaggttttccctaattcgggacttcagtgcctagctcggtttcaggtacatgagataggggttcttaacccagagttaatggctcagagaatctgtgaagtccctaaactgatagtatttcatgtgtttgagagtatgtgtatatgtcaacagtatatgtcatttttctaggaagagggtccatcaaatttcttcagattctgaaagtagaccatcaccctcaagaggagggtaagcacccctgatggagatgttgaacaagagtttgttgaatggaattgacaatatccatttgaatgattaatttttcctcaggctgacacaattgatgactaatatgtgttggtgatagacagagaggcctggcgtgctgcaattcatggggtcgcaaagagtcggacacgactgagcgactgatctgatctgatctgatgtgtgtaagaggggataaaaccaaagtagctcatttagatgagagaaagagatgctcattgatagctttaattgcatctccttattctagtttccgtgggaactgatgtatatttcagaatagagcaggctaaaaatactagcacatgtcaaatatccattatagaacaaaactttgttttgtatttaatacagagtccctgataattgactttgttcttttccccacttagtgtgtggactaacagaattgattattttgattgacttaactctgttccagatgaatagagcaatccaattggctttttccaccacttcatggattgaatgaactggctattttggtcctgtgagaaagcctcactgtctttaatccttatcttccctgttggagtatagtctattttggagtttcagttcaggaacatttgaattttgtgtcagtgagttttctggtttcgttgccttgggacaatctgcctatctatgctccagtgattcagaattatctggtcagtcttggctttttcatagtgtgctgctgctgggtgtcattcagtcttcctgtgtagagtgtttgaaaaaattagtggttggggtaaaaagtgaaaagataattagaacaagcaaatcaagtaaataggttctgcaaggtactctcctgaatgaattctttattaatattacatatctaaatgtaatttatcagttatttcatttaaatttaaaaactaataggttttaattaaaatttatcattaaataccaacacc

SEQ ID NO: 43017 - DNA, 1483 bp, Bovine  19866881299905
  misc_feature (1)..(1): n is a, c, g, or t
ntagttttggtttactaataaacttgaaagtggccttgtgccctgggagggaacattctttgttcatgcacgcaaatggaatttggagaataaactcctttcttttgattcttggctctttctgctcttctctttcatggtatcctcagatgcttaatttattggctcatggaggatgtcgtcagggtgtttttgcctgggaagacttgattcacaacttggaaatatagcttatattatatattatgtatgtgtaatgttgactcatttcaaaggtcaaaattaaatatgaaacaaagtttaaaatgacactttcaattaatgaaatctgtctcttttgtactgaaacagaattcaggattacatgacataaatatacacacacaaacacacaaacacatatatatctccataccatgcatgcatgcacgcattttgtacaatttctgtgttcacgtatctgggcatcatcccctgtgggtgttaatttctaactgtttagatgctcttttatctgtatcccagattagaagtgcagctgttctccagtcttagacatacttgcttgatcttggaatgacattagggggtttcttgcaactgttttgctgagatcattaagaaaatcagtcttaaagattggtttaggctggttttcctttggttcttaagtggaatttctctgaacttttctgacctttaactctattcattctttgtttatcctgaccttaaggtgcctttaaaccttagagggcaactagtcagtgatgattcaaagttatttatgagcttgatggctgtattagtggttttcccattttgcttctctccctgaagcctttaacctgaaagcactttggaacagggtctgttttcctctaactgccttcttgcacttgttgggcaaaatcagagcggtgattgagtcctcaacacccggtatggcactgcagagtaataacatttatcacacttcttgtttaagccctttagagaatgacatttcacagtgtaattttgcttcacagatttttcccatgtgagttttaactttcagggtagaattctctcttatggcttcacctttttcctattttgtgtatttgggagaagttgcacaaatcagcctcctctcagcatagcaaatggaatcaggttacgatcccaagtgccctttacctccagattcctgatggttccttccttgtttttcgtgagcaggcccaaattgcctcacctctcgctgccctttccactttatgaaacaagcagctaatagtaacacaactctaaaaattcccggatgacctgcattttgctctttttattatcccttaagaaatgtctcagaaattgaaatctagagtagcaagttttgtgatcttgtcatttagcattttacttacgtttggtttatttatactgtgcctttaaactccaagcggtcacaatctaagggacctaaagaaacgaaacccag

SEQ ID NO: 43018 - DNA, 1564 bp, Bovine  19866881327508
  misc_feature (1)..(1): n is a, c, g, or t
naacaagaaccccttaagggtggtggtcccaagacctccctggtggttcagtggttaggactccatgcttccactgcagggggtacaggtttaatccctggtcagggaactaagatccagtaagtttcaaggtgtggtggaaaaaaaaaaaaagggtggtgatcccttggttaaacccctcctccaccaaaataaccacatttgtaagacttaaaaaagacctggtgcttatgaggggctgaacaaactctggttaatctcaactcttccgaaattgcaatcagtgtacaccaggcctggaggaaatctagttgtaatttttccttatatttcgtttcgggaagctgtcatggccaagtgacagaaatacctcggagcagagagtctagtccttgactgacatgtcttccagctggcctgccatacctgctttgaacaaatttggccttttcaaagatcttccctttcttgtccgactctaccctgcagtcctgtgtgtgctgctatccagccaggagacgtgttttgctgacatctctgtcttcgctctctgtatgggatttatagcaattatcctttgcttggtcccggtgtctgtattttggcaggccgccctgccttccatgtgataagtgctttgcagacagtgcagccggagctctgccaagcctaatgtcacccccatcagatgccgcctgggtctaggggttacctccacctgccccttcctttctaagtctgctggtacaggttcccctggtactatgtttaaaagcacaaagtgatgtgcaagtctggctctcatccagtgccttggaacaatgttagcagtgaacctagataattccggcatctctgaatgttttttatagcccgtactacctggattggtttgtctgactgtgtacagcaagtaaatgaactggataatcgccatatttctattccactccgtgctgtgtggcctacgcctctggaaacaaaagttttctctccaacaaagtcagtcctcaagaacaatggtaccccctgggggcgaatccctttgtcagcgtgtgccaaggtatgactaatcaaattggctcaaaaaaaccacccttttcccatttgactttcatttgatattttcactgaagagcaagccacaaggacgacaacagagaagctctaaaagcaaacaaaactcaaaccagcttccctctccctccccccacaaaacaaccatctcgcatttatgtgtcctgttccaggtgtgcgggtcaggctgtatttattctctggctgctttgtgaatgtccatatctgagagcccaggaatactacggatggctatttctcaaacttgaacatgccttcagatcacctggaaatcttttgaaatgcagattcctgtccagtgggtctggggaggaatcggaggtcccgcgtgtctgatgaagcccctgggggacgctgttgtcactgatccctgggtgaaccttggagaattgagacggtggcctcatcctgtaagggacccgcacaggaaggtccagtcaatctacgtggcctgttaggccctcgg

SEQ ID NO: 43019 - DNA, 1415 bp, Bovine  19866881559729
  misc_feature (1)..(1): n is a, c, g, or t
ntggttttattgatgttgaacttgaaagagcccttgaacttggagcactaggatttggggcaacttggagtgatagtagatgaacagataataattaggttaagagagtgaataatggctgaaaagttgggattggaggtgtgtctctggaggatgaagactgaaccgggaagtgttagtcactcagtcgtcttagtcactcagtttcgagcccatgggctgtagcccaccaggcttctttgtccatgggattctccaggccagaatactggagtgagttgccatttccttctctaggagaacttgctcacccagggattgaacccaggtctcctggtactgtaggcagattctttactatctgagctacaaaggaaatccaaagattgagatgagagctgaagcaatgaagagaaaaaaattttcattgagacagtcagagaagagggaaggtaagctagcattcactgagcacctcattcgaccaggcattgaagtatattttattttttaaaatatatgttatgtaatttaatacctgggcttcccaggtggtgctagtggtaaagaacccaactgccaatgcaggagagttcaatgtaagagacacaggttcaatccctgggtagggtcacaaagagttggacactactgaagtgacttaccacacacacaatttaatacttttaacagcctcccatttaaccattgtgacatagtgttggaactgtttttgaagatgataaatacagaatcagagaaagtaagtaactatcccataacctaagagccagtaagtcctcttctacgccatgtgcatagttaggagaagccaagaagcaggtcaaatattactcataaaagattagccaatcagaattcagaatactgagtgatacttcaccagaacccagcactgggtattagcaatactcttttgaggtaggtttcattgtcggtggtctcttcagttatgtaagggcttcaatgaggtgtctattctgtgatgatgatgatgatgtgtgtgtgtgagagagagagagacagagagagaaacagagtcagaaaaagagaaatgacatcactgttctcacaggcacagttagtcttcctgactagaaagtaagcatatagaaaatgattttgatttttaagatgccaggccttcccagaagtactggttataattttagtgacaaccattgtgggaagtatttgacttttggctcggaagtttcatggaccagatgaatcaataatatatgacacatcttttcagttccccccaatcaggtctataaaaggcgtgcttgcatggctcacccacattcaggcagaatcagatggtctattaattcagatttgaattaaaaactctcacctctctgttttagctgttcaggatgccgcgtgca

SEQ ID NO: 43020 - DNA, 790 bp, Bovine  19866881775526
  misc_feature (1)..(1): n is a, c, g, or t
nagatttgtttcctgtctattatgaataccttgactacagataagatggatgatattcattaatgtgttttacccagattttgtcaaacgattaatgtcagtcattttgtgtttctaattgaaaagagtctctctttgaggtcccatggatgtttcacttgagatgtgcagtgccagctttcacctgtcattccatgatggctttcattgttataggcaaaaattttaaaaatattaagtttgcctttggcaaaggcccagttcagtattcaggctccacatatccgaatacccttgtcctcactctagatgacttgcttatcagtcctgatttggttctgaacctgacatttccttttttcctcctcttattcccttcatgaaaacaaaatttatcatggctagattataaggagctctgattatcaaaacaatgcaaatataccagggaatcaaatacaattgaatgtattatttcccctggatgtattagtaggactaaggtgtctcatttggaattttaggcaaaagatatttggggactaggatagaggaagagtccctagaaccctgtcttggtggctacatcttctgctcaccaattagattgtctgtgggaataataatataaatcaggtcaggttctgttcagccatttttattcttccaattgctcttcaatccagacctctaccatgtggatttggtacaatcatgtttggcttttaaacatttgatttccttctttctatttctttctttctttcttttttttttttacttacaaaat

SEQ ID NO: 43021 - DNA, 1395 bp, Bovine  19866881851950
  misc_feature (1)..(1): n is a, c, g, or t
ngcctgacaatttgtagctgaatacaagtagaaaatccaaacctgggggaaattgaatttgattcacttaaatttattctttcatttaagatagaatctcaagcacaaattcttcagacttgctggtcttgagttttcaatagacataagatgttttagttttgaatgtagtttttatattcgttgcttgcaggaaaagaaagttgcctgtccttttattgtaagagagaattattaaaatcgaggcataagactaacattgtaatcagtaattctcataattgggagatattcatgatgcctatcggagaagggatggcacccgactccagtactcttgtctggaaaatcccgtggatggaggagcctggtaggctgcagttcatggcattgcgaagagtcggacacgaccgggtgacttcgctttcacttttcacttccatgcattggagaaggaaatggcaacccactccagttttcttgcctggagaatcccagggatgggggggcctggtgggctgccgtctatggggtcacacagagtcggacatgactgaagtgacttagcagcagcagcagcatgatgcctattagtctatgataataaaaagtttataaatgatgtcaatgagctatatctgaggaaactaggtaggggatgattaatattgaaaagctggaattaaagggggatgcagtgactgccatatatttgaaaagttattacatggaataggccatagtcttgtccagttttgttccagaaggtagaaatggaaaatttaagttcaggtttcaagaaagtaaattttaattcaatataagggaaggagttcctagtaatgtctctaaacacaaaatgtttgtacctctgttaggagaattacagaaaagattcctgagacagagctgctgggaatttgaaccccatcatccttaaggctctctcaactctaaagttttggcagttctctttaaatttttgtcctttactgcaaaatcctatataccagacttgagtagttcccaaagtatgtcttcctccatttttccaagtttattgattaaaatgacatttcttcccatctctaagtatcaaaatgttcaagtcacttttctctttcatatttatctcccctaaaatctctcacagctcatcagtcactagatcctacagatccatatttatcagtgtcattctcagtcattaggttatttattctaatctccataaactaatcaaggccttcattattgtcgacctgtattgccacaacaatctcttcacaagtatccctgacatttgcatattcattccttaatctgtaattttcttgtagcatcacttctatcatgtcactctcattaagaatacagtatttcctttgccctttt

SEQ ID NO: 43022 - DNA, 1161 bp, Bovine  19866880470808
  misc_feature (1)..(1): n is a, c, g, or t
ntttcttcttcctttttaactcacagatactaaaaaatctgaattctgaaataagctacttttccttggggcccagaggtgctagttagaaaagatttgctacctctgctttctctacactgtacattgctctctgtcaagtcatcagattttgtacaaatttcatactgtcgcttagcaatattaggaagcaatttagggtgaaggactttttaagagaaaacacttaatgcaaatgcaaatacattttaaaaagagaacaattatttcttaaatgagagtaagagctactcaaatagtctgtaagaaagaaaggagttgaaacctcagtaacctgaaaaaagtcattctgattctgtattaaatatgaatttttttaaagttttcagaggtaaggcttcttttttctttgtattatctacatagaaaagctttgttccatatctgcaggtttttttttttcagaaccttgtccactaaaaattgaattcctcctatgtgctgggtgagctgtcttattttttaaatccttatttagatacaggggtgaaatctgttaatccataactgattctatggcaagcatatagaaaattataaagaatagttcactatttcagaggttaggaaactttccttggatggctggatgggggtcagacataccaaaaagatttgtcatagaagtctaattactttatcctccttcattttttttttcctcatataataagacaaagtatgaagaccactatttcaggagtgagagttaagtttccccatgagaaacttaagaagaaagaaatttcctagaatgttccagaaagaattggggatattcccagtaatttaaattggattatagacctaaaagtataagttggaaccataaagcttctagaagacaacatggaagagtatattttcagttttgaaaaagcaaaaatttcttaaagaggacacagaaagtgttaaccttaaaagaaaaaatatatagaaattaatttcatcaaaatttaaaatttttttgtaagtcaaaaggcatcaagatatacatcagagaacttgaatctggtatatatattccagcaataaaaagcaaacaatacaatgttaagatgacaaatactgaacagacactttaccaaagaaagcagagga

SEQ ID NO: 43023 - DNA, 3230 bp, Bovine  19866880541675
  misc_feature (1)..(1): n is a, c, g, or t
nccatgaggtataggaaggtaagaatgctgactatgtactatgtgccagaaacatgctctcatttgactgtaattacccactccagtgttcttgcctagagaatcccagggacaggggagcctggtgggctgccgtctatggggtcgcacagagtcggacacgactgaagcgacttagcagcagcagcagcagcagacatgaagagtaacaacctaccacatgttcagagcattccatttttccctagtctcctcactttcaataacttccagtgaggctgtgggctgtgaggctgcttgggaataggagccgcagttaggagcttcagtttctgatccggatcgaagctgttgggtaaccttgggcaagctccagtgcctcctggaacccggcccaccttatcgccatgatttatgtctctgtttggcattgctctgctgactcactgctgaggggagcagggtgctttggggacaaacaccgtacagcggtcaagcaccttaaggatgcaagggcaggaaagcagaggttcaaaaagagcagcagcaaaggacagagtaggagaaaggaggaacagtagagaaaggagagagaaaggtacaggctggcagaaggtgggcgaccaagaggagaagctgaaggggctagtacttcacatggtctctcctgtcttaaaacatcagaccagaaacactgctgggcagattaccgtcctgatgactgtaaattgctgtggggaacaggacagtcatggttccctgtttttcagtatttattcagtgcttaatgccacgtgctcttgtgccaaggccccattccactgaatgctggcagagaaccgtgtgaatgctcgctagcattagagtctaatcagagtgttcgtaatctctaaaggtgtctggtcccgtagtacttgttgaattattatttgagtaatatttcccaactcagtaaaagtctccttgggaaatcctgtgacatctttaagaatttaatcctgctgtagctaatcggtgccatttctaggtccattatcttaatcttgcttaattggcttattttaaatagattagtaacatatttccataagttgtttttaaccatgttcggcattcttatggtttactaactccgatgtctgtggggattcacactggtaacgtaaaccagtgaaacaggctgaacgcaagacaagacggagcagtggagactagggcaaactggagactgtcttgtgagaagcaggtggctgcatgctagtctttctgagactttttcttaaagccagagatcaaaattttctttaaaatctcctgggttctcccccataactctttattttgaaaaaaattatacacacataagtggaaagattaacacaatgaatacttgtgtatctttaacaagattcattaatgtagctaattctaacagttagaattccacttcatttctacctctatcacacacacgcacgcacttttttggctgatgcacacacatttttcttaactatacagcatgaatctcctagaacaaagaaatttttctatgtaccacaatatgatttccacattctagaaatgttatcattgattcagtactattatttaatatatatagtctgtgttcaaattttttgtattgtctcaataatatatataatgtgtttatgagaataagcatatatacatgtatattatatgtatattttagtacatgattaataactgagcacacattgcatttaattgtcatgtttttgtaacctcctttaatctaaaacagtattcttttccttttttaaaaaaatatatttatttatttggttgcactgagtcttagttgaggcatgtgggatctagttccctgaccagggatcgaacctgggccccctgcattgggagcccagagttttagccactggactaccagggaagtccagtattcttttcttaattggaagtatagttgatttacaatgttgtgttaattactgctctacagcaaagtgattcagttttacatatatatgttttacatattcagctttacatatatatatacacacacacacacacattcttttttatattctcttccattatggtttatcataggatgttgaatatagttctctgtgctatacattaggaccttgttgtttatccattctgtacacaaaaacttacatctgctaaccccaatcctgccccactcctcccccaataccctgccccttggtaaccacaagtctgctctctatgtcagtgattctgtttccgtttcatagatatgttcatttgtgtcatattttagattccacatatgagtggaatttgtctttgtctttctacaatgtgatcatctctagttgcatccgttttgcggcaaatggcattattttatttttttttataagtagtattccattgtacatatgtaccacatttcctttatgcatttgtccatcaatggatacacatttaggttgtttccatgtcttggctaggcgtccctggtggctcagagagtaaagaatcggactgcaatgcaggagacccgggtttgattcttgggtcaggaagatcccctggagaaggaaatggcaaccaaccccagtattcttgcctggagaatcccatggacagaggagcctggaaggctacagtccatggggttgcaaagagtaggacacaactgaacaactaacacacacacacatcttggctattgtggatagtgttgctgtgaacataggggtgaaatatctttttgaatgatattaatagttttgtccaggtatatgtccagaagtgggcttgctggatcatacggtaattctatttttagttttctgtggaacctccatcctgtcttccacagtggctgcaccaacttgcatctcctgtaacagtgtaggagagttcccttttctccacatgttcttcagcatttgttatttgtagacttttcagtgatgaccattctgactggtatcaggtggtacctaattgtagttttgatttgcatgtctttataattagcaatgctaagcatcttttcacatgcttgttggccatctgtatttcttctttggagaaataggtcttctgcccatttttcaattgggttgtttgtttctcattgtttagttgtatgagttatttgtatattttggaaattaatcctttgttggtcacatcatttgcaattattttctcccatt

SEQ ID NO: 43024 - DNA, 874 bp, Bovine  19866880596963
  misc_feature (1)..(1): n is a, c, g, or t
ntaaaaaattaatacttactgtgcagcagtctctgtgctttaaaatataaatatggtttctcatagaaaaatgttttgtggctgccttgttttttagagaaagacaaatttttacttaccttgataattctgtcttttgcttgtgctcggtttaatttagcctgcttcctggattccatggcaactctggggcttgcagcctatggctatggcatccgatatgaatatggaatcttcaatcagaagattcgagatggatggcaggtatgtgactcatatttttaattttgtcagtaaaattttgccttgatgttctggatgatttataatttacagaatttaacagagggcgttactaatgtctgtagcatttgattgacatctgtgaattctgtcagtcttcccactttgcgatataagctccataagagccgagagcctgccagtgtcaccagtatcattcaccaccagatctatagcatcttttacagtgccagactcataaggatgctagagagtcatgaagatactcgtcaccgagtacctgaatgcagaccacctgtaatgggcagtgtcctatctctgcagcatgcaaaatggaggagcatgtcttttgactcatgatctttgccagtagcccttgcaggtaggaagcatgtcaccatttttgtaggtgagaaaactgaggctcttaagaggtgaagtcacctcagatcacacttttggtaaatctgcatccccagatttcccagtcacaatcagttttcttttccacattcagagtcttgccctccttagtatgcctttgttgttcagtcgctggttgtgtccaactttttggacaccgggactgcagcataccaggctttcctgt

SEQ ID NO: 43025 - DNA, 1149 bp, Bovine  19866880635469
  misc_feature (1)..(1): n is a, c, g, or t
natgcaggaagcttctacagcagtaagtagtcaaggatcatcgatgccaatctaaccttcattaagtgttagcagagtaaaatgtaattttgtctctctccacttactctcattttatctaactgcattacagaaccaattaacttgcataatctccattaatatacctatctcctttaaatgatagccctaatcggaaaatagtatgagtatacatgaggatattctccactctttattatttcagttctctctctcgtagggaaacagatcctgaaatagctctccaccaccatctctacatctcagatctagagtgtaccagatttttctagtcacacagtatttgtgatggtattctataaaagatttccacattaaggacaaattgaaagaactcaagacagaaaacaaaagacaacctacaacagttttacaattaacagattttgaaggactggtaaaatattcctttagtttctttattaaaaaaacagcattcaatttaagtttacctgaaagtgtagagccactgcaggtcttggccatcaacttactaaaattttcattaaactttggtgaaagaatatcctgggataatgtttcataaggatcaaatgcttgctcctatttttttttttaaaaaaaagaaaaatatgttaggtttaaaagaaaatcttttctactatcatggcacagattatttaatggcaaatttttagttaagccctccattaggtttcagaacattttttttattctggggacaaataataactatggactataacttggaaattttttaaaaatgtaagtaatgactttaagtaatagatgacaagaagctgctagtcttaaaataggtcactgacttgtgatcacaagtatcaaactattaaatgcatatgcatatttatcccagctaaacaaaaattgtattattagtaaaataaggctgggatttgaaatttcagttaggtttgctgctgctgctaagtcacttcagtcgtgtcagactctgtgtgaccccatagacggcagcccaccaggctcccgtccctgggattctccaggcaagaacactggagtgggttgccatgtccttctccaatgcatgaaagtgaaaagtgaaagtgaagtcactcagtt

SEQ ID NO: 43026 - DNA, 915 bp, Bovine  19866880846834
  misc_feature (1)..(1): n is a, c, g, or t
naacactggagtgggttgccatttccttctccgtgcatgaaagtgaaaagtgaaagggaagtcgctcagtcgtgtccgactcttagcgaccccatggactgcagcctaccaggctcctccatccatgggattttccaggcaagagtactggagtggggtgccattgccttctccgtttcaaggcatagctacctggaacgaatgctgtcaaattcctcagaagtttcaaaactgagaaatcacttttgtatcccttggtaccaaattttcacaaatccacagttgtagctagttatgtgcacaaaatcttaagtggaatcactaataaaaaatgaaagaaacttagacatgtacgtagtggtttcagagttgtttctcagcataggcagtccccattttattaaatgcagtttaagtttcagagtaactttacgatacatgtatcaaccatgttatggatgagctaggctgtagtgggcaaaatgggaaatccggacgacacggcaaacatttccctgagggctgaggccttccatgctgaaggggatgagaatacagcagtcgtctcccctctggttaaggtaggaaacgccgctgtgagcttggaaaggcaccagtgaagaaacactcgccacgcctggaggctctgtgaggcagatcctattcaggttccctcgctccccaggctaggaacttagtccagccacttgtttacaagtgggtgttgagcattcctagatgctgaagtgttgacagctccacagaagtcagggttacactaatttctgtttagcttcctctccagtcccagcgactcccatcctgcagctggaggactgctgcacccacaacaatagcgccacgctgtcttggaaacagccgcctctgtccacggtgcccgcggaaggatacatt

SEQ ID NO: 43027 - DNA, 1143 bp, Bovine  19866880860832
  misc_feature (1)..(1): n is a, c, g, or t
nacggaaccggggcccccggcaatagaagcatggagtcttaaccactggactgctcccatgtccttgtttttaagcaggagataaaagtcatagtgagatttagtaccttgcccacggtcatgtaactaataaataacagagtcgtaatggatatttagagcccatactcttctgcagcctgctgctgtgccctcacagacagtctgcatcttcagtcaccagcatctgcaggggttatctgatgtcagttctagcatgaagggacctggaaggattgagttcacagatgaacctggatgcccaacccagagctttaggacatgactgctctctctgaagtggcttgtttgtatccacgttcagtgttgttttcctttcatccccagcttggattggatatggaggagttagaagaaattgaagaagatgctgggcttggcaatggtggtcttgggaggcttgctggtaagcgacatcgtgaatgtgctgtgttgtctggctattgacaccttctcagatgccaagcaagactattcctatagaaccagcagactgtataggagaagtgcaaggtgtgacctagtagtagatgtatttgtttttggctctgcactgtggttcgaccagttctagacagacagtcagagaaggcgatggcaccccactccagtactcttgcctggaaaatcccatggacggaggagcctggtgggctgcaatccgtgaggtcgctaagagacacgactgagcaacttcactttcacttttcactttcatgcactggagaaggaaatggcaacccactccagtgttcttgcctggagaatcccagggatgggggagcctggtgggctgctatctatggggtcgcacaaagtcagacacgactgaagcgacttagcaagcaagcaagcaagacagacagacagtagagaaaggaacttgaacaaaagagacattgcttaaaaagtttagagacattgcttcaaaccccaaagctaaccagatgcttcctgtgccctgaagggtttccacagtgggcccttcacttcactgttcccaactgctcaattcacatacttgtgtggtaggactgaagttgtttagccattgtgttatccttttgtgcattggacattttg

SEQ ID NO: 43028 - DNA, 1851 bp, Bovine  19866880873715
  misc_feature (1)..(1): n is a, c, g, or t
naaatatgtttgccacaccttttaacaaataacttttgatatatagtattttgttttagtttcatcaaatgttgaaccttgtttattcggatactaatttttgtctgcttggcttctgttacatattaatatgcgtgccttctgatactgtctacttagtgaactaataaaatgggctccagatccagttttcttcttgttttaaaggtgtttgcattctaaccaggaatgcttaaggtgtttatttaagttttatattcagaagtactgtatccttaaagccattgccctgttttcttctgttttgaattataattgttcttaaaggagccatggttttagacttggcgttttttttttgtttgtttgtttttgaactgattcaacatttgtgtgtctctttgaaatgagattaaaaaatttttttttaattttcatagcttaatttttagtttttccatcttttgagtattgtactgttgctacataattccaagagtaggaatgccagattaataattttttaatttttttttaaaggaattcaccctttacatgtttgagaacagcattatgttctgtttcattttttaaattgtgttttacttaagagtttggggaattttggaaatgaagtacagtctgcaaaacaaactaatgttaagttatgctggtaactgtatccatttgttagattgtttactatttttatacatttaatcatgagtatttcattaatacgtattttgtagtttaacttactgatgtttcattatattatgtttggtagtatgcagaatatgtttgattctgctagagcatacttataacacattcatacaaattataaattcatttgagtgggaatatggcaatcagcctcaatttaaaatacccagatactttgctaaagtttttaattgtgttttcttaagtccattgaaatttttcattttggggtaagatgtaaataaacaactttggaaaagcatatattatttactagtcattttattcttttgttttattatagatcttatgccttcttttatccggcacggtccaacaattccaagacgaactgatatttgtcttccagattcaggcgctaatgccttttcagcttctggagatggaatagtttcaagaaaccaaagtttccttagaactccaattcaaagaacacctcatgaaataatgagaagagaaagcaacagattatctgcactttcttaccttgccaggaggctagcagatgtccctagggaatatggctcttagtcatttttaacaaaagttaactttatttcctaaaatggagactctggttccaaatattattattcagataattattctgatggtcagagaaggctcccacttggagatcatgcacacaaagaccataggtattatgaatgcaaccatggtatcttccaaagaatgccactgaatcaggggaggcatgcttctgcccaggtctcaggtcaaacaacagggagggaacacagtcccgcccaccaacagaaaattgggttaaaggtttactgagcatggccccacccatcagaacaagacccagttttccccacagtcagtctctcccatcaggaagcttccataagctcttatccttctccatcagatggcagacagaatgaaaaccacagtcacagaaaactaatcaaaccaatctcatgtaccacagccttgtaccacctctattcagctctaattcctcttgatattccagtactggatgatgtagcttctaaaatgttcaactattctttctcactttccatgtacttaccatttttaaaaatctctttaacagttggctggcttttt

SEQ ID NO: 43029 - DNA, 2930 bp, Bovine  19866880892057
  misc_feature (1)..(1): n is a, c, g, or t
naaattcccagggggtgctggtttcaaaactaggattctataaagcctgccaaaaccaggggctttctaatgcaatgttacttgctcttaaaacacacataaaaggcatttacagattttttaatttgggtattaaaagtgtgggacatttaccctacttctattgagtcagccagaggtcagatacgctagtagtgattctcaagtgagaatctggggagcctgtgctcatatgtatttttacaagcacacagctgggaagccccaccctaaactggtttcagaatctgtgcagggtgaaatgcaagtagaactctgaaagctttctagtgattttgatgatgtgaaaccctctagagagcagcaccgctaaaaggacaaaatacttcagtgagttatttcttaccatagtaaatgatctgcacttcatatcaatgtagcagtattgctaattttccagaaaaggaaacaaccttgcttatcagcagtttctccagaggttttcaaaatcatggtgactagcctgaaatgatcttatcaaagtaaaccatctactgattttgagagaaactttcttttttttcaaactcaactaaaggttagcaaaacaagatttggattctcagatggaggatcactcttggctcttttttcaccaagacatcaccctggctcatcagagttttcttgaagtagtttaaatgttatgcttatttcacaaagctcttaattcagattaattttttttaaaaaccaatataccaatcacaaatatgaagatttatccaaataaacctaatatcaagaaagaaaaaatttcccatattaaaagtataagcacttaaaatcactttttaaggaaatgcagttacctcttgatgattatatccataatatctctggcactgaagtcaaagggtctgtagccctctcgtttaaaggcaagaattgcattgggccctagccaaatattgccatccatccttggtgtgaagtgaactcctaggaaaggaaatcggctatcggggacctacagatttaacagagcaaacagagccccatttcatactgcattttattatacacacaaacattgaactggtaatagaaaacaccttctcacgcatttacttgtgatctgtgctcagataatacttttctacgtacatgcttctgcctagaaatgccacacaggaaacctgatgccatgacaatgaggcacactgtcccatctattcctctttctgggtaaagaaaaaaactgtcctactctaggttactccccactcctaccgtccccaactaggaatctacgcagctgacaagtaaaatcagagctgccaggaaaaaacccatcttcataacacaggcttttgtcaagtgggaatgtaacaggttggaaaagatgatggaagtcttggcaaggtcaaaaacactgaatagctgaatactcgtagttcaacccagtaggtccagacagaagaatgagcttttcatttaaatgcctatgtcttctacaccatgaaactacagagtggccacatcccctttcttgcacttacagataagtgaactaagaaagaaggttggcatctgggcttgttaaaaggaaaagttctcttaggaatactctttccagacagaagtgggagaatcaggttctttcctcactgttcttcctgtggtacactcaagctttccaggacttgtgagcaagtactgtcaatttagggcttcccttgtggctcagctggtaaagaatctgcctgcaatgtaggagacctggattcgatccctaggttggaaagatcacctggagaagggaaaggctacccactccagtattctggcctggagaaattccatggactgtatgggtagccacaatatcaaaacaaagatgtagggatttaacccagagaaacaggtggaatgcttgaactaaaaagccctttaaaatagctcttgtgtctaactctgggaaaagtttttgtttcattcccttttgccacaagcgtcttgagaaagcagaggtatcatggtatgtgtgtgtgctcagtcgctcagccgtatctgattctttgcgactctgtgaactgttacccatcaggctcctctgcccatgggattttcctagcaagaatactggagcaagctgccatttcctcctccaggggatcatcctgactcggggatcaaatctgcatctcctgcgttggcaggtggattccctaccactgagccatctgggaagccagatgtatcattacttaccggataaatatttccttttacaagatagcgcttttctggcttcaagactaggtaatctccccggaatggtacaattcgaggattgggattgcagccactcaactcggaaatacggtctgagtaaagtcccgcacatgtcacaacatactgacatcggacctcctctccctagggcaagagaaaagaacagcgacttgtgggaagcagaaagaataggtgatagcaaagacagtaaaggcacagatatggatccttcattcattcatttatggctgcatcgcacagcttgcaggatcttagtcccctcaccaggtattgaacccaggcccctgcagtgaaaatgtcctaaccactggactgccagggaattcccatctttttattctttttaaaagatgagattaaatacaggtatcagcaaaagaagttcttcagcatttagttggaaggtagaaacttagagcaatggcacacaagaggatatcaccttaaattttgtactttagagttagagtggttgacctagcgaggatacctaacaagccacatacagacagctctttttcacaaagacctaccgtggaacttcttcactacttattgcaggaagaacccaccttcatttaggggctcattggcctcaacccattggcctc

SEQ ID NO: 43030 - DNA, 2597 bp, Bovine  19866880923363
  misc_feature (1)..(1): n is a, c, g, or t
nactgagtcagtgaggccatccaactatctcatcctctttcgcccccttctccttttgccttcaatctttcccatcatcagggtcttttccaatgagttggttcttcacatcaggtggccgaagtattgaagcttcagcttcagcaccagtccttccaataaatattcagggttgatttcctttaggattgaagtcttttcatgtacacacatgaatatatgaaatatatgtgtatatatactttatatgtatatatacataaaatgccctaatcatgatgacattgttcttctagagacgttactgtttatggaatgcttttggattcagtaaaaataaacagcctgctaaataatttgtttcatcgaagctctcaagtttcaggagctgcattattccttgtaaccctcatcctcaaaggtgttgttaatagcagaacaatttgagaatctacatagtagtgttttgtggtctgttatgtgtaatcatctcattgtaacttaaatctctactcttgctgaaacaatcttaaaattcattttatgaattaatacttttttttgtttgtttcttcaactccatttgtccctttctgagtaaatatcctttggctatatttttgaaagtcagtctcgggtgctcattcaaatgttttctctgtcattcatcaacttctactgttagaaaagaccttaatagtttaagaagaaataatatttccttttaatttcagttgccaagagacagtttcctaggtgctatgtcttttgtctataaaagcttcagtatactcagagttagtcatctttcggggtttgatttttgctggagagatgaagtatagagtttacaattaaagttagaaatacacaccacagcattttcagtatattgaaatgattattctctataagtttttgaagttccttttcaacatatcttaattcagtagctgagtggccagcttccattaatttaaaacatcacatagaacagaaaagtccctaaaacccctttactgagtataagattcaatatgtaaaaaggtgaaatgatatatacttgttggttctctccttgtaagctgtacatttgtattactcatagtaaatgctgagtcccatctgatttgcttctgacctgtttcctgccttttaaagatttacatagtactctgaattgaaactaagcttagttcagcaaaacatatttaagagggttgaaatctggtgctaaagagacttggcatatattccagaggacttttgaattctttcagaacaaggataatatttattgcttagataaaatatagttgtgaataataaatcaagtgtaaaactgttgttcttgcttatactatatattctaatatcttttggttattttctatcaaattcataaaaatgtttgttgagtacctactgtgtaagcttctgttacaagtttttacgaaacgtaagacaatctctgctgtctagataatttcaatctgttttcaattttgacctctttttttctttcacagaaacctaagtttttctaaatagtttttaaaatatttccagacataattcatatgccataaaattcacttgtttaaagatgtgtaattcagtggttttttagtgtattcagagctgtgccttcattaccacaattttagaacatttcattagcccccaaaagaaaatttgtacctcttagacatgaccccctaatctgcttccaaaccactttctgcctctatagacttgcctcttctggacagttcatataaatggaataatagagtatgtggtcctttgtgactggcttccttcatttaacattgtgtattcaaggttcatccatgttttagccttttttattgctggataatatttcattgtgtgggtatccacactttttggatccatttatcagttggtagacatctgggttgtagcctatctgaatagttttatatgtagatgttgattaccattaatatatatatagattgtacagtagatttcagctaggaagtctttcttaactttagatgagatacaaactaatgattatatgtttatgactacacagattcatttctattaataacaaaatatttctatatttttaaaagtttcctaaccaaaaaggaatatttaatatggcaattggcttacattgtaatgagacattttcccataaactgcctcattattttaaagtcacaactcagatatttattttattttacagcatgcttacatcatacttaatatataatctccttcctcttcagtaagcctactggtagctcttcaaagaccttggacatctaaactacaagttcaaagttatatatcacatccatacctacacgttggagaggataattacatacaaacatccactgatgccttttctctttctctcaccccaatatccactctgtccaagatcctttcagatcttatgctatgctatgctaagtcacttcagtcgtatccgattctgtgcgaccccataaatggcagctcaccaggctccccgtccctgggattctccaggcaagaacactggagtgggttgccatttccttctctag

SEQ ID NO: 43031 - DNA, 945 bp, Bovine  19866880927065
  misc_feature (1)..(1): n is a, c, g, or t
ntacgtttatcataaggcttatcttctcttatgttctaagaacaaaacaattgctgacttttcaagtaggtaactagtagattaatatcacgtaaaaatttttttgtacttctggtatatagttctagatgaacagaaaagatattaacctacttacaagaagcatttttatttttgttgacatagtcctttgacttcaaggatcttaaagctttcatgagtttagtctagctaatttgaattcactgcaaagaagtttcatttgatttttgtccgaagtgtgcttgtataactgttgaaaagaggcttatcttggtagctgggcaaaaataggatgaagacagagataggataaggataaatcagtaaagcctagaaagaaagagaacactgaggcagatgagaacctcaaggcttcagaaacaggtcctctcagaaggaaatctagcaatatgagattacctggagcgagaaggtattagttgtttcctctgtaagaaataaagcaatagaaatggagtatggtagggaattagggttaaatgaaatcatttaggaaattgagtcacaaattggctcaccctatcagagtaaagcaaaaaatatgcagatgataatcacaaataaaatttatgagaaaacatagcctaagattagtagtctcctagtcattaaagcaaaccttgaccatagtgtgcattctcagtaaatgtgggttgaataactgagttttgaaaagtagcctcactttgcaaagtagatactgatccgaagggagaccttggttgctgggtagattacaggtggaactgagcaagggttgagtgtgaagcaacctgagagtaacaggataattacccctagataagacaggagaagctatttgaaatacagaggaggccaaatgggttgaggccaaatgagccacctaaatgaaggtgggtt

SEQ ID NO: 43032 - DNA, 1450 bp, Bovine  19866880983646
  misc_feature (1)..(1): n is a, c, g, or t
ntgaagtgacttagcagcagcagcagcaacagtcctgtggatgagatcagtcacacccacaaatgactccagcacagacagagagcaagtttccaggagaagtttgcccatgtcattagagctgtgagaagggcaaagttacttccagctgaaggggtcacagagagcatcatggaaaagcaggcattggaggagcccaaactttgggagacatgtgttgatggtggtgtgcattcttgcctgcgggaagtggccaggctatgagggaagaagagggtggtcagcactgtgcaccctagtcttgctctatgcagttagtcatagggaccgatgggtgttttctgtttccatcacctgctctgacattactaaaaagatgatcactacagcccttcattttagcacctttcagaaacccagaacctttattgttatagtggaacttaaaatgtcatttgaaccacagacagtatctaaactcacagctgtctacgggtaatgagccggacagctgggattttccctctgatagtggaccagccgttttaatgtgtagccataaagttttaactttttcgttaaagggcatctcttttgtgaagcacggcagatgcttccctgacatctttaaacagaacacggttaacagtttgtgttaagtcacagggggactatagtggtgactcctggttttctctacaggagagatgtaagggcaacaatctggatagatgcggggagccaggactgaggaaacaccatttatcctaatcaaaaagtacagaggggcatgaaagccacccagcctaggctgtgccatggatgcaagtggagatgattcagggacagctgtaacgcattgcggggacccctgtggccagtgtcggtccatcagtgctggtggcctgcgtggtcagggacctctgagcagaggcagctgcctgccctcattccaccctgcctagggtggagttccctgccctagatcccaaagggcgacagaaaccagagacaggtggctggttgtctcccacggcagcaaagccgttctgtcttctgccttctgtgatttgtttctctgctgttttcagctgattgtatctgtcactgcttctaaaaacaggcagtgcggccgtcaccgtgactgctgatgccagcctccacatctccctccctctgcttttctcctcctgcctctttcctttcttgtcacttcagttgctactcagatttgtgagaaaagactggccttttatagacatcacttgccaggcacagtacttctttttgtctttgttggctagcccatcactcacagtccggaggggataatcttatggtcttccgcttccctttggcagagttctctgggggcctgctttttgctgacaaagaggagagttgtgtgtgtgtttttcaggcaactttctcttctgagccatccaaaagg

SEQ ID NO: 43033 - DNA, 708 bp, Bovine  19866881013554
  misc_feature (1)..(1): n is a, c, g, or t
ntgtccttttctttctctgcaaggaggcaacaatgagtgtcatctgtagacaaaggtcattacagacccaccagtgggctgttctacccggcacaggggggcagaggtcaaaactgggtggcatgtactcccctctctccacctggaagccgggggccattcctccatacactgccagcctccctctcacagggcactggagcccctggggcactttcaaggccagggtaataggaggggaacggaagatgctgcagctatccgatccatcttcttttgatccccagatattgaagccccaactgagaaacttgaaacagtaggaaaattaaagtgtctcttcacaaaggtgcaagcagcaggtagcagacagttttatccaagaaactcttgtcacaaactcagagacagacatcaataaatctagaccccaattaaacttgacactgacggtgactctagctctcatctcatcttacatccttattctatacataggaagcctggatgtccagagaagccaagtgggttgcccaagaggtagacacaaggtcagaacaggggcctctatctctgtgtctcttgctttttctaatatacttggctgccacttttctcaattcccagtggaccctctcccccactcttactccatgttattatttctgaaattggatgtaccttgtaattctctttaaaattcttttt

SEQ ID NO: 43034 - DNA, 1411 bp, Bovine  19866881022614
  misc_feature (1)..(1): n is a, c, g, or t
nattgcaaatacaaggataaatctggaaggttgatgatgtggttataatggaaaaacatgctctccacccctttttgtgcgatcttgggcaaatattactaggaacctctatgaaaagctttcccaattacaatatgaggtaatgcttaagtcacagtcaccagcttccaagaaggaaacttacacaaagggcccagcattcagtatgaacaccaaaaaacttgctccttacctcacaaatgttctgaacacacaagcaagaattaaaaatgcaaaagattcagtaggaaaattagagtcaaatacttaaattgaaaataagtaaagtctcagcgaaatgcactctattaaaaaatgtttataaacacacacacaacttttttcgtaattttcccaaaagtatgatggaaattattttgagtctttggcggatttctaggaggttttatttgaagaaattcttatgaacacagccaaacacatataatttttggctcttcaaccctgagatctacaactgacgagactttttgggcagcagctacaatagcgacggtcagctttcacctccggacgttatcatccaacagagctggactaagaattctactcaaacgttcgcacaacttcgagcagggcgagtgacaactgcagtgtttgcaaacacaatgcaaatctcgacgtaacaagaggaaaacgtgtgccccagtgtaatccctttaattcctacagaaccaggggatgagcaatttgttttctaaagaatatctttcttccagtaattaaaaccaacaacatagcttccagaagggaagtctgtggattttgaggggcgggacggggccgggagtgcggggcggggggggaacggagggggactaacttaagtttttcactctttatcagctttcaaacaacgaacatcactccaggcattaaaaaaaaaaaaaaatcacagaggccaaaaggaaacacaagccgcggggagcggcgtcggacacccagcccgggtcccccgcagcccgcggccgcccaggccaggtgtgggcgcaccccgcccgacactcactccgcagcagaggagacgtctccttcttcacgtacttcccctgcacctcggccggcttggacacttcgtttttggttttcttccgggacagcatccttgaccacgaggccccaggccacgtcaagcagccgccctaaggctccgcgccgggcgccgggagtccccgccgccacctccgccggcgccaccgcctccttccctcccgagccgccgccgcgtcgccgccgccgctgccgcctctccgcagcccgggattgcccacaaggactgccgcatgttcggggcgctaagcgcgccggtcaccgctcaatcgcttgtcagttccttcccggaagtcagccg

SEQ ID NO: 43035 - DNA, 943 bp, Bovine  19866881045526
  misc_feature (1)..(1): n is a, c, g, or t
ncagtgcagttgtctatttttaatgtcctatttttgtcttttcaatcctctaatatctgtttaacatttccctgtgttaattcttttaattctcctctagtaaaatacctactggggtttcctgttatgttgcctagaccctgactaaccagattctgagcctaggtatcaaggtgcaatattttaaaacaattttttgcctagactctgaggctagctacctaggctctatattctaaaactcacactacttccctcattttcagaaaacggacatatttttctaatgtttctgcattttgtaggagctaggctacgagctaaagaaaaattttcttatacccatgaatgagttacactcacgagcaggtaaccccattactgacaacacaatgttcatcgtattgttgtctgattcaacaaacatttactgctcactgactatgaggcaggaactgttagatgctggggatgcaaacataaatgtcattgttcttatccttaagagaacagaaatgcctaccgattacttagtattagtaatagctttgatcaaggatgcacagaggctgtgggatcctggaggttttggaagtgggcgttaaggaatggaattggatactggaacccactgtgagtttttcagaaagcataaactgagaaatatatattgggcagcagagtcagtgctttgtatggagcatttaaatgtcaaatggctgggatgccctggcaggtgctcagtgactaatagatacctggattgtctgtgtcctctagtcataacaagatgatcacatcgaagttagtaatccagtaagatttagatttgagaaacatgacaaggaggaagttaaataccctaaattaaatgccatatttagaatgtgctaaatcttatacttaccaaaattactgagaaaagagctagggttaagatcat

SEQ ID NO: 43036 - DNA, 973 bp, Bovine  19866881047345
  misc_feature (1)..(1): n is a, c, g, or t
ntgtgtctgactctttgcgaccccatgaatcgcagcacgccaggcctccctgtctatcaccaatttgagtgagttcactcagactcacgtccatcgagtcggtgatgccatccagccatctcatcctctgtcatccccttctcctcctgcccccaacccctcccagcatcagagtcttttccaatgagtcagctctttgcatgaggtggccaaagtactggagtttcagttttagcatcattccttccaaagaacacccagggctgatctcctttagaatggactggttggatctccttgcagtccaatggtctctcaagagtcttctccaacaccacagttcagaagcatcgattcttcggcgctcagcttaggtgttaccaaaaccaggatataagatgggttttccattttatcagtagtgcttttctttagcccttcatgcatctataggcgtctcgtttgaacctgagttaaagtagtcctgcctatttgtttttcattgcttaccttgtgtttttatgttgacaagtaaggttggcctcttagctgttcacatgacatcatttttctttgtttcagagggtttattacctctctttggaattttacatgggccgaacattacagaacaccatgatcaaccttggcctgcagaatgcctgtgatgaggccatctaccaggtacgttatctctgtatttctctcattctctccctttaaatttcaagtgcaactcaggaaccttggggagagagcatcccccctaagaaaaagaaagaaaaaagatgaaaaattgtttctgtagacatggctgtttcaaactattagaaatgtacactatagtactactgatctatggtttaagaggaacacagttagggaacacagttaaagaacttggtttgccccatgagaattttgttctgcaatcagtttttgacagcattccacaacaaatgcattttagaaa

SEQ ID NO: 43037 - DNA, 769 bp, Bovine  19866881071590
  misc_feature (1)..(1): n is a, c, g, or t
ntttcaatattgtttaagtagtaatgcaattttcttgaaattgtcagaatgcttgaaaaatggaagaagtttatactagaaattctaaagctcattttgcctactggtaaagctaaaactcagaacttatttttacatatgcttctaagccacttcaaaattaaactaaacccaatcatttgcttataaggaagtcatcagaaatgcacagaaaaatttatgcatgaggagtggataataacacataattataatagcaaaaaattagaaaccacctatgtaagttactacctatatggaaattggtgaaataaattctggaacatttcatctgatgaagtacaatatagttaaaatttgtattatttaaagtaaaccatacagaaaaaaattaatattttcaaaaggctaaaaatacctatgttgtgaccccaatttcgcaggaaaaaaattgtaataatgtatatgtgcatatgttcacatacatagttaagacactggaagactgtcccaatagtaaaatgttgacagtgcaatctctcattgtgagattactgtttttctttttgcactttgttagatcatctaaactttctacttaaaaacctatgtttaagtttagcaaatactttttcattaaagacagaaaagttattttgttagatgtgagcacagatatgttaaaatatattattgtccttgaaattatttttgaatagactttaatccaatttatcgctactttttctccgatcatcaaagttttgtt

SEQ ID NO: 43038 - DNA, 1345 bp, Bovine  19866881198327
  misc_feature (1)..(1): n is a, c, g, or t
ncctctgtcctggggattctccagcagaatactggactgggttgccatgccctcctccaggggatcttgccaacccagggattgaacccagatctcctgcactgcaagctgattcttttatcatctgagccacaaaggaagcccacgaatactggagtggttatcccttctccaggggattttcctgacccaagaatcgaactggggtctcctgcactgcagattggagaaggcaatggcaacccactccagtactcttgcctggaaaatcccatggatggaggggcctggtgggctgcagtccatggggttgctaggagtctgacacaactgagcgacttcactttgacttttcactttcatgcattggagaaggaaatggcaacccactccagtgttcttgcctggagaatcccagggacaggggagcctggtgggctgctgtctatggggtcgcacagagtcagacacgactgaagcgacttagcagcagcagcagcactgcagatggattctttaccagtagagctaccagggaagccccagctacactgtaacttggggtaaaaattttcttctcaagaactttttcaggagcccaagggacaaagagagtctcatttggaacagagggcaatagaatgacaatcatgttctaaaggagacataatgttattgtgactttagaattcactttccctcttttcctgaatgagtcagagtttgctgggctaccacagttttcttctccctttattgtaacctatgccttagttatcacatttggaggtttgagtagagaagtcagattcattcaactacacaaaattagagccacctggtttcttatagtccagccttggaattcaaggcatctgtataatataagttagacctgatgcccaataagaattgttgatcaggtgctggtacatatgtagaaaaaaattatactatagtagacaaagagtgctggcctcacctactccctgggttttatagcaaagcagtatgtaaactgcaaaactcaatttattttcagatttcctccctttgtgtctatattcaggccttcttcctggctaatgattgttctggtatttgatctgcattataagataaatatctagaaacttttctcttaagctttgccaccttgtagaaatggagcagcagacaataaaaaatcctggaaactatttatcactagaaaatgctcttctaaggatttatatgtgtattgcttttataggacagtcttttgatcatgtttataagccatatctgatgtaaaagaacattattatttatttattttgttttctcaggagcatttaaattcctg

SEQ ID NO: 43039 - DNA, 832 bp, Bovine  19866881221031
  misc_feature (1)..(1): n is a, c, g, or t
naaagaaatttttcaaggagtgtcatacacttgacacggcaaagataacttcccaacggcagaacctgcatgttcaaagagatacctctctaggtcaggcagactcatcgctgagcaaatagcctttaaaactgctttcccaaatgaggcaatgagtgatgctaagtcaattataacttgattctgtatccatctttgtctggcatacttgctgtcattagctcattgtctttcagcaaccacttctaggcttacccgctcagggaaaagagaatcagaacaagagaggatctgggttcaaatggtgatatctgctctttagaagggacaggtagagggtgagcaaagatggtgggtggctgtgtcacagaacagacgctgcaactgcacctccagccactcagtcatttaacagaccctcccatgacctctcacttagagcagctcccagagaggggagtgatggagacctgtgacggaaccaagatgtcccttgaggcaccaaggtaaccagcttcccagaggtctaacaaccgtgtgcctttctgatggctctagtaagagccattatccaatctgtcttccagagccattgttcccagcagacactgccacaaaatattctcataaattgagttccactccatgatgctcttggattctggtttgaagaagttttccaaagtcctagtttgctttcttttctacactctgccactttgggaccattctgtcgtcttatcaatcctaggtggttcgagatcagatctctcactgcacagtgaaattgcgccagaccacgggtctcatgggagtactgcctggaggtgat

SEQ ID NO: 43040 - DNA, 1534 bp, Bovine  19866881507907
  misc_feature (1)..(1): n is a, c, g, or t
nctgtagtagctgctctctctcaacaacccatactattcaaatgctccttgtatgttttctccagcatctctctctcctgggtgaggaccaaagaggttgctttctccctctggagagtctctttaagctgctcctgggcttctgcacattcctgggtgagctcgtccttctcaaactcccactgggacctctccctcacattgttgatccaggagctccttcagctggtggcggtagtgcacctccaaactccgcagggcgtgttcgtatctctcagtgactttctgacaatcagcctgaaactgggcttctatctgagaggttcttctattacactcagtttccattttttccctaaatgtggtcaacatacagcattactgaaactgtcatcaactccagaagcaaacataaaaacattttcccatgcatagaagaagcagccaagcaaacaatgtaaatgttttctaaaaaatggtcttcacttatttctatactcagaagggatctcatttctgagtgccaaacaatggcggccataattaatttaaaagactcacttacctctctctgcatttaaaaagaagatttagaaaccaaattctctggcatattcccagatatttatggagttttagccaaaaacttacaatgctttctcattaaatgttcaaatacatattaccctaaaccctaaatgggaaatacataaaattctttcattttaattatgtataccctggtgcctcagatggtaaagaatctgactgcaatgtaggagatccaggtttgatccctgggttaggaagatccctggagaaggaaatggtaacccactccagtattcttgcctggagaattccatggatagaggagcctgacaggctacagtctgtggggtcacaaagagttggacaagactgagtgactccctgcctgtctatatgtagttatataaaccatacatatatgtttttctttctatttaatgaagtaccaccaagataaagtatgaagcaccaaagccctcaaaagcatctgaggtttcacttgaggaaagtaagcacaaaatagtgtttcataactccgagagaaaatgtaactttgcccgaatctaataacttataaaaggcctttctcagaaaacaacaggactaaacgaagaagaaatcacatttgtgataatcttattatcctcatccagaaccttaaaaagtatatgtctgataaaaaaaaatgaaaaactttcctcttaaaaaaaaaagtttcaacaatcccaaggtaggcttatatctaaacaaggacaaaacaagttgaaaaactaaaaaagaattctagtcagtaagtgggtgcttacaccttctggtttttcaaagtctcctttattaactgggacttgtggtgcccctgaggactggtgtcccctcctctccttcccccactttcttaccttccctcatgtagttccctttggtgtttttccaagagctctttttgcaattctctttctcaagaatgtgtttctccaccagg

SEQ ID NO: 43041 - DNA, 943 bp, Bovine  19866881542290
  misc_feature (1)..(1): n is a, c, g, or t
ntggtagggctgaaatgcctttctcgagctgttctaactttttttttttcctctgaagctgccttctcagaaggaaatatgagaggaggcagcacttctcccagctgagcctccacctagctgaaggctacaatctgtgtccaaatgcgtgcgcaccagggagtgtggatgccttatacgtactgctcttcactgagagtgagggccagcagtttgctgatagcaggttttaggagcggggttggggagtggggggagtgagagagacggcagaaaggccctggtggggaaaagcagagacactaagaacaaatataatgcataccacagctccctggagagcccctgaaactgtttggccacatgtgcttggggggagggctgtagaaacttgtaaagaattcccagaacagaataggagcacattcttgcttacaagtacttctgaccatctgtcatcacgatattcaagggtgtacccattataataatatttgaagccaggagtaaaaaagtggagatctcaggcccattaattgctgagaaccagatctgttgtaacaaaataattcagaaattgtcttctcccaatttttccagaataataaatacccgtggggaaacactgacacccgggtctcaccctgaagatcctttggagtgagaactaggccaggcataagaggaacctctgtcctagctccaaattttagaaagtcaagaacaccccagggtatcagccctaagccagagagggtctctcggattgcagaagcctctaacattctcctccagagaggaaaacaccaagaagagaaggttattagaaacttaaacagtattttgaccccactgttgtttttatgtaattgctaattggttgttttttattgttgttgaagatttgttccttaccaaaaaaagcactatttaataggaaaat

SEQ ID NO: 43042 - DNA, 1340 bp, Bovine  19866881868424
  misc_feature (1)..(1): n is a, c, g, or t
ngaaaacttaggtccacacaaaaacttgtacatgaatgtccatagcagcattattcacagtagcccaaaagtggaaacaacccaaatgtctatcaactgataaatggataaacaaaatgtggtatatcgatccaatggaatacaaagaggaatgaggtactgattcatgctgcaagatgaatgaactctgaaaacactatactcagtgaaagaagccaatcacaaaagacaacattttgcatgatcccatttatatgaaacatctagattttgcaaattacatggatacaaagaaagaaaagccaggtattttttaaatcaacatttaagattaataagaaaacactatttataaataagtcaagggcctagtaaaatgccataccttgccacattgcttgtaggaaattcccttttggttacagtactcgtagatgagggctgcaccttgcacacataatttagctttcagagattcgggtttataataaatcccactatgtagtgacaccactattgtgtccggtctgatgaacagctatggaacaagagaaatacctttaacagaaagtacacacaagattcattcacaacccaagaagtaggggaatacagttagagttgaagctattagagacactatttaaaactctgcctgggtttgttcttccagctggagcactggtagcttccccagcagccaaccacagtatgtgtgtcaggtccctctagcccatctctgacttcagctatgactttggggtacaaacccacctctcaccaccagcaacccacttcaagggcccaatacggctctctgccttttgcctcagggtgttctctaattttgggggagagggacttaacatccctagggacaatcctcaaacaaagggacagaagttgaagggcacatgagcacaatcctgggagatattaggcagttcctcagaggtctcggtggaatcaagctcacagcttcaacctggataacacaccttcccaagattttccctccttccctgtttactctccccacccactgactcctgcttccttggataacctcacaaattacctatttttttttttaagtcactcagtcacgtctgactctgcaaccccatggattaatacagtccctggaattctccaggccagaatactggagtgggtatcctttcccttctccaggggatcttcccaacccagggattgaacccaggtctcccgcattgcaggcagattctttaccagctgagtcacaaggaaagcccgtatccaatatccagtacccaagttctagtcccaggctctgctttttgaagaatccagactgg

SEQ ID NO: 43043 - DNA, 1766 bp, Bovine  19866880782548
  misc_feature (1)..(1): n is a, c, g, or t
nttcccgaatctccttcgtactgctcagaataagagatcattttcaagcaagccatgaaggaaaggaaaggattttctcattgacggttgtttcaaggtttataggtatataaagtataggtataggtaacagagtcaccacgtgacccagcaattccattcccaggtcgatatgagagaaccgagaacatgtccagaaacttgtctgtgaatgttaatagcagcagcattcaaaatagccaaaaagtggaaacagttcaaggatccatcattcccctaatgagctgcagaaatctataccttactttcttctccagccagggcaaatgcaaagacctactccacgggaacacgcttagttcatattcaagactcctgacgaaagcaccagaacaatgcataggtgatcatatggaattgagttacttctcaccatcaggtattttttctcctcttggtcctggcacatggagatggcgtcttgaggtgggatcatattccaaagcccatcacttcccaagataatatacttgtgcttctgggggtcaagagtgtggacgcttgtgtctggttcaggtgacaccacaaactcgccactgaagaaatcatagctccacaaatcacctggggagcaggaggcagaaaaagccagaagcatcatttccaagagagtagtatcccatcaacagattaaagaggaaaatctacatgttcatctcacaagatgcagaatagcatttgataacattcgaaatccattcatgactttaaaaaagaaaaattcttagcaaactagaaattttaaaagttaactctcttattaacctgataaaagcatgtcttttatcaccacttttcttccagttctatacgagggatccttctcaacacagtaagaaaataaaaatatatcatatatatgtattagaaaggagaaaataaaactatcatttcttgcagataattttatttctacataggaaatcaaaaagaatttagataaattatcagaacaggaacacttagcaaggttgctaaataataaataaaagtcagcagtatctctatataacagcaagaaacagaaaatataaaattttaaacaattccatttacaacaatgaaccaaatgcaaggtactgaaaagtttaacaaaaggcatgcaaatctatcatggacaaaattatacaattagattccagtatctaaatacacagagaaagaaattataagcaaagataggaagatcatgaagatgttaagtcttccaaaaataacctataacgtcagtgtaattccatctaaaatcccaaaaggattcttgtagaatctgacgaactgattcaaaaatgtataggaaggaactactgtatagcacagggaactctactccatattctgtaatgatctgtatgagaaagaagcactactctgtaatgatctatatgagataagactctaaaaaggagtggatatatgtactaatatatgtataactgattcattttgctgtacagcagaaactaacatgacattgcaaatcaactatatttcaataacattttaaaaatacattgaaaagtagaagaaaaaataaataaaatgtatagggaagagcaaaggccaagattaactaagataactgtgaagaaaagataaagtggggagaacttgctctataagtagggagttctagtggctaaccgaaaacctgttaaccccccaggtcaagacattatgatgtaacctcctacatcaaatcggaa

SEQ ID NO: 43044 - DNA, 909 bp, Bovine  19866880810870
  misc_feature (1)..(1): n is a, c, g, or t
nctcccacttaagtactcttgggattccctggtggctcagctggtaaagaatccgcctgccatgagggagacctgggttcaatccttgggttgggaagatcctctggaggagggcatggcaacccactccagtattcttgcctggagaatccccacggacagaggagcctggtgggctacagtccatgggatcgtaaaaagtcggacatgacctgagcaaccaggcacagcacagcacaggaggctgaggaatttactgcccattggcctataccttctcagtgaaatagaagtgaaatcagctgagagcaagggagagcttgatgggataaggagctgtaaatattaggtgcaggcttatgactttctaattagcccttctcgtaacccaaaaagtcaatttattttgttactgattaaaggaacatttttcaattacttcatccagacaagctgaccagaaagttatgtggtgcagtggaagaaagattaagattttattaagattttcctgtggctggtaactagaagcatctgctttggaaagggccaagcctgcaggcagattcttaaccactgagccacctgggaagcccataataatggttactatttgttgaaggcctatttcatgctagatccctagtatactatagggttaatataatagctctgcaaaggtaaatagtaatacatcctttaacagacaaaaatctgaagttaaaattttgtttgaagtgaggaattccctagcgaaccagtgcttaggacttggcactttcactgccagggccctgggttccatctctggctgaggaactaagatcctacaagccactgaaagtgaaagtgaagtcgctcagtcgtgtccgactctttgtgaccccatggactgtagcctaccaggct

SEQ ID NO: 43045 - DNA, 826 bp, Bovine  19866880893511
  misc_feature (1)..(1): n is a, c, g, or t
ncctaatgataaatctatttcactaactcctcctttgtttattgggttttgatttttcatttaagccagtcaagttgtttaatgttgaggtaatattcaaatttgagaagttgtaacatgtagcaattcaagaaacaaaaaaggtctgttgccattacctcagttcttattatagtggcctgtttggtgcctctatagttaagaatcagggttttcccccctattttcaggggttcatgacttggctgttaagagttgttgctcctggctaatgcttggagtggtctgtgggtgggtggatgtgtgctgaatttaggttttctgtctaacaggcgtgttgggatgggaggggggaacatctagactgcccaccacatggagtgcagaagaagtaattggaaatttcagatcaattcagttttaaacacttttttggccttcccaaatataaccttgtttaaagctgttatttgccatcttgttagttatgatcccaccgtttttaagttcccaggaggggattctctaggggaggtggaagaaatgaaacaagcccagatgtctttaagatgatagctgtgtgatttcgaacgctgggtttaatcctcatactgaattattttgaattgaaaagagcgcattggcacacctgcgcctccccctcccagttaattgcaatctaatgccgaggcacctctttattaattaccaaatagtctgtgtgaccaaggactaacatttttaagttactcagctctatcctcatgggcctatatatttaatacctccaaagattttaaggataggctttgtatacttttgttga

SEQ ID NO: 43046 - DNA, 1026 bp, Bovine  19866881096162
  misc_feature (1)..(1): n is a, c, g, or t
nagaaattaaagggaagtatctctaaggttctggtctgagctaaaaatggaaactggaaattcccatttcagcttccaggattaagcagtttaacagccatcagtcggatgctccaaaagtttataaacttccaaaaggctttattttgaaaagtatactttaatatctaacttctcctaagaaatgggcagaatgtttcttctcatttatcaaaaaaaaaacttctttacattttgaacctagatttttaaataaaggagagactttaaaaaaaaaaaaaaaaagaccgtacctcgggcaagcctcagttcactggatctatgtcacattgatttataacagttatttcttagggggaaaaaagcacacacagatgcaaacaattactctatttttgtaggcaacaagtgaggtgggtggtaactgagaaatttttttaaaatcctgtcacaatattctgctttttcttaagaaaccctcctcacacaacaaacgtttgccacatcagagaatttccagggcctgaagcaccactttgattccagaccgctgcaggcattagcaggaggtaattagggtaaaaagttcagccacagttccatgtctagagtcctgccagaaataaatttcctctctattcactggtttctactgtaccctccctaagaatcatattgaaaacacatttatctttgtggagtttgttcctcttctaattaacgttatggcgtttacagtgtttaataatttaaaacgtccccccatcgcagcagtttttaacagtggaggggtgcattatcatttttcctatactgcggcttcattggacaagtgactcacagaagtatgcagtgcagctgttttcctcaagctctctggtcatcataaactttacttttatttccttgtttgaaaaaggtgcatggacgaaactgacaacagatgcgttcagtatgttcagtgaaatttttcagggaaatgaagactaataagggaatatatgttactttaacacaaatttatta

SEQ ID NO: 43047 - DNA, 779 bp, Bovine  19866881189963
  misc_feature (1)..(1): n is a, c, g, or t
ncgttagtaataaagtgaaagcttattttcttaccagtatattgtagcacaacacacgtcctttctgttatggggcttgcatactgctgatgttatggaaagctttctcatcagcctacccatgaggaaaattaagattgtcttgctgtgtcccagggaaatagtcaaggcttttacaaagagagaaaatagagaacaaaaggatatgtcaggcgtgtacgcaactgtcttattggcagatagcgtgactcctttatgaatgtgtgactttctgaaaactgattttaaatgaattatctttttctattaggcattgaagaagaggtttttttccatatataaatagaatttttagctctaccacgtcttgttcactcaactctaaactgaaccttcatagcatttgttttgtctactattgaaggctttctgcaggaagactctcagttgtgacattgtatggatgccagcaaaatgatcagaatccaagtttctagtgtaccatggctctaatgagctgctaattgaaggtgacaagctgttttttccttcccagttggtctggcaaaatgttaaatttcattcattattaactcattgcttctcagcagaggactggattaattagttgggaacattaagaaaagaatttttgccttgtgtccgttttggcgttgggagtttaggttttacaagatgctccccatcttcagttttgccaattgtgtgcagttgtgtaaatctctagcacaatcaagacccagcagcgtttctgtcat

SEQ ID NO: 43048 - DNA, 1917 bp, Bovine  19866880400754
  misc_feature (1)..(1): n is a, c, g, or t
natgagcatatgtccttctactctgccatcttgatctcctggttatcactcaggtcacaatctggagccacttcccatttccccatcacaccgccatgtccctcttcacacccagggaaaccatgtactgaccgcatcctgctgtttctactctcccacctggtgccaggccttggctttctgcagaggaatgccacctgtccctccagttcccaaggcccctgctgcagccctgccccacctcactgtcctggctctttccaggccaggccccgccccagtgaccccatccacctgactcctccattgcaggccccgccccagtggccctagtggccagctcacctgatgggcgccgcctcgtcgccgcgatccagccagtcctggggcgggacgatgtacatgcaccaaaggccccagttgtagccgtgggctgcgctggcgtattgctgcacctcgaacgtgtcgtacttgatgttgtcgatggctggcaggacgatccgccggcggtcctcccggatccgcgtaagggcgggctcggccctgcaaggagacgcaggtccctgaggaagggcacggatgccagggacccccgtcccgtccccctagatagggagccaggacccaggcggccacacccgcatctaatgttgggctagaccaaccctgcggagggtagatccaagcgctgcacctctggaagccccggagtcgtctgggccgcacacccggctgcccgaggtctcgctctgcctgaggcagcccgtggctaaccagcgattgacactagggatctaaacactatccaggcccgatctctgacatctgatgagctgtcctggctccagagagctctgtgagtcagcttagtctgacagccggcctgcctcacagcctggcttttctggcaagtgaatcctacttcctggcaggccttccctccagggctggaaggtacattcatttacaagcaggaatggaggcttgaatgtgccacaccctcttgtaacgcattggcgcacacccgtgaactagaaaagaaaaaaaaaaaaatccatgcctcggggagcttaggatatactgaagggacagaaaggctaacaagcgctgttgtgcagtgcacaacctacacaacagtatgtggtgggcctgactgagtgggtatggggggacagacaaaaatgtataagtaaatgatatattaggaggtgatatgcattgtgacagaaaaagagggcaaaataagggtgatttggaattgctgttttaaatagggtgttcagggtaggttgcactgggtgatgagcagaggtggtgtaggatgtagcagctggttgttaggggaggcaagtggggtgctgcacacagaaacagcagccagcactgagcccctgggatgtgctggtgtgcttgggaagcaggccaggcagcgggagtggagagatggtggccgtgcaggcaaggaaggcggagaggagagagaccagaggacaaaggctgtgggttgtgaatttccaatgcaggagtccccaggggcaaacaggtagcatttcactctggagatgaccttgtctcctgcaaggatgagatgctgcccaaggggctggagttcaacagggtcatgagcagcctgctgactgggggaccagagagatgaacagggggacaggggccgagctcagggagggacagcgggggctggggtcagggtgagaggtttctgaccctgcctgcccagattcaccttatagccagcctttcttcccatccttccaagcaagagcctggtatttacctgcctttcagcttcatgaggaggattaattaattactgttagcaaagtgcttcagagatgaaaagctctctgcaaatgccacatgcgctaataaggcagaatctttatagaggcagttctg

SEQ ID NO: 43049 - DNA, 1945 bp, Bovine  19866880598660
  misc_feature (1)..(1): n is a, c, g, or t
nacataggcaaggctcatttcaggcagactctccacccaccgtcgcagttcctggacaaatgtacttggcagagcctgatgcttcaagcttgtgtcacttgtcacttgtgtcatctaaagcatcagctggagcatcagctggtgaggcccagcctcctgggcgggtccagactcagtcctgtggtaggcacccgcaggggacacccagggcacagggggcaggacgccgagggcagagaacccggagaaggcagatggggagggcccaaccagccagggcgcccttgcctccgctctgctctgtaaatgtctgggtgccaggaccccgggcctgcaggggtgctgcttggaggtgcctgtgggagaggccacgtactcactttttgggcctgtagtccgggatggtacggtccagggagatgcggtcgctgagctgtgcgttgtacccgtattcctcgaacttgccttccgtctcctggctgtcatcccgcagcgtggccgccatgccgccctggcccaggcctcctggcccctccaccagaccaatgggcttggcaagacctggtgggagaaaagaaggggtcaggcaggttgcaggtcctaccgtgtccctcccccaccctcctcccggcctcgccctgacagcccctttctttcggatgcaagcgcagccaatttctcacatgttgcagaattccaactataggacattgcaggaaagcaaagctatgggaacagtataaggaccagtgccaaggtttcagggtaggaatgaacagacagaacccagagaatttttagggcagtgaaactttctatgatgatggatacatgttaacatacatttgttcaaacccagagcaagtaggacaccaagagtgaaccctcatgtaaattatggactttgagtaattaggatgagtcaatgtgggttcattaatcttaacaaatgtaccacattaatgcaaggtgtgaataacagggtaaactgagtcaggggaggggctacatggcaactctctgtactttctactcagtgtttctgcaaacccaaaactgttcgaagaagcaaacgctactgggtttttttaatgtcaaataaaaataagtgaactttaaaaatgtaaagcagctgctcccagtccttaatattgttgatcgtcgtaattccaactaatcgcacatccacacaatgcaacgctactttgggatggaaaggaaggaactaccaaatatgcaacaacctggatgagtctcaaaagtattgttgagcaagaagcctcccaaggcacagaggaaaacataagtacaattctatttaccgtcaactacagattggctatggttttccagtagtcatgtgtggatgtgagagttggactgtgaagaaagctgagcgccgaagaattgatgcttttgaactgtggtgttggagaagactcttgagagacccttggactgcaaggagatccaaccagtccattctgaaggagatcagccctgggatttctttggaaggaatgatgctaaagccgaaactccagtactttggccacctcatgcgaagagctgactcattggaaaagactctgatgctgggagggattgggggcaggaggagaaggggacgacagaggatgagatggctggatggcatcactgacttgatggacgtgggtttgggtgaactctgggagttggtgatggacagggaggcctggtgtgctgcaattcatggggtcgcaaagagtcggacacgactgagcaactgaactgaactgaacagattggcacttgccacaggcacttgccatctacctctacaagggattaagtcatgtgctgctgtggctgccaaccttccacaccctctgaaggagctcagggtggagagcagaaacaaggcattctgttgagtcctgtcccaagaccatataagcaaagc

SEQ ID NO: 43050 - DNA, 1073 bp, Bovine  19866880717490
  misc_feature (1)..(1): n is a, c, g, or t
nttggggtgttctctgtggaggatatgggcccttgtgtcacttcctgaagtaaagttccctcagggctttcactcaaggagaggctggaggttaacgtggcttttgtaacagttacatttaatgttcaaaaagaactcaggtgggccaaattggggtcatattttagtttgaaatttgtaattcctcacttcttccactgataaactgcatatctagtcagtgagtgagtggtttatctcctgatcctgatctttgaaggaacgtgggacactgatgttcccacgaggagacagttcacatgctggtttccaggaagtgagtcgtaaccccagacagagccacagccattgataatagtgttggggagaaaagctgtggagacactagcccctcaagagaggaggaaggatttgtgagtgaagttgggtccacagttcaaaagttaaaagaagtaaaacctgggatcctcttggttattcaagccagttggtgccggatccttgctgccagggcaccagtgacactcgttgggttccatgaggacctgtgagcagtgaagtaacaggaatggagaagtgggtcgcagatgtggttaaacactggtagaagcagctatttataaatatctcatcattcagacaaaaggtttccttatgcttttatttgacaacaaactgttattattatttaagaaaaaaatatccaagttgcattatgcttgaagttttttgaattcagactattgcatctctataagaaggcctctggtcacgttatacagatgatttaaggaaagaatggaattcctgtttcttgaactgtgtcgtggtagcaatattaagagcctacttaatagaataaaaacattagagcttctttaatcaaaataaaacccaagtgttatctggcatagctcatggcccataattctgagatgggcttttttcccagataacttgaaatctactggtaacagcctcttcactttaaagaaatctaatactcatagccaccgctaaatggtattgtatttcaaagttacgaatttgcaaacattaaaaactaatccatt

SEQ ID NO: 43051 - DNA, 1115 bp, Bovine  19866880777581
  misc_feature (1)..(1): n is a, c, g, or t
nagggagcagacaaacagagctgtccaaagataccccacaagacacggcccccccacttagggtctgtgccagccagaggactcccctcctgtgtctgatgggcccagccaagtggatttcttcctggaggctacattagcatctcgatgggccaatgtcatcaggggtcctgtgaggaggtggcagggtgggagggagagaggtgtgctctgttgtcattataggctcaggggtccctcccatccgcaaagcacccctgggcagctgcgtggacacgtcagcatccatggatgtcctagagtacagattcagagagcttcgagggggccaattgtcattttgggggttaattttaaagaacactcaacactcattgagaaaaagcatttctcctacaagctgtcccatacccctgaacccattgattccacctgcagcctggagcctgcacactccactggcctgggttctggacagtggcatggatgtttttaaagccctccaggtgactttgagctgcagcatggtttggcaggtgttcagctctaagaactggtggttaatgtgatactgcctgggcttgtctaccctgtggccactgttcaccttcatcttccacttcagtccacacagcagcctgagaagtaggtaccatgatcatcccatccaatggatggggaaactgaggcacggatgttgggtgatttgctcaaggcctgtttggcaccaaagctcttgctcttaatttatccagggcctgaactcagccactgtggcatcaggacaccccagccagcctgaccccgttccctgggcactacttctggctatggtctgggctgtggtccctgagagacatcaccatcctccctacctgggaggacatcccgtggcaggggtacaggatgggcgcggtcatcgtcctccgctccttggtctaagcagtagccgctggctttgctgtttctcacctacgaccagaagccaaaggagaagccccatcacaaggacccaaaggccaaagcaggctagaagggctttactcacccgtcccctgcccagggccagcagtctcaggaaggggtagtcctcccaggatgagaggggaagggaa

SEQ ID NO: 43052 - DNA, 1756 bp, Bovine  19866880827541
  misc_feature (1)..(1): n is a, c, g, or t
nttaggaaacagctggtcccagtgctgaaaaggatgctataagagcacttggagggcagtcagggaaacgtgctgccttaaaaagctacacctcaagaaaaggccaacgagctgatactccctgggaaagaggatggcaacatgcacacagatggaagaaacactcacaccagatgggggggtgggcgaccaggcgtcaggcagggacagcagggccctggtctaggtggggcatgtgctggggcaagtggacgcacagcaggatgaggccgtgggtggagggaagcatggggggcccaggccacagtctgtaggataaggcctaagaagtctgctggctgccagggctgaggcccagatgggaggcgctctgctttctgaggaaccagacacctgggagacgcctctgccctggctggggactggaggccatgagggtggtggagtgggggctgggaagagccggccagctcacaggccagccggcatgatcccatcacaccggtgcgctaacgggctgcctgcacagactgacagcgggtgggggtgagcaagcatgagcttgtggcagggtgtgagcggggtggatgtacagagtggtcagggaaggtcctctgaggaggtgacatccttcaagggcctgacagctggggaagaggcagcagcagccctgtgggctccagaccatcaacctgaggactgctgcatggttgccctgcgtcggcatctgggaacctgggtttcaggaggttcctcaccttcctctgataggaatacctcactcacatgtgctcagattgtttgtgcaaacagtgtggtttgtgctgagcactcgctttccttccgggagcctgggttttggtccaggcacacacaggtgcctacatgactggcccccagtaagaagccggggtgctgggtccccacaagcttccttgggagacagcctcttgccctgttgtcagggctcctttccggggaataaagtgcatcctggggctcctcaggcagtgctcaggagacacccgacttccaccctcctccccttccttgccgacagatgcgtgtcccttggctgcaaggcatacggctgggggtgtgtgagacgtaggccgagtcctgggagtgccgcaagcctaggggtagtcctagggacccaacacagtgaggctgtggtgtggctgctggcggaggtgaacacgggacagaggctctggagcaggttcccaccattcggacaacagccgaacacgggccagagcatgggcggggtcaggtcagctgtggggacacctccagggggcgagggagaagcctgaggcaggcaggactgccagaccccacctgctacagctggagaaacaaaagcgccgcccaagcagccggagccctcctgagcccacaccagccagaggagaaaggcgagaccgcgtctgctgggccatccccaggcctgcacgctggcaggggccgccagctcccctgggccaggccgccttacccgagctggagaagaggggccgggccaggtcctgtgggtagtggaatccggcgaacacacccggggcagggggtctgctgaacaagtccagcttggtgcccacgtccagcttgtggggctccagctgcatctgccgggacagagcgtgtataggggccggaggccgggcctctgtcctgctcgccaccaggctgccgatgagctggacaacaaggtgtgatgccccctgctccgctggcctcgctcagtgggcgg

SEQ ID NO: 43053 - DNA, 1134 bp, Bovine  19866880912101
  misc_feature (1)..(1): n is a, c, g, or t
ntgtaggaggactccgggagccggggtgccaccagcccagggtggttgcagatccgctgtagcctcaggaggatgctcagcacgtccacaaagtgcccgctcttcagcgcttcctgggtcctgcgcacatgcgggaagagataggagcattgccaggggtgcaaacatgtgccagctgggcttctccccgtctgctatccccactctatgaacgcacaactggtgcatccccttgacctggtgagtaaatctgccacatgccaacccacctccatgaggttgtggttctgagactggctcaccaccccatgagagaggacgggaggccagagagccagggtacgggttagacatcggggcaccctccatggcatgcccccaaagagcaacagggcaggtgtcccaaagagcccaggggtctgtctgggtcggggaaggaatgccctgactccacacgagtcctctcacactggcggcatgctgtgctcctcctgggccggctatgggcagagcctctgacaggaccagggaggaggtaggactgttgagcccgagaggagcgtggcctccagctccaggcacccacctcccgaaaaggagccttctaaaagaccagaggaggccctgctccgtgcgggcagagagggtggtggggggcacactcacccaggctgcaggatgacatcctcgtacaaggccttctgtcgattggagaggcggcacttgaggacatgctcatatttcttcgtcagctgcttctctacgtctctcttagttctccgcaaaatgaagggctgtgtcacctgaaaagagagagctctccattgtttcctttccaaaaacagtgtcacagccatgctacgtcaggggcccgcgggcgcgtacccggtgcagccggatgaccactttgtgatagtagtcctggttctcctcgttgggggccttcagggggaagtgcaggtagggcctggagatgccggggatgaggaagtgcaccatggtccacagctccaggaaggtgttgtgcaggggcgcgtcgatgaggagcaggcgctgctggctgagtacaggcggagagacgactcagggtgggcacagaatcgctctctctgacaatactcaaggagagggaca

SEQ ID NO: 43054 - DNA, 1619 bp, Bovine  19866880923661
  misc_feature (1)..(1): n is a, c, g, or t
ntccttgcctgcactcgcaggatccctgcagccctcagttaaatacagagcctgggcggtgaagccaaagtcctctctgggctgttgcagcctcatttagttgcttctgctggctgtctccacctgttgcattgcacaggggttttgaaaatacaaaattcctgccattacggtttctaggtaaaagaaacgtgaagagcacattgccttgtgaaaaagtcagacagggaagctgtgttgtggctctcgctttaagttttccccactggcacctatgaggtgcctttatcatttctgctgtttcttgttacctaattgtgcacgttgacttttcactctgcttgactcttaatcaaaagagtagtctaatggactttgtgttagatataatttttctagtccacattcatggaaacctaaaaactgccatcacattcactcctgaatgttgcctaagcattgcaggggtagaggtaccacttttgtgtattaagcacccctctccctgtccttgatgagcggctgcttcttaatactgtatttagaaatctccctatttaaactgcccctgaggtgggaagccctctgccctcaggtggccctaggtccccagcgcccatttagggggccctgccttcgcgtctcagcagtgtccacgtctccctgcccgtgcacatgggcgtccaggttgttccagcctgtgcagtatggccagaagcctgagggccgcaccgtggctttccccaacacacacccaccccggacggccacccctgccacagccacggccacaccacagggccacgttcgaggacggccacccattgccacattctctgcaaatccggatgcaaaaggtatgcttctcagggggctgtgctcggcatcacaaagggtttttgtggaagaaattcctctcgcactttccccggccccacggggatgtgtgaccactcctctgagcaggagtgggactgtctgctctgattctcccaggagaccatgtgtagttcttacatgagtttagtttttttcatgtctttgaattgtataagacattacattcttcgttgagtcactgttgatgtgatggtgaaaatgtacctcagcagaaacgttctcttttatgtcgggaaatacacgtcaaaagtcatttaagaaacttctgaggaagtctgctcttgtgttcagtgccaccacttcaacgtaacctgcttactgtgaagaaggatagggttaaacagcaggaaaggtaataaatagtcttgtaacccttatctgtggggtcacgtcccatgtttttctgagatcttcataaatgccagagcagcttgttgtaagagctctttgggaagccagggggccagtgctgcctaccttctcgtgtggtgaggacatggctctcatgatgtatctaagggccgacttttgacactccgtttactccagaagcacaccatgtagcaggatggtgaacgtaaagtaaaaatagttaacaacatataaaaaattagattttctcatcccataggccatcccgccccccttttagggagggcttctcattggagaggtggtgtgaaagaaatactgtttgttttatttctttaaaattcgga

SEQ ID NO: 43055 - DNA, 1498 bp, Bovine  19866880948397
  misc_feature (1)..(1): n is a, c, g, or t
ngggaggtggcgtggtccctggagggggtggggcagtggcagtcctccgtggagctggacacggccccccggcaggcagggtgctgtagtaagtggcaacgtcaacccctggagggggaggtgccaggcagtaggtgccgtctggcagcatgtagtagctgtagtacatggctgccaccgttgctgtgaagagacacattttgagggcatgagagtggcaaatgatgggccagttggctagaatacacaatgcagggagaaaagggacacttgctcaaatgcagtgtcccttctgtccaatgtcaatcatgtattttctttatttttctgatataagaaaggatgcccagggggcaacacaatttggaagaactggacaatgtccagacacacacccaggaacaatggaatctgaacatgcatggggacattcagagaagctcactgcctacacagactgcagaatggcagattaggacaaacttcccccgtccagtacaccagctctcctccttgtgtgtcttgtgagacgaccatctgaggactaaacccctccactggcttccctgtttgacaacaactctccactcttcacacttgttactttcctctcttaaaaatttgtcttggcataaatccttttcttaggtctcccaaggcaacagacacaaaagcaaaaacaaacaaatgtgacccaataaaagcttttacacaacaaaggaaactataaatgaaatgaaaagacaactcacagaacgggagaaagtatgatgatgtgaccaacaagggcttaatttccaaaatatacaaaaacttcatatacctcaataacaagaaaacaaacaacccaatcaaaaaatgggtagaagacccaaatacatttctccatggaaaacacacaatggccaataagcatacaaaaaagatggtcaacactgctaattattagggcaatgcattaaaaatacaaggtatcacctctcactagtcagaatggccatcatgaaaaagtctaaatagtaaatgatgaagagggtatgagaacagggaatcctcctacactgctggtgggaatgtaaactgatgctgccactatggagaacagtatggagattccttattccttaaaaaactagagccaccctatgatccagcaatttcgctcctgggcctacatccagagaaaaccctaattctaaaagacacgcaccccaatgttcaaagcagcactatttacaatagccaagatatggaagcagcctaaatgtccatcaatagatgaatggataaaaaagatgtgatatatatgtacaatggaatactattgttgttaattcgtgcctgactctttttgtgaccccatggactgtagcctgccaagactcctctgtccatgagatttcctaggcaagaatactgggagcggttgccatttcctgctccaggggatctttctgactcagggatcaaacctgtgtctcctgcattgtggggtgga

SEQ ID NO: 43056 - DNA, 1376 bp, Bovine  19866880952562
  misc_feature (1)..(1): n is a, c, g, or t
nggaagcggcaggggtcgaggtcccccacgttttcagtctcaccccaccctcctcctgcctctgataccaggacaggacctaaggggtcgcggcgagagaaaacctccctcgggaccacagggtcagtgttcatagcctacccctggcaataacactcagcacccaagaggtccgggcagactgcctctgacctccgggaaccgtgcctgtgggcatcctctcccccttgggtcctcctgtctccacctcctgaccccactgttgaggctaggaaggaggtgctggcctaggatcaggtggttcccaggaaggccaaccaaccatctgtccagggagtctcaccttcagatgaacgaccttccacttgtctgacagctctgcaaggaatgcaaggggtcaccagacatgcgacccggccgggcccctcctgcccgccctcccacccccaacactcacctgtgtgcttcacatagaagctggagagggtgctctcctggcggggcaggctcacagaggacagcagcatgaaggcattgttccagaaagtgaggggcacctgtcagaggccaggctgagcaccgggatgctgcatgcccactgccccctccctccctgctcccagggacctgggtggctcacctcagggcgcccatcggtggtccgggccacggtgttggaggcggcctgcatcgtatggtagcggatgtcatcatgttccagatactcccggaactgggagaggagcagggagcggtcctcctctggagacagcaggcctcccaccaccaactgcacatggggagcagggcagggcactgagcatctctcccacccccaggacagacagccctgaggtggagctcacaaaccagagtctagaggagctgcgagagtcccctcaaccccacaacccatagatggctgggggagaccccaagactcaccatgaagagctggtgggggaacagatagttgccttcccacttgggcttctccagtgggtgctcaccctccagctgcacaaacttcatgagtgtgctgagggccagctcctaggaggaggtatggcaaagggaccacgctgcacatccccacacgttacccctgcagaccggtgcttagacctgaatgcctgcaaaaccacactccgggcagagtcaggagacagaatgaaaccacaccctcgaaaccagccacagaaagagagaacatccttacctagcgaggggtctgcagtcacagccccagacccctgctgtgcagagaaggtggggcaggggccgtgcaggtaagaggcaaagccaaccaccccagctcaccttgacctgaaaggaggggtgagccaacagctcccccaggcggttgcagcagctct

SEQ ID NO: 43057 - DNA, 508 bp, Bovine  19866881145295
  misc_feature (1)..(1): n is a, c, g, or t
ntggaaggcccacccactgctctcacaggtatgaaatctctcttcctgaaaacacacaaaaagttgttcttaatcacagtttaaaagaagcatttctggtcccagtgactgggacaccagaagcaagtgcccatgagttgtccaagaataacagaggcattaaaaggcaattatccttttatttgtgtaaagatccaatttgttttgtcatgacatttgggccacaaatctaatagtaacaaaattttaatgtcatctgtgacgcgtagcaagcgtttaactagttaagttatagttcaccgacgacgacagctatttctttcattttcttaacgacaacacaaaaatctcagggtgatctctcatgaattgaactgccaagtccctgccaagtctattacagctgtaatgatttttttattattgctccaagttccaaaataaacttcacctcacaaggcgacggtagcagagtcagctggctctgaatttatttgcatgagaaatt

SEQ ID NO: 43058 - DNA, 2924 bp, Bovine  19866880372436
  misc_feature (1)..(1): n is a, c, g, or t
ntgacagaaatgacatgcagaaggaaagctagaaacttctgaagcatctcaaattcttagtatcataattctaggtcttaaaataggcacttgccctccctgtaactaataatccagttcagattcaatcctggcaagcagaattcacaggaggaggaatcacacttcccagccctaaaaataccagggagggatctctaagaaccctctggggttcttagagaaaacacccagttcacagactttgtgtttgtttttttttttttaattatttcctcagggcattgccacaggcaacagaacacacactccacccaactctatcactaaacaggtaagaggggcttttccactaccctaggagttggtgggcaaatgcaagatgcaaagactctgtcctccagggacctgagtgtgcaggagcctagagcagaaagggttaaggaatctgctcttccaggagaggctgtatgttgcaaaaagtctggctaaaacggaaatctgcgaaaacaagctggtatatctagttttcagtctccttgctctccaaaacaaaaggaacaaaacccaaagacagcccttggctgattaccataattaacacttattctactgtaatctcatcaattatttcatactgatttatgataagttctattgaaaacctacaagagaaaataataaattgatccataaaaccaattctccaatttttgtacaaaatatccaccaagccaaggttttggtgaaacaagctgtgctttcctctagttctcttataaaacgtgaccagtttactttgctgtttcaaatgacattctagttgtggcatcaggtcttcatttgacagtaacatatatatattttttgctctctaaataatgccttgttgttaaacgttttccaagtttattatgtttctacaattctgtttagtcatcacttaaaaataagactagtcatgtaactcggtgagtcagctaaacaatctgagttagtaatctccccaaaacagtttttggcaagacaaacttaggatctctctactctgttgtgatgcaataccatgagtcaaaaaagtctctaactggatggactggagtataattcaactgtctggtttccagattcacgtgtgaagtagcaagtttcatgtcacagctaactttcagttcctacaccaccaccattactacacaggattaccagagaaactgatactggtttatacaaccatttaggcactatgaaacctaaaatgatactctccgcaggattatacttagtaggactatcttcacatctcaatatttaggactagcttcccatctcatggactgttttttggagggtagtagctagtttaatctcacatttagacttaattttggccttatttcccttccttttttattttctaaacctttttttatcctctcctaccacttaaataaagcaaaggcaactaaacctaggcaaaggtcctcaaggatccaaccagatatttcagatgtagcaacatgtattttgtatgttgttaaaatccaatttaggttcctgtatagagttaaataacttacttgagcacatttcatcaacatgctctcctatagataagatggctgccagatataaacttaaaacatgctccccctcaccccccaccccccaccaaagcagcaggcctgtattgggccttgagctgggcaagaatgtgctaaaggaagacactggtcacttccaaaagagcatgacatttgcttggtattctagtacaaaagtcaaagtcgcttagttgtgtaccacttctttgcaacccccatggactatacagtccatgaaattctccaggtcagaatactggagtgggtagcctttcccttctccagagggcttccctgatagctccgttgataaggaatccacctacaatgcaggagaccccagttcgaatcctgggttgggaagatcccttggagaagggataggctccagtattctctggattcccttgtagctctgctggtaaagaatccgctggcaatgagggagatgtgggttctattcccgagttgggaagatcccctggagaagggaaaggctacatttctgagttgggaagattccctggagaaggaaaaggctacccgctctactattctggcctggagaattccaaatacagtccatgggctcgcaaagagccagacacttctaagcgactttccctttctagtacaaagtacaaaattcttttagctccactttctatttgtaaagcctccaggcctttttttctctcctaagcctctgtttgcccagaagcaatccaaagcctcattttctaggtctaatcaataccaatccactttatagaacccttcctatttcagtctcattgtcccatttttgaattctcataacactcatttcataaattactaatatttaactgttacccttcatttccctatgccttttcactaaaaatcattagtttctagagaaaagttggcaatttctttgcaatttccttctcatctaacacacaagtatgcaacaaacttctagaaaaagattacaccaagacacttcgcatctggcaaatatgtaccctggatacactgcatacattttgggtcatctttgttggaacacagcagctacactgtatgtgcgactgcgcaaagttagctaatactctattatcctcagttgttttcactagcaagtctaactttccgaaaacacaaggccagcctgaagattactttgttttccatctgtcaaggagatctgcaataaaaatcctcagactaccaacagggctctgtaaacagaaaaaatttaaaaataaatgagctgttcaccttcccagaccctccctgaaacagaagactagtaaatgtcgggataaaacagat

SEQ ID NO: 43059 - DNA, 969 bp, Bovine  19866880410077
  misc_feature (1)..(1): n is a, c, g, or t
natgcatgggacagacatggaattcaaagtatcattttataaataatagcagagaatcaggcacaggaaatagagacccataatggaggttgagacaaatgtgcctgagcaaggtggtggccaccattctgagtatcaagtggggaatcaacactctaagagcagccctggtgagggcaggccctccctctcagagacagaaatgacacaagctgcccagggcaggtgttggccttctgatgagtgtggagaaaggtgatgcttaagcacaaggcaaagagctgacttttctaaagcatgtattagcatgtggctaaaaatagccacctgttccaggtcggattccaaattggaagagctcttcacatattaaaaaagcatctgtctcctggtagtcatggcaacaggcatccctgaataaatgtggagagatgtttttggaatggggctgggaaaggaagtggacataacagcctctggataagaggtgagtctttctgttcttccctgacttgaagcctcatcttgctttcctacttcctagcccttctaattttgcacagcccctggtttttctctgaagaaataccttctatagttagtgcctgtccagtgggctggacagggagaggagatggagagaagggtcagacatcccattggcatgaagagatgggatgggaggccaagctgctcgggctcagaatctcatgtatgctatattgtttggctgtttgtgtatttcctttgtcaatgatccccataaaatatatttgtcacttcatgttaactatattaagtgccaagggtctgcttgtttcttttgcttagtatgctttgtcaactccttgaggccaaggagtcctttctaattccactcatagcatgaaaacactcctccaatctatccatgttgcttgtactatacagcagaagaatattctcttaggactcagagtgctaccccat

SEQ ID NO: 43060 - DNA, 1620 bp, Bovine  19866880587582
  misc_feature (1)..(1): n is a, c, g, or t
nttttaacctgtaccttttggcacaaattttctagagattataacggaatctttaactgctcacagagattaaatatcgcacactgaatgtaaagactttgcagccgtgattttcttcaatctgctcctccctctgccattctttgactgtatgtgtcatgtagcatcctggcactgggtcagtcagtttcaggtatcataggcatttggtttattccaagatgccagctcttcctggctgtgtacatgctaagtcacttcagttgtgtctaactctttgcgaccctatggactgtagcccaccaagctcctctgttcatgagattctccaggcaagaatactggagttggttgccattcccttttccatggcctcttcctgactcagggatcaaacctgcatatcctgcattacaggcagattctttactgctgagccactggggaagctccttttcctatctagtagagatcaagtaaggcttctccatggagcagggggtgcccataagtttgtattttcaggtaaagaaaaaaacatagagggacctgggagatcatcttgaagaccccccaaaatatacaggttcctcagagtctaacaataacctctgaagggctgaggacgcacatctgaaagttctgaagaatgtgcacaggattaggaccaacctgatcggatttacggagaaggcaatggcaccccattccagtactcttgcctggaaaatcccatgggcagcggagcgtggtaggctgcagtctatggggtcactaagagtcggacacgactgagcgacttcactttcacttttcacttccatgcattggagaaggaaatggaaacccactccagtgttcttgcctggagaatcccagggacgggggagcctggtgggctgccgtctatgggtcgcacagagtcggacacgactgaaggtgcttagcaagtcggatttatgaacatccaaaattaaaaactaaaggataagtaagggggtgattctctctctgcagtaggattccccatagggttcctttaagcagtgaactcctctactgctattgaaacattatttggtttgcaaaattttaattagaccttacatttccagaacacatttacgtgcccctgactactttgatttaatgtagattttatttgtatttatttgagcatttaatgtcagacactgtgctgggcattgtgttcaagaatactgaggttcataagacccagtccctgatgtccaggagatagtgcttcatggaggagctgggtgtgtgcacagctaggtagaatgcagcaatgcagatgtactaaaagggctctgaggacacagagaatgaagcagtgacttctgcggtggtgaggacatgtatactgggaaccttaacagaggagacgatacctgaaaaggagtttcagtcaactatcaaggtcacaaatatttagtgagtcccttccttttgtcaggcagtatgtcagggtctacagcaccacaggaatgacagtcagagttcctgccttcatggagcctacactgcagctgtggagataatgaacaggtaaacaagataattatagactgtgaaacgtgctaaggaagaggaaaagaa

SEQ ID NO: 43061 - DNA, 2558 bp, Bovine  19866880669718
  misc_feature (1)..(1): n is a, c, g, or t
ncctacctgaggaatgcctgaatttggagctgtggggtccctggaccacatgtccctaagtcaaactacctgcctattccaacctctaccaacccactgccctggctggtcagggcctaaaccccagaccttaaactctgcatccctcttcagctatggtcctcccacctggctgttctccatcctcacactggcctcctggactcaggagggctgatttgccctttccagagctcatttcctcccttcctgtcatccaccaccactctctgtacatccaagtccggtatcttgctcactctgccctggcccacctggatctgcccgagctctgggtcctgtaactagaaaggatgctactgggtattatgccatttggtctaatgaacactgcagacaaagagcactgaagaggaagtggtgaccctaggctggcgtctcagggaggcagcacactgaaatggggtttcagctggacttttagtggatgaatacttttgcatattcagtagagcagagtgaagtcaagtctaggatattcttgtcaaatgtctcctgctattacaagtactcctgctaccactgttcctgctgataatcatatgtattaccagtgaatctctatgataagcactgcatatctgtgtatgtgtatatgtatgtataatttatatatattatttgagacttttgacaagcctacaagagaggtgtggttgtccctattttacttatttatttttaatgttttcatttatttatttatttggctgggctgtgctgggtcttagttgcggcatgtgggggttagtttcccaaccagggatcaaatctgacccctctgcattgggaacgtggagtcttggccccctggaccaccagggaagaccccatccccattttagaagtgtaggaaatgaggcacagaggagaaatgttcttccagaccccaagaataccaagtgctaagaggaagactggcagcccagtctgccgactgatttcttttttccttgcagtttgctcctgctgcttccctgtaattaaagaaagcagctctcccctctgggagcagcagcctcctctccgtcttcccagggagacttttgcaaataaaactcaaatcaaatcacactgtctccccctgcccgccaccccctcagcacgtagacctgcaggcaggctccttcctcgagggcgtccattattctggtaggtgaactgtggctaatggtgatcttggtaattcggcggccctgagagttgtctgaaagcccggttcactctacaccctttttcattccccgtagctttctgagacatttacccggagactaaaaacattcatggttcgatgcagccccagatctgaatgactttgtgaaacttactaagtgctttgagagttaggcaagcaagaaaagatttgacttttgttctaatgaaagcaatttttatcatttaaaatatggaaaacaatcccacttttgcacttcagacaccaatatttgctagcatgcgtagccctataagtgcacaatccatgaaaatcttagatttgcagaaaagttaaactagaggagattacgtatgtgtttaccaggatggctttgtgcaggaattgcagtaatttgaaaacctgaatcctaggtcaggccctgccacttcctggcataacctctctgcacctcagtatacatctctgtacaatggcaagatgtcaggttatgccatttcacctgtccctcgaggttgtcatgagaatccaatgggccatagactgtaaaccaaggcatatttagaaaggggaggcccctttgatagaaggagaggactggggcgagggcagaaggccatcctgtccagggatggtaccccaggttgttggggaaccagtccccttcctagtttgattaacttgtgaacaggctcccaccacagaacaggagccattccaagtcccattatcctgcacattctcaccctgcagccctgctattcacttaaacaccgcagctcccgagtacattttaatctctgatcattagttacaagattttcttgttaattctgattcagcagattttgctgagacaacgctcttttttcccttttcattttggtcacgctgcacatagcctgttcagacagacaataaatctggtggctaacctccctcccgaggatgaatcatccaaaactctgcaaaggacacagccacgggggtggccacagggagggggcctcctctcaggctctttacaggtgactctgggggaacttcgtgactctggccccgggacacaaacctgcctgtggtgattacatgggatgtaacaagattaccccagagctcaatagcaggcaaatcagggaggaagaaaaaaaaaacagaacagcctaggacaactcagcagaatcagttcctgctgcttttattagatcacaggtatcatgcattgaatatgctgtggttttatctaacctggagataccgacagaattttgcaaccagcaagattgatttggggccctgcacttcgttcccttttccttcc

SEQ ID NO: 43062 - DNA, 1592 bp, Bovine  19866880672128
  misc_feature (1)..(1): n is a, c, g, or t
nttagtgcataagtgtattaactatgttttcctattttctctattcttgatgctctggcatatagggcccaggcgatcttgcagagactgcctttcccagagacaggaaatgactccccctgtgaatgtgcctttcctatgaaaacctacctctccagagcccagagctgcccactgcctcctttatggagctgtcacaggttgaccactatcatctgccataatccctcgagggtcaggtaccagacaactttaaatagtccctacacccatgagccccctgaaattattcaaaagagtccattctagacctgtgtggccagctgaccctgtctcacccattccttcccaggaaaattgcaataaaggctctttcccatgattttccctcactccttctgcatcttgaccaactctgggacttccctgtgtggtcctgcatggcatggagtgcccctccctcttgagaactgtaacaaactatcttttcatcagcaatcatctcccagtctgttggccccataaaaccagaataataataaaaaaaaaaacatgttttaaaacaataagagctcaaattctggagtcagttctcctggattcaatctcatcgccaacatttactggctgtgggacacagcctcaacttttcctctctacaggagaaacaataatatctaacctgttgggctattaggaggattcaatgagataatttgtataaagcacttaacctccagtaactgccatatgtaaatgctaaataaacatgagatctagatttatatttgggaggaaaaaggatgcagggcccacatctttttgaagtctataatcagatggagctttctagaatctcctgagtcttcctattcactacccaaatggtcctgatagctctgagaaagtggatgggtaggtggggcacctgtgtttcacagacaaggaaattgagactaaaagagcactagctagtcaatgaaaaaggttggactaagatccagctctcatgacaactagctttttctcccaggccagatgtggcatagatgaggacttggcagtcagacagaccaggcttaaaagccagctccaccacttcttaacccggtgcatgctgtggcaggttggagatcactaagcttccattttattaactgttgaaaaggggaaaataattttttccctcatagcttgagactttttaaaaagaattgaatcaaagctggttcaggcaggaaaaaatgagcagtctcctatatactaagagctctcttattttccaacaaagaaaatctctaatacaggaaatagctttatacacagggctgttcatcacaacatcactatctaaatataattagaaagcaaatgataaattcaataacagggaaatggataaataaattgtagtatattcacaggatgggataatatacagccattaaaagcaatgtttgcaaagtttatgacaaaactgtatttactgttaggtcaataaatcatgcctcatattgtttcattttcatcaaagtaacacaaagattagagagggaatcaggtgacaagccttgcgggaaagcaacagcggc

SEQ ID NO: 43063 - DNA, 785 bp, Bovine  19866880718106
  misc_feature (1)..(1): n is a, c, g, or t
natataaaattttgcccactgttacagagttttgtgtgagttcctcaaactgtttgctctttatgttacagctaatatcgcagggtaggttgttatcaggtaaacaatgaagtgatagctaattcttttagtttctactttgcagtcaataaaaaatttacttgttttaaaaaatatcaatactgcattgtccagaaaaaatgtaacaggtttatttataattgttataaagttgaactgctaaaacttattcactgaaacattttagaagtttttcatttgtttttttaattaatttttattggatagttgttctctatgttgtgttagtttcggctgtacagcaaagtaaaccagctgtgtatatatatttatatatatatatatatacacacacacatatattcccttatttttggatttccttcccatttaggttactacagagcactgagtagagttgcctgacctatacaggaacttctcgttaattatctatttaataattccatggactgtatagtccatgaggtcgcaaagagttggacatggctgagcgacttttacttcttcttcttcttctatcaatagtgtatatatatgtcaatcccaatctcccaattcaccccaatccctcatatatggatcaggacccacaaaatgcaggccaccccagtggcctggcccatgttacagatcaaaacctaagtcagtctgcactttatgggaaactccaatcaaggagatctaacatcccccagtcacaatcgtccagctcagcttat

SEQ ID NO: 43064 - DNA, 1568 bp, Bovine  19866880732550
  misc_feature (1)..(1): n is a, c, g, or t
nacagagcttcctggaaggaagtccacagctgcttctcttacccaccctctctccacactccagaagcactcagccaagccgataactgtggcaggtgcttgtgaaacggctctgacaccacgggagccttcagaggggccagtctgggggtgtctgcagaatccagagctcccctccacccccacctttggaagggctcctcctgccccagcctccctggctcctgcacaaccagcggccccatagcccggactcccagctgtcagcaccagttctcctcactcaggagctaagccttggcacttcccaggtctgcaagaggccaagattccttccagagaagcacttggtctgtctccgagcccagggccttgtcccccatccagtgtcttcatagttcagattcctgtagctatgaacggggttggcacccgtgaacatgagccttccagccgagttccatgagaaaggtgacgccttttccataaaacaccaggccctggagtgctttggcctattacagaatttgaagccccttaccgcaccccaccccgacccccaccaattctggtgacctctgatctaacccagacaccccaggtatccccggtgatggggagcagttggatttccatcctcggcaaagatctagggacaaggatgagaagagaacagaggaatgttggcagcaggtgaagcaggagctggggatgctatctgagggagccacgtcatctatggggttacactcgaatcagtgcacaaagaggggttgtgccagtctcctgactcctctttcagaaggtgccatgttggagactgccaactgtcttaacctggtcccaccagccggtgttcccagaagcagaggaacagtgctgtgacttgcggagcatgagtcagggtggctgacttacatttagggaccacgtcgtatgaaaagtttgtagtttaagcactggacttgcgctcacccacaactcaggcacccagggtgcataggcactaaacagacagctgacctgtgccctcacgactgcgccaaagctaaacatcacacgatacagttctgcccagcactcccaggcttgggtgtgtctggctgggcaaatcaggaggatgggggtgaataacaccaaagagttggggggctgcccccaaggctggaaccctgcgcacctagaccacttttgctctgcttttcagaaagtttctcattttgaactgcttcccaatagctgtctcttcacattatacctgcaggagccagtctttgggtcactttctggcataaaacagtgaagtttctctagcagaatgatactcttagagctgcttccctctgtccccttttgcactgagagttatcatttgtttagggcttaattgatcctgcagattggaggccttccagctgttgaggaaggatgtgactgtgtggggatggaaggggtgcaggcagagggtgctttaggatggccaagcaacagtagggagagaagggctgactggggctgagatgccccagtggcagagtgaagggcagccccaggactaaggcagctgt

SEQ ID NO: 43065 - DNA, 1579 bp, Bovine  19866880761987
  misc_feature (1)..(1): n is a, c, g, or t
nctgtaagatgggaatgagcattaatcccaatttataaataaggaaaggagggggggtgggcctccacatctttgagcctattgggtaccatgctggcactcaatctgaagcatcatgtaatccttccaacaatactgtaagagtgggaactccttcctcattttacttgggaggtagctgaggctcagggaaattaaaatgacttgaccccagtcatagagataataagattcagggactagggaaaagccagatctttcagactcctggtctacctgcgggagtggaaattttccatcgcaggtttgaggttgatttttttttttcccctcttcagggagggaggaggctcactgtgtggttttggatgctcaggcagatccctcttggagcctcggagagccacctggttattcatctcaggctctatcccacctcccatccttcccctcccaccccagcatgcctcttccttctattcctctccagcaaagaggaactggatggccaagctccctggatctcagcttgcagaactggtaattacccctttgtgtctagttaaccacctttcatctcctctacttgctggtgtccactttcccttattagcatctttcaactctttgccaagccctccaccctgtttgtggccagctcgggttgtggttgtttgtcgcggtgatggctgagggatgagtgtacatggtggggtggcggaggggagggggagctgctccaaccaaaatcactcacattttccatcctcggtgccaggcatctctctcctgtcccaccccagaggcagccaggtttaggtcacctggcttagaggcagacagttgatagctaggcccccaaattttgggcctttggagcttgggtattacctttcagttctcttgcatgggtgaaatgggagccgtctgaccggcaacttttatactttcaacaaaagcctgctgactaattcctcatctccaggagctcaccttcaaccccagatttccctgctctgaggcagcccgtgttggcccatcagccaaacatcctgagctttcccggacagtcctacttccactgtcctcatatttaaccatttacttgtgtagcaatttatatttacttgactttacatatttcatatgtttatattaataaaaattaaaggaaattttaaacacttagcctcaatttaagtgcctaagagccacatgtggctggtgccattggacagtgagagtaaaaacatttccattattgtggaaaacatattccaatatactgtcctattagacagctccgatatacacaggcaaaaattccagcatccaaagtacagctcgcagatcgtttgttccttgaaggtcctaaaacttctctgacctttcgagtgaactcatttgagttcccaaaatgtcagagcctgttgggattggaggccacccggcaaaggatgcctttgaagaaatgtcccttttgaagttcaccattatcaagtttggaatgcctgctgttcctccacagtgagacaggtggggcctgggatgttcttggtgcctggatcgccaagacttc

SEQ ID NO: 43066 - DNA, 1109 bp, Bovine  19866880777528
  misc_feature (1)..(1): n is a, c, g, or t
nataaagaaacatttacacttcaatacttcttaatgctgtaaattttgggctcaaataaccccctgagtcaaatttgatccctatcaacttgaagggaccaagtacagttttgatttcaacacctaaacttctgagggaagatctgagaaaataaggctaggagatctaaatcctttgatgtaactatcaggctctacagacttgtcaaaatcaatgcaaaactgaaaaggatatgctaaaatgcttattattattaaaaagataggctgcttcccttccctccgtttaaaacacatgcagaagaaatgctttctgcatgaatgcacatggacattctgttcagttgttttctaaatgcaatactgtggatttaaacagtatgctttaatttaaacaaagtatcttatatacagtcaatttagtttaagagatgaaaagaaacactactatgacaattacttatcaaacactctgctcttttgaaaggtgattttaaaagcaacacaggaccaaaaacatccaactattactttatttatattactatgcttaagttacatggaaaagacaaccaagcagttctgccccatatcagggaaaagtttccaatcaacaccaattatgtggtgacaaataactaggaatggtgacatctttgggtcaagactgacaaggaagaatgggctctgatgctacggttcatctccaacaagaatatggcacaacggccagcacaagcaatactaacactgaacctttagcgctggtcacaaattcggatctcttctctgaagctagcaaatcaagtgaaataactgggtttttttaaaaagtcttaaaatgaagcccaaataaatttaaaaatcatgctcttgacacactttcctttcaaaatttacataaaatactttccactcttaatagcccagatttttttcctcacatagcccaccatgtagctgcagatagactatttctgcctcaagatgtaaacacagggggaaaaaaaaaaaaaaacggcatctgcataatattctctctacacactgctgttggatggaaaatagaaaattaaaaaaaaaaaaaggaaagaaagggaaggttccat

SEQ ID NO: 43067 - DNA, 753 bp, Bovine  19866880780670
  misc_feature (1)..(1): n is a, c, g, or t
nccccagggtgtagacaaatactgagtgaacacgtggattccagactttgaaacactgtagcagctggggagtctggaaatgaattggtcaagtgagtcagatgtggaggggaaaaatatatatatttgcctggcttttttccccagaggtcacaaaacaggagagtgggggacagaatctggtaggctgcctagcatcctttttgggatccctgcaactcagaattacagcctttcagcatccttcctggatctgatttgacatctgaattcttccctctctcctatcattgtcaggtagagagacgttttcctaaaatgaggctgaagctgaggggtgagaacaaggctctctcagaattcctgggtccaggtgacaggcttggtgacaggagcggcaaacgcagcgctctctgtctttccctccccttctatttcctgtcagccgaggaggctgagaagagctgccatgtccctgaaacacaagcaggatctgtgagctcgtgtctgaaaagcagagagagagctctttgtctaaacactcagccactgctgggacaggaaacacaggcatcagggagacgtagcgagaggaggctgctggccgtggacccttcccctttcgtttgatgtctctgtgatggctgctgagggtaggttgctgacatcagatacaagagtcatatgtgtgtaagaggttgctagcatcaagagccacacaggtgagggacacatcacagctaggaatcaata

SEQ ID NO: 43068 - DNA, 1815 bp, Bovine  19866880793051
  misc_feature (1)..(1): n is a, c, g, or t
ngctgtggcttgggacagaaggaaatagcagcactcctgggcttgtgctcacaaattctaggcaaggttctctggagaaatggttgtgacttcatcacttcctccccagtgcctctctgttcccagggcatgagttaggccagctggaatgaaagccactgcctggtccagatcctggcctttcagtggaagcccctgcagctagaagtctcctgattaagcatccttccctccctcccccagcctactcccaggtcctgctgcccaggtttcttatttttcctggagaacaacaatggattggccttgtgtgtttattcctccctaggaggggctggtttataacaatgggcagatctctaccagcatcctgctctgccaaaggctgagtgaatgagaggcagctaattaaaaaaaaaaaaagtacaccctgcttcatcatcacttgcattttaccaacttttcaaagtgaaatgtggccggttaagaacataaagaattagagcttaggggcacagtggccactgatggatgcagggaacaaggaagaacaatctcccatttccactgggatgcttgtgacgtcattctccatccttgagacgtacctcgctcgaatctcccccggacagggttatggaatatccacctcaccctctcctacacttccctggtgactctaatcctaaaggagacttgagtagagattcggggcttcataacaactattggatcttcttcctttggattaaagatgcttaagcctctacccttgaaacttaaaagaaaaggaaatcctctggataaacaccatctttcataaacatctctccaacacacacccatcctgcaagtcaagagttccaaattccaattaattagcactaattgctgctgataattctggatccagtgagctgatggggcttttggaatattaaagaatgtctctcaaagttccccagggtggtaagaaaacactgcagctatcttgcataggataatttcacatacccacatcctatggtgtatagcgttattgccctttgaaaagaagacaagcttctcagtcatctcagagttggggaatggcctctctgtctctcccatttgttctacccaagtgtcccacagccacacaccccctttctcagaaagcccagactgaaagggctgctgtctccaaccatttcctcaatctttgttttagagacaaaaatcttgaatatttggcctggtcccatagccttcccattcttgtctggggctctgctactacatggcttccaaactcatcattggatggaaacaactttcaggtctccaaggactttcttacagcccagctccagggcctctgcttggccttcagtcatcatcaccacctttgcagcacactacaaagccagtctgcttcaggactcactctctcctgattctcatgatcttgctcgggtttgcctgacctgtctaacgtcaccttccctgtgccctctctggactcagtatccccccaggtttttctctggactcaaggcagctttctggcttcaactacccgtcttagactgaggattccccaatccatggctatccatctctttccacaatctgtgaaaagtgtccacttggacgacatccatcacttcccactcaccttttcccaaagtgaggtcatcagctaatgtatgtctttaaaagttttctgccccctcccaaacaggaagcttgatagtaggtccaataaaagagatctggagattttagttgatcataactacagtgttgatgcaaaaacattgaaagaaacagggg

SEQ ID NO: 43069 - DNA, 1690 bp, Bovine  19866880807054
  misc_feature (1)..(1): n is a, c, g, or t
nacctgctggaggagcgataggctcccactccgtattcttgggtttcccttgtggctcagctgattaagagtccgcctgcaatgagagagacctgggttcgatccatgggttggaaagatcccctggagaaggaaaaagctacccaatccattattctggcctcgagaattccatggactgtatagttcatgaggtcgcaaagagtcagacaaaactgagcaactttcactcttagggttagcaagaggtgcatctcctggggacaacctcagcacttcccatctagttcagggcaactccacaatctgatggatcctattgatagtaccttgacctaaagttttgaccttttattcctggtacatttttgcttgattttttcataatattgttttagaatgtgatttctcttactgaattcttggcacccctggaaatttcatgcctgaggtgagtgactcactctcatcgtcctagttctagctcagttttctaagccctcaccctctttctcagaagcagctcaatgggaaggaagttggctcagcttttattttcctgccagcaattttaacacctcccaccctgcacctttctctggcgtatttatcatgcaagcacagaggcatggctcttcaccatctaatcgttctcaaacgcagagaggctggaaaaccatcagccatcctcagaaactggcaaccaaggagggcttcaaaacagacagactctcagaaacttggtgacaagccccactctgcagacccaaagaatctggctgaagtgccctctgtcctttgtggggaccatcagtagtcttaaagaggggtttctacctggaagagataaaggaaccaacagaggtctggccaccggcagagaaaaaagaaaaatgttaatgaagtgcctttggtaagcttttaactccaagccaggtagccactggcatgtgaacctggcacagatttgaatgcctttatctggcttcctctgaagccctggcatactttctgatgcttggctaagtaagatgccctgtgaaatcagagcctggacttgagaggctcaaatccagggaggagccccgaataggtaaggggattggggctcggttctatgtgacctacttggccactcctgtttcatacctctaagcctctgtgataaaatctcctgtttttgtctttcggtcactaaattgtgtccaactcttttgtgaccccctggactgtagcctgccaggctcctctgtctatggggttctcctattgggtcttccttatcccctactgaactctgaatcctcaagggcttgaatttgtcttaatcaactttttaaaaatcttatctgcagcacgcagcatgtggctggcacacagtacacccttaataaatttggggttgactgaaattttgaatgatgcctaagatttaaaaagaaaattagcaatggtgacataaagtcctatgccaaggagggaggggccaaaagcaccctggggcccctttaaattgtacttatcccatcagtccttgtcttctactctctgccttctcgactggatttattcttactaatgaactcttcctcccatcagagtctagattggaaaatttttcattggtcttgaagaactttgaataatgtctcaagtacatttattatactggagggaaggttggagggaa

SEQ ID NO: 43070 - DNA, 1218 bp, Bovine  19866880807707
  misc_feature (1)..(1): n is a, c, g, or t
naagtcgttggcttacccagttcccaccaactgggtcttgtttggtggggatgcccatttttatagctcaccagccgtgtgacccttggcaggttcgtggacctctctgagcctcagtttcctcctctgtgcaaagaggctggtgatgaacatcatacagggctgctgtttaaagcagttcaccgagtcatccatccatgacacctggtcagtggtagttcccccgtacctgtccatcccctccctccttgtgtgtggtgaggtgtgggatgcagccacacgagacccactctctgcttgggccctcgtgtgctgaagctctttggaggagcagagattcaggcgcagggagctgcccttccatccctgctgctttcaccacccacccccctccccccagccactctcgcccactccttcatgatagcgtggatagcgagtgtggatcatttctttcgttgcttctgtgactaacttgcttcacattttctggcctagtgcttggaaagttactgccttctaatgagttttcctagcaaacatattgattttgcttttactttttctaatccaattttttaaaaagccagcaacaatacctggtaaggcaattagttgcagctctcttcctccttgagaccatgaagtcaagtctctggatgaccctagccctgtggtgtcaacatttttgataacactggaactcctgatactgttgctaggacccagggccttagtcggagaatcccgcttaatcctctcccctctccgactctccagcaatggaccaagactggctcccgcatcgagcacatggcgtcccacctctgcctggacacagacatgtttggcgatggcaccgagactagcagggaagtcgtcatcaatccgtgtgagtcctcactcatgagccagcactgggacctggtgagctcttgaggaagcattcggcacgagcaggggccatggggcggtgcttccctgggtgagatgcagactggagaccaggctgcacgtggccacatgcttagcagaagccctgaatggggagatggacgcagagctcccccccaccccccaggacgggagcggttgtctcagggaggatgcaggcaaagatgcaagccaagaggaactcggagacagatccccgtgttctcaatgccattaagttccagtccggctgggtgtgccccggagtggtgtcggagacagaga

SEQ ID NO: 43071 - DNA, 1246 bp, Bovine  19866880846735
  misc_feature (1)..(1): n is a, c, g, or t
ncctctgccctgctgccttttcttaacgagatgcgatagaagggctttttgtgcaattaagtcacagctggtacacaggggttcctggctggcagagtcctagactgtcttccacatgactcaggttagaaaagttcattcattcattcactaaacatatcatcattttgcatgtacaaacaccgtgagctggtgtgaaatggttcagtggtgagcccatacggcctagtaagggaggtcaagacaagtccagaaataaccatgacttgagacagaataagataagccatcaagaaaggcgtaaaaaggccctagtctgtttatgcagggagggcatatctgggtggacaatcaggaaagaccctgaaatggagaccatgttacctggcctcctggtggggcaaggggaaaacaggtggggctggagggtagggcccaacatggatggagcagaagccactgcaaaaagagatgacgagagtctcacctctggaacggcagccattcagctcagccttagagtttgcgtagggaagacacggagagcttaggagaaagagaagccaaggaaggaagaaggggaggagagggtgggcaccgagtggtgcagtcatcagaggcctcttgctcctttttacaaattcctttcctttccagctactcctagatgatggctaagagggaggttggaggacctcaactcaaggcacccaaagcttcactctgctcgatctgggctgaggcctccgtgcatgtttcacgccagcagcagggggttcccgggagagctgcaaaggtccttccctgggcctccggctttttgagcccactgccttgggcatctgagcaggggcagtggctctccactcaggccacaacctgttctgcataatgacgcacctgccacgatgctgctcgaggctggcttctaataaaccccatgctggtgggtgcagcgctcgaggtaataatcgctcttcctggctccctcaagccatagtcagaattataaagacacatgaatcagagatggcagcctgtaacaaaagctttacctccagctgttttgttcattttctgaacaacagaacattccctccatctctacccctcccgcctgttcctttgtgtttgggaccattatcagctaaatgcattcgtctaagctccaggctcacacaagtggagggagggaggcagaccaggaacggctggatcacaggggctaacctctgtgccatagttt

SEQ ID NO: 43072 - DNA, 712 bp, Bovine  19866880879358
  misc_feature (1)..(1): n is a, c, g, or t
ncaagctgccggccccccctgcctccaattactgcctttatatattgctagctgccaaggctgctttaggatcttggcagacagattttatttttttccaatagcttaataaagcagaggattatgtgggagtcataaatccaggagggaactaaagaacacctgctgagctcactgtacattaaactgactcccagtgagttttagagagagcctcctggcccagccagctggtcgacctcagctgtccctctcaatgcccggctcttcagggagtagcagatgacagtgttgtaacagggggctgagacctcccgcttgggtgggaattaactggaaagagttgatgagactagactgggatctttcaaaggaagaggaaaccatttgccccgctctgtgttaagctaacaagtttaaagattggttgtaatagggatgtttatttctcagtggatgaacctggtgatgtacaactgaagccaggagaagaacaggcaacagagcccaggtaagacatggcagctttggaatcatttcctcccaagggctcaatgtgtctttccttccaaaaactacacacaagactctctccctgggggcagcctccccatagattacagagccctcatctgtgtgagtcaaggcttacaagatgcttggcctgtgagtttcaaagccaatactgcagatttcatccaagtctcatgta

SEQ ID NO: 43073 - DNA, 890 bp, Bovine  19866880881257
  misc_feature (1)..(1): n is a, c, g, or t
ngggttttgttttggttctcatgagttattttctgacctctgccctctgcccttctgcgttgggtccgctgagggagaggatcacggggcctgactggtggcacgtggtccccttctccaagaaagagagaagggccatgggggtggggtggggccttctatagaaagcctccctcaagcgcattgtggggaccacagggttattgctacagagaactaggatggactgggagcaaactaggcagttataggcaaatacaagtggacctgtggggaaatgcttctgaggacctctggggcttaaggctcaccctaaggggagaaatgcgtgtgttccctggtgcagaagcagggagtgctcacaaggttgctgcccagcatttcctgaatagacgccaagcctgcaaacgtacgctctcttgcctggttgctgtcttcttggtctctagggccaaggtttgaatattgaccagagactccatcgtgctggtttatacacaggatcataactcaacaccttatcaactgaagtcaactttttaaggacaagcatcttgtggcttaaaactgccattatttgacaagggtgggcctttcctcctggctattccttactacccctcggggatactggacagatcactttgtttatccagtgtttcctgctttggaaggaagaggagtgcagctggactgtaggacctccaagggggagacgccccagggagttgggggtggggggcaggacacttaggaggcaagtcagccctagatttgatttgtagatttgggagtgattgattcactgtgagttgaagcttgaagttgtaaaagtggaaataaatctttgaaaaataatgtattggaactgcaaattcctctaaggatta

SEQ ID NO: 43074 - DNA, 1449 bp, Bovine  19866880923675
  misc_feature (1)..(1): n is a, c, g, or t
ncagtggtattgcttctgtcctgctgagtaggggcccagcctggctattcttcttggggatcttgaagccatgcaggctgacccacatcccagcgagccatgagcagtcagacgctccccaggccgtccttgattgcctttgctcataagtccctgattctcaacacagtgttggcccaaagtggatcctcagtggatgaataaatgaatgtgcctggatttctgcctttgaggacagttttaatatgtgcctctgtctcttttgttttgtcaactctctggccacgtatctcgtggctgtggacttagtttcctgaaaggggcatgactgtgctggctcctcagtttggatgtgccctgatggcacatgggagactcatctgccccaccacccacagctctttaggcccccaccagccaggccaggccttggcccttcactcagggggatttgaaattcagacaaaacatatggtgtttgcccacgaccttgctgtttttatgtttttaaataacttgtttttcatattattacaaaataacacatgtttgcttggaaaaaccaggcaagcaaaaattaagcacaaatctttcataaatccctaagtcttagagaatcactgtttagtgttcctagttttgtgtatgcatgcacacacacacacacacacacacacgtgcatgcacacacacagacatatttagaaaaatggggtcatcctgtacttagtgatttgtgacctgctttgttcacagaacaatgcctcgctgccttaaatggtcatcttgaattattattaatccccacccccaaggacccacttctgtggtcatcaattgcttatagttatttacaaaatgagcaacataagtccaaacaacccaaatcagtcagcaacggggagagcatttctcactaactgatgcagtggtaatctgtgctttgagcagtggtgtctgctcagaaacaagccctacatcccatgaaatgtttgtttcatcaagggctccagggctcaggctgtaaaagaaacaaagagtttactgagcagccataaccttaaaattgctacagtttctatgaaactggaaaattccatcgctacagccaatgtcaacagcccaggcaagaaaggaatgtaggaattcaaaggaagggaagaatttgattaagagagactatgggtaactggcaaaaactcgatgaaaatgaccagaagttactggcttccagcatctgcgtccagaaattagattacaggcactggccctccccggagtgggtaaggtagcaggcatataacacgtatttgtataaagaatgaacccaggctaggattcaggttctggcaaccatgcagctggctaacagtatcctgagaagcccctccccactgccttggggcctggtctcctcccctgatctatggagctcttctgccaagtcca

SEQ ID NO: 43075 - DNA, 951 bp, Bovine  19866881037066
  misc_feature (1)..(1): n is a, c, g, or t
nttctccttaagccgaacaaacattttgataggaagcccttcattattcatgaaaccttggcatttagccttgcactgaccgagacatcagaaaaccaccggtgcccttttctcacgcagaaaataagacctagacgagtctcagggagcaaccacaggctctccactcagaacccttagtttaaatttttaaagctcggagttcaaacaatttagttcttcacttctgtgtacctttgcatatttagcacttgtttcattacagcttgttggcaggtgtcgcttttctgcattaacaatggtatacatcaaagtcacttacctttttgagaacagtctggtattgccgtcagaaactcacttttgaagttggtgtctcggttgaaatatttctttaaaacctgccacaaaaaggaaggttattgcattttctacatgtgcatatgtgtctaacctctgccactaaaaaaacaaaaacacttgcagacagggccgtaatggtttaacctaaattattcaacccttgtagccttgacaaattttattaaaatcaaaatggtcacaaaaatgaatcctttcttaatgatagggatctcttttttagtctcaggcttcctctttcactagtaaaatttaagcccacttttaaccaattgttctcctaaatattcctgtcgtttggagtcagtggaaaatccagcaagccaacagtaccaatctccttctgaggcaaaagaaaaaaaaaaaacatgtgggtcgaggtttccactccactggagccttgcaattactttttaaattttatttatttattttgtcctaatgggaatgctggtcagagtagcagaaaagatggggcaattaaaagtcttgtgctgaaccagcctcaaacactctttctggcttggtttactcttggcacaagtgctttctccttaatgacgtcttatt

SEQ ID NO: 43076 - DNA, 1787 bp, Bovine  19866881046902
  misc_feature (1)..(1): n is a, c, g, or t
naccacccttcctgttctgttcctggtgatgtgggcattccctttgtatgcttaagttacttcaggttggattcatggattactggtatgacctggtactgacagttttgcagaagatgtaaattcttcatatgatcatttaaattcttcacatgatacaaaaatcaatcctcagtaaaagttgagggcacactaaacttaaaagtgcttgtggcaataaaatttatctttatcagttttctggttgctaaacatacatattataaaataagtttatgaaaactagacagtgttcaaagtgactatttcagatttttgtctgtatgtatataaatacatataataattctcttcccaaaaattagatcagactttgcatcaatcctatagcttatgtcttccacctaataatgtattttggatatcatgatacattagtttacatagatctacttggtggtattttaaatgtttatgtttgaaatgtgtcctcctaaatgactatcattggtaatggtggtcactaagggtatgtgctatttcactgatggaattctagattagagccaggagacctgtgcaattgactttttgtgtgcagacaggttttgcaagaaatcgaatggttgatttctcacttccatgtcaggctgttggcagtatttcaagtactcttttgattcagggttgaatcatgggacaaagctataagacatttgcctagcaatttgcaaggtaatcatataatgtgaacagtacagggaaaacaacaaaacctgctcactctggactcacattcataatcaggagttatgaaaataataacaactaacacaacagcaacttttatcaagcacttaatggggaccagggacactggctaagcacttgacatccgatgtattatttaatgctcacagtaactctaaaattatcactgctgctgctgctgctaagttgcttcagttgtgtctggctctgtgcgaccccatagatggcagcccatgaggctccctcatccctgggattctccaggcaagaacactggagtgtgttgccatttccttctccaatgcatgaaagtgaaaagtgaaagtgaagtcactcagttgagtccaactcttcacaaccccatggactgcagcctaccgggctcctctgtccatgggattttccaggcaagagtactggagtgggttgccattgccttctccgaaaattatcactattttcagtaattaatttgaagttcttgcctatagtcagacagatcggaattgtcagcactggtatttgaccttgagctaaataaccataaagcctgtgttcctcatcaccagttattctgctctccaatttgctccccaacagcacctgacttgggacgtttacctattgttacctcaaaactcagattttgaaatgtaaacatttttattgttaggaaagtttgtggaaattttactaacacttttgtgctgattttaagataaatttagaggaggatattacaatatcctcttggttgacacaacctgatgcaaacaagggttggaggtttattggttgagcttctgttccctgaccacttcaacctttgctaagtcagatttctggaaataatatctaaagtaagacaattaaaaccaattatgaatagcaccaggtaattcataaggaaatcaatataaaatatgactttaggaaaaccagatgaagtattagtttcctatggctgctgtaacaagtgatcacagacctagtggcttaaaggggcttcccaggtg

SEQ ID NO: 43077 - DNA, 769 bp, Bovine  19866881061499
  misc_feature (1)..(1): n is a, c, g, or t
nattgtaaaatatcattagtcagtctattttgaacagaatgcaagctcttcttgctatgtactaaggacaaagagcatgggtgctaattttacaggcaggccaatgtagctcatgcgctggggctccttagccctcaggattttagtatagaatttacagagcaaacatagacagcgagggataaaaccacaccgtgctatgatgggaaaaggacgagttctagtttcaaactgttttcattcccaggatctactaagcataactgctacttacactggtgcatctgtagattgtgtttttgatgacacagacttattttgcctattctttcaaaacttcatactctttgttttcattattctttaaaaaacaaaaaaacatgtgctagaatgtttagagaaggcattcaaaattcaatgcaaaaaaaacaagagcaatataatttatcgtactgttggattcaacaaatttgtttagatgttccaaagcccatggacatgaatcaatactggattaaaagatcagaaatgttagcatatgcatactctactactttgctagtgtttgaattaaatgagatcggagacaacacattattatagtctctgtgctctgaggttaggattgaagatgcctaatgatgcacttggacattactatgtattatgtgtgtatgtgcttaagttgctcagttgtgtctgactctttgtgactccatggaccatcagactcttttatccatgtattgagtgcttactaagtgccagg

SEQ ID NO: 43078 - DNA, 1487 bp, Bovine  19866881069776
  misc_feature (1)..(1): n is a, c, g, or t
natggaagagctaaggtggggaatatggggaaaggagcaagtttaggagcaaacaggaagagttcagttagaactcattgagtcagaggagactgggggcatccaggcagagatgtccagttgctattcagacataaggactggagctcaggagaggtgcaggatatgtttaatcgctcagctgtgtccaactctgtgacttcatggactgtagcccacccaggctcctctgtccatgggatttttttaggcaagaatactggttgggttgccatttccttctctaagggctggagctcagaggagaggtgcaggagagggatggaaacatgcttattggcagcacagagggtggctgatggcagggaaaacctggagtaagacaagggattatgacaggtcctcggggaagaccaacatacaagggtgggcagaggaacctgagcttgcagagtgggcagagagggtgcagcttgcatctcaggatgagagccaagactttagttctagaaaccgagatcagaggggtgcctgaaggggtttgggtggaagaagactcatatcaatggagtaatcgaggaaggtaagggtcccagggggccatgggtgggccaggtgggagtgatcataggggatggaggccttggcctcagctcacagtcagaagcagggaaacagggagccacagacagcgatgtggcagctctttcatgaagcttggctctgaaggagcagaagacaagttaggcgatgagcaacgtcggattgagggagagttcttatagtttctttccttctctattttattttttaaaacatatgtaagatacagaataaatttaaatactaatgggaaccatgcaattgagaagagagttgggtgatcagggagcgtgaaggcacagggcaggcgaaatcccctggaacaagggctcccacactgtctgcaggttagagtcacctagttgggggggcgcatcttttacaaattctacagcccaggacacagcccagattcagtctactctctggggctggaatagaggcagcagcagtttttgaagctccccaggtgactgagactgcagagagtctggaaaccatcaccctggaattctgctccttgagttgaggtcctcaggccagcagcacagcaccacctggggctcgtagaaatgcacgcctactgaaccaacatccacactgttacaagatccccgggagattcgtgtgcacattaaagtttgagaagctgagaggcaggaggagatgaatccaggcagtgggaacttgatcagtgctgatttatgaatgaatgcaggagagaagagtgcatctggggaacaggtagagggctggcctgccacagcgggaggcaccccttatccttccagataaaagagacaggaggatagtgcaggtacagggtggtcgggctcaggaagctggtgctgtctatttcatccataaaacagaggtgtcacatg

SEQ ID NO: 43079 - DNA, 1555 bp, Bovine  19866881124223
  misc_feature (1)..(1): n is a, c, g, or t
ncgcctgcccagaaaggccctcctgccaacgcttctctggctgggggccttggaaatgttcccacgggtgggtggtggcgtctccctgctctcgtgtctgtttatccttgtcctctttctgtagcatgttctaaaccctttctcaaacattttctttgctccccagcactgggctccctgtgcatcttcccagtgggaagaagttagaccctgtgcttcccagatgttcagtctccaaggtagtggctggtgggcgagcaggtttctggccttgaaccggcctgcccagctgatgctgattccacaagggactctcagagacttcttccatttagtgactcacataatcgctctccccttggaacagccagttctgaactatgccgtctcccagaaattgtaattccagtctcaggctcatctttacaatgtccctttggctttccaatggtgttccaggaaactcgttcatgccgggtcctgtcttgttccctttttgggaggccaggatgcaaatgcaatttcggctcacatccaggggtctgattttaattcaagatgcagctggactacttcttaaatccaaaattcttaacaacaacccccacccacaagttgcaacactcacaaaaccacccacatggtacagttttaaagccatgtaaccattaatgaaatacagtgtattgttctactccatttagtttaatggctgcatcatgtaccatggatgtaccataatttgtttaactaattccctattgaagaacattaaggtaattattattgttattagacgagcagctgaaccttggaaacatactcttaaatgctttccctctgaggaaaatgaagaagctgactgtttcttatcaacccagccaagcccttggagattattatacccgaggctgagattcaccggcagcctcagaggctgttattgacaggagtgggccactcggggtgttggggctgaaaaaggttgacagccagcacagcctctgaagactaaaatttcaaatcaaggagagtgaaggacaaagttcttaaagatccaccgatgaaaaagtcaccaaacttccttgtattttcctctgattagaatcctcaacaccttcctttacccagttatgcaatatgtcttctcggatatgcttatggctggatgtcacttcctgttaaatgttcagaaaggactgcttgctgtcaaggagagaagcggagagattcatggtgtgtgcacagccacagccctcctcagggctgaagatgggctccttacctgcagtgtgcccttttgtgtcctgtaatagcgctttgcagccaagagcagccacattgaggaagacgagagggaaggcctgtgagagcgccccattcaggagaaacactgccctacactgagacagagagacccaatcagagtccaggcttggcagggagaccacagatagatggtgtcaactacaggcacttgccaagggcatctgcctctgcggggattgaatcctgtgctgctgcagctgttaccttcaacccgccctgaagggcg

SEQ ID NO: 43080 - DNA, 975 bp, Bovine  19866881182152
  misc_feature (1)..(1): n is a, c, g, or t
ngacagaaatgacatgaaaacagcaaatccttaagaggagtcctttcacagtcacttctaacccatcctgtgtactgctgtcagaatcatttttctcagagatcactttcaccatgagctctcccatctcctgtggtcctgcatgtctcatgtggacgagtacaatacctgccttgcctgtccccaacttttctcctctactgtccagtctaacaggcccactggctttccccagcacgtcctcagcaatcccgaggttacacggttcctttccactccatggctgtccttcccctttctcctttagaatccaagctgcccatccttttagacccaacttaatttcacatcctctgcaaatccattcttggctttaccactagatgataaattatctttcctttcattaaaaacctatctatagagactatatttctgaacccaaaatggggacatgtggatgtggaattttctactgttgacagatgtgaaagacagtctgggaagtgttgcttgaatgctcaaaaattggactctggagaatgttttcatagttaacggggccagcaaacagaatgtttgaaatggtgataggatagggcattcaggatgcatggctgtatctgtccttcagcttttggcacgatctacatacagtgcattattaaatgcttttatccatattatttttcccaaagtaagctttaatttcattgggaagcggcactatatcaatacctagatttactcccaacacctaggtagagctatagagcaaaaaactggttatgaataaataattccaaactcttaatctctgtgggaaaataattcccatatggtatcaccatcattcacacatccttatctattcttctgtgaacaacacctcacacctgggatacagctcgtatgagtgatacagagaagtagagtcaagaattttcggggggccccaagagtagacacaggaat

SEQ ID NO: 43081 - DNA, 1138 bp, Bovine  19866881339111
  misc_feature (1)..(1): n is a, c, g, or t
ncagaaaactttttcctttttttggctacacggggtcttcacagctgcacgcaggctttctgtagctgtgaaattcaggcagctcattgcagaggcttctcttgttgcagagcacaggctgtaggcgtggacttcagtagttgtggcgcatggattcaattgctccaaggcgtgtaggatcttcccggaccagggatagaatccatgtcccctgcattggcaggaggattcctcaccattggaccaccaaggaaagtcctcttcagttttagtttttaagtagatctgatgcccttttagtattcctgcttttctaatcttctttcataaatgtcttccttttctatagctttaagaggtttcaagtgcatgaggtaagaaattggatttgattttcttgggcaccatccaaccctgaattcaatgattctttgaaacttgcaacatggttaacactaaaccggcaccactgaggaccactggcgattaaacccgcagcgatgtggatggtaactatctacttaatgagaagaaacaagcctaaccagtaagttatttatctagtgttacgattattgagtttctctgacattatctaggttgaatattcaaactgactacactcctagtgtgcattggaaattctgtcttagtaatgacaaccatagataacacacaataaacttggcactgtcccaagtactttacattcattaacctatttatttcttgtaataatgctatgagataattaatactttcatccctatgtgacagaagggaaaacaggccgagtaaggttaagtcatttgcccaaaattgaagttggtaaacgatagacttgggattcaaactcagctcagcagaatggcttctttcccactctgcatacttcctcctgaagctcagaagaggttattgaacaccccctgtatataattatgctcttatgtttcctcatatgagactactggaaccctttcctttgcctcttgtcattttgtgtatgggttttaccttttgcacaccaggaaaagttggaagaattaggagaccttcgaaggaggtaagaactgcaagtacaaatcatgaagctgcaataagaaataagaagtaagcaaggaaatgcaacccactc

SEQ ID NO: 43082 - DNA, 2227 bp, Bovine  19866880257247
  misc_feature (1)..(1): n is a, c, g, or t
ntccaagggactctcgagagtcttatccaacaccacagttcaaaagcatcaattctttagtgctcagctttctttatagtccaactctcgcattcgtacttgaatactggaaaaaccatagctttgactatatggacctttgtcagcaaagtgatgtctctactttctcactgtctagatttgtcatatcttttcttccaaggagcaagcatcttttaagcgtctgcagtttgagaagctagaaagctacaaagcaagggcatggatttttgagattaatccacctaccaagggggtccatgtcagtgtagacaagtcgggaaggaaatccatggaaagagagaactaaaattggacctccagggaaaaggagggtttggccaggagcggcttcccagcgaggggcgtggcctgaccagagaattagcaccaggcaggaacctggtgagtttgagcaaaagtgggtgtggtggtggctgtggttattctaacaaaaccctgactgaacctgggctctgtagatccaattgcaatttacacttttctgtcaggacaaatgaaaatgactgtttgatctttaagtgaatataattttgcagcacccataaggtattattgattaaacagaagagaggcgtagtaaatttcccagcaggaaacagtgccgttattcttttctatggaaaataaatactaagttctaagtggtgttttcggatgcatccactgagtcgctgaatcagcccggcctcctctccactgtgtctcgagtgggtgacagacaaccgctgaattaccgccggcaactggtaattttgccatccacggcctcactctgctcatttaacgttaggaaatctcaatacttttgtaaatgacttaaaatatttgacatgtatgtctcgattctttgaataccatggagactgtggaaagaagtctttgttaaaaactcggcttttgaggaacattgagaatggagcttcagcatcaggagaaaaaaaaaaaggtgcgaggagaaaccaaggcagcaaagcctcagtgccagcgcacctgtcctgtcacgccaagttcagcatcacacgcctggacatatttcgggaggttaatgaaataatgaggagactgctgcctcctaagcccctcatagagagaaaaccttttcattgctgagaaatgtgataccatgatttccactaacaattcccatggaaggccagtgaaattcatcacagatgtggtcaggataattatagatattactggccctgcaaaaccattccattccaaaggaggcatcgctttctgccagcagttttaagatctaggaggtgaagggacaccctgagaagcagagttaatgggagttagaaagaaatgtctttagaatttagaccctgagatccccgaggtacccagaaggatttcagagaatgagaaatctgtctggaagctcagtctgaatagaaggaagactcagtgatgaacagcgtgcctttctgtgcaatcctgccagaccacaacactgcactccaacctggcttcctactctgtgggtgaagctgagtggggtgggaggtggcagagggaagcttctcggtgattcgtaaaggcacggacgctctaactccgtcaggcgggttgtagtcacaataccaggacgcttaggatctctgagttctcttccttaaccaggaggaagggaggaggagctttcccaaggactcccaaaattgtgcctttggctctaggttacttgctgcttcttatctgatctgtactaaaaatccaactcaaactggtgcaaaccattcggggagattatcggctcatgtaattgagaagtctgagtgggggactgactgactgcagatttgttcatacgaggggtcttgttggggacacatgcatgttgggctgctttatcatgaacgacagtaagtttcatgttggcataaagagggggcttccagatccctccattgtgtatttatattttcctctattaaccagcaagtaacctgtgggaaaagattgaaggcaggatgagaaggggatgacagaggatggggaaagattgaaggcaggatgagaaggggatgacagaggatgagaggcttggatggcttcactgactcaacggacatgagtttgagcaagctgcgggagttggtgatggacagggaagtctggcatgctgcagtccatggggtcccaaagagtcaga

SEQ ID NO: 43083 - DNA, 1399 bp, Bovine  19866880422213
  misc_feature (1)..(1): n is a, c, g, or t
nttaaaggtaaggtcttggctacacaggggatgaagcacaaggctgacctcatgaaggtcaagttctaataaccagatgagctgggggtgctgtgaggtcaggatctacatggggtcctggagatgaagaacccacaggctggtgaggggagagaggtaaccaaggtaaaggatcatgtgatgtgtggctgattaggtgcatgtgtcaatcggtagggaacaggataagcaggtggactgccctgtctatgggtgtgtgatggggatgaggggacagacaggccaccacctggatatggaaccagaagaacttgcatcctgtcctgaggcactgcccacggcctctcccctgcagtatgcgtagcggcagtactggttcccctgacccctactccactcctgctcccataacccactgtccgcacacagcccctggtaaagaccctccaaagccttcccacttgcttaaaatggaacccaggctcttcaccatggccccaacctctctactcacaaaccatctccttccccgacccactgtgctccagacgcaggaccttcttgtccctttaggatttcctatccgtccctgtcttagttcctctgcccttgctgccctctctaccagaaacagccctgtggcttgaccgaatccacacccgcccccgcccccagagccccagcaagcactcaatctgaggcagcaggcagtttcagtcatatcatctgctctgcttccttcatcatgccctcctgcatgaaatcacctcgctcaggtactacctggtgtgttttttgcctctaccctgagagcatgatccccacgagggaaggagaatttagagctgaaatgaccagggaaataataggtccagagcaggtgcctgaaaatgtactgggtagaaacagtaccttggacagcgccctggacagcactccacacagttcctgcccttcaggcaagcagggcatccacctgcccagcacagagcctgtaactcaaagcacagggtctcctcctgagaactgggtggtagatggtccttaaacatcctttcctgcttccactcaggtgctgagcacacggacatctacctaactctctcttctcccaactgcagttaaaggtgacagcgagcctgacagtttactccacacttgctcagttggataagatgaataagtgatcagcagtgtcccagttaggctgccttctgcggttattatagattcgacacccaggcatcccacagaggcacggctccttcatcaatgcgggcttcttttagcccacgctatattaagctgagtaaaaattaaacactgactgttcaatgaaacattatattcccaatgaaacttggctagttaattacagggactaacactgcttttaaga

SEQ ID NO: 43084 - DNA, 1246 bp, Bovine  19866880537928
  misc_feature (1)..(1): n is a, c, g, or t
nttttatgacagcttatggcaaaggcactgaagtgtcaccaggcttccctacaactctagcctgccctgtcccagtgcagaagctgcctgatcccagaactcagtcttgctggttgagatccctgctcagttttgagctgtgtgctctcgagcaggttgcttgacttctctgagtttcctagttctcatgagggaaaagagtgtgaaatgatattccttctaaggtctgtgcaaggacggcctgtggtctatgagttccagacatgaactaaaacaccgaatattctcagctacttaatgctatatcttggtagctttgattgatcccctttcaaagtttctaaactgggaacattaaaaaataaatgacatttcagggccacggggaaattgcagtgttatagaacagtccctaaaatcttttcagaatgatttctggggctcacatctctcatatacagaagctctttcctgctcaggacatgcttagtagttcttatcctgcttccttttaaaataactctaaaatacatgaagtgaagcgacagcacacaccgagctccacctcagggtggaggtggttggggcctgatttctgatgtgcttgggctctgctgagcatgaagcccttcctgggccccagcaaaccctcatgttttgatgctaattttcaatttgcatctttaaaaaggtaacatttgatccagatgagctggtctggtctgaaatatttatctgtgaagaacacattttagttccttctggggagggagggaacgcctttcgacgtggaaggtatttaaagggcattatgggggtgtggcgtgcttctctctgaatcccagctgtttcaatgtctctttgcttgttctgactctggtactggatgaaggataagctgaaggtcagggccatgctcgctgtggtggctacagggctggcatgggcttctctgaggtcagtgatagactgggaagtccctgttgggggccagcccagctgggccctggaaaccaaatgcaccatgcaaatatccacggtgctgccttctgacacaactgcctggcagttttctaagctgctcagcatgcagaaacttaaatgtcacactcgggagtgaagaagcagatggacacactctggatggccccagtggacctgtccctctggtagttgtctgagggcaacctgaggacacgcaagggaccagggcaccagtggtcacagagagcttcatcccatagat

SEQ ID NO: 43085 - DNA, 1725 bp, Bovine  19866880608711
  misc_feature (1)..(1): n is a, c, g, or t
nagtagtgagcggtggggtgtgtgtgtgcacgtttcgattttccaacactcatcactcatcacttccaaggcaggggccaggaggctccaactggggtgtagcaagctgggccacccagcatttgccccccagcatgcaggtcccctgggctgcctgcactttcagagcccgggagtgagggctgccacacacctgcaccctgggcacctccctggcctcacctggtcccagtcccggccctcagtgttggactcatggccctcggattcatattcatcccaactgcccgggaggagcccctggcgtctcccacacccaacccaaaagctctcctgggtgcatgcagagaaggtgtggagccccaggagaaacacccggtcaaagaagcctcaagggaggggcttccctggtgctgcatggccatgactctgtgcccttaatgcaggcggcctgagttcgatccctggtcagggaaactagatcccacaactaagacctggcacagccaaacagataagcatacatttttaaagaagtctcaagggaggctggacttggagggagtgaatggtcaaactcaggccaaatccaggtcagctcaggtcagtgcagcccacaccaggtcaattcactctgagtggccttcagcaactttgtcatcaagtgagtaggtcactgagttccaaagacaggggaaactgagggtgcagcccaattctatcctgtctgaggatctctgactgctcacaaagagtacatcttccccaactaaatgctgcctgctgaagggtctgacagagatgggcgcccagtaaacgccaaaacaaaggccccgctgggcccataccctcagcgtggctgtttgacagcatgtctgccgcagcatcattatgctgccagcaacttgacatcactttcaaaccacggctttatttcaataattataaagtgttctggcctctgacaaattaatgggaggccttcctgcgtgccagcagagcggggagaggcagtgttactagggctgggccacgccctaccacccactttctgtttgtcctaatttgtgtttgcccagaaccacgggaaacccagagactggcagactcgttactcagttttcacccccatcaatctcggggaggttttacatgattggatatgagtttggggtgaactattcagatctcatattttgatgaatggggaaaaaattgcccgagagaacacagaatcgtgtgcgtttgcacatttcaggaaaacaaacatcaccttcgccaatccctatttctacctgctgcaagaattttctgcaaatcttaagtgtttggtaagcaaagatcaccagatgtgtgtcctgtctgccccgagctcacagggagagacttgtccatctctgagcatcatctgcctcctcactagtaaagaatccacctgccaacacaggagatgcaggtttgatccatgggtcaggaagattccctggaggggatgacaacccactccagtaatctagcctggagaatcccacagacagaagagcctggcagggactacagtccatggggtcacaaaacagatacaaccaagcatgcatgcatgccctgaactgtgggaaggttatttacaacgtgtgccctcaaggacccaggcagaccatctgcctggtggcggggcagaagcctcccctagcactgtaagggtaacaaggtcttgatgctgaa

SEQ ID NO: 43086 - DNA, 1141 bp, Bovine  19866880709320
  misc_feature (1)..(1): n is a, c, g, or t
naccaaggtttggcataatggagcccttgaacacagcaggccctactaaacttgggttggatgcagtttctatgaacctgtgttttttttaacctcacttatttccattctcaggcccacaatggggatcttacagccagggagaccctgcaaggctggattctctgaagaagattacacagcattaatctcccagaatattctggaaggagagaaggtcctcaaaggtaaggtggatgtgggaatgaattcgcatactgcactctggactagggagaacattgccacctgcagaacaagaggcaggactggctttgagccaggctgtatgcgaagcgaaggtggagaggtcagtggatgtgcagatcagtcgacctaaatggccttttgcatcacaggtgaatgattcagagtccctgtcatttttgagtgaggtgaatcatttcctgggcaacaaattggaattcggatctagtgtcacccaaataatgtgcagagagagactttcttaccaagtatttttgtgtatgaaattctggattcttaaattatccctgctttgcaatgcatgataaagcagacgatgttgttggggatgcggtaaataagcccacagacgttctgttcacagacatggcatgcgttctcattactgtcccactgacaacacggaaacacatatgcaggagggagctgccattagctccattgtccctgcagctcgacacccacgcttgtgacggggaactcaggggcagcttctgaactccagtgacgatagatcctcctgcatagatatgcttccctctcaagacaaactaaactttttattcacgtgggaggggaaattaatcaattctttcttccttgaggttttaaagtggcacggcgaatacctcgaccctgtgcctcccctccctgcatcagttttccagaagcagatttcagccagtttcaaagtgacggagggaacgaactttagcagaagcatcaaagctgagttcagtacccatgactaaaccacactcaggctgctgactttgtccccagttttccgtttcagggaattcagagtttctgcccacccccagcagatcctttgttgggagggactctcacagagtgggggaattcttcagat

SEQ ID NO: 43087 - DNA, 726 bp, Bovine  19866880720935
  misc_feature (1)..(1): n is a, c, g, or t
ncaatccactatatgtatatgcaaaaccgactacttatacatgtgatccaccgaatatacacacggtccactgtatatacacacaatccacttcatatcagcacatgatccacatcgtgtaaacacatgatccacataatacacacgatccacaaaatacaaacacacaatctacttcatataaacatgtgatccaatcatataaacgtgatccactttatataaatgtgacccacatcatataaacacatgatccacaccataaacatgtcctccactgcatatacacatgatcccccctcctccattcctctggtgggagcagcagcgggcatcaccattccgcccaggcccacggtgacttccctctgggtcaacctctcccacacagactgcagtgggggagggttgtgccccagccccacggcgcccacctcacctctcggtccaggccagcagccactgtcacaatgtcgcccgtctcactgttgatggtgaacatgttctgggaggggctctgcggggtctgggtcacgatccggtagcgcaccatcccgttggctgtggtggcgtcatccgcgtcgttggctgtgactgtcatcacgtaggtgcctgcaacagagacggcagctatgtgggactcgcctgccacgcccgccactgtccctcgtacacaccccagcagatgtctcccgcagtcatatcttcctggaggctggatgtggt

SEQ ID NO: 43088 - DNA, 1510 bp, Bovine  19866880781861
  misc_feature (1)..(1): n is a, c, g, or t
ntgggtgataggtacaagagggggtcaaatgaaggggcagagtacagggtagagagagcaagggggctgcagagagaggagaaggaggatggaggggaaagtagggagatggagggggaagtagggagatggagagggaggagaagcagggatggagagggagatgacgaggggggagggaggcgggaggcagaaagatgttggaaggagacaaggaccagagcaggtcagtttaacttgatctggtgactatttgcacagcagtgattgatttgatgatggtggagagacacaagtgttggataagaatattccggggcttctctggtggtccagaggttaaaaatctgctggccaatgcaggggacacaggttccatctttgatccaggaagatcccacataccacagagcaactaagcccgtgcactgtaactgctgaagtctgtgcgccctaaagcctgtgctctgcaacaagagaagtgactgcaaccagagagcagccgccgctgcaactagagaaaggccgaagcagcagtgaagacccagcacaggcactcaatcaattaaaaaaagagaatattccaggccacatgtcaaccgctagaattaaggcaacagtccagctcaggagagggtctctgaactcccaggttggaggacaggtccctgggttgcagacctggcttctgagactcagttacaactcattcagcaggtcctgtgttctgtccagttcttggtctgctgaacttagatatgacctaaatgaaccactagcaatatcgaaagtaaataatagccaaactgatagcccttaactaaccggagttaatttccttttaagaaagtgggtgcgtgcttagtcgcttcagttgtgtccgactctttgtgaacccatggactgtagcctgccaggctcctctgtccatgggattctccaggtaagaatactggagtgggttgccatgccctcctccgggggatcttcccgacccagggatcgaacccacatctcttgtgtctcctgcattggcaggcgggttctttaccactagcaccacatgggaagctctgtaataaaggaccagaaactacaaaatccaacctcaaacaacacccccacacccctcccatggtggcgagggggctaagcctttttcctggaaaatatttccatgctccagacgctcggagactatagactgcatttctagttttcaaataaatgctccctcatcaggtgctcgaggactagcagatgctccctgagataaatgctacctgtcaagttgtccctctgatcaggctttaagggagaaagaatttccaaatcatttacttgggaatttaaggaatcttaagtgaagtttgtttcccagaaaggaaaccctcccctatttcacattgtcaaaactatttttaaatagagttattctttgtgcttaaaactactcctaaaaataactccctggctggtggaattacagcaggcttgctggttagtgggt

SEQ ID NO: 43089 - DNA, 1959 bp, Bovine  19866880787999
  misc_feature (1)..(1): n is a, c, g, or t
ncctatgcactgtagcccaccaggctcctctgtccatgggattctccaggcaagaatactggaatgggttgtcatgcctcctccgggggatcttcttaacctaggcatcaaatgtgcatttctttaagtctcctgaattggcaggcgggctcttagcactgtacctcctgggaagcccttcattctcctttggtcagtgccaatcctgtgcccacaataggtcctcactatgtgttagaagtaagccaatgcctgccacatccagccttttgtgtgtataaggaccagcttctttttaattgaaatggagcaggttgttacttagaatttccagtccttgctgcagaggacaggtggcccaaaagtccttgagaatcagatgggaatcagtccttgagaatcccagccctgtgggcctggggagtttctgtttgccctcctccccgcactggaccttccagggatgggtctctcttccttccctgactctcttcatggaaacaacacccagtatagaaacacatcccctcacacagggcagtgaggacaggcactccgggtggcagttagatttcagccttggtctggctgattgggacaaaccatggtccttctccccacgaggctcgtggcaagagctcaagaaaaacaggtccaggctggaatcctgactctgtgcttcttggccccttgacccagatgttactgtttctctctgagtggcaggggctttactgtaaagtagggggtatattcggagaaggcaatggcaccccactccagtactcttgcctggaaaatcccatggatggaggaccctggtaggctgcaatccatggatcgataagagtcaaacacgactgagcgacttcactttcacctttcactttcatgcattggagaagaaaatggcaacccactccagtgttcttgccttgagaatcccagggacgggggagcctggtgggctgccgtctatggggtcgcacagagtcggacatgactgaagcgacttagcagcagcagcagcagggggtatattcttgaatgtggctggcagagtgggttgtcaggtaataatgacaatgatgcaggtagcgatgaggaagaagatgatgatggtgaagatgatggtgatgaaaagtgttgatgaagatgaagaaaataatggtagtgagatgatggagctgatgatgatgatgatagtaatgacggtgatgataatgatgaaaaacggtgatgataaagaagctgatgatggagatgataataatagaggactgatattagtagtgatgctgctgctgataagaacgataaggatgatgatgatgatgataaggaagagaggatgatgatgatactggtgatgatggccctgggcagatacactctgggtcgagtccttaaagttctccagtgctcacattcaggagtctgggtggtttgctttcaaagccttctccctgaggatgtctactcgcacactcacaccactcgcacacccacaccgggctgcctcgtcctccccatttggaagtttgacatcccgttctgtgacctttgtcatctttaagatttctctgtcttggagctgaggttttttttctttactgtgcttgcttttcctgctttcaaaatggtgccgtgctaccgagccgcaccgctatgaagatagaaatggcacttcttccttccttctcctggtaattttgaaatgtgtgaatttcttccccggagtttttagttttctcagacagcagggggttaattagtttggttatttcacaatagcatttacagtcttcttattaactgggcagatacccaaggacgctttctcctcgatgaggttctagtcccagggctgggcagcagggccgtgggctcacagatcctccagggagggggagagattcgaacctccagaatcactgctagctgttcccagagaatcat

SEQ ID NO: 43090 - DNA, 805 bp, Bovine  19866880844948
  misc_feature (1)..(1): n is a, c, g, or t
nagagaacagagacccagggacaggaagaagatagattgtcagataaagcaccaagaggagacgagggaagcattgtattttccttttctaataaacttagttaatatgcgatgatcaatcacaccatcacgggcatttttatctcccctgagtatcaatatgaagtggcgctgacgtgttcccaatacagccctgaaaggcgatgggtgggtacttgtctctgaaagccttggaccttgatggtggatcaatgatgtcaaaacctcctgctccgtcgtgaaaccaactctgatgatggtaattaagctgtgagagttggtctggctgaacccagcactctcctgctgcaaacagagttctcattgatcagccattttttatttttaatattcatggattagccacactctcaaagtaccccattaccatgtacatgtgaaatgagtccttccccaagacccagaggtcctggttcactggccccaacaccacaccgggaaggtgggtttccgagtggaccccatggcttctgcaagtagatgctggcacgtttgctggagctttgaagtagccagagggctctgcgcgccggggtgaaccctccctccctctggggaagtcagctctgcctgctgtcccccaagagatggaaccactttgctgaacagacgctgagttggaggaggccatggagacacctgacatgtcctctaaccatcacggtgtgcacctcccagacacccactgtgaggtcaggcactgggaccgtgtaaacatccaggcaatgggtccatagtgcgcccg

SEQ ID NO: 43091 - DNA, 1227 bp, Bovine  19866880850278
  misc_feature (1)..(1): n is a, c, g, or t
nccagcttaattatttcccttccgcaaacactgaaaaactcagatgaagaagaaatcactcctgattaatttgcatctgtcttaaatccaaatggagcctttttgttttaacatcacttaatgctgaggcagagaaagacttgtgtttttaaagacaaatgatttgagtcttatttttaagtctccacgtagcacagataattctaagaagcttgtttggcaaaagttaatcagacattggagattaaatttttcctttatagtatgcacacatttaaagttatgaagagaaattctaagtaaataaatcacgctttataaattactaatacccaaggaacagataaagacatgtggtgaagtcgcgttccagtctcagatgtgtggggacacgcacatctctgatctactgtcaaacggctctaaataaaacaattagagatgtttgcatatatttatcttcttgtgtgtttgtacgagcgggatgccaagagtgtgctcggagctgcacaaaagatgaaacaggacgaggtctcagccctcagggcctacaatcaaagtgaggcagataaaacaattcagacatgaaatacatcagttgagaaggctgttaaaatttatgaggtgcaaggtttgttggcttttccaggaaaggcagaactgagaggagggccagcttactgagaaccaccgtggggtgagtgagctccaggaggaaagttgaataaaagatacaggtgcccggcactgggagagagaaagagtgggtgggggtctgcgtggggcccggctgtgggtggaagagcagggcccccaggagcagagccccccaaggtaagaaagccaagaacctgcgcctcaggtctaaacggatgactcagtttcacctcggggggaagtgccattgctcaggtggccactggcatctgggactggtccctccacgtagaattcagggtcctctctctgcacatctcatcctgctgagggcctggaactgcccgagagcagggctggtcctcggtgtgagttgaagagaacagagccctcccgccctggtttcctgcccagactctgcttctggaaacaggctgacacctcagaccacagaaccttggactgatggctacaggaaggagttggtcctctctcgggtcctggggttcagggttaactttgttaaaccacttggaaaggaacttaaaaatctagagctttcccagtttg

SEQ ID NO: 43092 - DNA, 706 bp, Bovine  19866880861744
  misc_feature (1)..(1): n is a, c, g, or t
ntttcccccatttaagttagatgacaattttgtttacttggttcaagtgaaattccagttgcattgtgagctttttagaaaaatgagacatttatcttctctctgtacagcatggagctcacaagctcctgtaatcttgatataatctttacagaggtccataaaaaggctgcacagtatataaacctgtgatggcagggcagcctgtttctcccagctcatggaccaaatgatactgacttttctccttggcccattagggaagaattgagtgttagtcgcttagttgtgtccaactctttgcaacactatggactgtagcctgccaggcttctctgtccatggtattctccaggcaagaatactggagtgggtagccattcccttcttcaggggatcttctggagccagggattgaactcaggtctcctgcattgcaggcagattctttaccatctgagccaccagggaagcctttagggaagaagatgcaactgatatcacatgtacacttgatcaagagtcctcaaaatcaaatgtggtcaggcagggcatatacataagtaaaacacacttgatgtaaagaaagaaaggaactcctcccctaccgccactgtagctctagcatcttctggtcacatgggaagggggcaccatgctgtcagatcttaatttcccaggaaaatccaggaatccatacacttta

SEQ ID NO: 43093 - DNA, 873 bp, Bovine  19866880868411
  misc_feature (1)..(1): n is a, c, g, or t
ntgttaaaccagagtgacaggattgctgccttcatgagccttacagtttaagtaagagagaaaatataaattcagataatatacattctctaataaggaagcagagtatggttaaaggcacaagatggtcatgaactaacctggacatgggagagggaaggcttttctaaggtaattgcattaaatgaagccaccagaaacaaagctcttcgttctgtattatctgaattcatgggataattttcagatccccctcctccgacccagcagacagcattttcactcacacgtggccttcttctccaggagcaaagagagatatgatccacatgtgctgggttcccactaagccaccccttgctctcccatccttgggggattttgctttgaagggggtctgggtttttgcagaactctgcccgccacgagagagcgacgcaggtcagtgcatcagctgcagcctcgagcccagctgaccattcattattaacaaggctgagaaaaagacaccggcttagctcctaccccatgctaaactatggcatggagaacacttccttgaagccaaaggaaaagggcttaacgatcctattttagatacgaccatgcacctgtgatcatggccatcagtgaacaatcctggagacgaatctacagagtaagagtgtttgcagtgacccctgagtgctctccagagaaggcacggactagaaccatgaggtggagtggatccaggaattacacagcagctaaacagatgccccatgtgccccatggagcactcagcccgccattcaagaggttctcaattccatagtatttgctaccctattggggaaaactattttaagcctaattagcataaatttttca

SEQ ID NO: 43094 - DNA, 1214 bp, Bovine  19866880879599
  misc_feature (1)..(1): n is a, c, g, or t
ncctttaagccaggacattggagcatcctcggatcgctggacacggcccgggcgggctgaaggctggccctttattccctgggcactcaacacctttctgtttgcactaaatgttgggtgactttcggagcccctgggtgccctcagctccatttctggtcctggaacaaccatcagaggggaccagagatgtgacctctttgtgcaaagccaggatggagctgcacggtgcctcgttgggcttggcttgacgccctggtccagaacgaggaggccatgtccagacagagcagggcccacctcctcgatgcaggaggctccccgggatatggaaacagtctctataagtccttttctcaccccagtaaattacaataatagaaggttttacacagtgcctttgtgggataaggaaaaactaccgccagaaattagtcattattctctggaatgataggctaatgaagggtttcagatgcatgttctaatggaaaacaagtgaaaagatatattcagtattgactcagccgggtaggagtcagctaaggtctgggaagttgcagtggggacgtcagccagctgctgggggccagatcccaggtcaccccacatcttcactgacccccaggcccctccatgtcatgaagccctctctggctttgctgagtcgcaggggcctcacacacaattctggttcatacagctgttcagttcagtcactcagtcatgtccgactctttgcaaccccatggactgcagcatgctgggcttccctatccatcaccaactcccggagcttactcaaactcgtgtccatagagtcagtgatgccatccaaccatctcaccctctgtggtccccttttcctcccgccttcaatctttcccagcatcagggtcttttccaatgagtcagttcttcacatcaggcggccaaagtattggagtttcagcttcaacatcagtccttccgatgaatattcaggacctctttcctttatgatggactggttggatctccttgcagtcctagggactcttaagagtcttctccaacaccacagttcaaaaacatcaattctttggcgctcagctttctttatagtccaactctcacatctagctgagaagctgaatttctcgttgtatttcgtataaaggccacgtgggggcagggttgccgtgttgagtccccacccgggggggccacagcag

SEQ ID NO: 43095 - DNA, 1172 bp, Bovine  19866880924220
  misc_feature (1)..(1): n is a, c, g, or t
ncatcatatggattattactgtttgaatgattcaccttattctagaaagttagcttgtttccactttgtattagggagaatggcaatcctatgcatgttttctgtgagtttctgatcatttccctgaggttgagtcatggtgctaaagattcagaatatgtctaaggattgtcacacctgtcgcacctcaggtgccctcagaaagcccagtaggtgtgaacattcactaactgtaggaatcccagcatgtcgggggcacaggtaggatacatatccattaataaagatagacccacttctgccggttcactaggggaagacctgtgatggaagacaaaaggtttgtttacatttttatgtgccatcattactgaagatgtattgccactaatttattgactatttgttctttctttgtaaattaggtatcttttgggatttgcttattttttcccaccaaagtacgtgtgttctcctgtttgatttgtgtgacttcttcggtgctgttcacgagcctttctgcctccggtgcctcctgcacatctggctccttctttctctggtctttgggctttagtcacgttttctgacttagagttgcacttattttgttgtcccatctctccccacgtcttttcccaggtgcctttttctcatttgcccttcatcattcagtgtctttaatggtccccgtttcattctccgatctgttgcgtcgcttcttcttttacttttcatcactgtttttttccctgatgttccacttccctcctttttctacttcccttgttttgtcgtcaccaggcagtaaactcctttttctgaaatcacccgctttcccgagttttctgtcctcattctatgttcataccccttcccttcacttgacactgatttccctgtgtagccaatttagcaatggacctgaagggtctgaaaagtcggtggtccagtgcccatccctgagaagcctggcacctgacccctccatgtgtcccggggcgccatcactgaggggcttgtttcaccttccgccgactctgaagaaggtgctttcatagtttccaagagaaattttttattaaacaaacctgcactctcccagaccagaaaggcattatgtgaacgttttatgagccgaatgtagaaattaatggaggaaaaaaagaaat

SEQ ID NO: 43096 - DNA, 1585 bp, Bovine  19866880992662
  misc_feature (1)..(1): n is a, c, g, or t
naatgatggatgtggtattatgcaccttcttgtggaagccggttagttctcaaagcacagtgtgcatgtcttgtccccctcccatcatttccctgttgtcaccaggagaaaacctaacccccaagcacatcctatgggaccccatgatctgactgtgcccaaactcccaccatgctgggccacgcacagcttccatttctgatcacatccttcgtttcctggagtcctgtgttttccctgtgttttagccaccccaacctgcctacttccactgttctctgagaatgctccacatctcaggactaacacaggccctcccccattgtctgcgtatgtggcagagtttttgacactgtttttttttcagtaattatcagtctgtctccccagtaaacacagaggtccttgagagatagttcacctgtcaaacacaacaatggggacagaacagatgtcattaagttttactgagtgaatgaatgattcaactattgtgcacagatctagtagtccgcttttcatgatcattatggagattgttgggttagataaacaatacttggaaataatgaaacctgggaagttctgtttctggagtgcaggagtagtgtatatcagatgaatactcctcaaataacagttgtaaactttggggaaatgtttttgctaaaaactatttgaagttgcttgagaatgatcaatagtaggcagaaactgctggggactccacccttgaaaagaaaacagaactgagtgtgacctgtgtttgtgtgtctttaagagcacccccaatctgtccttgcatcaaaatgtagctagagctcacccagaaaaccagtctttctggccagaggagttggaagatgggatttagaactgacaaagcagctggaatgtgaggggataaatcctgtaaaatatgtagccagaggtggagactcccagaaatactcataaattctgtccagttcctcagctgccccttgaaatgtacatgcacacagaagattccagagaatccagagaaaagcaacagctagatgattgaaagaatcaagaagagactcaccaggcaaggtaaacagatttaaatttcagtccagccaagtcaacaccctttagaaaaagacagcagagccagcttctctacagtgtatcatctacaatgattacaatgaccagaatacaaacaaaaagtactagacatgccaataaaggaaaacgtgaccgaaaattaggcaaaaactgctcatagaatctaacccagatattggaattagcaacagggcctttaaaatatctctcacaaatatacttcaaggacttaaaggaaaatatggtcagaatgaatgaacacattgagaataacaacagaaaaatggaaactccaaaactacaaccaaatggaaatggtaaaactggagagcgtggtgtctctaatgaaaaacttactggatgggcttacaaagtagattgtagagggcagaagaaaggtcagtgcatcaatcagtaaaaattattcaacctgaagaatggcaggagagagaggattgaaatgcacagagttttgataggataagatcaa

SEQ ID NO: 43097 - DNA, 876 bp, Bovine  19866881005346
  misc_feature (1)..(1): n is a, c, g, or t
naatcccatggacaggggagcctggtgggctacagacacgactcaagcaacttagctcaatcaccatccactcactgtgctttggggagaggactcagttatttcccacctaccctttcatctgtagcatcacacggtgattagttaagagtctatgtgctactcccgaaatggaataatagaacctacccacacatataattgaataagaaatcaattttatgccctaactgtaatataaaggtcaagggaaaggaaagcaatttataataaaatgcgtatttctaaatgtaaatgtgcaggagaaactgccctggggaacactgtggatagttagttggttcttcccatgggtgaacacagcatctaaaagctgaacagatgcaaactagctatttggaaatgcaaacctgtcagtgttgtgggtgtcagagacaggagtctgtaaaatggagagaaactcctggtgacacttcccccaccctgatgaaaaaccgtgccatcttctctaggtgagaagcataactttcaacacatggaagttatgctcctggaaaactcagtgtgtcttacaaatgtctgtgctccttgcaaactggtatgaagacacaaggctcagtatctggctgcacgtatgaacactgtggagggtagtgcacaggccttcactgtgcagggtggcccagcacccaggcacacagcatgatgccggacatccctgagtcctgtatgccaccgcacccctccactgcccttacagtgtcagcagtaccctccaattgctgtgatgtccaaggtgcaaattaaggcttccctggggctcagtggtaaagaatctgcctgccaatgcaggagatagcttctatcttcggtcta

SEQ ID NO: 43098 - DNA, 1483 bp, Bovine  19866881009139
  misc_feature (1)..(1): n is a, c, g, or t
ntagatattgattgagcaaatgaattaatgagtgagtgaatgaataaaagccaaaaatcctaaattgaagaggggagtttgaggagcccctgtgggcccttcagcccaagttggggtacctaccctttgtaccttgagttgttcccagatggagctccctggagccccttccccatcagagaggggccttccaccccagggcctctggactcatttcctctctgctgtcccaagaaagataagccagggtgtgactggccaacagggtagactcgaagtggatgccccagttcaaggacccactgtgtctcctctctgggtctcccccaggcctggcctcctggcagcaagggacctaagcccccaccccccacacatggcctttctgcagctgctctaggtagacatgagtcctcagcatcagtggtgcacggatgggtgtcagcgtggaccctcgggtcagcctccaggtcccatggtcgccctgtttcaccctcccaggacacctcccatttccacagacgagagaacccaggctcatgacatatcccaagcccaccccacagtccccaggctgccccttgaggggtccctgaactgctctgtcgccccaccccagggctgtaggtcacaggagatctgctcttggtgcttcacaaggcttcgggtcaggcgcatccccactgggggcagctgctggccctgacagcatatgttgctttctttctagctccgagcacatgctgtggacatgaacggcaacaaggtggagaaccccatcgacctatacatctacgtcattgacatgaacgacaaccgccctgagttccttaaccaggtgtacaacggctccgtggatgaaggctccaagccaggtgagccctgagccccgagagagggacattcccgaggagggacacgcaggccccgccgccatgatgacacctgagactcatcgcctatgagtttattttagctcccactgcatgccctagagagtgggcatccctgctccacatacctcacagtccaggccaggcacagacagaggggctgaaacaagggagcagagcccctgcagtgacgatttggctcaggagccccctgggcgctgagtcatggggacggcagtagattaggggaagtctcctctgcagaggtgacctgtgggccaggagctgacttgtgatcagaagcagcactcagaagggcagggagggagtctggtggcagggagagcatgtgcaaaggtcctggggccagtcagggaggaggctggccatctgaggcctcctgggcacctttgggcacagcgggaagcacctgagaagactgactccctcagcctgaagaagtgagctgtgtggctgaggcccttggtccccctcagagctgacctaagagctgacccgtcttcccaaggactcctgtccagcataaatgataacaaccgctttacaatgtctggtctctggatcccata

SEQ ID NO: 43099 - DNA, 1701 bp, Bovine  19866881046554
  misc_feature (1)..(1): n is a, c, g, or t
ngcttggggctcctttatcccccaacctggatgagaggccagctcttcagtacgggccacatggggcttggttctgacccagttcccacactgtggagtgaccctgactccagcctcatgtttctgaccctgtgtcagtcccatccactttgccacggtgcccactgcccctacttggggtcacgtagtgggatgaatggtgtcccctcaaaagataagtcacatctggatcctgtgaatatgaccttatttgggaaaaggatctttgccagtgtgacaaagctgaggaccgtcctgattggggtgggccctaagtcctgtgacaagtgtccctataagaggacagaaggtgggatgcagagaccatgtgacaatgaaggcagagcttggagggatgtggccacaggccaaggatacctggggccctggagctggaagaggctggaaggaccctccctagacgttcaaagcctggccaagccgacacctgggtttcaggtgtcgggcctccagaatggggagaggatgccctcttgttataaagccactcacttggtaattggtcatgaccctagaaaaccaccactgtcacgccctccgcctctttatgtggtggcgatggagaccctggcaacctgctcagggggacatccgtgcctggggctgcctctttccacaccagggtctcctgtctgcttgctcacctgcaccccttgtagagcctccatctctctttcttattatcatcctgatgtgaaagtgacctcacaccccagcctggcctttacacagtaagttagaaccaccaagcctgaaaattccattcagcatctagatagttaacaagtgaactctgcttccagttctcatttcttagttttttatttgcgcctctaattaaaggaaagatttggccagagggatcagatacgccttctattagacatttctgctgataatggccatgtttttaaatagttctctgaaagacatcttctgattgaggttttcccattacttgattatgtaaaactcaaactggggggaaaaaaagaagaagtaaataacttacattcctttgagtgggtgggtgggtggctcaaattttcaaagtgggactttccagggtccaggccctgctggctctgttggactgccccttagtaacgatgccactttgttctgagcttcagtccaccttgggagggatgttgaagcacactttcccctcctttctcctcctctaaaagatcttctcaccagtgaatgtttttgtttatcatcatctgctggttcatgtgcgatagactaattatttccgcacagcctaaaacaagcccagagtaattgtctacaattttctgcacttgctttctcccaaagaatgtgtttttttctctcttaaatttcaaaacccaagtttctgattaggctctggtgatgtcatgtataaaacgagcaggatttcgtatccagtgtcaatcacaaacgtcctagtgacctttctgccctcaagggtccttggaaggataaatcagagggagcctcatccagtgggcgtggtggtgtgggggctgggatcacagaccctccttcccctccacacttaagatgctccacgctgaggcctgcccaaccttccgctcacagagagcaccattctaaatctccatctgccgccttcagacggtggcgatatca

SEQ ID NO: 43100 - DNA, 722 bp, Bovine  19866881094866
  misc_feature (1)..(1): n is a, c, g, or t
ncccatgccagctgcaagggccaacgccgtggctgcccctgtccaggggattgttggtgagcttatacaagtgtacaagccgtcccaccatgaggaaggtgaaagtaatctctcgatgcgagtccccgtcacaacccaggggaagatgagggatgccccgggggagagggatctgaactgctctgtcagacttggcaggtatctgcaggcagagtcatacaagagccttgaatccatacgtgtttttcctactgatagaaaattctgctttcatcacccagcaaactcagcgcagattaattaaacatgagatggtgattaatgtttgaagaggagcgggagtttgggctatgctgttggtctgtctccgggtgagtcttggttctgctcgtactaatgactccttacgctgcaggtttcagctccgggttcagggacaggggtgagagtccatgctggacaccaggcaaagcagccactcagggggatgtttcctgtgcatgtccatctccacaaggagctcggcgggcagccttgagtctgctcccccgaggctcacaggttgtaccaggaggtccatgtaagtgggtgttcaggtctgacttgcctcttgcctgtgcttcattttcaggccactcttcttgcttcattccattcctctgagactggtgacatgctctggcagctgtgatggaagggggtcctgggagcgggtcctgaag

SEQ ID NO: 43101 - DNA, 1845 bp, Bovine  19866881143917
  misc_feature (1)..(1): n is a, c, g, or t
nggtgtcatcccagcccgggcagtggagacttaggcccctggggtggttggatcatccagacaagggtcttgtgtctccagtggggctgcgtgtggagttttcctcccgaggagctccaccaagacagggaagaggttctgtcagcaggagagggggagccgttgagaacaatgtttatccaggaaaaggtacaaagcgcttgcctgtgtgcgtggaggccgatggagctgctgaggaagagccaggctgtgcccgtgtccctgccgagctgggctgtcttctcagctgggtaggtgggaggtgaggggccgaggagtgagtgtgcagcccgaagaggagagggttcgctgtagggggtggaggctgcgaggatgtgcgggaagaggcagcagtgtggtggtcaggactgaggggagcagaacaggtgcaagtcacccaccttgcagggaaggagcgtctcagtagttatttccctcaggttattctggtcttcttggaactagaaataacccagatggcacctaggcgttgtgtccagactcaagctcaatgtggtactcgtggcgggcagaacaagggcactccaggaggtaaatctgacccccagaacccgtgatgatgtcacctgacgtggcaaaggggaccctgcaggtgggagtaaattcaggagatgatcctgaattatctgaaagtgcatgtgttactcactcaggtgtgtctgactctttgagaccccatggactgtagtctaccaggctcctccgtccatgggatcctccaggcaagaatactggagtgggttgccatttccctttccaggggatcttcccaatccagggatccaaaccgcgttccctgcattggcaggcaggttctctaccactgagccacctgggaagcccaagtaaatactttcaaagtcacaaacaatgtagataaacattatatgccatatattgtggtggacgtctcaacatctagtagccaggaaggagccgttcagtcgagcagttttggggtctgtatgagtttttcctggactgacacatggagcgttcctctcctcaccgctcagcctggtcacctgtctcccgggggacagttcctctcatggagcctcagcatatgcttatgaaggaccatggcctctgggagttggggagggagcaccctgcctctggtgccccccttcctgccccacttctgttggaaaaccagcgggtcacgttttaggggggggaaatgtacttgatgtgaagtggcctctgagacccattcaacccgagcatttattaaccaatctcttggccatgagactgaagggagagaactcagacccctaatgtgctttaaggagacttcacagggtggaaaaacacccaccctcacatcctcactgcttttcccctctttgagccacacacagccaaatctgagactgtggtaattcactgggtgtgaattacctacacattatacacagcacttcaccactaagtagctttctgcagggctcaggatgcattttcccttttgtccaaatcatacgaaatactctttctgaattgttaagattttctgccacgcataaaaatgaggcttaaatcacccaaaatgcagccaaaatgcagtagataattctgagaactttacacctgtgcatatgatttgaggaatctgttagtctcccacccctgaggggataacggggtactgacctgggcgtggaggaaagccatggtctaagcatccttgcccagaggttcagggctgtggctgcccctacagagccccccaaaagagcctcatgggtgtaaagaaggtcagggcccttcgcagcctcg

SEQ ID NO: 43102 - DNA, 1325 bp, Bovine  19866881160137
  misc_feature (1)..(1): n is a, c, g, or t
nacacacacacacacacacacagattgtaagtgatgccttttcctctgcaaaaacctaaccaggctcctctgcctcttttctccctttctgcagaaaggaaagaagaacacagtcccggaccccgtccagcctccgaaagacacgctgctgccatggccacagcaccagagctccaatgggctgagaaggcagaaacgggactgggtcatcccacccatcaacgtgccagagaactctcgcgggcccttcccgcagcagctggtgagggtgagtggagagcctcctgccgagggggctgctctcagctttagtctaggcttcttctcccaggatgtcaagaattgagcctgataggcatattcctggagcttgggatggctgtgcactgggtgtctgagaagatcaagatttcgccttttcagtaacaagatcagtattgcacagaacagaaaaaaatcagaagggcggtcgcatcctccagggtggacaggcctgctcgctttgggtcctctctctccggtcactgtcaagtgacaactctggtgcttgggaggagatgggacaggaacttgggtcgtggcccttgacctctgacatcttcctttgatctgtttgttcacacttcttccccattatgactaagatgctaaatggagaatgatggcttctctgtgctaacagtgaccttggtgaagtcagagagcctgagaatgagcctggggcgccagggggcagttctgtgtcttttccctcggtgtcatctgctcctgacagccaccatgaggttgcttttcctgaaggagggaaagactcatttcacaaattcatgtttcaataatcaaggccatcaactagcattttcttcttccctttgaatgaaaattgcaacccaatataagcaataatttgataaaatggtagtgagaattccagtagataatgccatccatggagagtgccttgccccactctgttattaaggtgttatcttcatttcttggcctgatttgtctgttttgtttcctattctgtttgatgcaaaaagggagggtggtgtttaatatgcagagatgaagctgcaaactttgcagggaccccaggtcagacaccccaccacacacacatcacagccacagtgacatgtcatgaacatcatcctgccttctccacacgtgatgctgtgacttaagaaatatatagtttggtgttcatccccgttattcaccagaacccctaaagcctatgcagtttcctaaaagataagagtgaaaaagatgtctgcagacattcatagcaaaccctgtctagcacagctgagtttatg

SEQ ID NO: 43103 - DNA, 852 bp, Bovine  19866881229029
  misc_feature (1)..(1): n is a, c, g, or t
ntagcacacacacacgcaaacccaaggtgtggggttcttctgaggattaaatgaaatcatccaaataatgttttgctctgagtgttgggcagacagtgagccttcagtaagcattcatgttgagggcctcctatccagggaggtttcagtacttgcaacagaagaaaagaaggaaacagagggagaggtggtgtcctagactagcggaaagagcagaagctttcaacaaggaagctcacactaccccttaggaaatattctttgttctgttgtggcccccggactcctcttcatcctctagcatcctccaggagatgtctgtccttgtcagaggttttcagcttttggtgggaacttcatgcccaaggagaaacagaaggagagcagttactacccttggaggaaattctgctgttaagcctctgcttaactcttttggatgtaaaagtcctttaaagctatttttgaatctaattttatattaatcttttaatgtgattggatttaatcatgagtcttaaatctctcacgttgaatgtgtgagcatccatcaaacttgctcttggaaatgccttcaggtgggtttaaggacatgtgctcttcctgccctggaggctgaacgagtcatcctgttcctagagatactgttcctccttgcacatggagccggcgttgagtccacgggaaggatgagctgattctgataccctcgtggaaatgtgcaggatgaatgagttagcctgggtctcctgcacaatgatgctaaagcttcctgggcatgaaatgggtctcttgggcagagtatccacggtctctctgcctgtctttaagggtacttggggtccaggttcc

SEQ ID NO: 43104 - DNA, 1306 bp, Bovine  19866881303496
  misc_feature (1)..(1): n is a, c, g, or t
nataatgtgccattggttgtcttcctaagggcatggttactcctcttctgactttaggaaaccccattcctgttcaggcagcttcatgccttgagcagccaagcatcaccatcttgctctcatgccacccatttgctgcaggctaggtgactcatgggcatgaagtcattcctggccagtaacacatgatggggagactgcggaaggttgaaaggtggtttatgtcctggttgaaagatagacagcaaagctaatccttccttccttctgtcttgaatatggttatgggtggaagtgtcactcaaggacatgcaaacacagggctataagcccaggattaacagccccaaagtgccaaagatgacagaggaagagaagaggatgggtctgggtccctggtggaccactgcaccacatctgagagtctctctttccaaactccctgctacaggagaaaattacatatctttcctgtttgacaaattcttagctggtgattctgttgcttacatctgaatatgtcttaatggatagaatcgcacaactaacccttagttctgtacccaggcagccctttctcatttcccctttgacctcctggaattacttctatgtgcaaagccagagagataagattgtggttcctacagagcgggcccctgttcatccacaataactgggggccaggagggtgaaagacagagtcaggggtgagaaagtaaattaagaaaactcagctagtcctgcttctctaggcgatttcttcccagttgaactctctgcacctttttgatttttgccttgttcttaatgaagtccttacttgggcaaactgcctagcaacttcagttggcaacttgaccctggaaaattccttaattaaaaataatgtgattaatagctaggcgtatatgtgctaataaataaactttagctgaaaataaaatgtttgagactcagggggaagggttaattttttgctttgcccaggaagtctgggtgcatctcctcttttctaaagaggaggacagtaaagatgagtagcccagggatcagctcattagggtgcttaataagtgcttcatgaattaaggagtagcaagatagacacattttcaagatatggagacaattaatgaaaaaagaaaccaggaggaggacactggggtttcccaacttggggcctggggtggcactagggctctcatcatcaataccctttgtgtattgaccattgttccaggacaggggggtgtcagatatgggacgagctgaagcagagccaagggattaatggagcaggttg

SEQ ID NO: 43105 - DNA, 724 bp, Bovine  19866881399859
  misc_feature (1)..(1): n is a, c, g, or t
nttctgaagcaggctggcttcccttgtgtcagctccttggagccctgacaccaggactctccttgcagagcgcttgatggagatcaaagcttgtgtgtgcatcctgttatcctggagcctgtctcccccctgccactttcaacgagatttccgagtcgttctgggcaccttcagaggaagcagagctctcgctctggctggctcatatggagcagctcaaagagaagtgtctttgaaagcttcctcgcctgtgtactgcttccgtgagcgcggcctgctttcctgggctcctggctctggcctgcaactctctgatcatctcatttccaagtcctttgtgcagagtcctagcagccggctcaaatgggagcaattagcttcagtgggtaattaggcttctttgctggcactgggcttgagctgcaggacataatcgacgatttttacttcaagtccactttgtatcacctctcccaaacctgaatcaaatggtatggtgtttagaaaaaccaattacattccaggagcttccaaaacactcacaatatgttctaatgaggcttcttgccgttagctttaacaatgaatctcttccctatctttgttattcaacatttgcctgcttataaggacttaaaagctgatgcttcaacactttggccacctgatgcaaagagccaactcattgggaaagaccctgatgcgggaaacatgagggcaggag

SEQ ID NO: 43106 - DNA, 1544 bp, Bovine  19866881469727
  misc_feature (1)..(1): n is a, c, g, or t
ntctggtgattttttacgttttttcccttgggctgtgcttttatccccaatatcaattagtcttagtacttattttcacaaaaccttaatgtaggtaagtggtggggatgatctagggccggtcaattatttctgtggtaagtataatccaagattaattatttttgcagtcacatggcaaatgcatttcactccagaatctacatttcattggcaaaacgttgtattaatattttaaagcagagaaaaaggacaagaagacggaagacttattgctgctgcctggcggggaaattgtcactgccacattcaaataggctctagaactgggcgagattccctcgcaggattaaagggatcgggaaaaatgaagcagctcaggggcagcctgcagagcacgtgtcacccgtttgtgtttgtacagtatttgcttttgtttctcagggagattattctaaatcctcacgactcacttgcatctctgcatcagtaaaggtaaattcctctttaaagaaaatcagtattattggtttaaccttctagcacgatccgtgtgcagaggcccttctgtgcctcccggagaagaccctgcttggtcccgggacacggtaatgagacctcgtgccaagcagcttctagaagctccaggagcaaacgtgacttttcataatccttccacgggaaccggagagaaatcaggaggattttctccaggcctcctctgctggtaactaacctctgggcagaaaactggagccaaatgagccttttgtcatttccgtttgaaatgagatacaactttcaaaactaatcctgagaagctggagatgttagtgtctacccagcacattgtatatgtaaaatcagaatcatgacagaaggataatataatcacactgctatagtgtgtgtgtgtgtgtgtgtgtgtgtgttgaaacagggttgagaagagctgacttacgaaatgttctaacatttaaaagtcatgacagcaaacctcctacatacataaggcaaaccctaacatacctggaaaccgcacagcttattttcagcaaggtaaatagtgcttcggaatttgtgtgctttgcttttcaatgaaagcagtggcatgttctaagtcactttagtcatgtctgactctttggcaaccccatggactgtagcctgccgggctcctctgtccatgggggtttccaggcaaaaatacaggagtgggttgctgtttccttccccagggatcttccaaaacaagggactgaacccacatcttttgcatctcctgcaccggcaggcagattctttactatttgcaccacattttaattctgtaatcactgttttcaccagatagggtttctcaataaagggtagttttctctctcttctgaggaccagagtccagacacatcatcagaactaggtaaaaatttttcatgttccccacaaaaactgggcagagaaacaatggatgaaactgattcagattcttccagaaaagtttaaatataaacatgtgagtcagatacttagtaacttttcta

SEQ ID NO: 43107 - DNA, 623 bp, Bovine  19866881525875
  misc_feature (1)..(1): n is a, c, g, or t
ntttctggatctgcacggggaccctctgctgccttcatccagcttgaggcctgagcccacagggggctgggaacgcccatcagtcttgtacttttcgggtgtcttcccgctaacccagaccgacctcctggcctcgcaaagtctttggcctctcaggagttagccttgagacccaagtggatttgaaaagcacagagggaggggctccaggctgcatagacccccagggtgaggaaaagctccaggtccgggccctggctgtgatcaggaccaaggaaggggcctgtgcgtgcatcaaaatccctggttaggcctgagaagccaaaaaagacatcggaggacttgagaaggtaaggcggaaattccctctcagaagagctgtcaggacggtcagccggactggtttgggtgatttctgaattgaggggacctttctttaagggctcatcaagtgaacaacaggtacagcttgaaaagtgagtaaatgtttctgcacattccctttcggtttggagattgtttgctcagatattgcaaatgttctttgtcttggtttggagggctctgtgtccagaatacattagttctggtttaagaaatacactgccaaggaggggaaggaa

SEQ ID NO: 43108 - DNA, 1435 bp, Bovine  19866881656324
  misc_feature (1)..(1): n is a, c, g, or t
naacccttcacccacaatgctccttcccagcaaccgaagtgtccactcgcatgtgcagcatttaagcaagaaggaaataagatttcagaactgataaagagagaaatgcagtaagacagtgcttaggcaactgcaggagagatgccttcctgatagaataaccacctttcaaagtgagaaaacaatgccattttctgcccactgagcaaagcagctagacgaggggggagctgcagcctccttatttagggagcagcccctctgctcccctggggctggaggaagtgattaattagtgcctccttgaaactgcaacctcagaccaactgggggactttgtctgcgcacagcacagaatactatctttccagaagcctcttagaactcaacaatggagcatgtctcctacagtcctcagtgccagtcagggcggccagaaggacggaggcacagcttgaaaagagctctcttcttggtgcctgttttgtgtggagaggaaaggccactcaggacacaattttaactgaagaaggaagccaccaaatcctcaagtccactcccaggtcccttctctcctggtccctctctctctgcctggcaccccctcccatccctgcccccagtcagctgcctgatttaaacacagcctcccaaacccccacctgcttctaaaccaaacctgggcacattgaggcgacatctgtcatccttcaagttcatctttcaatcaggaaaaggcaaaaccaagactccctcatgccatgatggaaccagcttgcggaaaggcacaacctccaggctgatggtgctggaaaatccaaattcctattttaggttcaggtgacctcgcccactgcgtgaggctgacaggtgagcactaccgatgctgtgtcaggtgagcacggaggattctcaggatttaaacgcagacacgcgactctccaggctggagtctcagaatgtaagatgctggagcaggcctatggcctcacgccagcccgtggggaactcaatcctgcttgcagagaaatcagaaaggcagcccttggcccctcccttttgctgagtcagccaggctggacgtgagggcggtcttccctcgcttaggacgaaggagaacccttatcaagggctgcgtttaatcccgcagaagatgctggacccagaggacactgggaaattagcacacaagggatggttctttacttgtttcctctaagtgcagggcatctgctctgccctcgcaaacccgcctaccagacacagcacagaacacctggagagaggtggaggggcacaattcagagggttttcccctcccatccctcagtctgtccctgtgaaactctagaaagttccagaatctctgtgtgctggaattccaaaatgtggaaacaaccccattctaaccccaggggctgcaacacaagcctgt

SEQ ID NO: 43109 - DNA, 1309 bp, Bovine  19866881987005
  misc_feature (1)..(1): n is a, c, g, or t
ngcacagagccttacacatcccacccatgaggaggccctcctcctctgaacttgttcagtcacaaggatgtccaggaagacaagcctgacagcagctgtggttccctgcctggcgcctcctgacttctggactagagccgtcaccagctgcagccacctttccaccaggcatcctggaaagtatgcgggaaacgcccaggaacctgcagtcgaggggctccctgctcttccacagtcctgccccagcaccacgccagcctgtgtcttcttagagaaggttccatctgagatgttccttcacacagaaacttctgcggcccccaagtcacacagcccacccctctgtcgcgcactcggcttttggttgcccccgcttgtcgggtctctgaggtaccagtctccatgggacgacagagccgtgcgtgtggggcggtggccatggggacaactcgggatcctcccctccaccctgatggagatgctcgagtcctgcactccctcggaaaggagatggcccctgagtcagccagaaggaggggcgatgacacaggagccatgatcaggaaagatacagtcccctgatttgatggaccacacctcaccatcaccctgagtctggaagtgcaagctgcagttccctcattcttgtgcacactgatccttaaagagatcgttaattcttccctacattaatgattacaaggtctgttgggaaacgtagagctggctgggcccagatacatgctttttccttaagacactgcaaagagacaagaggaaacgcctaacggaggatcctcagggagccgacaggcagtgtcttcagcagaaaattttccaactatctgccatccattaacttatttttctttacaaaatattaatactggaaacttaaaagttcgtacatcagctgcacttgagcactttgaggtttaactgatcataaatgttttccattgtgggaagttgctcacttatgaaaacacacaaaatatgtggatccatttccagagcatggaattccagcactgtggaagggcttcttccagcaagaggtgggtgcccattggctcttgcacactctgggcaggcagaagtcagcgttttcttactgaattggtcattagacagcgcccagcagtaggagttctcacttgagaaagggcggggagggacagtgccccaggtggggtttgggtaggtggcccatccctggggtctgcgagaacagcgccccctcacaacatgagaacctggcactcgctctgctcacctccacaaacaagagggtttaatttttccgtag

SEQ ID NO: 43110 - DNA, 752 bp, Bovine  19866882095381
  misc_feature (1)..(1): n is a, c, g, or t
nccacaacctactacctcatctggggaggcctcaggctcagcaagcaggggaaggagatgaatcgatactgtgttatcagccaagcagtttgattcctgcacatttaagcacacaagtacctcgaagcttgatcccctcaggtcaatacagttttacagagatgcccccttctcagcagtgcaatgatacaggaaacaaagcagaagtctttggtgggcatccttggcaccctgacccccaggtgaggaaccgccaaccttgcaggtgcctgctcagtagttcaccagatgacagcaaggggggcttttcatccaggttccaacatggagaagagggccaggagctgaaatgtgaaggtctgtgggcctaacgggcacccagtgtgcagttccagtggggactgcagctggagtggtcagccctgctctggcttcatcaaaaggcctgtgagccgctgtgcagaaaaagcacaaagggagaggctagccagcactaaaactcccggtgcaataattgtcattgttatccaattatgctcaggatacctgaagctcacatggcccacagaggggcaatttcattagactgagacccacttgtctcactttactttgataacggcttaataaataaactgagtgagtcctaacaccgaggtgccaaatgaaaaatactttggcttttccattttatgcccctccttctctaattatctcactttcatattttccttgcttgtcagctccagcct

SEQ ID NO: 43111 - DNA, 4857 bp, Bovine  19866880415951
  misc_feature (1)..(1): n is a, c, g, or t
ntctgctgcgtggaggcatctgggtctctgacatgtatgactcgtgttccagtgctgttttaacactttgtttctgtaactgtttgcacttctacctgctttagtttagttctgttcagtcgcttagtcatgtccaactctttgcaaccccattaagtaggccaggcctccctgtccatcaccaactcccggagttcacccaaactcatgtccattgtgtcagtgatgccatccaaccatctcatcctctgtcgtccccttctcctcctgccctcaatctttcccatcatcagggtcttttcaaatgaatcaactctccacatcaagtggccaaagtattggagtttcagcttcaacatcagtccctccaatgaacactcaggactgatctcctttaggatggacaggttggatctccttgtagcccaagggactctcaagagttttctctaacaccacagttcaaaagcatcaattcttcagcactcagctttttttatagtccaactctcacatccacacatgactactggaaaaaccatagccttgactagatggctacacagaagcaatcattctgttctcaaggcagcccacccttcatgatttagatggaccagtaactgcctaaaacgagtgagcttgcttggcctgggttccgtaaaatgctcagcttggatatgtcctccttgtcagccgagagcaccagcttagcctctaggtgctcacccgtgcatgctttgtccatgaccgtgtcaaccccttcccatgtcattgcccagatgagtttttataacctgtgtgttttcgttcacttttgtcttaagaaggtatgtgactaatgaaagcataacaagcatcctttgtaggacacaactgatcattcccaggacagcattctatccaactaactactttttgctttttgtctgttaggagtttcttaaaaatcctactataaacatcgtcctccatttagaaagtatttccaaaggagcaaacatgtttcctccttggttgagggtgccagtaggcagtcctcatggggagaaatggatcaggaagaataggaaactttctcacaattgttcagagatccacacagtgggagataatgccaattcctgtatgtagtcacatttggtcaaacagaatgaatctgtccacatgctacatgcccaattgacatgaaagttagcatatagtcaaccattgtttataaaataatattatgcagtagattacattaccttgggagaccttaacttgtttggcttgagaaagattactctgggtttatgctttctcattaaatcccacaacaaaaagtataatcatgcatagaaaccacttgcttaaaattcaaaactcttctttgaaaagtcaataggagcacagaattacaatctgtattgtgcttatcttgacaccaaacaaccaccaaaataacccaatctgaaactaagggcagtgttggcaagtcagcagtgttaggtccttgtcaccagcagatatgtacatatatacattcagagctgcaggaggctggagccaggtgttttggggaatgccatggccatttcagatgtcctctggtgggcacatgctatgccattccaatctgctgattcctgaacataccaggattcacctgaatccctttggggccagacctcatcacaaaccatagagagcatgcctgtggtaggttatggtccctctggaagttagaaccaggtgtggggctggctccagtgatttgaaaactgtgtaaccagtcagtttcatggccatgtctaatcaaggtaagtctcagccaaaaaacatcgtcttggcattccgagagcttaatgtgctgtgcacatgtagggccaaagccttggggccactgaacacccccaaattaggatcaagagttcatgcaagtctggctcttcagtctcagggctcagccagatgctttcattcattcacatgtgtgcaccagtgtccatgacaagaggaatgggtacagactgcacctttgagcatctcagtgatatgaccccaactactcccacatgccattcagggagcagcaccttctcagatgatcacttctcagcctaacagatgaccactgcacacactgtacacttgtcatctccaagtgactttcccccctctttttggccccaggtgtgttgaggtacacagcacagcagatgggccttgatctgatgactgtggctgctgtactttcgtttccagtgtttcttgcatgaacctgtcagggagagttagaaggagaggagagatgcataagggaagacagaacacagaagtagagtgaagaccagggcagaagggctcctggaaaatgaagctggaagaggagctggtagtgcaacaccactgggaggagagagtgggagggcagtcagaggggagagtgggggcagccccaggagagaccctggggcagagagtggtgggtggggcttccatgtgccaggtggtggggagccaggaaaaggatgagggtgagcgtccacaggtgtcagaggcaccagtgagaaaaggcacaggatggaagtgcagggaggagacagcatgaagaacaaagcaggctttatcttgccaacagtcaaccattctgggcctcctcttaagggcttggggtctgttgacagtagagtgaatctcagccaagacctgtggacccagccagttgtgatatctccttttcctcagcatctttccttataatctgtgctctgggaggtgagctgtgctcactctgtcttgaccagaaataaacagtgggccccgtgcctaagaacactgatgggactgaaaagctatgcatgggagggtttggtgctctgggacctgccacccacacccttcccctgtctctgcacccagacatgattatccagaaggagcaaagcagatggaacgtggggagtgaagggactttcccccaacatgcctgggtgtttggtgggtgccatgggaggctcgggggttgctgaggccaggcggcaccctccatgtctcccaacagcgagcccaaactgtccacgatgctgtagttgtgccaggggaccatagagaccatcgaggaggtggaggctgagcaggacgaggaggcacccaagcaggcccaggaagctgagtccccacaggatccaaagaggatggcgacatggaggccctgctgtcctacagcaaggccatcagctttaaacgcctgtccttccacctatccaggatgacacagcaggccagacccacatggagggcagctcagatgacagccactcagactggctggaggccagcatcttgccacccctgactcaagagtggacaaccagcaagctgctgatgatcaaataagaactgtggccacagcaatggagctgagagtgacccttagtgtccactgggctgctgggtgcaaagaccacatggaaaaggtctcctccacatttagaaccacatgcgtgctcatgtctgtctgtaacatgataggaggttgacagcacaggacacctggggactcaggcagcaaggaggggtgggcagggtcttgccacgtggaaccagtgcccaggaggaactgaggccagtattctggcaggatgttccatgatgacgagctggaggagtcggagaagttctatgtggggcagtcatgcttcctgctgctcttctatgcgctgtacaacatgctggtggcccgttccaagatggtgtgctactttctcatcatcctcaaccacatggtctccgtctccatgatcaccctcgtgctgcccatcctcatcttcctctgatccatgctgtccatcccctggcccagcaggcacttctggatgatggccatcatctacacggaggtaggcttccctttagtgcacctgcctgacccctgcttcatgtaaatagtcaattagagggattgtcttaggtcagcacgtgattatagccagcagttgttggtgctgagaactctagctatcttttcacatctcacacctcacacaacataggaggtaatatcattgtgtataacaggaacaaggaacaacctttatgagattaaataattggctcaaagtgggcttccatggtgtctcagatgttaaagaatctgcctgcaatacacgagacccaggtttgatccctggttcaggaagattgcctggagaaggaaatggctaccccctccaatattcttacctggagaatcccatggacagaggagactggagggccacagtccatggggctgcaaagagtcagacacaactgagtgactaacactttcactttccccagctggtgagtggtgggggaggctttttgaggtctggtgtctgccctgtgatattgaccagcaagacagtaagtgtgaggcagacacaaacatggtgccagggccagtgcatggtcactgagtggacattgggtcaaacaatacagtaagcacttgaaacacagttggatgcaattaaccctaatgatgaaaacattggaggggtgtttcaacatcaatctctacaaacatctccacgtttacaccctgagctggcaaagttttgtttcatttgcttttatttcttcttgaggagaacttacagtgagcaataaaatgctgagaagaaagagaccagaataaagtgaaaattgtctatagtgcctgtgcagtttgctcctaaagattatgaactaaagtcatatttgcagaatgaagatcctcctgttcacattggtcctaatgacctcatttaatagctgaatatttgtataagtatctaattgaatcagcacaaactagcccttgcatgcatgctaagtcacttcagt

SEQ ID NO: 43112 - DNA, 1729 bp, Bovine  19866880625894
  misc_feature (1)..(1): n is a, c, g, or t
nttcaggagaaaaaagttatctatgagcttccctggtagctcagttggtaaagaatctgcctgcaatgcaggagactggggttcaatccctgaatcaggaagatcccctggagaaggaaatggcaacccactccagtattcttgcctggagaatcccatggacagaggagattggtgggctacaatccatgggtcacaaagagtcggatacgattgagcaactaaaccaccaagggctttgaagctggttcccgactgatgtccacacacacgccattagtttggaacattgcatcccccgggacacccagagtccagatgccatgttctcactcagcaggccaagtgcgtcccctcccaggagcccggccagtctcccccttgatgttttggggggaggggggcaaatgctgtccagacccaaaaagcagaagggattacagtcagagatcattttgaagtttaatgtcttggaacgttttttctttcaaatctgttattttaagcacacattgtgatttaatgactcttttggggagttcagtctgtggttggggctcggggccctgaggaatgcatgtttaattttttttttcatcctataaccagtatttcatcttagactaaatagatgcacattttagaaatcccacagaatcactgaaagaaacactgctgtttatagaaacgcatacatgtttgggcgaatttagctaaaggaaacagccagagctggttccagaggcatttaggggcttccttcatctcctcccagttcctcccattctgtatccttacaggacttacgcgcatgcccagccctgtaacttgtctgcatacctggtgccaccattgattctggtctctgtgacataaagaccaggtcccgtgcttctagacccagcagccagcacagggacaggtccctcgctgcactgggtgggactctggctgagtttggacatatgggtgaaattttcatcctctctgaagacatggtgaagtgaactggtcagcgaagtggacagagtaagagagaactttgcagtgggaactctgacaaacagaagtccctctgcttattcctctcctgccccctaactcctccaacagcagcacaggaaatttcctcaaaacttcagctgccacctcttcaccacatcgacagtatcactgactctgcctaacccactgaaaaccaaaagcaaaaggagtcctaaaatacaatgtgcaatcaacacatgagatttaagaggtcatgcatttctgctctttgtctttcaaaaatgtttgagtagtcataaaacagatatgagggcttccctggtggctcagatggtaaagaatctgtctgcattgcaggagacctggcttcaatccccgggtggagaagattcccctggagatgggaatggcaacccactccagtattcttgcctggagaattccatggacagaggagcctggtggactacagtccatggggtcacaaagagtcagacatgatatgactcagctaatgaagtaataatgaaatgtatagttagcctttctttggggcctctttctctgaagtttctggcagccacacggtttatccatgctacatagcatctgtaattcagcactaccgttgcaaaaagagcactataggtaccataaaatagccttggtctactgagtggaactgacgggacattattagcatcctaggtgttcagggggtcag

SEQ ID NO: 43113 - DNA, 745 bp, Bovine  19866880798719
  misc_feature (1)..(1): n is a, c, g, or t
nttggctttgcaagtctggcttgttcctatgacactctaagtatcctctttgaaaagagaggtatttcccagtgtagagagcaccatgctgaggcttcttctccttgcttcttgggtttaactcccagaagtgaaacaccaagcacttcactgggtgggactggattttaggagccatcagagcactgagctgtggggaattcctgcgtgtgttgggattgaaagacatcaaccttgttttctgggtgcagagtttcaggatactcctttcccatttgtttttcagataggagcgtgtggctgtattgaaaaattggttcaaaaaagttaatggttgatccaagcattcagcctggcctgcacagtcaagggatacacaaatgcatgagtatgaaaagcagatttgggaacagagggacagagaagggagggcagaagtagtgttctaatttaaatatctgggtcaaagcccctgaaggaagaaaatgaagggacacccaactcagtgtcttcatggagctgtgggatggtgcctccagggtatctgtggtcagaacacccctacccctaagataatctttgatcttcttctacaaatatcccatccctcttcccaagcaggtatttagcaactccctgaacttcctgtatttatgatggggaaatgtcacagatgcccatggacacctatgactgctgggtggatcatcagaggagctctgcctgcagagcccccaccccgaag

SEQ ID NO: 43114 - DNA, 1523 bp, Bovine  19866880848123
  misc_feature (1)..(1): n is a, c, g, or t
naaattaaaagacgcttgctcctttgaaggaaagctatgacaaatctagacagtgtgttaaaaagctgaggcatcgctctggtgatggtctgtatagtcaaagcaatggtttttcatgctttggatttgtcatgtatggatgtgagagttgaaccataaagaaggctgaactggggtgctggaaaagactcctgagaggcccttggactgcaaggagattaaaccagccaatcctaaaggaaatcaaccctgaatatccactggaaggactgatgctgaagccgaagctccaatactttggccacttgatgcgaacagctgactccctggaaaagatcctgatgctgggaaagatggaaggcagaaagtgaagagggcaacagaggatgagatggttgaatggcatgatcaactcaatgtacatgaacttgggcaaactctgggagatgatgaaggacagggaagcctggtgtgctgcagtccatgggggtcacaaagaatcagacatgacttagcgactgaacaacaacatgattattcaagggattttttcaaaagtttaccatacatatgtagtccagcctccagagtacccctgaaaggagacaggtcccgtagaagcagcatctaagtatggaacaggcatgtagacccaagcagcctccacgacacatggcagagctgagccctccactcgcctgcaggctgagctctgggctggggagcccttgatgcagcaaatggaggtgattccagcttggacatgtggtcctgacaacatgtgtcacgaacaaagttaaaatgctttccacccgccaaggggaggaggacccccttgaaaggcacagtttcgaatattcaggaatttaaagtaaaatgtctttctcccacctgatcccttaaaaccaggggtttattcagcagaagctttggtcccttggtccacaggtctgcccccagcaaacccacagagtccttttaaggaaaaaaccactcaggccccagtggaccctgtaggggtcacagagcaggctcctcacagcccagcattgctgcctcccttgttccagggctgggactgggtgcattctgaacagattcaggactcagtcccaggcagactttgtggtcatagtgcccgcctctcctggggacaccacctgagcatgccaccctcccattgcagaggtacccgcagccccgggggcagaagaagaagaaggtggtcaagtacgggatggggggcatgatcatcgtgctgctcatctgcatcgtctggttcccgctactcttcatgtctctggtcaaatccgtcgctggggttatcaaccagcccctggacgtctcagtcacaatcaccctgggcgggtaccaggtaaccatgcctccctccaggtctcccatccccccacccctctgtgagtccttgccgagcgcagccctctccctgaccaccggatgacttactgaggttctgtggacccacatctcctgtctgaatattgacagttctgcaaatatgt

SEQ ID NO: 43115 - DNA, 1792 bp, Bovine  19866880896255
  misc_feature (1)..(1): n is a, c, g, or t
ncgtcccagtgcaccagtcccaagcatccagcatcgtgcattgaacctggactggcatctcgtttcatacatgacatttcacatgtttcaatgccattctcccaaatcttgccaccctctccctctcccacagagtccataagcctgttctatatatcagtgtctcttttgctgtctcgtatacagggttatcgttaccatctttctaaattccatatatatgcgttagtatactgtattggtgtttgtccttctggcttacttcactctgtataataggctccagtttcttctttttttaagagaaaaaaaaatacaatcttcagtggaccaacacttctaaatattacagtaaaaagtattactagaaaaataaaaaatagaaatataagaatgataattacattaataataaaatataatgtactattattaagttcaaagcaatataattagtctatcaaaatcctgagcatgagtgccaagtcgcttcagttgtgtctgactctttgtgacccatggactgtagcctgccaggctcctctgtccaacgggattctccaggcaagaatactggagtaggttgccatgccttcctccagaggatcttcccaacccagggatcgaacccaggtctcctgcattgcagtaggattctttaccttctgagccaccagggaagccctggtggggccaacccttaagcctccagtgggttcctcattcactgcttatgtcacttctgtgggagccccaggtaggatgtattgacaagactctgcacactatgacttcacttcctctgagtgatcagcatttatggtcattagtgtccctgcctcagctgatgtctgggacatctcttcatccacacaagggagcctggggtgggcggtaaggatgtcatttgaacagagaaccaagcctgcagcatttaatgcaatgctttagcaatgaagttagaacatttgtgtggctattcccacatgtatgggcttcccggatcataaagaatcagcctgcaacgcaggagacctgggttcgattgctgggtcgggaagattccctggagaagggaatgacaatccaccctagtattcttacctgaagaatttcacggatgaaggcccctggtgggctacagtccatggggtcacaaagagtcagacacaactgaacaaccaacactttcactttcccacgtgtcaggaagggaaggcaggctatgcacgtggcttccgtgggggagacacatcctcgcccatagacggcgcacaacgctgtcctcaggacagggctgatccagcagttcaccagagccagggaccaggccgtccagccctgagctggcaacagaacaaacaaaccctgccgccttgggaatcttgctacaggagctccaggcaccaaaccaaggagcgagctcctccgaccattgtgttcaggcctctcagagcaaagatccgtttggggcaaaaggaagttttgaacttaacaggattttcctgaacatacaaaactggaacaacctgacaggctgggagcaactaaccagccgcatacaacccttcggggcagcaggtgggtgcacggggccagttcgtctgggcctgcagtggtgccgactttaaacctgcaggtagaacgccagcccccgacagtgaccacgaggctgggatgagaggagggggtgggggatggattaaagccagcgcaccagtaccccgatgtgcgccttccgagctctgacactttgatggaagaatctgctacaggactggaagttccaagg

SEQ ID NO: 43116 - DNA, 2187 bp, Bovine  19866880925101
  misc_feature (1)..(1): n is a, c, g, or t
ngaaatagcgaggaaaggacttttctccaggaggaggattgtggtgtgtggggtcatggaagcaggtgggaatctggcacattgagaaacccacaaacaaagttgaaaggcttgtaacccagagtgaagcgaagcgggagagggagggaggaggggatcttactccagcccggcacagggagacctgacggaggtgacatgtctgcctgagactagtggctccatacaggtggagcagggggctgaggcgagagactgacatatgttacctgccgtcacagtgataaggaccaccctgaacttcatatgttacgactcctgtgagtccatttatagaactcatttcccatagatcatatttttcactggaaatggcatattgtcataaagacttcaaacaggataacacaaagctagaacaataaaggcaaccctaaattttatttttagaaagccatataactgaactgatttttaagagaaaataaaagaaaggacctcagccttgggaactgagagagctaagttatttaccatttttcgactgttcaatttccgctgatagaaacaggaaggaagccgtaaagggcctgtccattgaaaagagaccaaagtaagaatgcaaataaatactgcggcccagtggttatggtaagtgacgagctccaagggtttccacatcctctccagggaaaagaatgttttatgctaatttttcaatggtgattgatggcacttaacctaatacgtagatcccaatgagaaaataaaaatttcctcgcagaagatatttttccactccatgccagttccaaggcctcagaagcttaaagaggcagaagtgtttttgttccagtcaaacttgattgagtcttaaatcatcataatgagattttcagcggtaacagcatgttctctgcttctatttcccttgtttctgaggcttccatgcaagtctggttctggttgtggggagaatgaggccgtgttattttctccgggagagacaaggagatgccctggggtctggggcttgttgaatgtgtcctttgttaatcagcactgagtgtccacgggacatcagcaaagccccgtgggaagccagcagcggtgcgtggacccgtctgtcatgccaggccagcgtggcagcgccatcaagacagctgttcctgttgggcttctcacttcaaagactcccgccttcctgaacatgcatcccgagttttattttccagggctgcaaaccaccccgttcctaagggcacaaaaggtcaagctttcatcccaggccgagaggaatatgcacttggatcctttccttttttgttttccttcagggaagtcataaaacctgctttgataattagtaaacagccagcatgttcccaacactcataaaacataaaggcgacatgaaaacccagctctgctttcaagttttgagcaggctcccgttttgggggtcccacccttccctcaaacacaagcgcatcatccaagccgcacgactgggtcctgagaggagcggaaccagggtcaagtttctgtccctggtcttcaaggtcagttccctgaaggtggaggagaaccagcctggcctgtgactgaccagaggccacagtcacagctgagaaagttactgaacttttcattagatagtggagctccatttttttttttctctctctctttctggtaaactcagtaacatcactcagagcacgtaggagaatttttaagctgtttcaaataactttaaatttctcaacccagcctcttcattaactcaaggaaatgaaaatattagcagccaaatttgaatccctactgtgtggctgcctgctgccacatcataaggattagcaagctgatcgcctgtctatccactcagcctaatggccccaaaatgaatagaaatctcctacggcctcgtctgcgtgacatgccttggccgtggcagtcaggccacttatgggccactctatgaagaatttacacacagattaaaacaaactgcaaggaaataaggaaactagagtagaatgatgtgcaggtatcattttcattcttagaattgctgttaatatgtttatattatccttccaaaaaaataaggagtccttggttgaatatgccaaaatagggtcttgacacagcactattgcgacataaatatcccccttccag

SEQ ID NO: 43117 - DNA, 1453 bp, Bovine  19866881004945
  misc_feature (1)..(1): n is a, c, g, or t
nttctcataaaatatggaactatcaggggaaagatcaaataatgaatgatctcatgcaacatttatctttttcatttagacattttgaaaagtctaaattgcaatttagtttggttagatttcatctgcatcttcagtctgagataatagtttcatggaaggtacaatttttttcttcatttttccctcccctttgatgtgatcttggacactttgcctgactttttcagattataggcatcgcctgcttggcaccctttaggactggtctgtggttggttgacagtgtgcctgcgtgggctttctcaaaagcagcagcatttggagtcagagtgacagctctgctcattcaagcaggaagcccagccaactggcaatgactgccgacaataaaatattaatatgaagaaacagtctttttatcgtctaaggtatttgtagcagattctctgaggcactttcttccctgcctcattcattcatactgtgtggaatacactgaattccatctgcttatagccctggagggagaagtcatgctggctttcgtccagtgagtcttggcagctcccactgtacgtcgctatttgatgaaggatttggcatgtgcgccgaggtaagcctttctgtggcgttatccagaatgagcttgctagtggaaggcactctcctcaaaggttcttcccaaagacactgccacagtgcttactgtgggtaaaagttgccactttatctaggggacatggcagcattccactaacccctcagtgtctcaccaggcgggggttggaccccctggatgagggggtggacatccacagaaattctgcaggagccagagagtggcttggcagcagctgctgtcggcagcagtagacagtgggagaatctacaggaagaagcagaaattccgtatctgctgggcactccctacttccccagtctgcccagactttagatcggccatcatgatgggaggagaggaaaagtcactagaccagctgctgaccatggcgaggctgcaaggaaggctggggagcctttgggaagcagaggactgttgagtgacacgcaaggtcacaggattctgcctaagaggctgcagtgagctttcaggactctgctggctccagagcccttcaggcagccacgcaagatccggctcatggccatggagccctaagtgctggggaagacaccagcttccctgcacaggacccttagagaggcggtgccagaagacagaccccaagtctggcctgaaacaccaagggactggctccacttcctgcccccacccaccttcactgccagtgcctgagtgcttcctctgtttcattaagatgagtgcttcatccgagactgtctttaccatcagggatgaccttcccttctgcaaacgaaggctcatgggagagcatctcagtccaaggggaggcaagggaagaagcac

SEQ ID NO: 43118 - DNA, 1558 bp, Bovine  19866881028397
  misc_feature (1)..(1): n is a, c, g, or t
natgatagatctttaaggatgagaataaggccgccatatggatcatggcaggtgacaatgtagagatctgcatgaacctagacgcggcctcattcagccagcacaaccctgtgcccaactccatccactgcaggtaaagcagccacccgtggagagcccctgagaagatgtgacccccaaagtccatgcctccagctcctctgcctttcctgggcactgacctgcttattgcaccatgaagccaagaatcccagggccagatggctcggtgatctggaggccaaacctccttgttatcctctgtcctccatgaacatgcccagggcagttctggggagcagatgcccctgaaccccaggacagccaaggacctcatgtgctcccagcagccctggaggtcctccccattgcgtgttggctggtgtttgcatgctgttcccacaagcttagttttttgatttctgaacccaaagcatgtcaggctgaggaatgagggctggggctcctacagggggattcacagctgcaggcagggaaggggaatggatggaaagcccacagtacacaaacatgtacacacaagcacacacacactcacactcaaacatgccagcagcttagtttcaccaacttcaagtcacacacatcaagaggactatgggtgttcagatcccaccaggactgaatcatggatgttgcctgtgtgaccgtgggatgctgagaaacactcacatcttatgcactctcccatatgtgtgacatcaaggatgagtgaaacatagtttagagaaaagtcatggaactattcaaaagtgttgagtattttagtctaagaagagtacagtccaaaagtccacttctgtgacagtgttctcagttcagttcagtcactcagtcatgtccgactctttgtaaccccatagactgcagcatgccagccttccctctccatcaccaactccatcaccgtgtccatcaccagcattcttctagggaccacttattctctaaccacactgagaacagtgtagcacctattttatcagagatgacttaagagctcccacaaaataacaactcagttatcaagtatctgatagcacaattggtgcttctgtgcttctcccaaaacttgggaagagaaacaaccaaagcaaagcctccaaagccgagagcctctgagcaaatgaatccagacaggacacggcttgtaggaatgatgtctgtcagctgatacccagcgggggaacctcccagagctccatcactgggggaggatggggcctgagcatttgcctgtctgcagagtgaggagtggtcccacagaagggatcctggctcagcccagggaagtgcagagagagtgctcacagagcctgcaaactccatgtcggtgtgtaaaaaattgaaagtggtagtcgctcagtcatgtctgactcctcaggtactagacagagaatgtttctcttgtgggaagtttggccccagtttgatgataaaagtgcacacagtcttttcacaaagtactgctctgtccatcactaactgggtgaggatt

SEQ ID NO: 43119 - DNA, 1973 bp, Bovine  19866881056931
  misc_feature (1)..(1): n is a, c, g, or t
ntattttcatgtctaactgcatgtgctcatctttgaggctacttgattgaatcagcgatcatgccttttatttatgaactatggactgcccgaggtaagaataagccattgccacacggagggaggtttttcaagcatctgcgtgtaagacccggttttccaaaggttttcatctgcaaagtactggggacaataggagtcttttcttagcagcctggctttggagaccgggttccatcattgttgtccaatagctaagtcatgtctgactctgcaaccccatagactgcagcataccaggcctccctgccctttgctatctcccagagtttgcttaaactcatgtctattgagtcagtgatgccatccaaccatctcattctctggtcccccctctctttttgccttcaatctttcctagcaccaaggtcttttccaatgaatcagctcttcatatcagataaccaatatattggagcttcagcttcagtatcagtccttccaatgaatatatagggttgatttcctttaggactgactggttttatctccttgctgtccgagggactctcaagaatcttctccagcatcataattcaaagcatcaattcttaggcactcggccttatttatggtccaactctcacatccattcatgactactggaaaaaccatagctttgacaatagggaccttttcagcaaagggatgtctctgctttttaatatgctgtctgggtttgtcctagcttttcttccaaggagcaagcatcttttaattttgtggctgcagtcaccatccgcagtgattttggagcccaagaaaataaaaatctgtcactatttccacttttccccatctatttgccatgaagtgatggagtcagatgccatgatcttagttttttgaatgttgagtttaagccagctttttcacttaacacgatattataaagtaacaatacctcaatttaaaaaaaaaaggtgtatgtatatgtatgtataactgagtcactttgctgtgtatcagtaattaacatattataaatcaatgatacttcagttaaaaatttaaaaataagtaaataaataaataataaatgtcacgattgtctccgtttttcacagggtgcctctctgcagtgaatagatcctgacaagtacaaggtcccagtgacctaaagcactgcctccaccccgctggagtgagtcctaacccatcggtggatctgggtcccaccctcacatgtttattcagagctgagtcctttgggggcctaaggggaagcgaccctcgcaggacggggaggacaggcaggaccagggaggggctggctgggctgaccttgcctgggccaaagtaaacaggccctttgtggccattattttaattagataatccaatcagtcttgacaggctttctaaacacagacaggagcacgcccaaactgccacagggtcagtgatcctgaaaagctgatttttccactccctcccggatataaaaataacgaaagctgggaagagttttattaacttttttttccccttcacacagtaccactgaattttttcccaaaggtctagagaagaaaacaagccatagaaccaattttttaaaggaaattatttgtgtctcctaatctttgtaaagcagtgttagtcactctgttgtgtccaattctttgcaaacccatggactatagtccagcaggatcctctatccatggaattctccaggggaaaatactggagtaggtagccattcccttctccaggagaccttcccgacccagggactgaacctgtgtctcctgcattgcaggcagattctttaccatcgaagccaccaaaaaaaaaaaaaacccaaggtgatgccaaaagacccaatgagaaaactggtatccacaggctccaccctccccctgctctgccccccaccaagcagaccccggttgcagcagctgggcctt

SEQ ID NO: 43120 - DNA, 2017 bp, Bovine  19866881067536
  misc_feature (1)..(1): n is a, c, g, or t
ntgtatggttagttgaggggaaggaagcctgagtcccgaaatcatccagcagcttgtcactaggcagaatgctgggaagagggggaggggatcagaactagctggggaagccaggtgcagggaaggaatgattccagttctgagagggacaagggctctcggtttcattcctttactgaacaactgttctggggacacagctgtgaacacttagaaggagaaaacataataatcacatatactgtacttcagatggtgatgactgcattggaggacaatattgtggaaaaggtgaggttctggtggagagggtttagaggaggtttactgtcttatagagggtgtgtcgggaaggcttttctaacaagatatttgtacagaaatctgaggaaagtgagagtgacccctgctgttatatgaggggaaagtgttccagacagggacattttcagtttgagatgcctgtaatacattcaagtaaacatgttgaattgagaactgacaacacagtttgaggggcttccctgtgtttcagatggtaaagaatctgcctgcaatgcaggagacctgggttgggaaaatccctggtgaagggaatggcaacccactccatatctagtattcttgcctggagaattccatggacataggagcctggtgggctacagttcatagggttgcaaagagtcggatacagctgagcaatttacacacacagaacactagtctgaagtttatggaagaagtttaggctgacatatttaaaatcatgagagtggatgagatcacccagggagagagcataaatggagaagagaagttttcaagtcctagacattagagttgttttttttttttttttccaggggaggggcgggtaaggaaggatttattacttgtagcaagttaggagaacagcagggatctttcccaaagcagtgtctccacattatggtgttaagaggtcagaaagatagggatgaccagcaaggaagacaagaacaagccgctagtgagatgggagaattatgtcccagtgtatttgggaaccaagtggaagatgtggccaagctgagatgaagtcattaactttgtcaagttctactgatcaacatgaagatcattggtgaccttggtcaggtcagttttgatagagagcaggggccagaagcccctacttgaagtgaaatttaggacagaacaggaaagaaggaattagatagagactgagtatagatgacttggagtgttgtgttaccctgagaagcagctggagggagatgcagtgaagctagaagactttggggtcaagtgagagttttgttttttaagatggagaaataacagcatgtgtttatactgacgggaagaatccgacagaatggaagagactgatgatgtaggaggtgtaggaaaaaggagagatgctggaattatgtccctgagcagacaggagagttcagaggatggagcctttggtcagtctctggggagagactgggttggactgagccctggtacagagttgggataactgtcctaacactggccttggatgaccaccagcaagatggctctgataggagacacccagggattggcttggattggctgagctttccctctgcttacaaagagctggttctaatttagatttgaacagatggcccagaggggagagagcattccaggtggagggactagcataaccaaggggcaggtaggcccaatgggctggaggaggtgaatgcagctgggtgggaggggcggagtgagactgagaaaatgccagaggtagaaggcagatagaaggtagtgagaccccctaacctttcatcctggcagctgaggctacactgtaccaaattcccagtctgggcgggcgctgagcacagaatcatgagtggggggcttaaggcttacaatcagaagctcatgagctaaagggatttgaggaaccaccatctacgtggatgtaagagacttcctcctgctttctcccagtccagggaatgga

SEQ ID NO: 43121 - DNA, 1189 bp, Bovine  19866881125366
  misc_feature (1)..(1): n is a, c, g, or t
ncggcccattcttccaattttaattttcaggatttcaaaactctctatagcggaatgggctgctccagctgatatgaggatgcaggtgtagggaagagaggactggcatctgagctctcagcccacggctactccatctctctaagttgctttctcatcagaaagcgatggggagagcctgacgggtctcaggggcccttggtgttcaatgcctgacacggggtactttcagaaccatgtctgagggttgcatggtgctggttctcaccctcagcgctttgacctgggttggggcagacgggggcagactggagacagagctgggcactgggcagtttgggattagcagcagttgttcactcctgctggttctcacatgagactctaacatcacagcttagatgtctagagtgcagtgtcgtgtggcaggagaatatataagatacagcttatatataagatcttaatataaaagatacagattttccccctcaaatttccatctacccctttgccttctcacccccctccattagccagggattcagtgccccagaagaggggtgatggaagaaaagggtctcccagtgtctctccttgggttttggtgattatgccagctgggaatagagtctgtcacctggagaagagttcagtcctccccagacatgctgggcagagggagtgggtggagagcaggtggggctttgatgcagcccatctggggctctaagcacaggctcactagagtcacccaagtgagcaggtcgagtttcttgcccacccatgtttgcagaggagactctgcaccagatacacacgcctgctgtcactgtgttaacaacgatgaccaactcacacgggcgtcctggagctttctgtgtcgccgccagctatcattttagcaatattctctcgtgtcgcgtttttaagagggaaagaaagcttatctgttgctatttctgcttttgcacccagactcatgtttctgtgaaagaaaaaaagaagaggtcaaggtcagtggttattcacaaatctgcaggtgagattaaaactcctgaaatactcatctcaccaagtttcactgggtccacaattgtcaaccccaacctctctgtccacctcacctggacatccagcctctcagatatccaaggaggctgcaagcaccttcaacaccgatcacagg

SEQ ID NO: 43122 - DNA, 1065 bp, Bovine  19866881395979
  misc_feature (1)..(1): n is a, c, g, or t
ncgtgtgactttccagcaaatctctgagcttatctgaagcattactttcatggtctccatctcggtccaacgtaatgctgtgactttggttcgttcttgcttattcttaccttatgttgaattgcatttatttcctcaggcctgggcccagtcctctgggcttggttccttcttcaaaataaacataacaaatcacagtgcttctgttcaaggatataaggcccaattcattcattctgcatcttcatggatgaaggtctcagatatgtctgaaaacatgggcaaaattactcactatcatgtttggtgatagcaactaattttcaacaagccaaggtttcctgtgaccttacagtggataagtccagaagatacctaaagacatcacgtgatgtcatccaaaagatacctcagcatttgaaaattctaatataacttggaaatatgcgtatgttttcctgcagtgacagtgcagttcttgtcgcatcagaaatgcacatgctgggtctcttttctctgataaaatagtcataaaactgataaagattccattctcaaactttttgagctctctgaacatttcagctctctagactgtctccgtgcttaagacacaatatgtctttggaagggaaatgccaggcaaggactatccatatggtttgtgctttgtgtcttgtggtcagtacagttctcctcaaatttcagcaagcaactggggggcttcttgttgaccagaagcctaacagtgctaaaccgtatggatcttgtcctcctggctccttctgtcctagcctatgagtagaaagagccagagtgtggtggtggtgtttttgtgattgtgctttcttttttttcttttctttttttttttatgttatttgcccatttcctcctcatgataatgtgtgatataaagaaaaactctttttcaaatgtcctgcggcctgtgttatggcctgtgtctgcacagtataaagtgaagcagaaggtggtgacacgtgactcctggtccctaatcatccctgttggctctgccatagcaatttgtacccattcaggcaa

SEQ ID NO: 43123 - DNA, 936 bp, Bovine  19866881410990
  misc_feature (1)..(1): n is a, c, g, or t
ntactataaaaatttcaacatggaatacaactgcttttcattatcagtccgttaaggaatggtatttgccttttccttttttttttttttggctgatggttttaaaaaacttttataaatacatttgaaagtgtcttcaatttctttaagtcttacagttatagttttcttcgtataaaacttaaacttctttggctaaatttatcttgaagtattttattatttttgatgctcttgtgaatgggagtgtgctgtgtgctcagctgctcagtggtgtctgactctttgcaatcccatggactgaagttcgccaggttcctctgtccatgggactctccaggcacaaatactggagtgggttgccctgcactcctccaggggatcttcccaacccagggattgaacccatatctcttgcatctcccacaatggagcagggaggagagggggagagtctttaccactagcgccacctgggaaggctcccctcctgccatggccacagaatcactccccaaccctggctgcccccccatactcctactgcccccggccccccatactctgcgcgtggccaggatggcaccgagcaccctcacccctggaacaggaagaggttgacgtagttgtagctcttggtgaggaagttgccgaggacccgagttgggtagccgcagcggatctggtaggcggacagcccgaagtacacgcacttgacgaagtaccacagctgcgcaaccaggttctggctgaacttcctgggcgagaaaacagaaaagtacagggtgggatgctcttcgggtacagaaagacaccagttagggtgagagaaaagcctactcttccctctggcttctaaaggcaggtccttatcacagacgtctcagccgcatttggttggcaggagtcattcctaagctaatacatcctccaaag

SEQ ID NO: 43124 - DNA, 998 bp, Bovine  19866881477020
  misc_feature (1)..(1): n is a, c, g, or t
nagcaacaggtggcagaagactctagaacagaagatactttgtggaacagcgttttaaaggcattgaagatgcagttctcgatacaggtactcattttgtgtcaggaggctcatctgacttaactccagcttggaaatcccagtcctgggcccgtgggtcacatgggtctttctaataatttatgattgatatctgcttctctctgcttggaccaggggcagcgatgctctgctgggccatgtccacggagacagcccagagcagctgggcactcccaaggttctgattagcctgcacctctcccatcacctctcacctctgtcatccctgtggaaagcagcaccactgtggagcatgtgacctacctggagatgctgtcgtgggaatccaagctgtccatcctgtgggcagtctgggcacctgcagcagtgccagcgtgctcgtcgatggtgtccagtcccgactccctggacaggttcatgatgtggttctggtagtacatgtggatgctctcccgggttgggacgttgccctgcggagagggagacactgtcacagccctgtgcagacatcaacgcttctcagtacggacagccctcccccatcacacacaccttgagcaggatgaaaagccaagttagtcaagctgaggattgacgtcaactcactgaattaatggtgccagatgctactgggtcatgctgaacagggaacccctcctagtttaaggttgaagatggtcaaatgtacaacttgcagttatgaaataaataaaccatggggatgcaatggtgactagagttaacgatactgtattgcgtattgaaaagttattaagagaatagatcttcaaagtcttcttcacaataaaatttataacaggtgcagtgatggaagttaactagatctactgtggttatcattttacaatatacataaataccaagttattatactgtaagcctgaaatgaataaaatggtatatgccacccacat

SEQ ID NO: 43125 - DNA, 1364 bp, Bovine  19866881779640
  misc_feature (1)..(1): n is a, c, g, or t
nccggacagcagaacccatcccaggtccttggagaaaagcgcctggcgggccttcaaggaatcccagtgtcatcacatgctcaaaccccctcccacaatggagccaggatcaccgtgcagatgccacccgccatcgagggccactgggtgtccaccgggtaagcggccgggtgcaagggcccggcaagtgcacttcttagggtttctcaggtgcacagagactttctagaacccacagtgatcctggggttgtctgagttctcactcagagccaagcgactcttggaagcctgggttgatgaagaaacagagctcggtcctgcagaaatcttagcctgggcagtggggatacggtgccactgtgaagccacctgggagtgaaagcgtccttgtttactgaacctgaggaccactcgtgtatgaaaagaaccattagcaagtgaaattagcaaggagtctgtgtttcaccaaccctgaaacatgacgtgcaagcttctgatggtctaaatagtctagcggtattctggtaagttgatatccagcttcagagtctgagagtacgttaaaaaggacccacactgcctggaccagccagggcacagctcttggcttcttttccaggctgtggagctgagatttatcccggtttgagctctggcttatcttccattagagcttttaaaaatagcccagaggcagacctgtagtcttcaccctgcccattaaattgttgcaaattcacatggctaactaggctagggaatagtgagatctgacgccttctgtgcagaccctgcccaggtgcctcaggaagggttcacaggcatccggagaagagaggaaaaagcgaataagacaagggagacccagagggtttttgtttttgtttttgtttttcccctaaaaatggggtttctcagaataacctcctcatcagtattggcacagacaatcttaatgcagtgtacttttaaataatttatcattttgttcaacaaatatttctgaagtgcacaaatgtttactgcgcctgagcacagttctagactgtgtgtgtagcagagagtgaaacagacacgtcttcaggaatttcacaaataaacacacgaagtgttacaaggagggaaaaaaaacaacaggtgctccaggagaatatcagggctcctattttaggacgggctggggtgggaagggctaccaagatgaggacacttgagctgagatgtccttggccatgcaagactgggaagagctcttgctggggggcaagcagaggctggactgaagaagcaccacggtagcccttgtgcctggggcgggggtgggacagcccccagcaggccaaggaggaggctaagccggct

SEQ ID NO: 43126 - DNA, 1127 bp, Bovine  19866882026325
  misc_feature (1)..(1): n is a, c, g, or t
ntattacagatccaataacattagtcggtgtctgtcttgtgacaatcaggctgaaatgaataatttattgcaaatgaggaggactacctgcattatctgtaataggccttttcctaatgtctactttattgcccaataacattccttcaaacattcatttgaatatgaataaaaagatatgctctttaaaaattgaggagcaagatcatactcattactatttgctatgaactaagctggacccccgagagtcactgagctccctaaggctacagccccctcagccgggctcccgcactcttcgcagatctggtctggcagctcacctggtgcccgaggatggggtgtgttgcaggcttcttacccttggaaacatttgcatccaccacatatgcttcagatggccacaggatgaaattagtccatgcaaaggttgcccgacattacacgttatttaagaattaaaaaaaaaaaaaatccctcgttaaactgtgaatgacttgattcctaggggatagtttgccgtgtttctgagaaagcatgacctgacttgcctcagcagtctctgtgtcctgcccttcaccactgcggtgccatccattctcagattagctgctcagctcagggctcccagtcaaaacacactgtggccgccatcctggaatgcacgtggtgttagggcccctgcacccagcgtacagtagatgactgtagcatgatctgtgatctctgactctccttataactcttctgttctcatctccttttttttctttctgtttccattactttgagcagcatcaagaaaaacttaccaatccaccacaatgagtaagtccccctgtgaagccatgaaatacttgctctacacaatgctatttcatgcttctccatcctaaactttgaccattttctcctgcgggaaaaaatgtcaagtttaggtgttgatagctctcatgactgactcttcactagaatctgaattggaagagctcaccaaacctgagtttacagttcattttttagaaagagctttaaaaaaataaaaaacaaccagatgctaaaaagcccacatgccaggctgtgtaggacttccattttgttcatcctcttccacgtgccactca

SEQ ID NO: 43127 - DNA, 614 bp, Bovine  19866880516821
  misc_feature (1)..(1): n is a, c, g, or t
ntccctcctcattctcttcaaatgactgctttctgggttctgcccaaatcatttcagagaaactgctcatgccaaagtcactcatgacctctgactaccaaacccagtagaatttttctcttcttatcttgcttgtcctttctggatttcccatatcactgccactccgctccttccgaaacactcttctctgggctttctgcaatgctactctcccctggttttcctcgactctctgatctgccttcttcagagtccgacctttaatgtaatcaaagcttccagacttcatctcactctcttcactgtatgtccaccctaagttctctctctgggtgatagtgagagtctgcagatctctgcatccaacagacttttctctctcagtcctgacccaactggctgtcccactggaacctcagattcaaagcatcacaaacggaatttatcatctttcccttaaagtccctcttcctctttatatccccatcagtgctcccattacccccaaaactgaaacaaaggatcaccataaggctcctctgtttttagcctccatccacacccagtcactgtatctcaactatctactacatctctatatcaactatcta

SEQ ID NO: 43128 - DNA, 978 bp, Bovine  19866880629442
  misc_feature (1)..(1): n is a, c, g, or t
ngcagcttttgcttgttgcccaaggaggcggctctgttcaagcccccctttcctcttgggcagggtgggcaccttgatggcctgctgcacctgggtcgtaggtagcaggatcccgggaagacggatctggacacagaacctttccgagagcagcagccgggacccgtttgcagtccagagcactggcctgaccaacgtggggaccttgaccgcactgggcatttctcccatctgcagaattaagggtcttctgttcccttatgaccagagtgtgttggcatccccaccccggcaccccgagtggcagggaggcagcactctgcccgtgggtctctgcgcaccctgccccttggctactggagatgaggctgggccctccacacactccccagagttcacgagggcccttggctcgggggagcctcacttgttcccagagagtcgctcccccatgactcatggccctgatccccgccccgcaggaggacttccggaataaagtggaggactacattaagcgctacgccagatgatacggggagaggactgcagggccgcggactgtgcgtgaaaagatgggctccacccgcaaccagaggagcctctccccgatcctcggctcccctcagtcccgccggctcgtccgggtcctgtgaccgtgttgtcctgaggaagaacctcttcacgaccgcccattgtagccggagagttccacataaatacagccagaaaatgtgtctggggttctaaagagttgtctgcttcccttaacatgtttacttttttgaaactgtactgtataggctgttgatgagaatgaactcagcgtcgaggctagagctgcttctcccctcccccgtcagtcccgcgcaggtgatgctgacgctcagtgtagcccgcagattggccgtcagaaacccgctacaaacagactgtgattggtgcgaagtctcttagctcctcccacgaatgtcggcc

SEQ ID NO: 43129 - DNA, 909 bp, Bovine  19866880861353
  misc_feature (1)..(1): n is a, c, g, or t
nctatgaaaatagcctaaaatctatacctgtgaatgcctcaaggctatgaaatcaaaacctagagatgaccaattgctttaagttaatcagatcttttaaagccaatcaaataatttcctttctttgcttccagactttccctacagaagtcttctcccccagctcctgttggtggagtgcctctaactacttccagcttggcgctgccaattccaattgactgctgtttttacatgttaaatcgatgattttttaaaacatgtttaataacaagaaactttaagtaaatgttagttactcagtcatgtccaactctttgtgaccccatggactacagcccaccaggttcctctgtccatgggattctccaggcaagaatactggagtgggttgccatttcctactccaggggatcttcctgacccagagatcaaacctgggtctcctgcattgcaggcagattctttaccatctgagtcaccactttgttgaattacaaattttaaaatggctcacttaatttaaaagtggatccaaccaatttttgctcacataaactgttaaacatgcctcgtgctatcttgtaacagtgctgacatcatcacctaaagtttctttattaggtatgcttcttaggctatatctttgaaaatttttctttcacaaactcttgccctcattgtcaacatacttactagaaaattccacttggattccccgaatgtcaggttaaacttttcataatgttcctggctttcctctttcttctctcctctgctcatccatgtctacccttttggcattttcattattatagacgctacttcatatcctaaaccatcaatccaaaaaacctgagcttcttcttgtatgccctttctcatttatctacatccttcctacacttt

SEQ ID NO: 43130 - DNA, 798 bp, Bovine  19866881251056
  misc_feature (1)..(1): n is a, c, g, or t
ngagagcctgggcaggggcgggggtgggtaggaagtgctgggggagctaatgtatgaggacaaagttggaacttgtgagtggcagtttccttggccggtgcccagggtctattttgaggccttgtcaaaactctcctgacagaacctaccacataaccacaatgtgtcctggccccactgcaagtcaggaaggcttgcggtttaggaagatggcaacagaagagggagcttataaaggacctttgccttcggaagattaaggctcagtttgggggtgaaaatgtgcttagcgtgcatgtctaagatccaggttccttttgttttccctctgtgtggggtgagcttgattaaggaaagctaacgagggcagcattgtggaagaatacgcaaggaagagcgcagtattgatgtcatgtctggttctgagtgtttggcaagaatcagtctaatgctctacaccaggggaaaagacgttactcttaccccagtagggaggccatgtcccgagctgaaatagtagtccagttcagagaccttaaaaaggattattgagtttatacagaggaataagcttcttcctgaattctcattctcttcttcccatagaactgtgcagccccatgtataatatcagaaagttctcgctctaaatttttggtttattaccagatgctgtgtcccagcatagctgcctttctgtaccagatgctttctcatgaaaccttggtgtttctgtacttagtaaagtgcttgggtttgacgttctttaacagatctcagagcttcttaggccagaaa

SEQ ID NO: 43131 - DNA, 1491 bp, Bovine  19866881331226
  misc_feature (1)..(1): n is a, c, g, or t
ntggattctttccagtgagccactgcggaagcctggagataaacttcttaatgcgcgatccatggccttgcagtctgctactcctgtcatctggcctaatgcttaatgtagtcttcaactttgttccggaagtcttccttgtcccacaaatgatgttctgcagctccaatatttagtggatcatcgaaactcaaaatattagtaaacagtttaatccccaaacaacatccttccgtgtcctcgtgggagtccagccagtgccccaaaaatgttgagaacattgaattttctctcagtaaacttaggggtatttcacctgtctctgtgatgttgggggtgccaaatcctggacaagcatttcactttgggaggcagcatgttgtatgcatcagaaacttcagtttcaaactgaaatttgccaccctggtagtaacccttatccggagtgacagctgaaagcgatgaaacttgttcagattaggaaaacgcactttgcacgtacaaggtaaattagcttcagcttctgccgcctctttaacaagcagcctgtctcacggacacccaccgagtggagtcagaggctgtaagtggcacccaggactctttgagaccaccaccctgcttcaatttgcttggtagtgaaacatcattgttggtttttcaaagctgagcccagctctttgtgaccctgtggactgtagcatgacaggctcctctgtcctacactcttaaaataactgaggacaactcaagagagattttatatgagttatatctctctcgcgtagatgtttatgtgttcgaaaataaaacaggaaactttaaacttttttttaagctacactgccaggcacatgggaatcttagctccctgtgctcttcaggtcgttcagttgtgtccagctctttgtgaccccatggactgtagccccccaggctcctctgtccatggacttttccaggcacaaatactagagtgggttgccatttcctcttccatgggctcttcctgacccaggggtcaaacctgtgtatcctgcgttggaaggcagattcttcaccactagcgccacctaagcttcctgagaagggatccagcttgtgccccctgctggggaagggtggaatcttaaccacaagacaggaaagtccctatttacttatttaaaataagcaacaatatagcagtagacctgccctacaagaaatgctaaagggagtctttcaggtttaatggaaaggacacaatgtaacttgaaaccatcattgaaaataaagtgaagtgggtcccactctttgcaacctcatggactgtagcctaccactctcctcctttcatgggattctccaggcaagagtactgcagtgggttgccatttccttctccaggggcatgttcccaacccagggattgaaccccgggtctctcgcattgtaggcagacgctttaccgtctgagccaccaaaacctcactgctgctgcttctgctg

SEQ ID NO: 43132 - DNA, 3247 bp, Bovine  19866880195559
  misc_feature (1)..(1): n is a, c, g, or t
ntttttcctgtggtctgtatggatgtgagagttggactgtgaagaaggctgagcgccgaagaattgctgcttttgaactgtggtgttggagaagactcttgagagtcccttggactgcaaggagatccaaccagtccattctgaaggagatcagccctgggatttctttggaaggaatgatgctaaagctgaaactccagtactttggccaccttatgtgaagaattgactcattggaaaagactctgatgctgggagggattgagggcaggaggagaaggggacgacagaggatgagatggctggatggcatcactgactcaatggacatgagtctgagtgaactctgggagttggtgatggacagggaggcctggcgtgctgcgattcatggggtcacaaagagtcggacatgactgagtgactgaactgaactgaactgagggggaagtattccatcattaggcttggcttagaacattttttttttttaagtaagatgatctgctgagacctgctgtgtgtttactcgtttggtaagtatatgaatttattaatttccaaagctataatgggatccctttgagagttgacaatatacttatatcatggataaaaaagaattcccatagggttttgaactcatagtgagatgttacaaaaactgggcttctacttctgtctgaaacctgatttacttagaagggcagagaagaggcgccaggaagtaaacacacaccgtaaaggcaataaacactctggagacagaacggagggatcttttctaagtgaaagtgaaagtgttagttgctcaatagtgtctgactcttgtgaccgcaaggactgtagatcaccaggctcctctctccatggaattctccaggctagaatactggagtgggtagccgttcccttctccagaggatcttctcaacccaggaatcaaacctggatctgccctttgcaggcagattctttacagtctttgagccaccaagtaaggtgctcataaaaggctgcttagaagaaatggtggtacagttgggtcttaaagaatcaaaagactttagatagatggtgagaaaggacccagatatttaaggtaaggaggtcaatttagcttattggtatatgcaagtctatttaattctaaaacagaaatagtagaaaatactcaaccttccttattaggctatcactctctctgttttttcccttctctgcttccctgtcctgacttctgtttactctgacttctgcaatctgtcttcctgaccttggcagtgagctgaagctggccccactaaggatacagatggccccgttgctattggcagtgtcagcccttctctctgcatccctccccctgtggactacccctatttctcctcccttgggcaccacaactccattctcttgcgcttctcacatcctgtagatggctcccttcttttctcctctacatgctccttctcttcaggccctctctccactgcgggtggcattcagggttctgctttcagctgtctcgtggccctgactctgtttacctcctacttttgactcaaagtttggattgggatgtgggaaacactgagcagagttctgggctctagtttgagtagagataactaaaataataggggtttgcttaaaagtagcaaagtaaagaggaagaatgacattgggtggggctggaaaggtattttttgttctgttttttacattttcttggctgcaccacataacatgtgggatcttagttcccagatcaaactcacgccccttgcattggaagcagggtgccttaaccactggaccaccaggggagtccctggaacgggtgtgttttaacctttagatatatgtgtctggtcacaaattggaaaagtacagaatttgtattcaacgtattatcagtgaaatctatggaggagctgagactgcaaagtgagaaaagaattggtctgaaaatagaatcttgaggatttaggggatgaaccagtgaagaacagaatagttcaggcagaggaggaaaagatgtgatgtcaaggaaataaagcgggggaaaaaatgcaagaaaatcaaatgtcaaatgcccagagatggtaaaaactatgcattaaaagtggctgttctatttgatgtttgaaagtcgctaagttgtgtctgactctttgcaaccccacggactatgcagtccatggaattctccaggctggaatactggagagggtatcctttccttctctaggggatcttcccagcccagggattgaacccaggtctcccgcattgcaggcagattctttaccagctgagcctcaagttcatcgattagcaatatttatgaagtgttttgcagtttaaataatacaagtcaaatttttgcttgtcttttaatctacttaatccaaagctgaaatacaaagtgttttgctcaacagcaaatagagatccagttaagtgtggtggtaagggggcaggattctggctctgggtttaaagaccgtcaacataaaaagcattccatctactcaaatcagaagtgacctacaaagcagaaatcaactgttctaaaaccaagatgccaagcaagacaggaatctttgtcttatttgtctggagggaaggatgcttacatactcgtgtgtgcatactaagtcgctgagtcatgtctgactctttgcaacctcatggactgtagcccaccaggctcctctccccatgggattctccaggcaagaatactggagtgggttaccaagccctcctccaggggatcttccagacccagggaccaaacccccgtctgtctcctgcattggcaggcgggttctttaccactagaaccacctctcatacccctaaatgaacagtcttgtgacccttgagtacatatagggagatcagatttacaagttttgtttccttggtttttggccagcatctttcctgcaccttaactacaaaaataatattgtctaacaaagtgatttgcggataactcctttctctttcaggggttcggtccatcagaattttgttgacttcacttttgccactagcaaaataattggctacctattcacactgaaaggagacatcgattccaatgtagccatcagccttagcaacaaagcttccttagcgttcttacaaaaacatttaggtaagatacggcatcttctttcccgacatagacaggatgattctcaggacaaaactatctatcctaattcatgtg

SEQ ID NO: 43133 - DNA, 1923 bp, Bovine  19866880358668
  misc_feature (1)..(1): n is a, c, g, or t
ntgcattcctttttatggctgagtaattttccattgtgtatgtgtaccacaacttctttatccattcacctgtcgatggacatctaggttgcttccatgttctagctattgtaaatagtgctgcaatgaacaatgggatacatgtgtctttttcaattttggttccctcagagtatatgcctaggagtgggactgctgggtcatatggtggttttattcctatttttttaaggactctccataccatctcccatagtggctgtatcaatttacattcccactgacagtgcaagagctttcccttttctccacaccctctccggcatttattgtttgtaaacgttttaatgatggccattctgactggtgtgaggtgatatctcattgtggttttgatttgcatttctctaataatgagtgatgttgagtatcttttcatgtgtttgttagccatctgtatgtcttctttggcaaaatgtctgtttaggtctttttcctactttttgattgggttgtttgtttttctggtattgagttgtatgagctgcttgtatattttggaaatcaatcctttgtcagctgtctcatttgctattattttctcccattccgagggttgtcttttcaccttgcttgtagtttcctttgctgtgcaaaagcttttaagtttaatcatgtcccacttgtttacttttgtttttatttccgttactctaggaggggggtcatggaggatcttgctttgattcatgtcatccagtgttctgcctgtgttttcctctgagagttttatagtttcgggtcttacatttaggtctttaatgcattttgagtttatctttgtgtttgatgttacgaagtgttgtaatttctttcttttacatgtagctgtccagttcctagcaccgtttattgaagaggctgtctttgccccattgcgtatacttgtctcctttgtcaacaataaggtacccatgagggcaccttgcgctgcaaatgcctgcacagcagagcaaccctgaatggttggcccagccgacaggtcttaccagttagcgcggatggctcaaccagagaacatgtacactctgaatggatttactgtcagatccaaatgtgttgtgtggtcaagtctcagaaacatgtggtctaaacgtgagattttggaaataactgaagagggcacaaaggttttggacctttcaaatggcatagaggaggtggtgaacactgagatgtctggaatggtatacccaaattggataagagtccatctgagaaaagaggcctggagatgacagagatttaactgtggatctgtacgtgtgatcagtcagtccaaagctgctctgcaataagtgccatctttaccagaccaacaaaaatatttgagaaaattgagaggtgtagacacgagaaattgtcatttttgaaaactttgtgttgaaaacaaaacagatcttagactgcctgtgtggtgtatttatagtgctgtttctgtatatgtggaggtgagatgtttcctctccctttaaatatgtcgtctttctaatcagttgggaggatttattttgctaaacagtttgctaacacattactcccattgcaaaaaaaaaaaaaaaaaaagggtattttggtttcttctgaataatagtgtttaagatagaaaattataggtttctgacaagcatattatatgatactacttggggggatggctttgttagcagtaactcctacaaaatttttgttttgtttctgaagctttgctgttccagtttgactaatactctgaatttagaagtatactaatatgacacaagatttaaataaagtttgtccttaaaagtttaaaaaaaaaaagatactcataggtgcgtggatttatttctgggctttctatcttgttctgtggtcaatatt

SEQ ID NO: 43134 - DNA, 2141 bp, Bovine  19866880371686
  misc_feature (1)..(1): n is a, c, g, or t
naacataaaactggatgaggagaagagggtttagaggctggtgctttagtgattacttgcacagggacttccctggcagtccagtggttaaaacatcgtgctcccactgcagggggcatgggttcaatctctgttcagggaactaagatcctatatgctgctcagcaaggcaaaaaagaaaacggacacagatgccatagactataactcactagagtcacaggaacagtcctcattggaatatactttcagagagctattttattattcgtttattttcatatttatgtatttaaatatttatttatttgtctgtgtcgagtcttagttgtggcacatgggatcttcttgagtcatgtaggatctttctaggtggcacacagactctctaactgtggcacaggcttggttactctgtggcatgtgggatcttagttcccagaccaggaatcgaacccccatcctctgcattgcaaggcagattcttaaccacttgaccatcaggaaagtcccctcttagtagtattttaggcttttggctcagcttcttgtagggtctcagcagaagaactaccttggtttcagtggggaatgatgacgtccaggaattaccatgtgcttttcaagtacatgcttgttctctgagcatgtagagaaaggtgggctcagggatgaattacactaactgcctttaggcaggcactgaaatcatgctgggattagaccctgggagacaaagatgcaggtgatgaagtgggtgatgtgggattgttactgacctcacttatcagaaaagcagctactgtccaggaaatcctgtttacattcattcatgggaggggagtagactgaccacagcaaagaggatcctggagcttctgaatcctctggaaagcataaacatggctgcattacctttcaggaaaagaatgtgctctcaaacagaccttgcaaatatcatgcagccaccattgcaaatgttcctagcagacaacatacaggttaggatcgctcaggagaagactagcagtccttccaggaagcttgcttttcatcatagaatcatttgcaaatcagaaagaaaacaggaaacttcaagatatgccgtagtatcatgacagactgagattccattctaggttttaaaagtcactgtgttctacttgtaaatacatgtttatatggaagaaacagcttaagaggcatttgtaattttaagaaaatgtgcacagacatttttaaagggttgagttagttatagcaagttgatgaatgccaaaaagaaataattctcaacaaggttgataagtaaaaccaaactcctagaaaaacagagtttacacctctaagtggacaaatactaccattttctgcaataaacatttatcagttggagtttcccatagtaaatgtatttcattttaggtttgcacataaataatccttggaatatttaaaacaaatcttacaatattatgagagacattctttgcccttttagaaaacagatatagaattttaatgttaaggttttagatttatatataacatatcatgtatatttatatattatcattttatatatcatatatattattttaaatatatatagtcatatatatgatatatcatacttccagattttacatttttgcagattttacttatattttaaaaggaaaaattttacaagtattcattaatcttttccttacttgaccagcaaaataaaataagccacaacttgtcttctcaaggcatctgtataaaaagattctcctattctctaaaggctctgcattagctaccaaccaagcccatggcttctgttccagttatgtatttcagccaagagtgaaccacaggttctgtctatgacaaaaaggtgaatctgagactcaactcagaagtcacaggtttaacaagaatctactggacatgaatttattacgtgctgggctccatgccagatggagtgggtaaggccatgagaagtgaaagaagcagtttctgcccctaagaagcttacagccagtgttccagatgtgatgcaacagtggaaaccacgaaggcaccttccggtagatctattgtctggcttgtcctggtgtgggaagcagacgcatctagaatgccttcca

SEQ ID NO: 43135 - DNA, 973 bp, Bovine  19866880389865
  misc_feature (1)..(1): n is a, c, g, or t
nagttataagaaatgaataagcactgtgttcaggatctggtggagtgccgtgttattttccagaacttgctggaaatcaattgttcttcctgaagcttcctgaagctagatgcaagtgcctctcaagtgatggctgagaaagctaattttatttgctctcttgtgattatcgtctacaggattctgcttcccttgttgtttagtcactaagttgtgtccaactctttgccaccccgtggacagtagcctgccgggctcctgtgtccatgggatttcccaggaaagaatactggagtgggttgccatttccctctctagaggatcttcccgacccagggattgaactcttgtctcctgcattggcaggcagattctttaccattgagccacctgggaagccttgctccctttagctggttgctttttcagtccttactggagcttgagatgatgtgtctactgagacccaaagcgggggtcagtgggtggggggcagttggtcaaggtttattcagataacactacacacagcatgtttctatgatttttttttttttttgcctcttatgtttttattgtttcatttttgtcctcataagcaactctttctctaggagaaatattttatagtaagtccataaaatatcagtcaacacctgtttatttgaatgttgacagttctttcctttactgctcttttcttccctgaactttatttctttcagatgctgaaaatttcttgccacttctgtatttcaccgcagccacagtctccctccattctgttctccatactctgctatagggttcttgggaaaatgcaattctgataatgtcacttttcagtgaaatacttccattgcactccactgcttatagccttgcttcctgtaaggttgtccagggactggctgcctcaggacaagctgcaggggcagcttgttagagatgctagttttccatcccttcccgg

SEQ ID NO: 43136 - DNA, 1131 bp, Bovine  19866880421329
  misc_feature (1)..(1): n is a, c, g, or t
ntcctgggtaaaagaagatggggagaggcagtcaggaatgagcaagcagagtaggtgtgcagggaggggtgggatctgaggatgccaaggaggcagggggtggactggggggtacctgccaggggacagagcagttgagacttgaaacaggaggcagtcaggagccaggagagtgatctgatccagggaggggtgagatgaaagcatttttcaggaggattaggctggctgaggcacaggatgtcttggtcttaggcaagttcaggccaaaggttgatgagaagtcccgaaggaggggtcctagtccgacgttgggcccccaggtgcagtgacagcagcctccttaggaaggatgatttccccggggaccccgactgggtgtgcctgggactcatcctaccgccagctttgcctccaccctgtcccctcacccgccacttccaggtcccaggaaccaaaggatccatcaggctggagtgttcagaggccattcccagaacttgcctggtccggctctccgcccctgccgagacgagacaaggcattgttcaacttggcctctgctatcatgtgcccagtgttgacctcagcttccttgtggctcatctcacaccccttctctctgtgcagcccttacttcctcctgttctttcactgccctcctcaaaaccgtctctaactttttctggctccttcacatggagccacagaggagaaattccactgccagcttctaggggcaagttttggaaagacgctgtgtgctgccaagcctgggagggtgacttaacgagagagtgagccacatgcctccttctctcagtcattggtggtgtcttagagatgacaaaggcccctggtgggcatctctaccccaccccatgcaggtcaggaacagagtctgagctgactttctcactcagtcagagtctggttttggctcagtgtcattgtgcctgcctgctaagtcactcagtcgcgtccaggtctttgcgaccccatggtctgtaacatgccaggcccctctacccatgggattctctaggcaagaatactggagcgggttgccatttcattctccaggggctcttcctgacccagggatcgaacccgtgtctcatgtctcctgca

SEQ ID NO: 43137 - DNA, 1595 bp, Bovine  19866880582854
  misc_feature (1)..(1): n is a, c, g, or t
nttaacaaaatttagaattatatgtatttataaatagtggttatttgtttctattttcccttgccttctctatcagcatgtaagctccatgtaggcaaaaatcaaatctgtttgatctattcctacagacctaatgtcacccccacagagtaagctctgagtgactgaacaaatatatctcatttttctttccacatcatcactgtagagatggaagcatcgttgttgggtatgaagttgttggttccagtggcacatctgagctcctgtcgggcattgagcagatggttgagaaagctaagacatatctgcgccagctgtatacacttgaagaaaattctttcagagtgttcggagaaggtaatgctgaattctgtagaattaggttacctgtatatgggctcagatcctcagtcatgtgggactctttgtgccccagtggactgtagcccgccaggtccctctgtacatgggattttccaggcaagaataatggaatgggctgccatttcctcctccaggagatcttcccagagcaaggattgaacctgtatctccttcgtctcctgtatcagcaggtggattctttatcactgagccacctgggaagctccagggaagtaggttgtgggagcctaattagtagattatgtattggagatgttcccaaaacagaattgttctaagactgactttatcaagcagctgttccctcccccgcccaactcccgccaggatgaaactcaatttcagctgactatttcagactatttcagactcttgctcatgggtgatctgacctcttattcttaatgtaaatgtcatgcaagactgattcactgcaggctctgttggaaatgactcagcaatagtttactggtgtccatgttgaaagagccctggggctgatgacattcctaaattataatccaagggacccaggaaagaatgtttgtttttttttttttcaggtctttcacatacacaaacacacacagaaatacacaggcacacacaccccacttcatttcttcaaatgtttgaaaaattctttacattcaatttcaatctctcttaccaagatttttgccactttcaacatctatctaacaaatatttactaagtgtacaaagagcttagacacttacgacagaacagtggggaaaagaaacaaaaatcacagcccttgtggttctttcttctcccagtcacgatcatggtaagaacctattatgaagggcctggtgcaaggggagctaagtggttggtcatgatgtgaggggaacagagtaggacatgtcacccccaaatggcaactgcctatcttttaaccttatcatgcctactttgtcccatagtatcttgaagcttatctggtattctagcatgcccttaaagagggtaaatattttctaggagcgatcacaccttggcttgttttcagtgaatacttactatttgatagctcactaaaagtcagattgttggcctagactacatacctggagggaaagggggccagccttggggagggcagaacatcaggaaagaagaaaagggactgatgggggtaaagatgggcatcaaaaataaa

SEQ ID NO: 43138 - DNA, 1385 bp, Bovine  19866880595714
  misc_feature (1)..(1): n is a, c, g, or t
ngactgattagtaagtagatcacagctaattctgaaggaactccaagtcctcccaggactcggaccagcctgacactccaaaatctgctgtccccctattttttttttaggaggaatgcattcagtcattgatccctggaggctaaaattgttcagcctcttgacactttacctgaatgctccaagaccatgagaaaaaataattagtgggtatttttccccagtcctcagatgtgcattccaggctgcaggagttgtcattgaacctagagagcagtgggaggtgataattagtgtctttttctgacttgaatatcgctggttaatttaacctacatctcctgagtataaaaacctgacccatggaatttattcttttatgcatcaatagtaaattcatgtaaaaaaaaaaaaaagtctcctactaaataccaccaagcatgggcatgaaccacttgttttttttcttaagaccataggatcatgaattatcagttctcactgtcagctctgaacttgaggtgagacatttcctactgagaggtgtattcaggaaggctgctccttatcatcaatcacagatcttggcaaaacttcaaagggaatattctgaaaccaaacaagtaaacctcaggagcattaaactgagattcagaatcttcaaatgggaaactcctcccactctaatttaatcaaggtcaagagaaagatagggagaccttagccttcaccctcagatgtggctttggatgaagttctgccactgagttgctgctgaccttgtgcaggtcaagagaactctctgagcctcagagtcttcttcagtaaagtgatggaaaatatagctttctcatggggggttggtgagaatcatatttaagtgggaatatatgtagatagcatcactgactcaactgacatgaacttgggcaaattccgggaacagtggaggacagggaagcctggcgtgctgcaggccatggggtcgcgaagagtcagacacgacttagcgactgaacaacaacaatatgtaaagcacacctatccagtcacatagttaagggctcagaatggaggccgtggtcttttccttcacttctcacttattatggtcatcattatcatcaattatttgtgttccactttctcatcaacacagtggagatgtgcccacagaaaccgaatgtaaagattgctatagcagtgacctataaactattcagcattatgctgctgctgctgctaagtcacttcagtcgtgtccgactctgtgagaccccatagatggcagcctgccaggctcccccgtccctgggattctccaggcaagaacactggagtgggttgccatttccttctccaatgcatgaaagtgaaaagtgaaa

SEQ ID NO: 43139 - DNA, 696 bp, Bovine  19866880605406
  misc_feature (1)..(1): n is a, c, g, or t
ncaagtctaaaccacaggtctcatactggcaccctcagggccccatctggctcacagatgtgttttgcttggcccaggcaatgtttttaaaactattgatttagttgctaacatttaaacatcaggggatttcagatgcaaattcagatttttgaattccggcattttttgaaatgggcatgtctgacaatactgttttgctattcctgccttggtgacatttaattggagctgagtacaggctgcccatattcttgtagctttctttcatcactgccgagaatgtactgtttcagtgaatttttggtaagtttcgcatgaacagagtaaaaaactcaaacttagaaaaatatattcattggaaaattagtttccaacaacttgtgtttcacagcccacagatcctcatctacaaaagcacacactctcaccagttaaacagtgtataaatatgtatccccccttgcaacttacactggaattcatttcatctgggttaaatatgtcaaaacaaaatatgaaactataaagatactagaagaaaaaaggaagatgttgctcttgtatcccttactttgttgatttaatgacaacatcttcccaaagtaaaaccttaacccagacatgacccaaaggaacaataggtattcaactatataaaaaagatggggacgggggcggggggggggcgggggg

SEQ ID NO: 43140 - DNA, 1945 bp, Bovine  19866880744296
  misc_feature (1)..(1): n is a, c, g, or t
ngaacactgtgggactgccctcgtggtccagtggctaggagtccacctgccaatgcagggcacacaggctccatccctggtccaggaagattgcagatgccatggagcaactaagtccatgtaccatagctgcagagcccaagtgcctagagcctgtgctctgcaactagagaaagcgtgtgtgcagcaatgaaggcctactgctaccaaaaattaattaattaattaattacaagggaacagtgtatcagtgatactctgaaaccacagccaacataagctcacctaggaagggagaaagaaaatgaatgatatgccaaagctgcctggaaggatacatttttatttgcaatcctggcatcatgaatgctttagggggaaaaaaaatcatgtcttcatgagacagttaaaaatgatcatgaattaaaatcatcaagctgtgttagcatatatggaaagaatggggtcacatgatcgtttgactcaaacatttcattgaccaaaaactggttttcaaagacagactgtgttaaattgagagtgaattagtttttcatggatattttggaagttctggtccatttgcgcacatttcaaggtgctgatgtcacacagaggtaagccaaatggtttgcatcagatgagagatgaggaagtggcctggcaaaggctgttgctcttcagtgagacagggctattcatacggtgggtgccccaacataggagacaagactaaggcagcctggaattaaaaggttgaaaatatctacatcttcaagtcagaaaaccagaaatgcttctggaggacagtgaatgccttacatatctcagtttcactcccatggcccctgtttcctggagctctgaatacccgtggatgggtttcacatgtcctggtttttaattaagagggtcagtgaccttaaaggacttcacatgtgcaaaaagttatactgtagagtttatagattgcccattgaggatagttgttatgttattataattttatgtatacatacatgaattatactattacatgtacctacatgaacatacacattattacatatactgctgctgctgctaagtcgcttcagttgtgtccgactctttgtgaccccatggtctgtagcctgtcaggctcctctgtccatggggttctccagtcgagaattactggcaagcaactgcagtaatttgccatgtcctcctccaggggatcttcctgacccagggattgaaccctggtctctgatgtctactgcatttgtgggcgggttctagagaaggaaatggcaacccactccagtattttgcttggagaatcccatggacagaggatcctggcgggctacagtccatgggatcacaaagagtcggacacgactgagtgactttcactttcacttctttaccactaaagccacttgtcactattacatactcacgcatacacactatttatacatacgtttcactattacataaacatatatacattattataattactgggactaatttcattaataaatcagactatacctcagtctgatcaggagattagccctgggatttctttggaaggagtggtgcttaagatgaaactccagtactttggccacctgatgcgaagagttgactcattggaaaagactctgatgctgggaggggttgggggcaggaggagaaggggacaacagaggatgagatggctggatggcatcaccgactcgatggacgtgagtctgagtgaactccgggagttggtgatggacagggaggcctggcatgctgcgattcatggggtcgcaaagagtcggacacgactgagcgactgaactgaactgatacctcagtcaaacttcggagacaattttcccagtctttttgattttacagtccataagggtgggcggaaaaaagcttttcttctgtcggctgt

SEQ ID NO: 43141 - DNA, 1456 bp, Bovine  19866880752332
  misc_feature (1)..(1): n is a, c, g, or t
natgggatgtcccaggcaagaatactggagtgggttccaacccagggatcaaaccccgggtctcctgcattgcaggtggattctttaccattgagccacctgggaagccataaagcttggcacaggtagaaaacaacgtgctttaattcacttggtcttcctcaaagcctcatatgagatactgttaatgttcattatttcataacagataaagcatggaaacaaaacaaaaaggataagtaacttgtccaagacaagcccactgcacctgcagagtaatggtatcaggattcaaacaaagaaagttgcattctaaggcctgaactcttaataatattctctatcacctcagtgaaaagtagactttagttctaacacaaaagaattctgagtattcagtcatctcctaggattttcatgttggtcttcgtttttactgcgatccagatatttcattaagggaatttgatcactcagggaatcttttgacatatcttttgggaatgggaagtaaggagacctaggggcgcagtctgcccagtgtaagataattaaatgaacaaatgtcatcatttcgcctacaccttttggtgtaggcatgccacctcttctcttcctcaacatacctgctcatttcgtaaaggaaactcctcctctcctcgcttcagggttctgagatagagccaagacttgttgcctatttctacagcagactggtccttgaaatagtatgtcgagcatgcagagccatctctacaatacaaacagaatcaatgacttgtatcacgcatgttcctcactcccatccttgactctttctgacttcccttcttccaactctacatttttttttaaaatcaaagaggcccccaagggagttctaagaaaaagacattgttgcctgtaaagaaggcactctgtcttcacaattctgggagaccctggagtggaacattctctcccgaatcagatcccagcaccaccacttactagctgtgtagtttggggcaaattacccttccttggcttcatattctgcctcccttgaaacagtgatagtaacatcttaaaggattgttaagaagattaaatgagatggtatatgaacatagcactcaatgaacacaatgatgagctcaataatggtatatgaacacgaactctagaaatgttagctgtttttttatatacatgacaatctaattcagtctccttttcttcgcagtcatgggtaaccatagttgacaactgtatcaagtattttttttttcctgctgagtggcacagcttataggattttcgttccccaccaggcattgaacacaggtcctcgacagtgagaatgggtcccaaccactgcaccaccaaggaattccctctaacagtactttgtataaacctttaagaaaggtagagctcagccacataccaagtgacgtacctgtgttctacagca

SEQ ID NO: 43142 - DNA, 1264 bp, Bovine  19866880763209
  misc_feature (1)..(1): n is a, c, g, or t
ncccttgctccatgctggatcattgccaagggccatagcagccaccataaacaccatctcttaactccatctgtccctgaaacactcaaaaagtacaggctagaacccaggacaactaaactttgggtttgccaacctgatcaccaagcacactgataggtcagacagactctcagagtttgccatcatggcatgaaatggaacagaggagtttccaaagagatggcttatgcatgacttagatttcaggagtcagagaattccctcaacctctggatagagcactcaaaaaactaatgcttttcccaatattaaaacaagtaagttgctttgaacaggagctagtttattgagtaatatgcataatatctggtatgtgcccttccattttcttcagaagcgattcacttccggtaaaataacaagtggtgttcgcggtctgatgatggactaatcgcgctaatgatagactagcttgtttccccaaggctcagtcatgagcctgcgctccacatctctgggcttttaaaagcacattcttcctgctccccaaggagctgaacttcagaaacgttgatggatgaccatttgtgcttcattttccatcttcatcactcttccccccattttatgcttctcctcctggagcttattttaggccccttcttggggctggatttgagagccattgttgttcacagacacaggcatcagcccaaccttttccgatttctttcagaaacaaatgttgtcattgtgcctgacataatatgtattcttgaaagagcattttaaaaagaatatatcatggctccgaagaactgagggaagtggaggtggagagacccgactgtcagatgtgaagcaaccttggagcagggactcagatggaaggcaagaggtgtccctggggagcggccagcttaccacagggatggccttcgctggttgaccagaaggtgatgctgacctagtgatgttacccttgtattgtaggtcttgggaaatttattgagtgtctcctatgtgctgaggatttctaactctaccttaaaagttattttctctctttggctaagatggtggactgtctcctgcccaccaccaactgtcccctgctccccgtgtaccccggtccacatagggggactcctgtagccttataaatgagtgggggagcttggtgggttcagtgtattagaagtcaaaaccactccgtgtctacgcccttgaaaattctggattctcctgacagtgtataatc

SEQ ID NO: 43143 - DNA, 1497 bp, Bovine  19866880775874
  misc_feature (1)..(1): n is a, c, g, or t
ntttgtgacactgaaaaatggattgcatctgaaaacttatcagctaggtaaatatttaagatttaagcttagtcaattttcttaactcaaaatgtcataaaatatccaaattattttcaaaatcccaattttatatggtttatacttttaaaaaatactgacatattaatacacatgaacactcaattttcatagattttaaaaaattatatatagtgtcatagcatttaatttttgctaccaaaaataaatgatttacagaagatccattttcatcattttagaacttaaaactataaaaaacagaaaactgaataatctgtttcttacttacttggacccttagcaggtggtgggtggtttctttggtttctattaaaataataattgtgaaaacagtaaaacacttacatattaaatatttatagttaaattctgatcataaataatctaagttacataaatacctctccttaccccatccctgctagaaattataaaatggtaagattcaagcaactccacaaaagattacagacaaaaaatttatcctattagaacaaatgcctctttgatcaaaattcaaatatttcaaaaattatcactgacttagatgaatttaaaaaagcttaatgatgagcagaaacattcttccgtatctctcctattttaagaatcctatgcaccattttacctctctttacctggcagggaaagaaagatactttatttttaaaaaagaggaatacctaataaatacagagagctttcacttttgattattcaggactctcaaaaagaacaaaaaggcaaaggtctattttttaatttattaaaattctcttgggtttagaagcattcattcatttttgccttaaaaaacttgaagcacatttctaagtttgtgaatttggtttttccaaattaaaaataactgataatcaatactccatgaacatctaataaaagccaaaaaaagaaaatgagctcattaacaagagtataaagtgtgtaaaaataaagcacacctgaagcctgttgaattagtaatgaatgaaatttagcaaaggaagaatctcagacagtgtaagccttcatacattatccttttgtaatttactttaaataaaagactgcaaaggttagagatttctgcactggcttaaattaaatatggcttactgccttgctggggtttgccagctctctgtgtaaatcttttcctcttgttgaaaaattcattaatccctccataggcgaaaaagagggatcaaactgtataaaactaaaagatcattgactcactctcacattattcattgtgagaagtgagatcaatacattaaatcctgtaaggaggctaaataaagccttctcactgtcccagaaatgcagtgacagagtaacagtacccaacagtaccttaaaataaaaattttccacaaaattaaatataatgacttacagtcaagtgctaacttgtctgaatagtacagc

SEQ ID NO: 43144 - DNA, 1141 bp, Bovine  19866880841887
  misc_feature (1)..(1): n is a, c, g, or t
ncctgagcctggatgagatggttgggctttgtcagcaggtggatggccggctgcccctgggcccacagatgcaggaaaaggtgttctagtcctttggtgaaaaatgtgcaaatgttagtaaaaacacctttatggattgttttgtttgcaagtgtttattatcagacactcctcaggggttcacagggcaggtcgcgaatgtccgaagtagggcctgggaatttccttccaccaaggctgtgcttcctctctttgttactcctcaaaggacaagtggaagcattgctcgagagccttatttaaccctttcttctgtccgcctgccccatcacagacaaatccatctatcagcctttgaagaagcagaaagattgcagacttgggttgtgtggggacacccacaggtgcatatgcagacaggcttgtatatatgtgtgtgtatatgtgtgtatatatgtatatgtatttgtgtgtatatatgtgtgtatatgtttgtatatatgtgtgtatatgtgtatatgtgtatgtacgtgtatatgtacatgtgtgtgtatatacgtgtatatgtttgtatatatgtgtgtgtgtttgtatatgtgtgtgtatgtgtgtatgcatatgtatgtgtatatatatgtgtgtgtgttagtggagaggagatagataatacagcataaaacttattttttttaaactttttcttttatattggagtatagccgatcaacagtgttgtgttagtttcaggtggacagcaaagggactcagccatcatatacatatatctgttctcccatcatatacatatatctattctcccctcccattcaggctgccacataacactgaggagagttccctatgctgtacactaggtccttgttggttatccattttaaatatagcactgtgtactgtccatcccaaactccctaattacctcttccccccaacctcccccctccacacataataaagcttgcttcttttttaaagttctctttcagtattactacatacacccagtcattgttcagaccagacaaaatttctactttatttaccaaaacatattttcatagtaaaaatgctcacccaattttagttaccctgtccccattccctgttcccagagcaggcc

SEQ ID NO: 43145 - DNA, 1551 bp, Bovine  19866880849261
  misc_feature (1)..(1): n is a, c, g, or t
natgaggagctgttgttgtcatcagcgtgtatgtgtttgtttacatcacacctcgctgggggtcagtgatacctgacctacagctgtgtcggccctggcatccattcgaaggcttggccatagtgggacccccttcacttccttgaattcattcaactgaattcattcctgataatccttgtccttcagtttttggagaacaatcattagcatttgctattatgcttctggagacagctgcccattgtcttctcagtcttccagttatatatttatggatcagatttcatttatttatgtcaacagctgtctccttatcaacagtggtgctgaactgggactgctctcacctacagtttccagaatttttagcaataatctattcttaggcagaactgaactcgggcggctttcctggcatcagtatttatgggattgtgtttctccctctataaataaaagaattcccagtagaatcgtcatcctcctctctgccttgaactcatgtgcatgcacacatatgcgcctgtgcacgcacgtgcacacacacacacacacacacacgggaagagcagatctctaactgggatatgaaaaaaattatgattcaaatagaactggttaacaggtgagaacttgccaaaccttgttttcattttattctttttttatgagttttcagtcatgttttcattgggatctgcctttgtataggaatccctgagccatttgcctttgagaatgtcttcgtgtttttcaataggcagatacagtagagaagccaggtggaaatataggcgggaaacaaaaaagataaccaatgcatcacacttggaaaaatatttggtggtttggtcattttttttgagctagactaacttctggaaggactataaagatatttaaaatttcagtgagtgtctgtgttgtctccccagtacaatttaaacacatattttatatattagcatgtttttagtatgttaatatttaataaacttggtcggaaaaaacctagatgaattagaccctaacctcaactttgtcctttttctgctagaatttgtgcaagctaaaaagaactcttgctggactcagtttcctcttccctaaagtaagcaagaaaataagatgcactcagaactgttctcattcagatttcattattatatgcgcatttcacagtttctatgtatataccatttatgtagttattctttacattagtgcctatcagtaactgaatctgagcttggagagattaatttttttttttttactggactctaggtaggctgcagtccatggggtcgctaagagtcgggcacgactgagcgacttcactttcatgcactggagaacgaaatggcaacccactccagtaatcttgcctggagaatcccagggacagaggagcctagtgggctgctgtctatggggtcacacagagtcggacacgactgaagtgacttagcagcagcagtagcagcagtcctattttctctagttattatcattcctgaacatcttttaaggggagctgagaatcta

SEQ ID NO: 43146 - DNA, 1715 bp, Bovine  19866880881868
  misc_feature (1)..(1): n is a, c, g, or t
ntaaatatagccgtgtatacatgttcatcccaaaccctctaactatcccttctccccatccttcccccttgcaactataagttcattctcaagtctgtgagtctctgttttgtaagttcatttgtatcatttctttctagagtccacatataagggatggcctacgatatttctccttctttgtctgacttacctcactcgtatgacaatctctaggtccattcatgttgctgcaaatggcattgttttccatggctgagtaatattccattgtacatatgcaccacatctttatccattcttctatcaatggacacttaggttgcttccatgtcttggctattgcaaacagcgccgcagtgaacactggagtgcaaagatccttttctctgcatatatgcccagggtgggattgcaggatcatgtggaggctctatttttactttttttaaggaaacttccatactattctccatagtggctgtaccaagttacactcccactaacagtgtaggagtgttcccttggctctacaccctctccagcatttattgttagtggatttttttgataacagccattctggctggtgtgaggtgatagctcattatagtttttatttgcatttctcaggagtccttttttgccatcgaactaaacaccagctcagcaacctgtagttctcactgccttcaactgtctgcctccttcctcctcactttcacctggctgactcctatttaattttgagggttgaatttttttaatatttcttttgggaaatcttccctgaattcttcagaccagatcaaccactcctctattctcacagctccttgtgtttccccttcatagcaggtatgttattttatattaacttgtctgtctccttcatgtactgtaagttccttgatagaaggaagtgtgtctagtcagcactgtaacaccagtgcctagtaggcattctgcaaatagttacggaatgaattaaggacctgatccatctcaagcatcagccctgagaagtcatttatgtacatgcatgtgctgtacaggaacagaataaaatatgaacggggaaaatttaagcttctgtgatcctgaagaacagaattgtgagccacgaatggcaatgtatgattcttactatattcagaaggtattagaattatggatgaaaaatgtcgctgccatatcagtcaacaaaagatgttgcagtcatcaagtcatcaaccaactgcagacacctcctgaaaaaccacccccccccaccccgaaacacacacacaggatattggccccaggtagctgaggtgcacatcaaaggaataatttcaatgagcccagactcttgcattttttccatacatagagaaacactgctgctgctgctgctgctaagtcgattcagttgtgttcgactctgtgcgaccccatagacggcagcccaccaggctcccccgtccctaggattctccaggcaagagtactgaagtgggttgccatttccttctccaatgcatgaaagtgaaaagtgaaagtgaagtcgctcagtcgtgtccgactcttagtgaccccatggactgcagcctaccaggctcctccatccatgggattttccagggcaagagtactggagtggggtgccatcgccttctccttggtacgtacggttgtctttaacactaatcttttgagcttctgactaccctgat

SEQ ID NO: 43147 - DNA, 2714 bp, Bovine  19866880927448
  misc_feature (1)..(1): n is a, c, g, or t
ngggggaagggatgggaaatgcatctttaagaaattaagggaaaaaataattccatttagaaatcattcaaatttctttctgacatgtcacacttaatatcagttacccattttcctttctctttgtgcttgcctcagaattcttcctgactcagaagctaactttaatcttctgctttattattaaattaaccttttttttttcttttcattgggaatgactgattaccaagcagacattaaatttaaaaattccactctgtgaagtggattttcccaaacccactagaccttgctggcaataggaacagtatgtccagtaaaactgggttgtggttgccagaaagacgactatgtcttggaccacacctggaataacagataccaggagctgttaatctagtcttctctccctggagggtgagatttcagttttcttaatgtccagggtcttagaaagaggataagaaaatttcaaagtcctgaggacaaaggaatttggtaagaaagaattctgataattgtagaattcagaactaaaaggctccaagtatataatctaactccttcattttaaagattaagaaaatgagatgcaaagttgttatggctgcagcccacaggtttatacaggtctggctaggtttcccgtaagtactttctctaatgcactgtcctctgaatgcaggcactggaatgtataatccagttttattcagcttgttcgggatgtcaattaattgctctcccttactgggtgttccattaagtgtcccccaatgccacagtccattcctttctgacctctctttttcatatcttcctttccctcttttatgctttttttctctcattctttttcttttcttttctgggccttgctgcagggcttgaaggatctcagttccctgaacagagatcaaatttgggcctcctgcagtggaagcacagagtcctaaccactggaccaccaggcaattcctcctatttttttcatttctgattacttttatttattaaaacagctaaatcctgaataaagaaccaggcaatagatttataggtggtgctagtggtaaagaacttgcctgtcaatgcaggagacataaaagatgcgggtttgatccctaggttgggaagatcccctagaagaggaaatggcaacccactccagtattcttgcctggagaatcccatggataagaggagtctgatgggtttcagtccatggggatgcaaagggtcagacatgactgaaacgacttagcacaatagatttaaggttcgtgataaggaagatgatgttggtactgttaacaatacctacattgttctttccaggttgcaaagctctctcagttccatattctcttccccttacaacctagagatgagttaggtcaatattatttttattatttcatacggaaaccaagggtaaggtgagtgaacctgtatgcctgaggaccttacctcaggaaaggagacgaactcaggcataaagcctgaggtttaggactcagaacccaagagtcttaaactatttagaactttagaactctgcctgtctggagtgtggttcacttagagagcaagtcaaaaaacacagccaggaagtacaagatgataaaactatcacaaaggttttgggtaaacataagggaaaaacaaattgttgactagtcaataaaagggagaaggcaatggcaacccactccagtactcttgcctggaaaatcccatggatggaggagcctggtaggctacagtccatggggttgcaccgagtcggacatgactgaagcgacttagcagcagcagcagcagtcagtaaaatatgggaatcatttacaaaaggagattgtgtagtaactcccttaatagagggtttaccctgatgaagcaggttcctagttattccctgaagcattcccaagtgtgttttcagaagatgttttggcaatatgtatcaaaaacagtaaagacgtgactaacagcagtttctctcaggcaaattgctcattatcttctaaattgtttcttcatctggtaataacagggtttgggggaggattaaataaagtaatgttaaacatcctggcatagtgagggcattcaataaatattgacaatgtttaatcatgataatattttcacttgtatgaggaaataataagcattaaagatttagtgataaagactttcttagctatgtttttataaataatagtgaaaagttggaaagaacctaatgtccagcaatagggaattggtaaagcagggccttctggtacagctacatgctaaactgttaaacagtcacttaaatgattacaaaatataatattacatagtaagatgttcatggtttattgtatttttaaaaagcaaattataaaatattaaggattataaaatattataaatgttataaaatattaaaatcaaatattaaattgattttttgtttaagtgtatatatatacttaaacatatatatacttaaacatatatatacttaaacatacttatatatatatatacatgaaagatgttttgtttagttgctaagctgtgtctgacccttttgtgacgccgtgaactgtagaggagtctgccaggctcctctgtccatggaatttctcaggcaagaatactggagtgggttgtcatttccttctccaggggttctttccaacccaggaatcaaacca

SEQ ID NO: 43148 - DNA, 1043 bp, Bovine  19866881148034
  misc_feature (1)..(1): n is a, c, g, or t
ncaaacatctcctggaaccttgtcctctactttgcaatcctctcctctctcctctcctctcaatgtcctcttgttctaataatcacaaattgcactgaatgctttatcaaaattctgatggatacatgacaattatatgaaggaaactcatgtggaacatacagaattgtaaggaatgactaagatgaaattattatatatgcctgctaagttgcttcagttgtatctaactctttgtgaccccatggactgtagcctgccaggctcctctgtccatgggattctccaggcaagaatactggagtgggttgccatgccccactccaggggatcttcccaacccagggactgaacccatctcttacatctcctgcactggcaggcaggttctttaccactagcgccgcctaggatctattgatttgtttgcttaacttcaaattgaagtactaaatgaaaactgcccattaattagaatttaaaagatcaacagaatgttttaattgcttagtaaggtagatttcataatccaccacatagtatttcaggtccaacatacaggcttcaaactttcttactccaaaaaaagaaaacaaaacaaaaataacaaggcactgatttacctcataaacttgttcaggtctgtggtcccgtgagtacctaaattctgcaactgttcctgtaattcttcagtcaattgtccagtgaatttgtataggttgaaaatccccattttccctttcaccgtgatataaagtttctcgtgcagttttaaaaagatattctttgcgatggatgctataaacagagaaaacacttttcaaaagaagcaaccccttcttgaagtaaatagtcaatatgtcttgatcagcaggaactagagccaaaggtgaagattcaacatagactgtgagatggtgaaagccttaacaaagtttacgagaccttctaccctctttccagctctccaatggtatttccagtgtcttcgccctccaaatatatattccgggtaaaagacactcttttttacatctcaccat

SEQ ID NO: 43149 - DNA, 994 bp, Bovine  19866881216545
  misc_feature (1)..(1): n is a, c, g, or t
ntgtttaacctaatttctaacaattatttctgagtattatttcctactgccagaatggaaggtgcaaacaaataaaaatacgatcaaaaggaaggttaaatattatgacagaataaattaggatttatataattaaatttcactccatcaatcaaaatttataactaattactaggaaatggaaagccactccagtattcttgcctggaaaattccgtggacagaggagcctggcaggttatagtccatggggtcgcaaagtgttggatgcgactgagcacacatacattgtacgtaatcttaatagttttatcttgactgtaatttcagtatcggggttcttgaggacctctgtcttaagcataatccatgtccagtaacttgtctattagaaatgcttactaatctgatctctacttatgtgttttctttcagtatggaccagtatttacagtcattgttatgggcacccgaatgacctttgttactgaagaagagggaattaatgtgtttctaaaatccaaagaaataaattttgaactagcagtgcaaaatcccgtctatcatacaggtaaacagtattttcagataggccatttgaaatacaacatggaatcccaagggcagttctaggtaacaagcacgtcttcactcctctagcaaaaatgaggcagacccactattttattctttagagtagggatagaaaagagtttgtgatgagtttggcctttgaaaaacaaattgtgtgcttagtcgctcagttgtgtcaactctttgtggcctcatggactgtggcctgccaggctcctctgtgcatgggtttttccaggcaagaatactgaagtggtagccattcccttctccaggagaatcttcccatcccaggggtcaaaggcaggtctcctgcattgcaggtggattctttaccatctgaaccaagccctaaaaatgaattatttggtagtgtcaaacatttaggatctccacaagg

SEQ ID NO: 43150 - DNA, 725 bp, Bovine  19866881243286
  misc_feature (1)..(1): n is a, c, g, or t
natgcttttttacagcacctgtaaacaagtcagtgaagtatactgttctgagtttccccataaatatatattattattttttttttttggaatgttagaataccacaacaccaactgcattacataatagttactgaaggcaagttaggctataacaagggtaaaattttatggctaaaaatattcatagcagcaacttttaaaaagatgattttattaaatcaagtcattgcacttggtcattttattgctacagcaatacaaggccattaaattttaacacttctcattgctgatttgaactgattgtctcattctattcatacatttcaagtttaaatgcaagcataaaatgtttaccaacatcgagagagcacttgggttgttgttgttttctgtgatcacggtaagaagcataaaaagagaattctctgttacaccaggcccattctctcttcctatcttcagacttagattttgtagagaggtaacagctttacagaatgaccgaagcctagtggtcgcatacatacacacagtacatctaacattaaaatataactccccaaattagtaatatgacgtgtttcagagaatagcaaacctgaacaacacattcactaacaatttggcaatgacagatgccaagcagttcacctccactctgtcatttatactcactcattattaaaaaaaaagagaaaaagatttatccccaagtaaaa

SEQ ID NO: 43151 - DNA, 770 bp, Bovine  19866881328491
  misc_feature (1)..(1): n is a, c, g, or t
nctcttatgttgttgcaggaaacgctgaaatagacactgacagtggctgcagcagatacaccctcgtggccaatgggactcagtgtccgagcgggtcgtctggaacgacagtggtctacacgtgtgagttcatcagtgcccacggagccagaggcagaaaggacatagaagtgacattcatgtctgtgggtaaggactctttcactagcatttttgggcttgcccctcaaaccaggggctgccagtaaactgggaacatccgtgagcagtgaagccgggccttccctggttgtgagagggtggttggggtaaatcacacagtgggatttgcatctctgccagttaaattcacaggaattccttacaaggaaaggtaagagtaggaagcagtggttgcagggaaggaaccgcctacgttgtactgagaaggcaaaaagctgaagtaggtttcacactcagattagtcactgaataaggaaggaatcccatggtctaagagtcggacacaatggagcgactttcacttcacaaggataatgccccttatatcctactttttctcccataatcccattctccctctcttgaattgcaatagcttggctcactccccaccatccttcattccccccttttctctcccattttatctttttcagagagaatgcagcagaaagctttaggagtctggtatttcctggttatcttacagttgtaacaagtgtgtttgttttcaattaattctaggactcttaaaagtatcgtttcta

SEQ ID NO: 43152 - DNA, 1102 bp, Bovine  19866881424928
  misc_feature (1)..(1): n is a, c, g, or t
nagaagatgggcattattatagggcccttgtcaccagtatttgtgaagattatcttgtgtccatcaggcttgtggactttggaaacattgtagactccgtggaccctaaagcactctggaacatcccttctgagcttttggctgtgcccatgcaagcctttccatgttgcctctcaggatttaatatttcacagggcgcatgccctcgtgagggatgtgactacttttacgaaatagtcacagaagatgtgttggagataacaatattagacatcaaaagggacgttggtgatatccctttagccatcgttgacttgaaaagcaaaggtgaaagcattagtgagaaaatgaagaaatattctaagattgatatgcgtagcagtgatctgaggtatgaaaaaaatgatgcagaagtaaagggagctctcggggtccccagtcccgatgttggacttaagaaatcaagcagtaaaactggacgagagagaatactccatgttgaatcccagacagctgagctcttggaaagactcaacaaagacttaaacatccttgaaacgcaaccaggtaaattctatgaccccaaaactgataacatttttgaagcttttgaaaacccaggcaaaaataagattggcaccgagttgctggaagaaaaagtcaagggcctattgggtgacaaaacgaagtttgatgataagtacccaatgccaggatttaacacattcttaccacatgccaccgaggcaaaggaggtcctggaactgaattctctcgaggtaccactttctcctgacgatgagtccaaagaattcctggagctggaatccattgagttgcagcattccctggtcggggatgaggagaaagaagatctggacctggtgcctccaaccatgactcttcccccaaggctgtgacccagaggtcaccctgccaccattgccagggcagctgcccctcaactgtgaagacgagaaacagcctgaactagaactgcctacagcccagctgtgtctggaggacagaataaaccctttgtctttaacagctagtcagaaagcccaagaagccctgtgcactgaagacatgagaggatcca

SEQ ID NO: 43153 - DNA, 1272 bp, Bovine  19866881456306
  misc_feature (1)..(1): n is a, c, g, or t
naatgaattgctaaaggtctcttttattttactttccaatttgccaattttgcttttgttgagtgtctatcatgttctggacaagggagatacagagtgagaacaaagagtccacagtgcgtgcacaggctaagaacaaagggaattaactagtggctttttccagaggtcttcaaaccatgcatccttgagctctcaaaacacgtgcatgaccgttgagtgatgtcagaaatgtactgactcattctggtgagtcaggactctggctttgattgtctagacagttgccaagttcccctgctgggtctccctgcttctattcttgtctcattagagtctgttctcacacagccttggacatcaaagaggggttatgagaatggagaggacggacaagttctcatcttggtctgtgaagctctcaaatgcctggagaccacagtgctgataccagttagatctatttcatttctcctctaaatagcaaaatcatagagagtaagcccatgaagggaggacttggtggtgattagtaaacaaacttctctttctcagtaaacaaacataaaataaaaatgtttattagaaattcttaaagggtgatgagttcttaaaggcatccacgtgtctccatcattggttttttaaaaatgttttatgttggtgtatagttgaccttcagtgttgtgttaatttcagatgtacagcagagtgattcagttatacatatacatatatccattctttttcagactctttccccctatatgttattacagagtattgagtagagttccccgtgctatatggtagagtccttgttggttatctactttatacatagtagtgtgtatatgctcatcctaaactcctaagtttcattggctttaagttctaaaatgtcagtgtgttctctctcctccccacatggtatgtgctcacagcctttgtctgctttctttccagttgccataagcagccctgcagctcaagagttcaccgtcgatgttgagatcagttttgaaaatgcctccttcctggaacctattaaagcttatttgaacaacctcagttttccaattcaagggaatgacactgacctagctactgacattttgagcatcgaggtgtcaacaggtgagtaaaaggcctattgcttgaaagaggaggattgaactaatcagaagaaactactctgggctgcttgggaatgtggggtgtggaaggggagcaccctgggaagagtgaacctcagacaggaggcaatggatg

SEQ ID NO: 43154 - DNA, 1038 bp, Bovine  19866881634155
  misc_feature (1)..(1): n is a, c, g, or t
naacttctatcttgtggtgctccactggaagcagagcagaaaagtttctcattggcagtattataatttcaactgttttcctttcagagtgactaaaggcccacataggtagcctgggaagtgaggcaaaaaccacctgtgctgcttttactctattgccaaggttggattagatagtcacccttgctgtctttcagatcaacctggccttggacacaagggacagagactggtaagatctggcattgcattcaaatatattttcaatttcaaagaatattaaaaaaaaataataattttgtgtttaaaagttcctcaagttgataaaaattgtagtgattcatcttcttcttaaacttaaaaaacctgttcattaggaatcctttcaagcatacagcaaagtagagaaaaataatactctatgtctatcagggagatttatcaattactaacattttcatcttacttgctttttcttttcctcaattattttagagtgcgttagaaaatatcatgacattgggacagttcatccctaaatacttttgtatgaatttataaagccccgaggctataattccttaataagcattggtggttaagagattatatattcatttatctcattattagaaggaaactagctggcttttggacacaactcaacaggaaagcagaggagacaaacacagaaatcatgacaagctcaccagctagaatcaagataaatacctatgtgtctgtaaatggcaggtgtcactccttgccagagctttagaaagccttcctcctggacaatccctagggccgtgcgtaccatgcccctatatggagcagactctgttgcaccatctcccaaccgagcaagggcagcttctccttgtatttgaagtcgagtttttgtgaggtcgaggggaaaggttgctgataacaacaaagacaagaaaaaaacaaaacgagggggaaactcataacattcagaaaagtgaaccaaattttttttagaaaatcacaggacccagattttagtcaccacaa

SEQ ID NO: 43155 - DNA, 896 bp, Bovine  19866881821001
  misc_feature (1)..(1): n is a, c, g, or t
nattcgaacatatcatgagtcagaaatgtgcactatttcattttactaacccagtgacttaaatggaggacctgagagagtattagaatagtgaaattacttgtcttggtgttgtgggccaaaactggacatatagaaggcattttacatgagcatgatatataattttgtaaatcttcctttcatttaccttttaaatttcatttagcttcatctcttcttgtgtttttatttctttttctttttgcgtgttgcttaaatatgcatttgaaaataatctccataggcaaaaattactggattgtgcttttcaagattttttttgtaggttgtcagtatgtatgtatcagtgtaaaaagcagtttctaacctttcaaactatagcatatttttaacaccttttaaagactgttatctttatttatgcagtaattaacaaatgagatatttagatatatatttaaactcaagatctctcacattatataatgcattttccattaaagccgctgtgtttcttattatgctttggtgtatattataattatttgtgtacacttaccaaacaattcaagacagaaatcaaaccaagcatattagattgcctgttgtgatatattagcctagtgactagatccaagatagaataaagcaaccccagaacatgagtatggaaaagaatcaacagaggtcaacaaatacagttattacagaatgcatattgccaagtagtagtaacctctgcctgttttacctttgtgtcttccagccctttaaaaaaaattctctaaattatttagaatatgaaaattgattaagttttaaaggcaataatgataactgtctttggacttcttttaagaaatagcagttctttgaatctgtgcatgtaaata

SEQ ID NO: 43156 - DNA, 956 bp, Bovine  19866882070315
  misc_feature (1)..(1): n is a, c, g, or t
nacctaaaagtcgcagctgagcacaaatatgaacaagtccaattagcagagactctgccaagatatacacacaaaagataagaatgagcccatttgtatactataaaactgcccaattatttgtcggttccttccttgtgtaaggacaagtcagtgccagaagggaattttcctggcctcactatagtaaataccaaaagagagcggaccctgggccacattgggtcaaaagggttaccaacatctggttgtgaattaaaaggaaaaaaaaaggctcctctgtcaaaatgtggaagtatattttgcaagtggaggcttcgtggactttcgtatacccttctgctgggtatatactaatattgtggctttcttaactttgcttgcatgttaaactttcaaatacacttctttaatgaaacaaatagatgtctctgccttcagggagctcccacagtagtggaggattggaaggtggagacaaccagtaaaatattaataaataagtacattataggttattgtagggcttcccaggtgatgctaatggtaaagaacccacttgccaatgcagaagaaataagagacctgggtttgatccctgggttgggaagatcccctggaggagggcatagaaacctactccagtattcttgcctggagaatccccatggaggagcctggtgggatacagtccatggggtcgagaagagtgggacatgactgatgtgacttggcacacatgcacagtgttttagaagtgatatatgatatggaaaaaattcatcagagaaggggggttgggagggctaaaatgtgacatatggtggtccgggaagccctcactaagaaaacagtgtttggagcaaggtaagaatgaaggtgaggagtgaaacaggaggatatctgagctaagagcatccaggcagagggaacagccagtgccagaactctgggat

SEQ ID NO: 43157 - DNA, 2204 bp, Bovine  19866880135078
  misc_feature (1)..(1): n is a, c, g, or t
nttaaattcaccccattccagtctattttagtttgctgattcctagaatgttgacgttcactcttgccatctcctgtttgaccacttccaaatttgccctgattcatggacctgacattacaggttcccatgcaatattactctttacagcatcggaccttgcttctatcaccagtcacatccacagctgggtattgtttttgctttggctccatcccttcattctttctggagttatttttccactgatctccagtagcatattgggcacctaccaacctggggagttcctctttcagtatcctatcattttgccttttcatactgttcatggggttctcaaggcaagaatactgaagtggtttgccattcccttctccagtggaccacattctgtcagacctctccaccatgacctgtctgtcttgggtggccccacacagcatggcttagtttcattgagttagacaaggctgtggtctgtgtgatcagattggctagttttctgtgattatggtttcagtgtgtctgccctctgatgccctctcacaacacctaccatcttacttgggtttctgttaccttggacttggggtatctcttcatggctgctccagcaaagcgcagctgctgctccttaacctaggcgagtcacctctcctgaccttgaacgtggagtagctcctctcggcccttctgtgcccgcgcatctgctaaagcagaccagaaatgtccaaaagtgggtagtggcccaattcctggaaatccccatcccgtccccaaaatagctagaatactccttccactcattaacctctgaaattacctagccatataaaaactgataacttcataccctggggcccctctcaccttctgagatggcccaaactctgtgaagtgtgaaaatcactcagtggtgtccgagtctctgcgaccccatggaccctttatgaccgaaggacctgctaggctcttttgtcgatagaattctccaggcaagaatactggagtgggtagccattcccttctccgggagatcttcccaacccaaggatcaaacctaggtctcctgcattgcaagcggattctttaccgtctgagccaccagggaagcctgataggtaagaagtggacttacgcagagagaaacactttgtttctgaattatttctgcgatgagacattaagaacctgggctccattaagtcctgggaccaggtgtgtgatctcagttaaaagaccatgggttcaagttacatgatttcagcagcatgtcttgaaacccaccacacctttcactcttctgcttccccatctcttcaccagtctcttctggaagcactttgttcataaatcatttgttcccgaattctcctcttgacatctgcttttgaagaaaccaacttaaaatgggcagttcttaaaatccaggtgtccctgagaagaatagcacctttgagatacaaacgggccagttcattatttgacaagtgcagtcccattaaaaaactgaaaataaaagtcactctgtcgtgtctgactctttgtgaccccatggactgtagcttaccaggcttctctgtccttggaattcttcaggaaagaatactggagtggatagccattcctctctccaggggatcttctcaacctagggatcaaacacaggtctcgatttaattaaaaagtgcttgctccttggaagaaaagctatgaaaaacctagagagtgtattaaaaagcagtgatatcactttgctgacaaaagtttgtataatcaaaagtatagttttttccagtgtacgaatgtacgaatgtgaaagttggaccataaagaaggctgaatgtggaagaattgatgcttttgaattgtggtgctggagaagactcttgagagtcctttggagagcagggagatcaaaccagtcagtcctagaggaaatcagccctgaatattcattggaagaactgaaactgaagctccaacaatttggccatctgttgcgaagagccaactcattggaaaaaaccctgatgctgaggaagatggaaaacaaatggagaagggggcgacagaggatgagatggttggatagcttcaccagctcaatggacatgaatttgagcaaactcggggagacagcggaggacagatgagcctggtgtgtgtgtgctgcagtccagggatcacaaagagtcagg

SEQ ID NO: 43158 - DNA, 571 bp, Bovine  19866880282481
  misc_feature (1)..(1): n is a, c, g, or t
nacccgactgagaggctgaattgaacagaactgatagtgaatgttgctgcctgccataaaattaatgtcacaaagcaatgtttgccatgaccacatctcaagaacagattgttttgcatatttacctgagggccaaatacacttcctagtctactggcctctcctcgtgtgtctgaacggcgaatgtcaaggagttcactgacactgtgggaaccctgcaggttcaaacctacgtgaactctgtaggcttaaacctgcaagaccaaattgatgctttaccctgtttgacgtcacggtcttaaaatcaaatttgcttaccctcattcttccattgttaaacacactctggttattattctgctgtttccttaagagaaaaagataaagaggctctaaaattttaggctataaaaaaaaaactcagggtggctgcaaacctgccatccagatgcccttgggcaattggtggacaatgaaacctagggtcaagtaggtcactcaacccgttaaggctaaaattggtagactgaaaattctgaaagagatgggaataccagaccacctgacctgc

SEQ ID NO: 43159 - DNA, 696 bp, Bovine  19866880345266
  misc_feature (1)..(1): n is a, c, g, or t
nacctgtcatgatgctataaattccccaccatgtgagtcacatttacaatcctgtagaagtggtaaggctgtgtcccctttggttgattagtcacagatgtttattgatgctctttccatgcttctctggctttgcacctgtcgcctctgtttagacaactgccacatttgcctgatgatcaggcctcttaactgtgtccggtatttctgattgccagcaggacagtcgtggctgagaatggtataactctgttgttaaggacaagggttctggagtctcactgtctgagtttggaactcagttctgcctcctccatgactttaatgtttctttgcctcaatttctttatctgtaaaatgggaataggaacatacctacctctttgggctgtggggaaaagaaaatgagctcatatacatcaatctctccaacagtgcctggaacacagtgagcccacaataaaaattagccataagtattatctcctttcagaagtcctgctctcaggtcttcccaggtggctcagtggtaaggaatctgcctgccagtgcaggagacttgagtttgatccctgggtcaggaagatcccctggagaagggactggcaattgttgctatggacagaggagcctggtgggctacagtccatgggttcagaaagagttggacacgactcagcaagtaaacgacagagg

SEQ ID NO: 43160 - DNA, 1452 bp, Bovine  19866880391339
  misc_feature (1)..(1): n is a, c, g, or t
ntgagcagtcataattcccgctggatccatatcctaattgagagtttttagttattttgatttagaggtactttcttctcttgctgttagagaaaaaatttcctctattgagaattaaataatttcttatagaaataaggcatatgtatgtatgtatgtgtgaatgtatgtatttatttatcccatataatttaatttgcattttttatattaaaagactatcctgtgctatgctgtgcttagtcgatcagtcgtgtccaactctctctcaccccatggactgcagtccaccaggctcttctgaccatggggattctccaggcaagaaaactggagtgggttgccatgcccttctcccaaaagactatcttgctgctactgctgctgctaagccgcttcagtcgtgtccgactctgtgcgaccccatagacggcagcccaccaggctccgctgtccctgggattctccaggcaagaacactggagtgggttgccatttccttctccaatacatgaaagtgaaaagtgaaactgaagtcactgagtcttgtccgactcttagcgaccccatggacttcggcccaccaggctcctctgtccatgggattttccaggcaagagtgctggagtggggtgccattgccttctctgaaagactatcctactagctgcaaaattaacaccaagttttactgcagtgcttcaacatcctcttgccttagccacctcctcaactgacctagatacattttgatccctggatagggttagcatgctgccctggggaggattctgtagtagaaattattcaggaggtctgggctgcttgtcaagagtctgctgttctttacttacagaccttggttttcttactggggttgggaaggcaggggatataggaactagagttaatttacggacatgtatgtaagtcttgttattggacagaaacgtttctaaatgtttataaatattaattcatcctcacaaccaccctaagaattacaattattatccctattttatagaggaggctaaataatttgttcagattccataagaatttgggaactcttggaagagacctctgccaagattagcatggttcttaaacaagaatggcctctctcttttggtggcagggggcgctagttgcaaagaatctgcctgccaatgcaaaagatgcaggagactgggttcattccctgggtggggaagatctcctagaggaggaaatgacaacccactccagtattcttgcctgggctacagtccatggggtcacaaagagtcagacatgactttcaagggattccgttgagaatctgatgaaagctataaaccccttctttggaaaatacagctgtgttaataaattaatctgcattccaaagccatctatggagcccagacagattaaaaacccttaatataatagaggaaaccatcagtc

SEQ ID NO: 43161 - DNA, 1673 bp, Bovine  19866880580065
  misc_feature (1)..(1): n is a, c, g, or t
naactttgtatttaaggaatgatttttcttttcgatcctcttattagtctgttcaggctgctattacagaatacaacaggctgagtggtttaaaaataatacaattttcacagttcttgaagtcaggaagttcaagatcaaggtgccagttgattcagtctagtgaggccctacttcctggttccatagatgtcagtcttcttgctgtatcttcacatggcagaaggggtgagggaactctctgggttctctttcataggggtactaatcccatccatgagggctctacttaattaactaatgacctagttacctcccaaaggccccacttcctaatactctgacagtagaggttagaatttcaatatttgcatgttttgatgtttgacagaaaacaacaaaattctgtaaagcaattctctttcaattaaataaaaagaatttcaacatttgaatctgggggttacacaatgtccatagaagttgtttaagagcaattcacacatagtttttcagacatgtgcagcgaagcatttaataaacatgtgaccacaaataatctcattatcctcaggtttatgtttgcaaactatctcaacagtattttctttttcataaattttaaaaaatgtcctgttctcttaagagaattggcttgtcaacgagtggctaaattttactaaaagtccttgaattataaaaatctcactttcaaaaagtcttggcacaccagaaatagttcaatgattaaaagagatgaagttaacagctaacctacaattaaagggaaaaaaaagcaagtactacgtcgttttgttctttatttccttaacttagtatgtaattaagaagtgactcctgaattaactaagagccaatcaggcacagaagggagtaaaagaacgagttaacgaaatgcatactgagctcccattctgccatcttatgatgcagttctgtttcccctcctctcacttgcaaattactgaagtgtgttttgcctcagagagctggtgccaggtgcggctgatgtgtagcagaactagggtgcagggtctcctattttcccctcctgaacggatggttacttatgaggctgctcagtgtggactggaggcctgggaagcgccgggtagccattcggtcggctccggcgccgatgcttcccacccggacgacggagccttacggtcctcaaggcaaaagaaagagactcagaggaagcagagagaccgtcaaagatgtacccgtgctcagcaactcctgcctcccttttctttctctaacaactctttcctctggtgctggccgctgaggcaagccacaaagcagcttctccgccgctccgcccgctgtcaggtgcccttggcggcctgcggccagggggtcacgagtttgcgacgcgcccccgaagctccagctccgggaggcggggaggagcagaaccagcagcagcaacaacagcagcagcatcggcggcgggcgctgtggcgcgcctgcgcacagcccaatcacgcgcggtgcagcgcggcgcgggggcgggtcggcgcccgggggggctgtcattcgcagcgctggtcgccgccctcagctgcgccggtcggttccggctcctccctctcctgtgcctgggtcccaccatggtgctggagtcggtggtcgcggacctgctg

SEQ ID NO: 43162 - DNA, 1862 bp, Bovine  19866880714597
  misc_feature (1)..(1): n is a, c, g, or t
nctcgctctggattcttgttgagcaacgatgttgcctgtagcgccccaggtctacagagtgaggtttgaaggaaaacctcttcttgaacaggtcagcatctttctgaagggcccaggcagagggctgtaggtacccaaatttctccctgagccttggtcacagtctgaggggacttgtggcaataaatgtgcagctttcccccttggacaagggaagtgtgttcatttatgtatatgtctaaaatgaacattaaaaagagacctagtttaatagtatcaaggttttaaatctgccatgaacccagcacagccccaggggtaaatgcctagttaagccccagcattcacccctacatatttgtggctataatttgaccgcacactgatatattaaacatgaaattaggtaatgacataattaggccattgagacatgtgccgaatcctcaggacaccagaacaacccccctccagggttgagtaactacaactgtgactgtactgcttgtttgatttctcagggtttgtgcccagaaggaccacatgttgtctcagactctggaatcttgaaaccaaacatcgacaagtggcttgtttgagtttggttcaagtttagaggctgaagggatcctaagaactcagcaaataggaatttgtgcggctttcttcagcctctccatttggacgaatgtgcgaaggggagaaagaaagcatgcatcatttggttcttaggtactgagaactttcccttgtccaagggggaaagctgcatgttcattgccacaagtcccctcaggctgtgaccaaggctttgggggaaatttggatagagatagaaggaatgagaaagttctagaataggagacttgaaactgatgggtagccagttctttggtccttgtcaatggttttggtgttactgttttcttggatttcatttctgctgaacaaaatgtttgggataggaatgcacagagggtagacctgtccaggcctcaggccctgaccgtggccgcaagcacatcccttgccgtggatcagagggacagtcagggagcgtctccaggaagggacagattgctcttttagctccagttatggtgatgctagtggtagagaacccatctgctaatgcaggagacctaagagatgtgggtttgatccctgggttgggaagatcccctggaggagagagcatggcaacccactccagtgttcttgtctggagaatcccatggacagaggagcttggcaggctatagtccatggggttgcagagtcggacatgactgagcaacttagtacatatggataccaaattcacctgtgattcagaatcatagcaggcctcatcctggtatcatagtggctgggctgtgtatatgtgtggttaattaaaaaaagtttttaacactatgcctttattagatttttcataagagaaaattgctggaaaagaagtacataaacattaaaggaaaaataatcctccacttgaagagaaaatgagtttagagtgactatgaggaaaaatcagaagcagttagaagtttctaaaagtccctaaagtaatgtttctgagctgtggagtgctataacttttgtaatccgtctgtacgaaattgggcctgagatgttgctttactttcttgtctcacgtttctggaaaacttctacttttcgaagataaatcgttcttttctgctatttattgaggaggctactatgtaccatgcagcatgcttcggccacacttactttgggctggaagcatacagggtaccatatgtatcacgtgtaccgtgtacatatgagaatgtgtgagagcactttgaaaagcttgcagagttgtgctaatgtgt

SEQ ID NO: 43163 - DNA, 1268 bp, Bovine  19866880747589
  misc_feature (1)..(1): n is a, c, g, or t
ncattggaatccatcttggctgagcgatgcgcgtgccactaggaagaaccctgagtcatagtaactggccagagacaaccccggaaactaaccccattaccataaaactcaagggccatgtggcagagacgttctcctgggttctcttaccctgctgctctccacccaggcaccccttcccaataaagtctcttactttgtcagcacatgtgtctctttggacagttcatttttgagtgttagacaagagcccactctcagaccccggaagggatctcccttcttgcaacacaatgacagcatcattcctcccaatggtgattggttctcagatgaactaaaacctggtttggccaaggaactgggaagaagtgtctgctggggcatcagcctccccaccctgcatcagggttggatcaagaaacctcttctgaccacaagtaaaaccagcctctggatggagccttcaccaaggatggcaaagataatcaaagaatctgggtatttggtgacattgttgatcaacatgtctaattctttcatacatcctagtccctaaccacatacattcctgccatatttaagccagcctgagttgccaacacagtgtaattgatcccaggcagcagtcacgtgcggaaaggacagcaagcatctggtcacagagtaggcattcagtaaagtttcctttttgcctcatgcctacataaatgcaatcttgagaatgtgtcccaagaaaatcccatctcttccactttcaagagttaaatcctgtgagcctaatatggtgctagactcatggcaggtcttcagtaagtatttgaatgactcttaacctgggactcacctctaaatggtgatgttggccatgcctggactccagcttatggctggctcagtgggaatggaagtaataatagatgtgcatgtgaagagcagaggtctcagtcccatttcttgactctgggacgagcaccaggagcacaggtcctccacttcctccacccccagtctccatgcctgctctctcagacatctgccactggtaaggtggtgccgtctgtggccaatcacctacaaagcaaaccatccgaagaatgtctggtatgcagggttatgtggtatggcgtgggtttgttttttctgttcatcacttggcaagggaatcctgaactattttgtctggaggcacaagcatagagctgaggaccccaggggagtggaaattagagggagggagcgggacggttcggcctctattcctgcat

SEQ ID NO: 43164 - DNA, 2431 bp, Bovine  19866880762157
  misc_feature (1)..(1): n is a, c, g, or t
naaaaataaatagcctatcagccttttaatgacctcaaagacagagtttttttaacataatctcataggccagtggatgatgctaggggctgctccactgtgccaaaaaaatgcaaacacaaccataaacctacatgagagatattaagaaaagtaagttcaggttagatagaagagccaaagcatttactttaaaatctaattctgacttacatttataagaggtatacaattctagacttaatttctcgattaagacacaaagctggggatgttcttagttttcatacagcaaattaaaagccatcaggacttgggcatcagtaaagaaggaccaggtgatgtagaatacagagaagaacccacagcccattaccaaaagaagaaattatatggatactggaatgcagttcttttttctttttattttcaacattaatatgccttctcaacttagcttatggttatattaagctgactatggggtctctggcataaaatcattctcaggaagaaaaaaaaaaatcatcctgtgataaggtttttgagtgacctgtggctacttgagttctgggtggctgcaacttaaggacagaacttcgtgaaatcatttcaaagtcatcaacccaaagataaggctagacctagacacaagcttcttcccatctaaggatgcaggagccattgattcataggagggcacttccagaaggagctgagaaaaatactaataggctgtgagtgactcacagtcattctaaacagccctcctaacaacccaattaaagatccagccatttagcctaatttttttcacctccataggtttaatcttcttagaatcaagtactacgatctccaatagaaaacaaagtaaccctcacttgtgatgcccagatatgttggggaggaagtaagagaaaaaaacacaagtgcagagataccatccacagacagaagaaataccagaactcctctgtgctcaataaacactcattcatttattcccccaaagaactttcactgaatcccaggtatgccctcgacacaggggatgcggctaggaataaaaccagtgcctcatttttgaaaaccaaaatttcaacacagtgaggaagtgcgggaacagtccaacactagagaaaaaatcatagcccagaggaggagcaagtcacctccatgtgagagaaggagacagagtcagaggttgcttcacatcatggggaacacaggcaggaataatgaaaatagagcacagagaacccttatttggctacagaacattgttcattttacaagtatatttaaatgaaacattaatgagtatgtgtgtactcaacaataacaggcaaaacaactagacattagtcacaatccatagaggtgattcacataattaaaaaaaattagacctatgcaaatcacagccccatccttaggaggaaaggcattagtagactaaatacacaaatgtatagaatcaatattccattgccagggaacaatcaagcagcgatcacacacaaccacatgggagcagagcttctcaaaccttaatgtgcacacacacaagctggaagctggggtggagcctgacagtctgcatttctaataagctcccaggtgatgcagacagggctgggcccgtggcccactctgagtgatgctcagttctgactgagcatccttagacatctacagagggggctcataaacgagacaaattccagtcctcatctgaagcctgatgagcaagaatcttaggagatgaggttccctgtcatttctctctaaactataaggtggttctcaagtgcagccagacttgggaaatcagtcacatagactttttgtatacctcaccccaagaaacaggtcagttcttttctgtacatagaaaatgccagcagctgtagaagatatccatggagataatgagtcagaaagaggaagcccagctaacctgaccaggctgatcaacttgaccatcgtgatgcctagaatcacagcctccacaggctgacacctgtcgtagaatctatcttgccccttttcatccactataactataaccaaactataaccaaagctagtgcttagatcattatctctttagcttcataaaacacaccaaagaggaaaaggactttttctttgtttttgcctaaaaattatagataaggggtcatccatgatgaaagactggaaagaaaccaaaagacaaacatgcaattaaccagcccaatgcctccaggctccagtcttgaaagggctcttcagccacacacaccctcactacaaagtgcaattcttttaataaaagggactgagtggaatgtagtctttcaaggctttcatgcacaaaatcgcttctagaaaaaaggaaaagtaatcgtttaccatctccagggaatagggatagacccgggtc

SEQ ID NO: 43165 - DNA, 3711 bp, Bovine  19866880800799
  misc_feature (1)..(1): n is a, c, g, or t
ntgctctgccctgtctggccagtgattggggaatttgatgcccttctccagatatcaaacaaacatttcattttctgcttgtgacatctttttaaagaatgcatggactaaaattagcacagactccattttttcttccttcctctcttttggcctccttcctaaaggatctttactaacgtccaccaagcccatcctcctacacaggtccctgggcatgcacctggcagaggaagagcatttccgcctgtggtcctcttttttgcccttgtctttgtgaattacatccctgaaacattgtgtcccttccccgatggacttgacagtgaaggagctgaagacaaccataggagatggcctaagggtcactagcctcatttctgcctccctccctgaaaacctcctctgagggatcaccttgctgagtgctgataagcatcatagtcatctctctcacagctggccactaaaaccagactacaactcactgcactatctttccagttaggaatcacgctgtgtttggtgttactgaaggccttgtgcggctatcgctgctaagtcacctcagtcgtgtccaaccctgtgcaaccccagagacggcagcccactaggctcctctgtccctgggattctccaggcaagaacactggagtgggttgccatttccttctccaatgcatgaaggtgaaaagtgaaagtgaagtcgctctgccgtgtctgactcttagcgaccccatggactgcagcctcccaggctccttcgtccatgtgattttccaggcgagagtactggagtggggtgccattgccttgtccgaaggccttgtagacacttacagttaaaaacaaggtcataaatcacatcagaaattaaaaaaaaaatttgggtataattttcttaaagtgtgaacatctgcatataatttaaatgtcctccaggaaaaaaacagaaggcaaacaacaagaacttccataacgtgagtgaagcattttcctgccaggtggaaacctgagtggaacaggcagtcccaggttcctctcttttggtagtgagtctggccactagcggtttgcttctgattttgagttgagaggagctggaggggagaccttacctgtactcaaagacctgaacagtatgtgagccaggtcagcttctcttctggaggaccccaggtgggttgtctttaggactaccacgcttactagtcctaataaaagggaaacttctcagaaccacgggaactgccaagagaccagagctggtcagctggcctggtctccccaggttgatctggtcccaggggaaactccagggaaacagtcaacagacaaagcaggtgccagagagaaagcgttgccaaatggttatgccagccacctgggaagggactggcctctgcacccagatgtggaataactgcatgtttctgcaacatctgatggacaaagtccaagcttgtccgattagtattttggggagcagttttcccacagcagccaccactctttctttaaataccactggaataatcttttaactatttctgttctttttttcctgtatgtcattccagatttatgttacagatatctatccatccatctgtcctttatcagtggagaaggcaatgtcaacccactccagtactcttgcctggaaaatcccatggatggaggagcctggtaggctgcagtccatggggtcgctaagggtcagacatgactgaacgacttcactttcacttttcactttcatgcattggagaaggaaatggcaacccactcaagtgttcttgcctggagaatcccagggacggggggagtcttggtgggctgctgtctgtggggtcgcacagagtcggacacgactgaagcgacttagcagcagcagcagcagcatcctttatcagaatctactaattgtgctttctatttgatagaaaaattcttaaagataatgtcaaactcttaaaaaaatatataggcactcgagtgtctatctaggaagcatggatgaagaacagatgacaggattttcccaaagatttaattaggtagaattgttacactgtaaagccatgtgacatgaatcctgtgtgtgtctgaggagggtctgagagacccactgctctatttggtggggagtcatgtgggaatacatgctgactaggggccccactcacctttactcttccgcgcacctcacatctcctggcctggaagcagctagtggtacaggagctcaatgtccactgcttggtcatagagaaaatgctgtatccttctccctgaacatctggctgccttttcccatttgcccaactaatcagtagagcctgctggtcaacagcaaaatgtaccctaaaaagatacatcaattctaatgtaggggcttcaaacttcaggtccttttaaactgagcttttcattattcagaacagcttgctgttgcttttccatgactgtcattttggccaaacaactttaactgggcctaaaacccaaaacaacgccatctagctgcgtgaaggtagcattgactacggcagcatcttggctggcgtatagctcgcttctcaatgaggaggatcccagggacaggctccacttcctgactctggaagctggggccccaacactgtactgacctcccctgtgtcaccacttgtctgctgctgtgacctgtcactaggcggtccctgccagcagcgttgggctggctcttagacccaccagaagaggctttcctaatccacctgtacacacttctggctcactatcttcatagagtagtgtttgtatgttcaggagtgacctttacaagagcacatcctctttgctccaaaaatcggagccattagcacaatacttcccctttcagaaagcggagttttaagtcttttgttgaaagagatcagaatgaactcacatatccttcacaggctcttctagggggaggaggtcagagctaacccagttaggctgttacgtgccaggaaaaaatgtttcacaatcccgaacttcctggtgcacccaattaggctatggaatcactttctgattgtcggcatattctaaatattatcaacctcttctgacaagttaacctgcaacaggaaactcaacagacagagtatattccacactgcgttatctttattagatatatttcgtccccaaggtttatataaagcccagtgactcaccatccatacatttggtttggctgatttggtttatacattttgttactgtgggtggaaagcaacgttacagagagttgatttgtgcttgaattttttgctgaaagcttgatcgtgaaaattactaatttctaaattgaagatcaggataaaactgaattaaaatgaaatgtaaatctagatgtgtctggaggttataatcctgaccctgtatcacaaacatgggttttattcccccacgttgagcacagcctttaaggattcatcattgcacaaaactaagctatacataatacctaagctcttatgaaacatcattaattatgatttgtttctataataaacaaaataatctagcagtacagatacaggttttaaatgctacaagaagaaatggaatataacaaaagagatgtaatgagtaatctacctctgattctaacatattctttcctgttgccttataagctatattaggaacccccggagacagggcaagaca

SEQ ID NO: 43166 - DNA, 1604 bp, Bovine  19866880849926
  misc_feature (1)..(1): n is a, c, g, or t
ngcagtaaatagcccatgtgctatcactttgtgcctgtggcagatattgttagaaaatcatgacagtttcctactgatcctaggagagggagccactgccagtccctgggagttggcaggtgtgatgaaacctgtgtttcattctggacacagctagtcctgaggcatgggccatttgccctgtcctgatcagtctttatgtgatgggtcagcatgccaccagcctctggaaggcctccagtgggaataaatatttatttctggtgaatggccagagtcagtgactctgattgtaaaagcctctggtcagtgttggtcttttcccctttgggaatgagttgtcatatgggaacactgagattttggcctcgattccagtgaacttggcattttaaaagttgctttgggctgaagtcaggagcccttagcgaggggacaagaaagtatttggtctcccttgctgtggtctccgggttaaccaggatcaaggttattctagggacaggaactcctgtacttggacaggagtgctgacagcatgcaaggcatggctctgagtcctgtgactagacttgagacgtgagctgaacagctgggatggtctcttcattcactaggttcagacatgttcatatgtaatcaacacatgtttataaagaacccactgtgtgtgagacactgaactctctgtcctgggttccttctcaccacctccccagcttcatgcgccttgttgtccttcaacaaggacaacagtttagacctctcatgaacttgattctttccacttcccagaggttacatataacctagactttagctgctgctgctgctaaatcgcttcagtcatgtccgactctgtgcgactctgtagacggcagcccaccaggctctcccgtccctgggaatctccaggcgagaacactggagtgggttgccatttccttctccaatgcatgaaagtgaaaagtgaaaatgaagtcgctcagtcgtatccgactcttcacgaccccatgaactgcagcccaccaggctcctctgtccatgggattctccaggcaagagtactagagtggggtgccattgccttctccagactttatcatctaatcactgccacattaaaatactagatgtatggtgcacctttgcctgttcaaactccttattcctgaacttgagatagagaccaagtcattcttgattcttatatatcttttgggtgttgtttattgttgttgagtccctaagtcgtgtctgactgttttgcgaccccatggattgtgtagcctttcaggctcctctgcccatgggatttcccaggcaagaatactggagtgggtttccatttccttctctgagggatctttccaacccagggatcaaacccgcatctcctgcaatgacaggcaggttctttaccactgagccaccaggggagaaggcaatggcaacccacttcagtatttcttgcctggagaattgggctgctgtctatggggttgcacagagttgaacacgattgaagcgacataacagcagtagcagcagcagagccaccaggaagcctgtatcttttaggtaggttaggcctaaaggtagat

SEQ ID NO: 43167 - DNA, 1419 bp, Bovine  19866880872514
  misc_feature (1)..(1): n is a, c, g, or t
nagttattacagaatgtcaaatctgtccctgtgtttgggacacatttctgtattaatacctgtttggcctctacaaatgattcatgtggggcagtggaatgactgagtcactgtcagaataatttactcacatccctctcatcattattgtacattctttcctacagccaaacattactcacatgtctctttgacctacgttaatatgaatgtcactgataggctgttttctctctgctgagctgaggtgtggtaaacaggaaaacaagatgaaaagcatttccaatgatagttatggaaccctgtggttaaagggtcaacccacattttctagtcatggaacaaaggaatgatgatcaaacttggcattaacaaattctacctctgtccacacctcagctatttcaaagggttttctagtgctgcttcagtgaagtcaatttccccctcctacccacaggcatctttttgctgccccaggctcaggaagcaactgtgcaccatcctctttgttcagacgccttttcctttaggcaaaaagaacagaaatcttctccaactagctcagcaaaaagcagggactatatggacttccctggtggtccagtggctaagactctgcgttcccaatgcagggggcccaggtttgatccctggtcagggaactagatcctacatttgcaactaaaaattctgcatcctataaataagacccaatgcagccaaataaataaacattaaaaaaaaaaaaacccaaaccaacagagactgtgttggaaggaaagtggggtttctctcaggaagctgagctagtgaggagataggaaatacttgggagagctagagttccttctctaaagagatacatttttaaacaatttaaggagacatgtgggtaggagggtcactgagctcctgttgccaggttagaggaagaagtatgatgtcaaggggtttgacagtaagtccagccccacctgacgctgcatcatggggaggaacaactgtaattacatgacacaagaaacccacgcttcatctatttctacctgtgccaagtggcccttcttctgttcaaatcagagcatggactgtgccccacgcaccctgttatccatccgaacacaaggactgcaggctaaattccaaatacccaagaccgaaatcttcagttctgcctaagagaatggctcgatctttgaaattttattgtcttgtacagggcattctctgtactagtttgttgtagttataaaacagttagcaagacagcttacatttccatttaatcaatattttctatcctatacatctctgctcccaattttttttctcttcaaaatccattctttaaaagaaaaaaaaatcactggagaaatgtgtgttaaaaaacaacaataaaaaccatctaacaactga

SEQ ID NO: 43168 - DNA, 813 bp, Bovine  19866880921201
  misc_feature (1)..(1): n is a, c, g, or t
natactaatgcatatatatggaatctagaaagaaggtacttgatgagcctatctgcagggcagcagtggggacgcagacacagagagcaggcttatggacaccaggtggggaaggagaaggagggaaaagtggagagagtagcatggaaacatatacactaccacaggtaaaatagacagccagtgggaatttgctgtgtgactcagggagctcaaaccgggctctgtgacaacctagagggatgggatgggaggcaggttcaagagggaggggcatatctatatctatggttggtttatgctgatgaatggcaggaaccaacacaacattggaaagcacttatccttcagttaaatatagaaataaataaacaaataaataaataaaatggcattatctccaaaaaaattttaaaaagccaaccagaggaaccagtgcatgggcagtggagaggaagagggggtaagacagagctggggagatacaaaggcgaaactcttgctttactgtgggtttgaaaacagaatccacagccaagttattctgacaaaagcacacacagaaggccaactacaaaggaggaatatgtgtttgaacagatgccaagagaaaaactgacttaagacttcgtactgtgtcaaaggctttgtttgttgacagtagaattatcttgagtttgtgggggaaaatctcgaggtcctctctgaagccttcctcagagactcataccccggctgcagtgttttctcagtgaagcactcctaaggaacacggtaacaggacgagggtaaaccaaggaggagggcggttcc

SEQ ID NO: 43169 - DNA, 1463 bp, Bovine  19866880928521
  misc_feature (1)..(1): n is a, c, g, or t
ncaatgagaaacccacgtggctcagctaaagagtagcccccccgccccgcttgccacaactagaaaggcccacgcagagcaacaaagatccagctcagccaataaatggaaaaaagaactgctcagcaggctggtgcggaccagcctgggggagctgacggaaggcttcaactagaggcaggggtgtggtgaggagcagggcaatgagcaccgcatcactcgcctcagccccgctgatgaccaacttctctggaacctggtctcctcatcccttcacctactctaagggtccttttctagacaaaacagcctcacgtctaagtcagtgtcccatttcctgcaaggatttggcactctatccctgaacatgtaatatgaagcaacaaagcagaagtcatcaaaattggcaagaaatgggtgatgccattaaattttcacccacttctgatacttgaggacaagatcaaataacctgtacattaccacagaaaaaaactggactatccttgagtacaatcctgccaatgacctgagaagacgagcctgggggagagcgggtagggaggtgccaggggacctagtgaatgaccccatttcagaagcaaacgcggggatgtattcaatacattctagtagcaccaagtcacatgaatctggatgcacaaattaaccccaggctggttttaaatcatctctaagagactgttacacatttcagggagatctgagaatgttgtgcacatgatcctcgctttgtgcaagaagatgcctgcctcattgaaggacaggtggctgcctttagcaactttgtaagtagattaaacacaccaaagaagcagtgcagagttctggataccaggatgagacctgcagctagatggaacagcacaggagctgcgtaaccttaaccaagtgctgcacattccctaagcctcagattccttacatggaagactggaacagcagcagcatcctcataaagatgtcacaacatgaattaacacacagacaccatgctggtaaccatggcaacacgacaacattattcttgtcctatctagctaactttacggcttgaggtcaatcatttgaactctgtggtcctcttttctccccctcgagtaaaaaatgaagggaggaagattctttccaacttaaaatcctttgattctaagctcctgtctgctcatctgcttaggagatgcatcatggagagcagaaacaacttgaacttctagaccctaccagtttctgaattatctgtaagaatgacagaagaagagtcaacatgcaatggattatgaatgcaaccccaagtgactgcaaattctaaagctaaaagtctcagtcagtgaagttgtaggtaactattatcccaacaggtatcatttactgccacttactacttgatggacatgggtttgggtggacttcaggagttggtgatggacaggggaggcctg

SEQ ID NO: 43170 - DNA, 1501 bp, Bovine  19866881031159
  misc_feature (1)..(1): n is a, c, g, or t
ntagtttcaaaagtagggaagaaagtgactcagccggaaggttggtagcatgactggggagtggagaacagggcaccctttgaagcatgtgagccgggagttgatggactgtgaggtcggctggcctgtgaaccatatgttgcgctttattccttatcattgctcacttagtcactctgcttgatggcggagatcctgctcgtcagttcttattcattgtttatgaactcaccagaccttttgagtattcccattgaaccttttcactgggcggtgattgccgtggcccaggagtgatctctgcatttgcccccatcaggccctggatggggacttctccgaggacaaccgcaacaagtgtcgcgtcgccaccgcccccttgatcgcagccgtggagaacttgacggcattcgcctccaaccctgagtttgtcagcgttcccgcccagatcagctccgaggtagggagtcttcacagcaacagtgacattgaggcctgtggctagttttgtgtgtccctgaatggaatgaacagttaagaattccaaaacccctgtctgtcagtacatagggcactgttattttgccagtgatgacacatgcagttaatgaaactgtgttggtgtatctctcaaaaggtgatatcttggttttatatgttgagaataatctctgggcataggtttggggctgattcttggtatatgtcaaactcaaaaatgatacttaaagattggacatggccccaagttctccccatccaggctccatgtgagccagcctccgtggttcccttccctctgtcttgataaagagcatgaccttcctgggtcaaactcattcacttaatctgtgtgccctgcacttgacttccgctgtctggtcccagggctcccaggcacaggaaccaatcctggtctcagccaagactatgctggaaagctcatcgtacctcatccgcactgcccgctcactggccatcaaccccaaagacccgcccacctggtctgtgctagccggacattcccacactgtgtctgactctatcaagagtctcatcacgtccatcaggttagtgtctccttcagaaattgcttgcagcctgcatctgacagggcaggagggggataagcccatcgggacttttatttaacagcagtgttattgattattgtcatcattttttcttctttgcctctttgggaccaatggtagcacttgtcacaacaatacaaatactaacaaatatttgttacgtgctcgatactattcaaggcattttacctgtattaatgttatgtttatcataacaaccttgtaaagagatgctgctattgtctcccttttcctgaggagagaattcagaaagaaatttagagtgacagttcccaaggtcgtctccaggtctgcttgctttagcctcagtccttctaaccattgtaccgtagttgtctatacctaggagcttaggcagagagcaccactgtatatttagcaggatt

SEQ ID NO: 43171 - DNA, 1750 bp, Bovine  19866881049322
  misc_feature (1)..(1): n is a, c, g, or t
nactcctcccaccccactaaggaccagcgaaggtaaagcacacagaacacttttcaaacaggtatggaacgaagacgaccccaggggagtcatgcgcgtcacaaacgacatcttgaattcaaaaattaattcacaaaaagaatggttaaagtgacaagttcccctggcacattttttggagacagattcatttcagtattattatgtacagtaaatttcaccctttttaagtgtagagatcaatcgattttgacaaacacatgcagtttctgcagcaatgttaaaaatagattattcacctctaactttccaagaatatgtgacatgaagtaaagagggcacatatggcttgatgacacaaaactaactctagcttctctttctaaaagtaatggtccccattctgccagaaagaagaacctagaagtgaaaatcttgtctttgggggaaaaaaaatcaatttgtagatgcatctacaaagcaaggaatggaaactaccaagatatactggtcaatgcagttgaatttcctttactaatgggagagtccctccccttgacaacacccctgctcatatgaaagcatttaccttttttttaaaatatacaaatggagcccaagaatacaaacctatttctaccataggtcatctttagccacttgtgcagtttaaaaccacaaagcctccttgaattcattccaaaaatctctaataagtttcacatgactatcaatgctccaaaggaatttacctggacaaggagcataactttcattttaagacgtatcttaaaatgaattgcatgagcttatgtacaaaagggagggaggtgattattcaactagaactctaaaaatctgttaaaattacatcccagctgcagaacaaggtcctggtaacttcagactacaaaaagaattacaagtcggaaaatggcaacaaatgccactgtaaacaatctaacagtgttttgttaattttatttttatgtatttattgttggctatactgggtcttcgttgctacacgtgggctttctctagttgtggtgagcagggacttctctctggttgcagtgcatggcctccttgttgcagtggcttctcttattgcacgttcgcaggctgtagagcaccggctcagcagttgtggcacacaggcttagttgctccatggaatgtgggatcctcccagaccaggggtcgaacccacgtctcctgcattggcaggtggattcttaaccactggaccaccagcaaagtctctaacagtgtttttaaccttcctatttggctggactctggtaaaaaccacagggttttccaaaccctggctgagtggcactgaaacctcagtatccctaacaatcttctgattatgaaaactccctattcttgggtcccacacagatctaccaaattagaatacctggggcctgggcaactacagtatttaaccttcatcctttaaccttattcctgggtaattctgatcatacttgacctaaggaccacattctaagaaatacactaagagagcatgtgttttgttatacagtcatcaaaataaagtcaagttggtgaaataacctgaacattgatcctgagtataagttatataatctacaggctaacggccaaggcttaagaatggtttttgtgattcagagagaatgtcattgtaatatcaacagatgaactacacagggataatctttcgttaatactgtgttgccagttctgtggtccc

SEQ ID NO: 43172 - DNA, 1033 bp, Bovine  19866881126351
  misc_feature (1)..(1): n is a, c, g, or t
ngaagaaaagacatgaaaggatacttttacacttgtagaaaggagtaattttctgaaggctacttgcttagtgtttgtgtgtgtatattcttgtttgggcttatatcctcatttatgattgaactttcttcaaataacccaaatgtcaaatgtcactattttcccatggctttgttattgtagaaattattgaggctatcggctgggttcccttcctagagagtgaatctggcatatatttactgattcatgtggtgcaaagaacctagaaatgtatcttttttaaaaatgcaaatttttattttatttatttttggccatactgtgtgggttgtgggctccctcttccctgaccaggaatcaaactctggcccttgacagtaaaagcatgaagtcctaaccactggactgccagggaattcccctatgtaaattatttttaacttgaaatctaaataattaaaccatatgcgcaataccaagcttaagaaatagaaccgtatcaatatctttgaagcccaatgcgggccactcccctcccacattctcctttcagacatatctttaaaggaatatgaaatcttgaccaggaaactgtttgagacttgtgactgtggatagtgttttcactatattttcttgctctagatagaacttcagggaggacaatctgggaggtaaataaatggctgagattctgttggatttgtgtttctggaccatggtttctgataccagaaagaagggcctttgctagggctgaagtatttaagaggcctgggaaggttaagattgccctgagctaaccggccttgtgaagaggaccttaaactcagttgacaagttataagtatctcaattcatagattttggagaatagcagatatgactcagaaagaaggatccacagaaggagcaggaatagtattcaaggccttgaatgtccacagtgacaccttgagggtccgaagaataagaaaatgaaacttgagatacagtggacactaggtggaaaggcgaaagggggcagagg

SEQ ID NO: 43173 - DNA, 1352 bp, Bovine  19866881227755
  misc_feature (1)..(1): n is a, c, g, or t
ncttaagacattttcatacagcatcttatttcttattgctcaggtacagttctagggactggaggtggggctagctctattctcttggatactatgttttactggacgaacagacagaaacaaagacataagtatatagtacatgatagatgctatatgagatggttggacggcatcaccaacccgatgaacctgagtttgagcaagctctgggggttgctgatggacagagaagcctggtgtgctgcagtccatggggttgcaaagagtcagacacgactgagtgactgaactgtactgaacctgatatactatattataccatatcatatcattccataccatatcacatcatgcatacatatattttttgatgtgaaccattttttaagtctttattgaattttttacaatattccgtctgttttatgtttgctgttttggccatgaggcatgtgggatcttgggtccctgatcagggatcgaacctataccccctgcattggaaggtgaagtcttaaccactggaccaccaagcaagtccctcatacatacattttttaaaagtgatgccgagtctcctccctaagggaggagagaaggtgggctcagagaggtgtctcttacacattacatcttctctggcttagagcacgaattccctgctatggatgaaaacctggactggggaataagttttcctttcagtaggagtcgcacaggaggcaggaaatgtgggtgagttccttgagcgatacttcttgctctaagcaaggggggctgctgtgttcctaatccctgagactggcctgacggatgctggataatccatctgttgagcgtggctggctggcagagaaccatgctagcagtcagggccagctcagtctcttcctatcccactctgacagcttatttatcttattcacctgggtaacagttgtagcaaagtggagtgtggggtctctgccattagagatgacattatgctggacagcagagccatcctgttgtttagtgaaaagacaatgaccctggccttgcgctcagccagagggacttcatctctggtgacctggctggtgatgactgggggatctggggactctgatttagcagggggccggaaagagaaggtgaggggtcaagcaagtctaggtggtgttggcacacaggaaagggcatggagagtgacagccagcaggtgtgcagttacgttctgggacgagaaaaatgttttaggatgagagaggggtgacggttccacaactttcaggatatactaaaaaccactgaattgtgcccttttatagggtgaattttaggcttattaactttatctttttttacac

SEQ ID NO: 43174 - DNA, 824 bp, Bovine  19866881252133
  misc_feature (1)..(1): n is a, c, g, or t
ngagatagcttggtgatttcaatttctttgaaatgcttctacctgaatggtgacaagggagttggcctatgggctctgttgttgtgctcagtcgctcagtggtgtccgactcttttcgaccccatagactgtagcccaccaggctcctctgtccatggaattctccaggcaagaatacagagcagtttgccatttcctcctccaggggatctttccggccgagggattgaaactgcatcacccatgtctcctgcattggcaggtggattctttaccactgtgccacctgggaagcccagcctgtgggctctaggtggaagttaaaactactgacctcccagcttgcagctgggattgacttagctgaagaaagatagactgttaagacactgtattcattcaagttttgttgctgaaataaacattatttaatgttacacagaagttgttttattctgttgatgttcatgacagtcctttagaaacaaacatcaaaggcatcagcacgtccccaggctgttttctggagaggaaaggccactgcctggcggacaagcagggggacacctatgaacaaggcaggaaagcggctgctgcaaccatttgtcagcgttgccttatgtgaggccactttactatatgacgtaataaagataatttataatgttttcatgaaagcaggagtgggtggtagtgggcttttctttgtcttttcttggcgtgtaattgaaatggagcttggaccaaatgagaaacatttgtgttgaggggaaaatagatcccagaggcttctgactggggtcaaatattgcctccttacttta

SEQ ID NO: 43175 - DNA, 845 bp, Bovine  19866881314664
  misc_feature (1)..(1): n is a, c, g, or t
nactgatagtttgggggaatcatatttgattagtttttgtatgcttagcatcaagcccagtaacaagcatgtggaatgtgcttgagaaatgtgtgttgaactgctgaaataaaaacatcaggttcattgtcaaatcaatgaactcctcccaccagcccgtggtctgtacctggcctcagggcatcatgaaggcgagtctcacctgtgtagtgctcattgccttgagcagcacaggtcaggagctgcgccatggaggagcctactgctttagatgtacttcccaggtcctgagcacatttttccagctgtaagaatatgcaacagggagaagaacttagaagaaccaaatcatccacaaaagtcttagtccccaaataatgcaaatcaaactctgggcttcaattctttcccatctaatataccaatggccctacgaagaaggagggtgacagaggggaaagaacccaggtttcagggtaaacaaatctgagttcacaccctgccctctgctcccctcctctacttgctacctgtgataggtttgggtaattcactgaacctctccaagtctctgtgtcctgagattatagtatctagctcaaaggttttcagagaattaatgtaggtactcaacaaatggtagctattagtattatgcctttaaaagctaattcagaaagtctgcaaaaaatccttagtgagaattaattatgccttggcaggaagtgggcagacatccagctgttccaccttcctggcacgtgggaccattaccattgttcaatttgatcataatacttttatggaattctaaccagaaggaaatgcaatagaaatagaggctg

SEQ ID NO: 43176 - DNA, 919 bp, Bovine  19866881348510
  misc_feature (1)..(1): n is a, c, g, or t
naaatttaaaaaagaagtattaacttatttcacaattctgaggtagttactattgtccccatattatacaaaatggttatgtgtcttggccaaggtcatagagctataagtggtagaactgggtgaacttggtctgaagcttccagagcccacagtattgaccacagagctggggattttaagccagataaaacgcttctctcctgactgtgcttttttgtatgaaagataaacatcacccaaacagttggggatgtgctaacccagcatccctgggtgaggataaagtatttctcacttagttggtaaatatctcccaagtattgataggaaccaagtcaaggaattcttggtgtgggcaaggctgatttttttttttttcctgttactgcttacatccttacttaaaactgcatccctagtggctcataaatgagacattgagggtatttgcttcctgtaccttttcagtaggaatcattagtaggagatgataatagcgtattaaatatgcttaaccttggaaattctgtctgtttgcaaaatggagaattgggaactgatgactccagtattctcctatttccaaaagctgatgcaggatatgccagcccctagaatcaggccaggaggcaaaagggatgaaaaaaagggaagtgtgtctcgtcagtggtgtagaaggagtataatttgtggcagtcaagttccgtttggttgaagactataaaactggctgcacaattctcaacaaagcatagtctctagaagggagtatgttatgtgctcgtgaaattgaaattgtatttctaagaaaatatccctgtagtttctctttaaaagagtctttagtgtctataaaaaaggggggtggggaacgagccaggaactgagaaataaaatgccatctttctttggggat

SEQ ID NO: 43177 - DNA, 1378 bp, Bovine  19866881379578
  misc_feature (1)..(1): n is a, c, g, or t
ncctaatgatagtttaggctatcatctctttacagagatacacaccaaccaatcttctctaaattagcaattaaagaccacttattatcctgaaaaaccacgttagtgtattcaccattgacaatggacattccaaaacacagatgaagtctgcagttcttggctatgctatcagagaatggcaattagatgctgatgaagagttgttcattctaatgagcagcaagctggcacgactagggaaggattccttgaggacagagcacaagatactgtccagtcatcctttcctactgacccaactcaactgaagggtcactggagaagaattgatacctctgacatctctgtctgctgttctctgagggttttacacttaccatttcagtggtctctgcaacgggttagatgccagaaccatggggagatttttttaaatactaggatccatgttaaaaataaataaagtaaaatagattaaattaaaaaaaatactaggatccaccaccccacagagattccaaaggattagggctgggagagagtcgagggatgtacattctaaaatgctcccagggattccaaaggagccattttgaagaccagcacttgggaatcacttcattacttcattttagagtttgctccctacaacaactctatgagatgggcagggaaggtaaataattacttccatcttataagtgaggggaccaaggatgccttctccatttttcccctgtgtaaatgtggaaggaaggcttacaaaagtaatgaatgagtaataaagaataaagagtatgctggacgtttgatagaatatttgtacattaagcagacccctcaagaaaagaggaggcttggtggtgtcagcctggactgccagctctttagataaaaacctctgggaccaagttcaagggagatcttggaggaaatggagttaaggagtgcaggagggcgtctgggagcccagacccaccttgctcatggcttctgcgatggcgtcaacccaaacctcccaccaaccccacttcactggcagcttcattcagtgtcaccatgatgtcgtccacggcctctttcatgagctgggcggcctccgtgatggcatcgtgggtgtgctgtgcctgagaaggaggggtcggaagaagaagataattgtaagctgtttccataagcagaagacaatggtgcttaatctctttaagaattacttcactttttaaaaaagataacgttaaaaagcagaatataaaactatattctcactatgtaacacaaaaatgtattctctattttttcctttccttttattatatttgtatacatttctttgccaggtaaataaaagccagaaggacaaagagaaaaaaat

SEQ ID NO: 43178 - DNA, 1186 bp, Bovine  19866881502811
  misc_feature (1)..(1): n is a, c, g, or t
nttcagtaaagtcatagtaaaattaaattgttactttggttaaatattttaatatgtttagtaaaacagaacataatttaaataaactaatcatactcatatatatacacacatacatgcattttacatatacatacatagccacattttatataaagtattttatattgttgttggaaagagtaatttcaaccatttgtgaaatctattatattctctgtgaataattattttacaactaagtcttctgttgagatgcattagacagatttacttttgagaatgaaagtaaataaattttgaaaaatgtactgtcatgttaatctacagattggaaatttttttcccattttgttgcttctgattttgagtgaatgttctttcaaaagcatgtataaagtaggtaatattctcattatacattatagtattttaattttcaatgaatgttttaaagtagtgatgtttttcaaagcaatatctttcactattaattttattaattttttttcagtttgagatcaatataatgttaagaaaagttcagatattttagggaaaagttacttgttttatcaaccataaaagacagtttgtatttttataacttgttttccagtctttactgtatacatgcttgatttaacatagcatttatcacattatatatgtaacatggatccagcttctttgcttagtatgtgtatatatattttttccaaacttaacttatttttaattgaaggaaaattgcttcacaatgttgtgttggccactgccatacatcagcatgagtcagccataggtatacatgtgtccccttcctttttaacctctctcctacctcccacccctctaggttacagagtgctggtttgagttccctgagtcacacagcaaattcccactggttatctattttgcacatggtagtgtatctgcttccatgttgctctctctgttcatcccaccctctgctttcccccacccatgtctgtaggtctgttttctatgttggcatgtccactgttgctccgaataggttcatcagtaccatctttctagattccatgtacatgtattaatataaggtatttgtttttctctttctgacttaagttccctctgtataataggctctaggttcatccatctcattagaactaactcaaatgtgttccttttt

SEQ ID NO: 43179 - DNA, 1302 bp, Bovine  19866881544526
  misc_feature (1)..(1): n is a, c, g, or t
ncaaactttcatgtgggtgaagcttggtttaaagagcatagcgctctcatggagaggaatcgggtgctgtggggtgaacgatccaaaaggacgtcaagaattgggttttcccaccacttatgccgattatagctcaactcttttttagcaaaccattatcctgattgcctgtaagaagggaaaggtttttgtcccccccgcccccgctactttaatatttatgtatttggctgctctgggtcttcgttgaagcatgtgggatctagttccctgaccagggattgaaggcactctgctttaggagtaaagagtcttagccaccagaactaaggagtgaagaccaccaggggagtcccaagaaggaaaagtttttagaaataaggatttttttaagagacagcatgacatgagaaatagaaaagtatggtcttcccacagttgtatgtaaacacagaaagagagagcgagggtctgtgctggcttcttggagagagtgccttgcagaaagaatctccatcctggctctgcaggccgagcaggcaagcaaagtctgtggaaagcagaggaaacaagcaagacagattgaaacaggcctcagagaaacgaggacaggtggtggagaagagaggcaggcctggatttctggcccaaaagacaaaagaggacaacacatttgtcttagaatgttatgcagttaggaaggaaacccccaatccaagatggtagaagttggcaaatctctgtttataacctctgtttcaggctaaggagacaaatcccacttctacattttgctggctaaggtcttgccttggctttcttttttccacaatagattcattgacccacactgaagccggtgggtgggtggggtgggggaccataaacttggacagtcccacgactgagtaaacattttctgtgtgcaaactagggttcctctgcttcctctcaacatacaggtttgggtaattaactaccagggcttccggtgggtgattagccccaggcctccaccaaatgtcctggggttttctccctttcgttttttgaccctgtgcattttggctggagtatagaagaaggaaaaatctgaactgttttctccagctctcaaagtcccgattactacaagggagaactgaaaacaaaccactcttggactctgagcagaagtggcagcaatatctctgcttagaaatctgcaggtgaaggatggagcgagggtctgtttctcattagagttcttggcaaacgttttgaggcgcatcggaaaagaagggtgagtgactgtcggtgagg

SEQ ID NO: 43180 - DNA, 1211 bp, Bovine  19866881584705
  misc_feature (1)..(1): n is a, c, g, or t
nccttggtgaacgcctgcagttccctccttctaggaggctctccttgccacgctgtggtaactccaagactgtgtgctgctgtcttattctaaatttgtttaatttgtagttttgtccaaagcctctttaattgccatttttttctttttcgatttttaaagctgattcagagtgtaacttttttttggccaggtgtcatgaatgtcacgctttgcccctttgtgttttccaggcactctaagtgagggtcctcaaatctcctgggaaaatggtggctctgtctttaaagatttgtgtccgccactgcaatgtggtcaagaccatgcagtttgagccatcaacggctgtgtacgatgcgtgtcgagtcattcgagaaagggtacccgaggcgcaaactggccaaggtaggtcattggttatttgctggctgcttgaagtgtgtttgtatattttaccctggtagctaaggaaacagaggctctgcatatgtgcacaggtcagctagtgtatatgtttcgaatgaaattcttatcctggaccttactcgcctcgtatgtaaaacttgtaatgacatcattgtagttctgccagtgaaccagcatcatcatcatgtccctttcatacttcagcaacgtgttctgcagtttacaaatcactttttggtataaaggcctatagagtacagatgaagttgctcaaacagttattgcttttgtgtatcctgagccctgtttcactgtttctactgccagcagcctgaagaagactggaactgccataaggacccagggcaagcgtcatatttcaagtactttgcaggggcttctaatctttatctcaaaccttaaaaaaaaattgtgatacatgttttgcttaatgtttggttaaaccactggccacagttaatctgagtttaaacaagtcagtcatacaagtttattttccatttccctttgtcttctctctacatttccttcctttatttagtgtttgactgatgcataagaaattgaggttactcctgaattcataagcctttagtgtgaaaatggaataaaactttccttgaaaattggaatcataaaaatcaaacattcaaagacagttattgttaggcatgggtcttcatgaaaagttctgttactctcaaaaccacgaatcttttggtccaaaagcaatgtctatattattcaaaacacaatctataata

SEQ ID NO: 43181 - DNA, 903 bp, Bovine  19866881599941
  misc_feature (1)..(1): n is a, c, g, or t
nttgtggacagtggggactactctgctgcggtgctcgtgcttctcattgcaggggcttctcttattgcagagcacaggccgtagggcacgcagggcttcagtggttgcgctgcatgggctcagtagttgtgacacatgagtttagttgctccaaagcatgtgggatcttcctgggccagggacagaaccagtgtcacctgaattggcaggcggattctttaccactgagccaccagggaaacccctatcaacccttctagattccttattctgtgctaagaaattgcagacattacttcacacattttggagttttcttgaccagttgcaggctgagcccgtcactctctactgaggctggttccattcctgggaaaacaacccagaaatcactcctttctttcatgctgtgcttgacagatgtgtgagagtggttttttttttttaattacaaattaattcattctaaaaagtagcaaatgcatttattttcttctctgcattttaatttcctctctgaatgtgttcgatagcaaggaaaataataaaataaaaatttgttaagtgtgttctcagagctcgtagctatatgccccactctttttgaggaaagaataatcatatgctaccttttacatgaatcagacctttgctggaatggagccatgtgtatcagttcagttcaattcagctgctcagtcatgtccaactctttgtgaccccgtggactgcagcacaccaggcctccctgtccatcaccaactcctggagcttacttaaactcaggtccatcgagtcaatgatgccatccaaccatctcatcctctgttgtccccttctcctcctgccttcaatctttcccagcatcagggtctttttcagttggtcagttcttcacatctg

SEQ ID NO: 43182 - DNA, 1451 bp, Bovine  19866881666414
  misc_feature (1)..(1): n is a, c, g, or t
nctgaaagtacctcccattaagtcgcttatacaaagcatagttactcgcctactttgaaaaaatgaatgtcagtcattataaatttaaattgccatctcttaagaaataactacaaagttggtgtaacaacagtcatgttctgtttccagggagtttacttcaacagtgacaaatctgcccccacctacactaaatggggtatctgggtctgtttccccaaaggtccgttattatttataaggatgaaagttagggtttcttttgcatgaagtggaatttaggcagtgaggtcatttgttttgaaactacagcaaccattccagttttttccccccattttagcatttcagttactctgggtcaagagtaaaagattaagatttcagagaaaatccaaagcctggtaggccacccacagaatggtcaaagattctgccctggacagtccagggcacaactaaccaagggggttccctttcccaagttaggcaagttcactgataaaaagtcagtgcagacttgcacacacacagactcatacatatttcaaagaatgttcaacagtcccaggattcattttttaaaaataaacaaaaaaacagaacctaccatactgaccacatggttcctgatccttacagggcaggagggtccataaactcctctggaaatatgatgaaccctctcgcccagaagaaggacatgatagattcagtttcaaattttcacagaaatttctctgtacctctggctaaggaccctggcttaattaaaacaaggaatcccttttcatctttctctctgaaatttgtacaagctcttggtaaagagggtcatgagtgacagtcccatttacaaagtgatacacaagggcagggaccggtgagaaaactggcttcgtgcagctcttaggatggagagtatgactctgcagccagcaatgctaacaactgttcttgaggccctggctgtgcctgggagcctttgccaaacagtttcaacagggaccttcccaaatctggttttgcacttggcactcagttcttcaaaacaacaaagaatagcacagaaacatatataataccatatgtaaaagagccagtggaatttgctgtgtgactcagagaagtcaaaccggggctctgtgacaatctagaagggtgggagagggtggtgggtgggaggcagcttcaagagggaggggacatatgtatactgatggctgattcatttcaatgtatggcagaaaccaacacaatattgtaaagcaattatctttcaaccaaaaataaataaattaaaatggctgcaacaacacaacaacaaaaatcaacaaacatctgcatgacttaggaatgcatactaaggtaccaaggatcagttaaaatgaaaaaccgagatgcttatcataactctgaggtgatagggggcgatttttttttgttgagat

SEQ ID NO: 43183 - DNA, 909 bp, Bovine  19866881811750
  misc_feature (1)..(1): n is a, c, g, or t
nccgtttctcactcattgaataactgtgtgaactgtctccctgggcagaaggatgtggatgtggccttgaagagcattggggagtcaagcaagaagctgctggtggactcggtgagaggttttggctcgggaaggggtacatggggccctgggctcacctcaggtgcaggtggggtcttctcccctccagggaccctttgagtagctcaccttcccttagggggttggttttcgtgcctatttgccttttccttgttttgctttccaatcagccgaattcccaggtagagcatctaaaatttactttttccttgagcccacgttgccctccgatcttgggttatccctgtgagccaagaatggggcaggctgttgacggggagggtttggatcatctgacctctcatcaggactcactgaaagagtgagtggtctgtggaatttcacggtggagcttgttcccttctttttttgtaaaccccctttggggggacttggccttcttcatctctgtttcttctctgctgtgtgcctgcacatagccaggtatgcagacagtgggtgtggtgtgactcatataatctagcttaactctctagaactttttaccaacagttacagttctgctagtggcacttctgagggaaagctatattgttagcagagaccaactgatgaataaaattggtgactattagtttggaaaaataggatttaaagattaatagcatctgccttttagtaccagaaagctaaaactttgcaagtttccatctgagaatgccaagatagagcatggattcagaaagcagatcccagagtcaggttgtccaggtatgaatcttggctgtgcggcttaggagaccagaagccctgtggaaagccgtccttgctatttttagatccact

SEQ ID NO: 43184 - DNA, 453 bp, Bovine  19866881820857
  misc_feature (1)..(1): n is a, c, g, or t
nttctggttccattgatgacttgagtggacttaagcaaataattaaacctgcctgggaccgagttttctttttttccaaaccaaagcaatagttgcctcatttttcttatagtttgggaatattaaatgaaataatagttatcaaaaagtttaaaaaatataaagcacaatgtgaatagttatttctaatagtaatataaaaagatgttttaaactgtgttagtttctttttttctgagcaatgttcatactctatatctgaagggttttgtatactttttctcttaatggaaagcgagaaatgtatatcttcttgagcatccaaataagaaagttgaaatcatgtttgtttagataaattaactttgaagattccttggaagaacctttatggcgaagctgttgttgcaactctagagggattatacctgcttgttgtcccaggagcaagta

SEQ ID NO: 43185 - DNA, 1109 bp, Bovine  19866880730005
  misc_feature (1)..(1): n is a, c, g, or t
nagagtgcctatttaacctggagttgacagctaaatcataggccaagaaagcaaaactaagtgaccagagaattaaacctaccatacctgggtagccagtaacataaacaaaccaagaaccacatatgcccatagaagagtctatataaatgaagcagtagcagaatgaggctgtgtatttgaaacttacaggtcatacataacttatatccaagatctctacaaacagcagtaacaaatccctatacacaggagacgatataatttatcattcaaactggaacacttttaagatgtaaaagggtgccactaataattaagctggtacttaattaaattaaaactgtctcagtcaaactgagatgtaaggtcaaccttattacatattaaacccctgtgttataccagagaaacactttgaagaaagggcaccaaaggtgaaatcttcagaggaaaaacacaacttctttgaggaggggcccaaaagtttcccaagcaggagagaactgcagggccttctgctagttgctgacctcgatgaaagtggatattattgggcatacacaccatctgtgcaagctgtaaataacatctctgaaatttctcagtgtttacatgcccttccactgctttttcctacgttgatgacatctatgaaattttaaggccctaaatgtcaggaattttgtttcaatttcctgtatatagacttagtctgcattgattttgcataatacatacaggagaatatgaagattacgtccatctctgaagaaatatcttgttaccgctcatggattaaccaccatcattttcttaagcatggcacattatgtgacgatgcagtacagatgtctttggattacatataggtcagagccccaacagcacacagatgacacactcaaaagtggtgaataatctcagttcaatgaagggtcacttacaaaggtgtgggcaaaataaaggaaaccataagggttgacaaaaaaaaacccaaaggagactgctatcatccctaggcttgaaagggcaagagagaaagccatcataggaacatggagaagtctataactgtagaagcctgccaggcaggagtggccaaagga

SEQ ID NO: 43186 - DNA, 564 bp, Bovine  19866881152389
  misc_feature (1)..(1): n is a, c, g, or t
nataggtataaataattaaactcaagatggtggcaagctgcatgcttgtgtgtgtgctaagtcgctttagttgtgcctgactctctgcgatcctatggacggtagcctgccagtctcctctgtccatgggatttcccaggcaaaaatactggagtgggttgccatgccctcctccaggggatcttcctgacccagggatcgaactcacgtctcttatgtttcctgtattgacaggtgtgttctttaccactagctccacctgggaagccaagctgcatgagcaggtgaaactgcttggggtagggaagtgcgtttccaaactgttgctctgaaaacattcacatcactgcacgcacagggtggttgggtgtatttgtgttttgttttgcttttatgtgtgtgtgttttacataaatcaaatttcttgctcctctaagaatatagcacacacatagtcacacatatttacctatcatgggagtaaagtgcatgcttatacaaattttgaaacatgataatttcttgaaaaactaggtttcaagggatatgtacagtaagcttggg

SEQ ID NO: 43187 - DNA, 788 bp, Bovine  19866881275033
  misc_feature (1)..(1): n is a, c, g, or t
ntgctgactctgaagagggagaaagagatcagctacaactcaagaaatgtggggcacatacagaagctggttcttctgttaaatttggtccatgtattacataacaaatttgttccatgtattacagaaggaggcttcccagatggcacagtggtaaagaatccacctgccaatgcaggagatgtgggttcaatccttggcttaggaagatcctctggagtaggaaatggcaacccactccagtattcttgcctggaaaattccatggacaaatgagcctggcaggctacagtccacggggtgcacagagtcggacacaactgagtacagatgcaattgtattatggattcatgttgtcttagtataatacacgattttctttccttgaaaaaatcaaaatgatgtcccttggcagactgtcttactgtgtaaacttgccactgagctattttgcatctcattatccagtctgatttgccaatagctaattacagtcatcactgacttaactccattctcacagcatcataacagtaaaacaaggagtctaatggcatcagttatatggaattcattataatagaagtgaatatcacattgttacacacttatattcacatgtatgcatttattcctctaggttttcatgcctgaaataaatttactggaatcccagcctctactatatgttaagcctacaattcaagaacagccaggccaaggacacagtgttccatctttacaatcaaatacagatttcccattaaaaggaaaattctctatttca

SEQ ID NO: 43188 - DNA, 1085 bp, Bovine  19866881892620
  misc_feature (1)..(1): n is a, c, g, or t
ntcctttagaatctgtgtggtcactctctctcatttcctttgctttggttggtctctgtttggcttttttcttgttatattattctgccgtctctattagaggtaaaatatttatttattatccattttcctgtggatatagtattaactttttctctgaaaaatggttaggattatttcaatgaggtctcttttaaagctaaatctctaattttaagaacttttacctggtagctcagatggtgaagaatctgcctgtaatgtaggagacctgggttcaatccctgggttgggaagatcccctggagaaaagaatggctacccactccagtattcttgcctggagaattccatggacagaggagcctggtgggctacagtccacagggacacttttgctttagaatattatgctaaaacctctgaaaccatgatagataaatagatttatttataataaataaatagaaacaatagtaagtggagagatatttcttaggacatgtcctataggttaggagaaactatgtgaagttttcttacctcaattttatgttactgcagttaaaaaaaggacattggaggagtgttgcagaactattgcaagacaaaaatatttacatataaaaaagcaaaatgaatttaacgtcctctcatgttttatatctatccttccttgatgtcatccaaatttcctattgacagaattatactacctttattttaaatttggtgatcaagcaggaagcctttcctatcaatgtctgtccttgctccaccaatttaagaagactattctctgagaacaaaggacatcccgttcaaaaagttgccccctgtaaccctaacctgatacctgtttgcctttaaaccttccacagtagatcatccctcaagcacacaaaggcaccccctttccaagctccacatttatcagcaggaaaaaagcaaacaccaccatttctcaggtacacagtgtctccacacctattacagttgtgagcagtggtgaccttgcactggcccaaaccacccacgagtagcctttgatgttcctggagcctcatgttttaatacagtctaaa

SEQ ID NO: 43189 - DNA, 1753 bp, Bovine  19866880569244
  misc_feature (1)..(1): n is a, c, g, or t
ncttatgtttacgagaatacgcacatatatttatgtgctgtataaaaagtatttgagaaggtgatttaggactctcaattataaattttcagggcagaagacttattttgctgctaggacaggtgaatgggccaacagcggaatgaaagcctttacttggtaaatcatcattgttaaaggagagaaacaggttaagtttgttctcccagagcatgatttttactcagttattacaacattaccacaaaagctgcctagtaacattagttaaaaacaacacagggtagggaaagagcaggaaatttgaattagatatgccccggggcaggtgggcgtaaccccttctctcagtacagtgagtgctgtattctgaagagcgtgaaatttaaaaaatcggaacaatcgtttagaatttcagttaggatattgctgcagttaaacccataacgctgtgccatgttctcagccgcaggaggcagggcctggatttcttactcatttgggcacttttggttgtttaaagaacactaccattttaattattccggaaacatttattaagcacccttctttggagccaaggcacactgctgttttctgcagctctaaagataaataaaacttgattctcaagccctggttgggagagaagccagacaagtaaacaaagggtgttacatagtccacgcaggggtgtggtgaaaagtctggagcagggaacatctattttacatggaagtggagaaagtcaaaggattcttgccctgagtatcacttttaatgatacttaaaaaaaatttgttttcgtctttcccccagtcattctatacatctggtgggaatttacctctcctattctgtgtgaggacctgggtgtgaaccaagaaatcttcccttcccattgggaatccacaccctttttgcccccgctgattttaagaatatcccagtttagggaagcagagaggtggcaaggttaagagttgacgaacaaggagtattagaagagttttcacctccaggaagggggcttcggcagagggttgcgaggttaagtgggagacttctgtatcatttgaactaataatattgagagataaaataaaccaataaatatgtaagtaagggtcctattatcactcagaagatactgagcacctaagccgtatcatttactttgctgacaaacgtccacatagtcaaagctattgtttttccagtagtcatgtatggatgtgagagttggaccgtaaagaaagctgagcaccaaagaatcgatgtttttgaactatgtcattggaggagacttttgagtcccttgggctgtaaggagatccaaccatccatcctaaaggaaatcagtcatgaatattcattggaaagactgatgctgaagctgaagctccaatttggctacctgacgggaagaactgactcattggaaaagaccctgatgctgggaaaaattgaagacaggaggagatggggatgacagaggaggagacggggatgacagaggatgagatgatcagatggcatcaccaactcgacggacgtgagtttgagcaagctctgggagttggtgatggacagggaagcctggcatgctgcagtccatggggtcgcaaagagttggacacgactgagtgactgaactgaactgaagccatatcagaatactgcaataaacaaaaggaaaggtccttatactcaaggacctcattttctagaacggaatagtagttaacaatca

SEQ ID NO: 43190 - DNA, 1786 bp, Bovine  19866880911172
  misc_feature (1)..(1): n is a, c, g, or t
naatccgcctgacaatgcaggagacacaggtttaaccccaggggctgggatgatcccccagagaaggaatggtaacccactgcggtactcctgcctgggaaattccacggacagaggagtctggcgagctacagtccattgggttgcaaagagtaggacacgacttagcgactaaacaacaatacactttggggtgggatggtaaatacatttctaaaagtattcaggttatttctaaaaggcctcccctttatcaccagcctcactcaactctcagaagaaactttagctctcggggcattcatatgaaactacaaacatcaacaagttagaaatatgcatatacatatacaacacaaatatacataaagagaatagtgtcatacaattcatttgttctagttattctatttccattcaaaaacgcttatcaagaaatattttacaacactgtttttgaaatagtattattaactatggggcttcccagatggcaaagaatctgcctgcaatccaggagacttgggttcaatccctgggtcaggaagttgtcccctggagaaagaaatggcaacccactccagtattcttgcctggagaattctacggacagaggagcctggcgggctatggtctatggggtcgcaaagagttggacacaactaagtgactaacacatactttcacattattaactgtatccatactttatttaatcattcctttattgctaaatattaacattctcaatttatctgtatatgaatatttctttaagagagactcctagaaatagaaattctgggtaaaagggaatgtgactttaaaatgttgacaggtgttaacactttgatctccgaaaagacattgtcattttaaagtttcaccagtaatgcgtggaaactttttttttactgcaaccccaccactgttgaatatgataaatctttgcctttattgacttttgctagattaaataccccaacaagctaatagtttacactttctattctgtattatctttctactggttattagcttaaaatttcagtacatctgcatttatagttttctagcatctgataataagtgttacaaagcaaatggcttaaagaagaaaaactacctcctgtaaaacttcatttgcaagaaaacggctatcaccctcttcaacttgtggactagagatccttgttacatgtccaaggtcacctagaagtattgaaaaaaatacagtcaagaattaaaacaaaacagcctctattttaaggaaataatttggttacttttctttcttacctattttaaacataactttgttggatgcccagtcatcttcatctccttcttcagaggcagcatttgggattgaagttcgagatatgaaaatattacctgtcaaacagttatttaggtaagccatactaacaattaatagaatcaaagttcacaaacaagtcatacaacgaatcattcagaaagcgcttaaatatatagactatgtgttctacccaaacccagtaagaaggaaaggggactgtattttctagatacagaaaatacagaaatgtactttctggtctagcactggtcctttaacacttgaaaaccactgcattagactcttgtcagctacacattgatcttcagcagttctaattacttagaaagtaatacaaagggcaattaacatactaattcatgatgctgctgctgctaagtcacttcagtcgtgtccgactctgtgatgctactgaggcacaaattttaatctaatgctacaagg

SEQ ID NO: 43191 - DNA, 1357 bp, Bovine  19866881031989
  misc_feature (1)..(1): n is a, c, g, or t
nggttgccctaatctaaaacttcatatgattcataggatccagttttttggcttttcttgaaaaagggaagatttggcaacaataaagctgcatttcctcaccatagcatcacctgggtttgagtagcaatgctgcctgtagatgggagcaccattccctactgcttcatttccactcattttccttcatgtatggaccctgcctgggccctgaaggcatttgaactggggactcctggtctgtgaagtcccctttggttgttgataaaagagcatagctactagtgatctgttcctttgggctctcaaacttcttgccctacaccagaaaccagtgtttatgattcctacagataccagcagaaatcagttgtttgggattccttccctgagtttataataaacatcacaggtacgtgtcatgttaccagtaggtcctcatatgaggatcaagggcatgaagctgtcattgcaatttgccttgccatattatttctaggttcttcagagtccaggagatttctttctgtgcagagaagcattttctacaacttccagtctaattgatgttcagtttatcaaatttatatgcctaatcaactgacaaaactaataaatttttaaagtttctcaaaatacaattttacatttaaatcctattgtaaaatgtttgttttggctggaaataacagaaagccctgaagtggggtgggctgtgggcacggtgcacctgggctgcagctccacttcgtcatgatcctcttggttctgcccttctccgtgtgcgggcaccacccgcaggcttgtagcattgtggctgctgcagtgacattgtcatatccagacacaagtcagagaaagcaagactcttacttccctttgtttgtaactgtggaaaactcccagaagctctctgtggactttaactcccatctctttggccagagttgtgtcacatgcctgttcctaaaccagtcactgctgaggagaatgggatggccagttggcttttactaattatcccagagtggaaggactgttgagaaatccatcctaatgatcaccacatcacttactgaaattcccttaaacaatccaaatagtaaacacaaatccagtaagactaattcctcaaacatttgaaacgtcccaacacaccaaatagcagacagaaacattaaaacaaagtactcacaaaggctataaccacgtttaagtctgaattgttaaaactatggatttaatttctttttcattacttctatacttattcatggaaataatatttatttagataccttttcggttacagtgattttactagacctccaattaaaataatactatttcatacggc

SEQ ID NO: 43192 - DNA, 2178 bp, Bovine  19866880447246
  misc_feature (1)..(1): n is a, c, g, or t
nacagggaagactgacatgcttcagttctggggttgtaaagagcagacatgacttagtgactaaacaacaacaataacaacaacaacagatacatgtatataggcttccctggtggctcagccacctgtcagtgcaagagatataattcgatccctgcctctggaagcaattttagttttttaaaaccaaagtttatagtttctataaatcattcccaggagccacctgaaaacaagtcatcacagaactgatacctgaatcagaaggcgtgattcttcctgggctgaagcaagtcaggcccgtggttcctgattttgcttcacatgaaacagagggcaagaggggtgcctgagggcctttgttatggtgcaggccaggtcagagcaggtgtcccctcctccaggctagggcagcctgacatcccctgcctcagggcctcagggtcccaagtatggcctgaacgtttccacacctggaccaaatgctggaaactaagttattaaactggaaacctggagagttttatgggaggtgccaactccaaaacaccagaactgaaatctaaagaacttttcactcatctaaccagaagagttggggtgggggatggggctattctataacctgtcagactgttgatttcattttattaaacttaggtatgaaatcagtgcttagtgaaatgtttggcttctatatttttgcattttctttacttccctttagttttataatgaaaatacttttcattttaaattcaccgggagtctttgtgacttcactctcctaaggtgatttctgttgaagcaaataatcaaaacaggatattcaggtaaaaataaatgtatacttggtatattttcttatcaaaactggagggactgaagaaagctttgggggacaaaagaggaaactattaactaggcaatggaggaatgctaattaaaagcaccaaggggttcactgctgtaaatataatccagagtggaatattctataaaatgggatattcaaagccaaatcagcatttcaggcaaatgtgacttttctctcttgtttttatgagttggaatccagaaaagcacatgtcttccaacatctttaaaagtgtaatcatttcttataagtactcagcattaagtatgattttaaagttgtatttaaacacaaaattcaagccattacacctgtgtgtttatggaacttttcatagatgtatatttactgggaaactactgatattgtcttctagcagtacatgctgttctgtgccaaaaagttttgctgcctctgtgtggtggccttaaatgttaagactgctgggtcagcagccctcctaccccagaggtctgtgtgcaaacccatgagaattaaaaaagaagcaaaatctgtgggaacagaatgcagatgctaaggtgtccttttatgtacaaacattgtctgcgtggatgctggcctctcacacagattaaaatactaaatgccaattactcacactattgtcgaaagatccaaagtcattgtataattactgttgtgttcaaaggaattatcatgtagttactatgaacaacatgttctattttgtggaaactatacaattaacttgtcttaggctaataaattaaatgtagcataagctcatataacagctgcttggatggaggggatgactggcaacacatttaaagatatcactttgaattcactaacctctatactcaatgcagtagtaggtgtctcctcctttggggaagttatgcacatgcccacttttactaaatacatattttaaggaagtttaaacatattttggttatgggagaaaaggtgaggcagaaggaggaaaaagagtaaaatgataataaatttttggacactaatttggagttgaactagaatggcaataaaatgcatgaatctattatgaggtaaaggagtatgtcaaggctgattattgtcaccctgcttatttaacttatatacagagtacatcatgagaaacgctgggctggagggagcacaagctggaatcaataacctcagatatgcagatgacaccactcttatggcagaaagtcaagaataactaaagagcctcttgatgaaagtgaaagaggaaagtgagaaagttgacttaaagctcaacattcagaaagctaagatcatggcatctg

SEQ ID NO: 43193 - DNA, 1524 bp, Bovine  19866880628060
  misc_feature (1)..(1): n is a, c, g, or t
naggttggcttacacatataaatgattttatacaaagaatggtagattcaatttcataggctacagctttcaaatgactttaagcaacatcacacacctcatggagcagatgcatgtctcagggggaattatccagaagcattccctctaaaggtcctagggaggctaaaatgggctccatttgaagaaccatctccatcagtatgggcagacctcggtgtgtggtcctttttgtctgagatgatcaggacgcgtaagcctctcgctcctggggatgccgtctgggattgtttggtggctttctggctgtgagggttttggacattacccccgattttcgtggaaaaactagtcctcgtgtttcatgtcaagaatagttgaaccaaactgcctttgacatcctagagttatgtgctcactcagagtgttggcatttgcccagtgccgacagcaagggttccaggagttacatgagccactagggccatcccatctaccatctgtcactggcttatcatgccaccttgggtcactgacttccccactctgtgtcatctgtgaaatacgcataatagcaggtcacagccttctgtccctcccctctcctctcctgctgatactcactttccctccctcccaccctttgttcctctccttcttcctcctcctcctttgccatcccctgcccccttctctctcccctgccccttgtcaccccccttgtctccctcttcccttccctctgccccacagaagaagataatgtgtctgtaaagcgctttgagttccttggagatagagagtctataaatataagctgttatcattgttaccatgggaaatgttcacagagaaccatacttcattcctgcatttgctgaatataattctgcctcctcgccctgctggcttcttgaggctattaaacaaccaatggttttacaaagcactgtagccaggtagagagtagggactcagggtagaacttgttagctacccaactgttcttcatgtcaattttcagaaactaggtttctgtctaaaatagaggagagtacaagactggccagagtcagctattagtccaaggatgcaaattaggacggtataggtatgccacatgaccaatgaccctgatctatagcaaggtccagcccagggagaattccagtgggcttcagaaataatattccacccatttcctaaattctctttgatgcctgactcctcaactttagaaccatggctggcaaaatgttggggtacagagagttaagagtttctacctttccgccaggctgtgtcttcttcgttacagtctctgcagggcctagtacagtgcccggagtacagtgcctggcataatgctgatgctggacagaggtttgtaaaagaaatgagtatccacagagggggcagcagaggaagaaagcgacttttttaattcttttacaaccgtattacacaaacagagaaataagcctcagcaaactcttcaggaagaccttccaacagtcattgaac

SEQ ID NO: 43194 - DNA, 2052 bp, Bovine  19866880646542
  misc_feature (1)..(1): n is a, c, g, or t
naaacgtgaaaacttaaacttttaattgaaaatatctgaaaccactttcaacctcttgtatttaaaactcaaattatcactttcaggattaaaggaaaaataaaaaggaaaaatagcacacttagatcaaaagtagcaaaacagtgattcattattagatctttctttcttagattagttctttcttcaggaaagctattttcagttctccgagcttcgtatctcaattttgtcaacttaatacaaaataatactctaatactatgccctaaattatgtaaatttgaaccctaatagaatgagtttccagatagtacagcagttaaaatgaaacaacagcctttctttttcagagttactttgaagaggtaactctatatttatttagtacgttcaatataattataagctaagggaaaacattatggccccaaacaaaggacaaccatgcacccactttgctagggatggtctttgtttagtcctgttgctctgacattctctcagcttagcactcctccctgatggttcatctgttaatgaattaccatcatcatcatcatcattatccacaaaaacagttgtgttaaaaggagttgggatgctttctatctagtcacctttctcccaaggacatagctttcaccttcacagctgtccctgagaaactaaccaaattgtccccggaagaacagctatttcgtgtatggtaactgtttattcaagaaagagtatagattcgtttaagctaaaaaagaagtttcctatgccatgtttccacacacacacggtatctttccatgcagtgaaaacaaaagtataatgaataaataattttaaagcaatttttatcatttcatttacacggtaaagttgctgatccagtgcttccaattctttagctatttgagtcaaagtttattttccttcagttgcctctccctcaacactaactagcattgtaatccataagttcctttaattctaatcaaagctaaattatttttacattcatgcagcttattttgacactacctcaaatatccactaggatatttatggatgattcaaataatgtatgtgtaaaagtcagctcattatatattccctctatattccaaatctgtaaactttagttccaagaatggcatcaaaatctatgcagttgcccaaaccagaaaccaatcatcaagttagctaagtatgtttcatataaataaatataaataaaagtgttcagttgtgtctgactctttgtgaccccatggactgtagcatgctaggctcctctctccatagaattctccaggcaagaatactggagtgggttgccttgcccttctccagggatcttcccaacccagggatcgaacccaggtgtcccgcattccctctcctctctttacacgcattggctggtatttagaccattttgcatagagtgtggtcactggatgtataaaagttcatggatgtgccaaaggtcagaactgggagaggaaactccccatcagggtactgaagaggctcccaggaagccacaggcaggggtactgctgacactcgtcctctgggatatgaggaatccttgagaagctaccaaaaggactgctactgagttactagcactcttcccacaataaaagagagccagcagaacttactgagaggtaagttacctacatggaggtggtgctgaaaactgctggttttgatctgtccacagggacacttgaacctggcagggcagctggctggggcaaaggctggatatccccagtaggaatccacgtgcaaagatatcactgcaacttgctggaggtgagcactactggatgaccctagcaggaataagaagaaaacacagcagaactaggaaagaagcacccacttgtctcattgccctccccaggacgtattccacagtgtggctctgaaacggaggcagattgtgggccttcccaggaagagagccccaggtttcccaactcttgtttgtagaaaaagctttagcctcctaggtcttcccccagttccaaagagcaattttat

SEQ ID NO: 43195 - DNA, 950 bp, Bovine  19866880930275
  misc_feature (1)..(1): n is a, c, g, or t
ntttgtataaataaatatgtgcatgttctacgagtgaaacaggagggaagggggcagggaacaacctttaaaagaaagacacagcggtagggcatgacaaaaaccggttagaaccgccttttttcctcagcgcttggcgctgaccagttgctcgcctcttttcctccactgcctcccagttctagattagccatcaccatgggttttgaaaagccctgctggcctccaggtgctcaatgactacttggcggacaagagttacatggaggggtgtgtgccatcacaagcagatgtggcagtatttgaagccatctctggcccaccacctgccgacttatgtcatgccctgcattggtataatcacatcaaatcttatgagaaggaaaaggccagcctgccaggagtgaagaaagctttgggcaagtatggccctgccaatgtggaagacaccacagaaagaggagctacagatagtaaagatgatggtggcattgatctctttggatctgaggaggaagaggaaagtgaagaagccaagagctaagagaagaacgccttgcccagtatgagtcaaagaaagccaaaaaatcagcacttgtctccaagtcttccaccttattagacatgaaaccttgggatgatgagactgatatggcaaaactagaggaatgcgtcagaagcattcaagcagacggcttggtctggggctcttctaaactagttccggttgggtatggcattaaaaaacttcaaatacaatgtgtagttgaagatgacaaacttggaacagacatgctggaggagcagatcactgcttttgacaagtatgtacagtctagggacgtggctgcattcaacaagatctaaaatccatcatggatcagttcccttaaataaaagtttgaaagacaaaaaaaaaaaaaaaaacccaaaaaacgggttagaaccaa

SEQ ID NO: 43196 - DNA, 956 bp, Bovine  19866881206845
  misc_feature (1)..(1): n is a, c, g, or t
natgagatggctgaatggcatcaccagctcgatacatatgaatttgggtaaactccaggagttggtgatggacagggaggcctggcctgctgtgattcatggggtcgcaaagagtcggatatgactgaaccaactgaaatgctgaactgaacctgattctgatttcactacaatttttataagaagaacaaacagatgtcttaataaaatgaccaggtggcttataaacaaagaagcatcatcaagttttgtgtacagattaaaaactatacaaaacagctatagaccagcaatgggttttactattttttccattttgtgtacattcttgtttaatacacataattaaatgatcgttttgttactaaaatcttctgactcactcattaaaatcactttattttcaaaattgttgaactcacatttcttaatatgtaactcacatttagtaatctgttgtttatctcagctttcaaaatataattaatctgtactgatctacttgacacacaaaatgacttttggggaactgtcatcattaggctggcattgccttcttcccactaaaactctactttggatttaatttttttaaaaaagcttacagacaaaaagagcatatctcttgaaaaataaagaaatattaattctaataataaagaatgtacaaggctccccaaatcttggctcattttgacattggaaaaaatagatcattagagcacaaaggctacattctaaaatataataaattcaatgctaaggagaagagttaataaatatttccccctagtaaccacccccagaaaaaaacatttttcctcaactttcaatcaattatatcattagttcacactttagatatgacatctctgttaaacttagttcaaatcaagaataaaatagcaataacatttctcaaagtgaaaggtgaagtcgctcagtagtgtctgact

SEQ ID NO: 43197 - DNA, 1785 bp, Bovine  19866881426146
  misc_feature (1)..(1): n is a, c, g, or t
ncatggtgatggaaagtgacctgtttcctccccatttcttggcctttgtatccctgtctgatggccctggctcatgcaaaagtgaaggattagagaagctcagcttgttccaagctgcatgtgtccctctttctaaatcataaacagtgtttgaatgccaaattatggttacaaagcacctagttaaatactttgactggtgtgatcttttctaaaattaacttccaaaatgcaggatcttgatttttaagtaaattcttcattatcttgaaaggatatgtgagtgaaaggcttatagataggatttaaaaaacaccacacttcctttgttctgaatttgaatttcctatggagcctctgagttgctcagtgctgaagggcacttgagtataattaacgtgacagtaaacagactatatggcaagctgcattcagtgggatggatgcctttggatacacctcattcttggcatactcgcgggtcccagacatcagctctgattacaagttccacttaaagtttcaactggcaaacaaccactctgcagtccaagacaacttgatatttttcactggacggaagggccatggcagagtccttgatcttgcttagcttccttaacagtacttgagagattctcagggactctggctgtggataagtagacacttgcctaggccagcctccgcctgtctgctgctcaagcctgcacctcatccaagatgtgcagcagcccttggcaccctgagtgctggtcactccaggccacctcttataatcagggaattgtaattcctgccagcaagtgaagatacagaagggggcgagtcacacaagatgtcagcttaacaattggccctgtcctatttctttccatttccacagaaaaggagagatgggaaattctcagaaggaacacattttatgatgcatcattaaatgggaatggttgccctcaaagaaaaccgtccaaattaaaggagtaagaaatcaagaatgtttggggcctgtgaccatgtactccagtgccctatgattggtgggaaagcaacatataagctaaatttgcctgcattaagtagaaaccagttatagacatgtggaatcaaagaaaaacacatatgttttatccccaagtcagcaaataaatagttaagcatttaatcatttatcttctctgagctcacggtcctcaactgtgaaatcaacatgtgtcaccagaaaataacctttctcatcagtgattctatcatgctaactaactaacacatgttaacacacgggtaacacatgctgttcttttccgctcactcagtgcctgtgtctatgttaacatgtgtctgaaaggagcccacactcctagggtagggtggtgtatagccttccccacctctgaggggatgagggccccttttctcatgagcactttcccactcccaacttggcaggagatgcctgtcagagtagtgaagatagcagcctctgggcctgaaatgtaggtttggatctgatctctgccacttaacaaaccacaggttaagttacttcttgtctctgtccctcagttttttcaccactcatatgggcataatgctggtgattgcctaacagtgctgggaggactgccgtggctcagacatggactaatagcagggagcacctgccccacacacggtagtctgcaatgtctccaggaggccttcttgagccacctccacagagcaggtctcacctcccccatccatggtattctctacctcagcctcttgcttatttccttcaaa

SEQ ID NO: 43198 - DNA, 1258 bp, Bovine  19866881526667
  misc_feature (1)..(1): n is a, c, g, or t
ntaaagtcatatcagagccaaggggaagtcctaacaggaacataacttgtatctccatgcaatgtaactcacaaatgattttctttatattatctgattgcatctattactgattgtaataaggtattggaaggagagttggctaccccatcttccataaaaagaggttgaaacacttgtaactaagctagtaaaaactaaaaccttctcccagactcattatttttctcagaaaatcaagatccacaggttaaacaaatgctcaaatatcctctgaggctgtggatatcaaactctttagaggcacctgggattctgattcacaagttaggatctgtgaatgctaaaagctcctacatgcggctgctctagggtagcttatcattaggcagagtgaaaccatgtctttggtagtatgtcacacaggaagacaaaatcatctatttctagtgcagtggggcccacaaaagtccctgtggttccaagaattatgattgcagtagcagctcagcaggcataataatatttctggtaactgaaatttctgaggcccatgccacttatacaaattggtatctgaagagacagaagagagggggacacaatttcaaggattttacctcctataggtctaaatgtgctttaatggtatgaagattgaattcttaaatgctctgatttccagttaattctccaatgttcatatttttacagtgaaaatctgacttaatcctctaatggtggagatggttgctatgatgagtcacacctgtgtcttcacctgtctcagggcagtttcttaagatgttctgagttctatgcagtccattttctttgctaagacaactgtgttttccactgaagaaggaagggtcagttagcaataactttctattactagaaatgagcaattgttctgggactggaaagatgaaaagaaatggaggtctgagttttctacgaatacttggaacaattactgctttgcttggctctgttctgatatcagccacatgttaacatctttagcagaaaccataccatatgtttcagaactgcctgtgttgcctctaagaacagtcttgtccttggatggatctgacaaaagtttctgtgagcatttactatgcactgatctaagggatggagatcagggttggtggggggggggcggagactaatacaactgtgaaaaaatgctgtcctcaaaagtcacccctgtgtaaacaattacagtacggcaagacaaaatgtataa

SEQ ID NO: 43199 - DNA, 937 bp, Bovine  19866881558112
  misc_feature (1)..(1): n is a, c, g, or t
ngggcgtgcgtactacaggaatatgtctactcattgaagattgtggcctaaccatacagccggtcccgaggcggcggcggcggcggcggggcaggggcggcggcgggggtcgtgcggtggcggcggcttcgcaggcggcaggggcaccggagtcggtcctgcagtgagcggcccggggaagagcgcgcagcctcgccgcccgcagcccaggcagccaatgcgcgcgtcgcggcgcccttgcgtcatagggtcttccatttatacgcggcgtgacgtaagggccccggtgaccaatcgcggccaggctccaggccgagcgccggcgacagggggcggaagcccggccccgcggacgtcacggcgcggcggcggctaccggcgtgaaccggttgatgaatggcggcggccgcggtcggagtgctggccggcgggggaggggcggggaggtccgggaagggcgcgggaggaagaccgggggcgggaggggaggccgggaacgggaggagacgctcaactgcctgactaaaaccccagagggctgaggacactctggtcaccggagcaggcctgaagctggcctcggctcagcacgcagtgcccgcggggccggcaccgagccgcagtcccggcccgggctccttttgctgagagtcagatcacagtccgctctgcccgcggtttcctcgggcaccgctccccgcgatccctatcgccagaaaatggttctgcgggcgagccgaagcgggcgctctcgagcaggactggcgtgattcagcgagcagcccacaggagacgggagagtgccttggatacgcataaacgctcctgctccccacaggcggctttggtcccgccttcacacgatgcatgcgggtgactgcagttggttcgagcgtggcatttggaaatcgcatccgtcctttgtacctctgctcat

SEQ ID NO: 43200 - DNA, 1121 bp, Bovine  19866880533365
  misc_feature (1)..(1): n is a, c, g, or t
ntcctgatatcttgcaattgtcgaaataagattttgctgacaggtagcaggatctcattaaatacaactacctcaccatcatgtacagagaggtgatgtagtgaaaacttgagcatcaaaaagaaaacaatggcagctgagtggatccagatgggtctatgtcataagtttgtgatgctctctggaatacacagatataaactatactagaaataaactgatgttcctaattcttgaagtaaatatgaggaacaaatcatttgaatgataaataaatttgaaaagttgtaagttataaaaccatacagtatctttcttacatgagaaagttaaaataaatattacagtgaaatgataatatatttaatttgttttcttcctacaacacatgaagtaataaattttagaaacattctctaatatatatggtcttgtttcattttgtatttatttatatagtcacttatatttcagctttctcatctttgctagtcagttgcaatttttcaactgctttccattttcagaaattttgtggttcttcacttttccatttttctttcctatctcagtaaacaaacaatatcatgaaattagtgtataatgtttctgttttatctgttttgttaattatgtaataatcttaaataatagtatatcacctcctgtttaagtacaaaaggttttctaggacaagtgtagaggaaacagaatgatcttttcattagtataaaattttaacaagatatatagctgccaaagctagagatagattttctatctcttttgtgacctcatttgggcacgaaatatggactagagtaatgcatgcaaatttcttgtttaaaagaacaccagttggtctagagtccttctcttctactctttctctagccttttcatgtggcttgtctttaattaatgctgcttgcaactggatgggcaaggttgtccagtttagagtgtgatagtccatttgggtgcacacgcaagtatgcctttcatttatgttttagtagtcatttctctgaatacttaaaatatataatttgacttcctgttcagacttttggtagggaagaaagaattttacactgatctctcaccctatgtggcaaagt

SEQ ID NO: 43201 - DNA, 1972 bp, Bovine  19866880661261
  misc_feature (1)..(1): n is a, c, g, or t
nctacctggccccatgctaaggggaatcttgactgctgccccctccctgctcaccccagcaaggctgcctggctcctgtgtgggaggtgggtggaggaaaagcagctaatgagttaacatcctgagagttggcaaatagggcagagatgagatggtttctccaaaggctatagcaattctggagagcacatagtccaggtgggctaactgtgagatggacaaagactggctaactggactggaatgttcctagggagaaataagccttttttgtgctaagtcattgagagttggaggtctacttggctgctagcatttaatgccttgatgaatataatcatttacatcaaaatagccctttcagttacataatatcacttgcttttcagaaaaaccctaggaagtttagtttccattcttcccattttgctgctactgctgctgctaagtcgcttcagtgtgtccgactctgtgcaaccccatagatggcagcccaccaggctcccccgttcctgggattctccaggcaagaacactgggagtgggttgccatttctttctccagtgcatgaaagtgaaaagtgaaagtgaagtcactctgtcgtgcccaactcttagcaaccccatggactgcagcctttcaggctcctccatccatgggattttccaggcaagagtactggagtggggtgccattgccttctccattctgtatttgtatagtccttgctaaatttggtaattctgtctcctttaccattttaaggataactgtcactgtgattcactactgaaaacctcgcttactgcctttttgcctcacatatccttaagataaatgcacacttcagtgagagcagatttccacatgatcactgtgaatttgaagatttcccattaatttgtatgtctcctactcttttatgtgtagttttactttgcaattctattttcatctataatcggaaacacaaactcttacaggcatttaattgaaaaactgaaatgcttttaaaatggtatcattctgttttgttattttttattacaaaaattagcagtgttaaggttttcattataaaatcaaattatagggcaaacatgttctttacgaggaaattactcttactttctaaatcttaggccaaataattttattaaggggtacaaaatataaataatattttattctataaaatgttttaatatcaacttaacatttatatattatttaatcttaataaaactttagaaataaaaaaatacgatgtgtttagaggacacactactccaaaatacggcaccttggcatactgaacattttaagttaaagtagcttgagaaaatagcagaagcaagaaggccactgtgccctcccccaggccctccttctgcctctgagaaaagtcacagaaccctcatgtgagaagctcctccatataccctgtcctctctcttccccagaggaagaggattcccaagggcatccttactttcaaagaccaaaggatgtcaagaaggaccctaagaaacaagtattgctaagtttcctctgctgctgctgctaagtcgattcagtcgtgtctgactctgtgcgaccccatagaccgcagcccaccaggctcccccgtccctgtgattctccaggcaagaacacgggagtgggttgccatttccttctccaacgcattaaagtgaaaagtgaaagtgaagtctctcggtcgtctccaactcttagagaccccatggactgcagcccaccaggctcctccatccttgggattttccaggcaagagtactggagtggggtgccattaaaccccatactccttaacctattgaaggggagcagaatttgtcaccccaacatacgtcactttggcatagggagtattttgagctaaaggcaatcaaaaccctacagattcaggaaaacatgttactgccccctcaactgactaaatttacaca

SEQ ID NO: 43202 - DNA, 1776 bp, Bovine  19866880725806
  misc_feature (1)..(1): n is a, c, g, or t
naatatcttgaacagatagataagtgagtagttcagtgacatgcttgatggtcatgcaaattctgagatcaccttctcttatttctcttatcatattccattgtggatgtatactaataatttttaattgaggtacaatagtgtaggccattatataagtgctgttaatgtcgtccagttgctaagtcatgtttgactctgcaaccccatggattgcagcacaccaggttcctctgtcctccactatctcccaaagtttgctcaaattcatgttcatttagttgatgatactctctgcacaacattgtaatttgacatctgtacccattatagaatggtcattcctaaagatcaagttgccaaccacctctgtacatttgacttccttgacctttttcattttcccttcaataattagcattcttttctctgtatctgagtttgtttctgttttgtcttttgtttgttttgttttgtttctgtctgtctaaatttcacatatgagtgaaatcatatttgtctttctctgtcagatttacttcccttagaataatattctcaaggttcacgcacattgtcacaaatgggaagttttcattattttttatgactgaatagtactcacatatatatcatatatgtgtgtgtgtgtgtgtgtgtgtataagcaaacatttatagagcatattagagattcccgtagtttcatgtaacttttttttttcatgtaacttttaaaaatatgattttaacaggaagcccgtgaaaaagaaaggaatttttattattatcttatagctaaggaaactgaatctcagcatttctataacagtcttacagccctacaattgataacaaagcagcaaggatttgaactagagccctcatatagtttatcaatctattacactttccataataattcacagttctatgagtatttgctgataacatttgaaattgagattagagatcttccaaataacatttgaaagagagatttagagcaatttttatcatatcctactgctttcagaatccaaactaaacttacctttattgctacttatgtagtataattttactgtggtacctttttcttcttatgattacatattattttctcctagcaattgaaacactttgcagatattacccaattaaacctctcaaatttccctttgaggtgatatgaaataactgttaatcatttttcccttctatatttatatttctgttaagaactatagaaagcttagtgaactaatagtttatatataattagacttcttagatttaaaagggaacaaattctcatatcaccagggcagcctccattaaacttatataatagtaatagaaagggagaagcttacaaaagatgagaaagctggcatgtggagaaaatgtcactgttatttctggttataatagtaggtttttttttcatactgttcatggggttctcaaggcaagaacactgaagtggtttcccaatccctactccagtggaccacagtttgacagaatgctccactatgacccgtccatcttgggttggccctgcatggcatggctcatagcttcgttgagttaaacaaggctgtgatccatgtgatcattttggtttggtttctgtgtgtgtgtgtgtttgttgttgttgttgtttttttccagaggccatgggattgtagttcttgcttttgtctgccttctgatggatgaggataagagggttgtgaaagctttctgttgggagggacggctgtgggaaaat

SEQ ID NO: 43203 - DNA, 1043 bp, Bovine  19866880859389
  misc_feature (1)..(1): n is a, c, g, or t
ntttcttatactcacttgtatagaccaaaaagttaaaatcttgaaagaaaacaacatattaacatattttactaatgtatatgtcccacaggcatacctttacagtttgtgtctttactgaaatatgaaccagcctatggttaaaatgactaatttgagggttatccaaaattaagacactatacatcaggcaaggaaaaactagaaagtatttcattcatctgagtaatcaaaaactcttgtttgtgactattgactggaaaagtgtaattatatgaataaacattttatgatggggaataagaatctgcttgctccttatcatccttatagctgttaaatgctcaaaaaggagatcatctcattttctgttatgatccagtaaagtaactatagcgtatggagttcaggaagagaaattctgctgatcacttaggtgataaaaggtagattgaaagtctctttctcttgatactcataatattggcagagatattcatcatgaggctgaaaaatttaagggcttcttattgagagagatttcataatgtggtaattatagttataatgtctagagtcaaaaacacatttttaatgtgttttcacagatatttcactagttgcagtagtttgtgtttagtcggtaagtagcagagaaacagtacatttatttgttgaaaaatttacttttgagtatatgaggtttcatctttattttctcagatatttaatttcatatttataaatattaaacaacaaaattttctgaaactaaaccaaaggtaacaaagagtttaattttaaacttactaggtttccgatttaatttctctttatataagaactgacttttaaataatacaatatttgataagttactcttatactttgagaataataagaaattcctggtgattaagatgactattggaaaatacagattggagtggaaatgtaaaaaggaattatagttttctagaaatacatttttatttaattggcatttataatcattaaatgtaaaattgtttcctgggcatcta

SEQ ID NO: 43204 - DNA, 891 bp, Bovine  19866880870929
  misc_feature (1)..(1): n is a, c, g, or t
naaaagaatacatttgaatcagttctaatgagatggatgaaactggagccctattatacagagtgaagtaagccagaaagaaaaaccccccaaatacagtatactaatgcatatatatggaatttagaaagatggtaacaataaccctgtgtacgagacagcaaaagagacactgatgtagagatcagtcttatggactctgtgggagagggagaggttggggagatttgggaggatggcattgaaacatgtataatatcatgtatgaaacaaaaaataaataaattaattaattgattaattaaaaaaaaatctgttgaagctttggaatcaagccagagctcatttattttccctcatatgtttttacaggacctctttcttggtatattcattttatacttaggtaattaattttaatactcaatcagcaaaactatttctcctataagaatatcattgtttacatatgaataatttagaatatgattcctcaaataacacttctaaatacacatgtatttccagtgatgttacctttatgtaaaataagcaataatatttatgtaaaaattccatttatgccactatgaacagaataaatgtgctttgttgagatttattatctctaatgttgcatatatttcagtcactcaaacattactttggcaattgaacttagaaaaatatctgtggacagctgttattctaaatagacaaggaaggtaagccaaatagaaaggcagagggctatgaaaatccttaaaggtttctcagttgattcttttttcattaatgagtggctggtaatgatttatatttggagttattcaaaccaaacaaacaaaaaaaggaacatgttttgcccaataggaagacagtcatgtgcaa

SEQ ID NO: 43205 - DNA, 1754 bp, Bovine  19866880930286
  misc_feature (1)..(1): n is a, c, g, or t
ntttttattttatttttaaaatttacaatgttgtattggttttgccatatatcaacatgaatccgccacaggtatactgaattgttgtgttggagaagactcttgagagtcccttggacagcaaggagatccaaccagtccatcctaaaagagatcagtcctgggtgttcattggaaaaactgatgctgaagctgaaactccaaaacttgagccacctcatgcgaagtgttgactcattggaaaagaccctgatgctgggagggattgggggcaggagaagaaggggacaacagaggatgagatggcttgatggcatcaccaactcgatggacgttagtttgagtgaactccgggagttggagatggacaataggcctggcactctgggattcatggggtcacaaagagtcggacacgactgagcaactgaactgaactcaactgaaacagctattcacattaaaaactcaaaaatgatttattttcatttgatgaataccacgacttagaacttgaaattactagcttaaattagctacaaagttaagctgaattaactaaatatagtaacttcatgccaaacatcatatttgataatttaaagatccttttattgccttagtttcatttatggatcctgggttttacttgagctgtcagaacttggaactcattttgttttcaatatattaccctctactaatgtttgattttttattttctgaatgttacagtggatcttgttttatttttctatgatatgaaatgatagcccaggttaaaatcaaacaggacacataatactaaaaattaaattggtctttgtctattaaggaaaactcaagtacaggtatgaaaaaatatgccagtacccacgccaggattcttagcctttactatactctataatacctgacagcagcttctaggagagactggattgacaggttaattatagaatatgtaaaactatatgtacagaaaacatatcaaacaatttacctggcactccaccagaaaacagcagacaacttttatttgaaactatttgaggatacagatcatataatgcatgacattgaaaactcccataacaaatgcatagtgaggctgccagcaagattactgattcacattcaaacaaaaatttatgggaagaaaaaaataagcctctatttacttcaaagtaaatgaattctcctattaggatgggctgtactactagtatgctgcacgatattcttcaagttgaatgagatcaccttcaagttttaccattatgacactgatgtcttgacataacttgaaaattatattctatcctttatcattttgcaccaaagagatgcatatactgacaaggaatttcttgatctactgtctttggtccaaggaaattttttttttttttcttctagatatctacagaggagttcaccttaccttgaaatcaatctgaacctttaaaagtagtcataagtaactcctgttagaataaatctatcttgaaatgataaaacatccaaaggacaattatatcaatacaagactctgattttcctgaaagccatgtcttcccagctatgttgttaatgtgtctggctaggcatgaccttgatatttcatgttattttgactataaatgagccttaaagaagtacaagacatatttcacaagagtaagaattgttctgttcatcttagccaaaattatttctccccactgttgtgccatatgttctgtgcagattgt

SEQ ID NO: 43206 - DNA, 1209 bp, Bovine  19866881091961
  misc_feature (1)..(1): n is a, c, g, or t
ntttacttttctgcattgcttgcatttttattaatacaaagaaagcatctaaaattattttcagaaaaaaagtcattattcctgaacacaaataaaagttttcttttttttttttttttttaaacacaccttaattctaaaccaaaactctctctgtatacaaatctccttgaaggaagaatgtggaagacctgagacaaaaagaggaagaggagaagatccttctcctcactcaataaagtagaacagtcaatgacaggagatagattttggagttacaactcttctgaagttattagggagacgatactgccccgagcacagccaaggtagatactgacagggctattttcataccagtggggactaagtagtcatcaggaagccagcctaccagctgtgtaggagagattctgcctgagtgtggctggctggcatctcagacctcattaacagaagagggagagctgtcccctacacctgaagaagttaagtggctaattaaatccttccctgctgacaccaggaaacaagccagagggctcactttaacccctgtgcacttttgtaagcagcaacactgacatgagcaaagatcttgaaatcaccacctaaagcaaagagcatgagtgaggtttatatgcttagcagagtaattcttggaagacaagaaaaactaaagataagaaacttgtattaatgaaacagaccactttcaaagcatttaaaagaccacttcctcttttaaaaatagtaacaatcaagctatgtactctcagaaaaaagttactaaatatcttatatatgccaagtactgatgaaaagtgcagacaataaataagttaacaacactcagtatctattctgtagtagattatggtccagcaggagagacagacttgtaaactaacaaaactaacaatcacagtaatcacagagatgttcacagtaacagcatggaaggaatataagcacaaggtgatctcatggtatctaccaatctaatgctgccttttgaggacaaaatggagggtatacttgacttggacttagactttcttttgaaggcacccttccattcctatttttttactgacccccccctacccccgcttaagagtctcctgacccttatctgcccctttatcctaaggctggtttatatctaagtgataagaaaattcgggtgattgtacattaagaaactac

SEQ ID NO: 43207 - DNA, 1426 bp, Bovine  19866881178960
  misc_feature (1)..(1): n is a, c, g, or t
naatataagaagccattagaaatttttatctcagattgagaagattggtgtgtaaacagagacaagagcttataaacaaatagatcctagttcaaattgatcctagttctttcttcatataagaagatctcgggtaatgcaatgctatatggaatggaggttagacatctataaatgtattaaaatagataggcattcttgtactgaagacttatctaagaaaaaatggaagtgcttatctaaagaaagctaccatatgtaaactaataagtaaactttatttttaaatttttaagatttaaagttttacttctgttttctaaactatttgtttaacttccaatgttttctgttatcttctaaggaagaacttttttgctagacaaagatgttgcagagggtgagcacgagaacctcttagaagtcagttatgtccacggcttctgtgagcataggcttacactatgagcagcaaaacagccaaataagagctctctctctcacaccacttaatggatgcagttgcagatgttatcaagacatctacaaagtaggctatgttctttagtgttggtaactgaaacagctgttaaattaattaagtcagtatattttccaagtctgattaggatatgtttatttctgctttcacaaaacagctgcgatgtaagtagtaaaactgatgttttaagaaacctaaaataaaatcaaaatcatcgtaagttgtccagttcaagtaaaagcttacttttggatcttcatgttttatttacttataggaacactagtgtatatgggcaaagcaaaattttaatgtctttgtaagtattttcacatttgttattctttttaacatatagtatagaggactgaaacatcaaaacagaatatgatatgcaaatgctgaaagtggctttattaagcaaagaaggcaatccaagaaaaaggactaaacttgaattgagtattgctctgggtttccctatgttttatggtacagtttgttggaatataactgtagttacggtctgttaacaagaatctagaagcttatttgagtcatatgaaaggagagaaaaaaaagagggcacagtttaaagaaaaaaatctgtaacaaaaataagacaaaagctcagaggcaactcaactgctccagatgttctgcatctgctcacttgcccactggggaccacgagataaagagattaacacatttacacaaagatggttagacaacaagctcagataaggaacatgacagctaggtccaggtaccctaaccagagtatggagaaaatgactcactaaacctcttaactcacttacacatgatattttaattgatttaatgttcaaatgctaccatggtagactatgaactggttattaaaaaaaaaaaagtcactttcattctaactagaaacat

SEQ ID NO: 43208 - DNA, 1280 bp, Bovine  19866881486454
  misc_feature (1)..(1): n is a, c, g, or t
ngctgataggtttctacgggaatgttagcagatgggttacctttagatttctgcattttcttacctttgaacagagcagttcgtcttttatctgttcattcattttcatactttcacacagaattgcttgaagaaagaacacccagatgaaaaataatgtttgaaatcatctcctttaaaagattaactttcttgtttttagcatgcacctgcatcttaccatatcctagcatggaatgatcagaggcttgaaaaataacagcttccacttggcttgcagaaatatcactaagttcttaggatagaattttcctgatataacaaactcattaaacaaggtacagaaaccactacagagctttttaattagaaaaaaaaaataaacaggaaataaaggaaaaatccttcagttatatttccatttttatcataattatggagaattcctgtgttggtaagatttctatataactaatgataaaggcttgatctgaaaaaaaaagaaaaaatctaagaatcttttagatttatgtccaggagtcaaacttgctatagatgaaacatttcctttttttgttcttccagaaagtgtgtaaattagcaaaaatacaactagattctgcttacatttcaataagagaatacttatttttaaaaattgattacacataaatattatgtacaaatatcaaagaaacaataatcttgagactcaatcacaaatcatgaaaaaaagtttttctttaaagcaaaaacatatatgtaagataaatagagataaatatacagttttatcttgccagcatatctgttcaatttattagttgaggccattctatgctatcaaaataagcaacattcatatcttaactgaacgctcagccatctatggcgacattatatataaagctcagtcaagcataaagaatggcatagggtaagctctttaattagttgagaggatctgttcgggagttctggaagacaagcatgtcagctgtagaattaatgtggcacctgaagcagctgataagtttacattgtagctatatcctaattgacagaataaacacctgccatcaacaggcgtatggcatcagaaacctgtgcaggtgggttctggccttagcttggccttttaatgaagctagagagctcagtatcagaaactgttgattcctgaccctgtgaacaatagcatgctatatctcacatccctactcaaagaagcacagtcaataaaccgccaagagaaatgaagcaggtttttgacctcaatt

SEQ ID NO: 43209 - DNA, 773 bp, Bovine  19866881858939
  misc_feature (1)..(1): n is a, c, g, or t
nctgaaaagatagaaaattactaaaaattaaaaaatcgttatttacataagtctgcctttaaaattgctttgtcaagtaatgtaccatgtattacagaaacctacagcgatattatatgacaaaatgagcgaaagagtgaaaagctttactttcctcagaattcctgaagcattttctgttctctaggaaatattgccttgatatgctaagtagaaaagcagtatgtttaagagtcattaatctcaattagctttattttccaccataaaattgttcaaatgaccttatgtgtgtaaattaggtataattacttccagtaaaggagctaagttcaatcatctgatatcttggagtttagccagtgcattttgtcctaaatatttcaaaccttcaggaactaatttaacatttcttttaacaaaatgccctttatgacacccagaatctatagaactggtgatacaccttaatttgtaatttattgtgttttgccttttcaacatatgttaatcatggcttcagttcaagctaaactggtataataagaggtcctgccaaaagaagcagcacaagttcacttcaaaactagaaaataatacaatggaaatcataaatgtgactgcttataaaagaaaagtgagaatttttaaaagtcatattcaatatacttctactatcttacttgtcttaataccagggcacctgtttacatactgttaagaaacttctgggacccacaacagatttcccaacatgggggatctggcaaaag

SEQ ID NO: 43210 - DNA, 712 bp, Bovine  19866882112951
  misc_feature (1)..(1): n is a, c, g, or t
ntttatgaatcacatctaattaattacttagttgacgtctttttctttaacataatttttccatagaatcatacaaataagaagtatgcaaagaataacctgggcaattaaaatagagagtgtctgaaattttttccattcctattatgagtcaaaatctttgcaaaatatttcctatgtgcttgttgtcatcatctcttaattctaagctccctgaaaattcatcgtatgttggatttatatcactaattataaaaataaatatatatttctctcaatcttatcaatctatattttatacaaagaaagtttagaatttagagtaactcagtaacttctgtcatcattttgcatctaattttatataaaagaaaatattatcaaatacagtaagaaatttaacatcctatttcaagacatatttcccccgtggaacaaattccctcttttttttctgagtcaaggtagtcagaagggtaaacacagacatatgtatgcacacaatggtacacagatatgttaaaaccagttttatgatagattacaaacaggttgtacaaaattttatttttaaattgtccaaaaatcttatattaataaaaatgaactgtgactcaaataagtgattctatagaggtatatgctatttggtgtacaaggtcagtggcattcagggctctctgaactaaataaaaagaaaggatttataaat

SEQ ID NO: 43211 - DNA, 1070 bp, Bovine  19866880413156
  misc_feature (1)..(1): n is a, c, g, or t
ntaaatgtggtggatctgggttcaggagaaaaggggatattgattgattcatctctccctaccctccaagaaaaaaaagggagaacatttaaggtagggcaagatccactataaggcagggagcattaccttgggaagagcatctttcaaggccacccatcatgtcctgaacatctaccagcatgtgggcaatcagggaatttacacatcttcagatctgctgtactgtctgggacatctcctaccatttgtacctaagatgttgaaaatgactcttctattttctcaggtagctgtgggatgatttcaaacttgaaaaaatatattgaaggtaaaaaattacctcctcttcttcctcctccttctgctcatcttcttcctcctcttttttcttctcctcatctccctcttcctcttcttctcctcctctttcttcttcttcgccttctctctctcttttttttccctaaaagactttccattccaaatcagtggagatagtctgtaaaattctagattttgtttgaatgttctcttccatgtagaacagcattctttctctgttggcagaagcagcccttcatctaggccaaagcatggccataattcaggccaacaggaacaatgggtttggaacatattgttatttgttaccaggacggcttatagcacacgacttaccctaaacaaatgaactctaaaggtttggattaccgagggccataaatttaaatgcactcagcttatctttgttggggcttacctcttcaaagacagtctcctactttaactcctactattatctggttctctgttttagcggagatttttaaaaagcctggacagactgatgcttgggaaggttcagatgctgaacctctataagggagagagatctgagagcaggagcagcatctctgccagcaggggtcagccctgctggctgctcacagcaggtaagttgcttggcatcacagtgtcaagagtatggccttgagagtaagtagacttgggttgaaattcaggaacttcagcgctcacactttagttctctttttcattattttctt

SEQ ID NO: 43212 - DNA, 1646 bp, Bovine  19866880457262
  misc_feature (1)..(1): n is a, c, g, or t
ngcatgctatcaatgggctcagaatgttaaaattaatcagctcgactctctgtgtttagctgggctgattatataggtcctggaatgtgaacatgtggtgacagacctgagaaagtaaagtaataggaggccaatcccagcaaaggccagggagacagatcaatttgcaatattcttttctgcacccatgcaacaaagcagaaacatgaaagcagaacattaagggatgttccctatgaactggacaaatcaataaacatcagtggtaaagaaaaaaagtcgctcattctcttgagtaccccaagggcatttccatcttgggaagtgatgagtcgcggtggcctctgtcatgttcccttcgcctacatggtgtcatcttctgcttgctcaaggtgaacattgctaagcatcagctgaaagagggtgcagggggaagtgtttaaggaaatgactgcctcctgttggagatgtgctgtgctggctggaaggcggttggacgactgagtctgtggcctcagggggaacactgaaggcagggttcaaatagtaagatggtgggttcccctcttcctcagacattctgaaagtaccaagtgagtgttttctcctgtcagcgttgatgggctatgtaatattgagggtcctctttattttcttggacttgagtcagtgatggagagctggaaaaatagcagacaaaggatatgcatgaagtggcttagagatagaagaatatgcctgagtctaacaaaggctattaatgacgtgataccagtcttggcttcatatcacagaaacccagatttcagcatgggcatgtgcaagtgtggcatgcatgtgtatgagagtgtgtacatgcatgtgtgtgtgtggatgagaaaaaataggacaagcaagaaagggactgtcagggtaagcactttctgaaacttatgagactgtcagaccaattcttttctcttctaaatcatttcccgtgaaacaaggagatgattatctgactgctagaggaaagcgggggtattatatttcatttggggggaaatgtagatttatggcagatggaattttttttaaaccaacaacccaacaatggcagagttcatagagtgagttaaagcgcttgcctatattttgtgtttcaagctgatgggatttacacacatttgtagtggtttcaggggctgtgccattggagggactcttgttcaagaagtacaaggaagtggaaagaaaccatcttgtacctgtttaacaaaggcagtgcttttccaactatttgcccaagataatctgcaattagagacatctgctcactgggaaaatgactgaagtggattttgcaaagaaagaagaggttcatttattgacttatttattaacagggcatctattcagtgtcagacagtgtgccaagcacttggaatggaacagtgcaaccacaggtcctgcctgcaggaacctcccagcgagtggtgaatgtgggataagtcactccattgtaaagtgaaatgtatttcccaatggaggcccatgccagatgccatagagcccagggaagaaaggggtaacctctcttgggtggtcagagggagtgagtcaagaatgcgaaatcaccacggcagtgggacaattctggaaaatgg

SEQ ID NO: 43213 - DNA, 797 bp, Bovine  19866880463185
  misc_feature (1)..(1): n is a, c, g, or t
ncttctcctgcaatgaaagtggatcttctacaatgaaagtgctgactgtagagattttgttcatttctggtctttgtgacttggctggctcatgggaaatttaaaaagtagctgcaggctaggatgtgtgtgggtgtgcatgctaaggcacctcagccatgtctgactcttcgccacctatggagtgtagcccaccaggctcctctgttcatgggatcctccaggcaagagtaccgaaatgggttgccatgcgctcttccagcagtttaggatacagcttttcaaatagctggcatggagagtgaataatgcagccatgctgacatgggagatctgggcccaggtggagttactatatattcgcattctggtgtctacctcaggcttgggtccttttcagtagaatgaagtcatctttcagccctgctcacccctcagtgagtctctttaaccgatgaaaaatcctcttggtggtcctatccttatctactaggaagctcttaggccaatggccagtaactttttttttttattgaactatagttgatttacaatattctgttagtttcagggacagtgaattgatggccagcaactttttacttctaataagtgaaacattggatgggtcgagttcaccccatgcaagttccctgagttgtatccagctccagtacactggtcctaaccctgtgccaccttctttcactcaggggagcatattaggatgtatccatacagaggaaatcctgaatcttctcttcagtttgtaacgagaagaatcaatctttgcaaag

SEQ ID NO: 43214 - DNA, 1337 bp, Bovine  19866880464578
  misc_feature (1)..(1): n is a, c, g, or t
ntgacataagctgttttcctccatttcttttgggtaacccattcccttcccctgttaaaaatggttctcaggaaaggcccacctgtggttttgccccacattatgcactgattgatgggttatctttccacagtctacttgcttcttaagccttgtctacggtgtgacatggaagagctgtctttggtgagaagggctattaggtgtaattttttgggagggactctgaggctgtcggtcccttcctgggcccccagacctattgagcacctaatctgctttgcttacactgaaggccagccctgataatcccagctccacctgcatcaccaggctgtcagcaggataaagtgggatgatggatggaggagcactttgaaaagttaaaagctcctcacaattgtgagttgttattgttattaatccacagtgtcagagagacactcctcttgaaaagagtcccattcctgaggagactgggggcagtttgggaggaggtatcactcattggtttcttgttcttagagcaacaaaatcacccccagtgcacatggagtgaataggatgaaaagttgttcttaaaatcagcacggataaggggctcccctctcccgccccagagcctctaaaacttgtaaactttgctttggcaggttcattgccaagtgacagggagccaatagccttccttctccctctctgttcccacatctctttctctaccccctctcagttacttcagaacaagtctcagcatggagctgatcatcagcttctggaaagctgaactggtgcctaagtatgtggcttggctgagtggggggaggagggcttgcttctgcaggaagaggacgggggtgcaagctggggaactgggagggaacgggggccttggtccaagtttgtacactcactccctggcctgtgcttctgtattctgctcacagctcatccaggggtggggctgggagaggatgggggtggggggaggcaggagggagggtccaaggcagtcaggtcctggggctgattgggattctgactgttggtcagattttgttagatatgggtccagctgctggaaaataaatcaggatgtgggagagaggccagtgggtatttatggtggtgatttgttgtcttacaggaaagagctgtttccgcatctctttttcaggtgggagtggggacccctgctgcctttccctcatcactggctgttttcataggttggggttttggcaagaagacatgtgttggctggagttcctgggactgggttgggcagcacaaggggggcccctgagctggggttgagatgctgtcctctgccctca

SEQ ID NO: 43215 - DNA, 757 bp, Bovine  19866880668031
  misc_feature (1)..(1): n is a, c, g, or t
ntacattttgaaatgcatctagtgttatgttccatgaatagagtctcactcttttccttatggggagtggtgccccgccatctacccaggtgctgcaaaagttccaggtggtggagaggctgacaggatctcgccacgcgcttagacaagggcagggtgtccctttgctcactggagcatatggctctgtacaagctcttttgaacagcccatgccctagtttccagctcagatcactgaactggaaatgtgcctgtccacggagactttcaccttagatggcagtcagatgccttcttgtcttttacatctctccttttctctgatactttgcccttgaaagcaggcttctgagtggctcggttgttgaagctgatgaactggtgggtgcccagatgctccaagcagtaggctttctgttttttttttttgcatgtataaatatctttacatgtaaagtgactgtcagcatgtaccttggctgtttgcatgacaatgtgaagtaaaagatagcagagactgtgagaatgcctgcctggcatcacactgctgtggcctggcctgagaagtggtaccatctctaagacgttccaacatttcaggctgtgggaaccatagttacaagcaccttttcacaaacaaggagactttttctgtgaggaggaggtcagtaatcaagaagctgcgctcattttgagcacaaaggtgtctccttgacatgaaaaaactgtctggattttcgctttttctcctcctg

SEQ ID NO: 43216 - DNA, 854 bp, Bovine  19866880757145
  misc_feature (1)..(1): n is a, c, g, or t
nggactcacttctgctgggagctggtctagcttgaagccctcttaccgcacgcttgggtttgtgcttcttaacttctgcttttaaactggcagccgttttctactgcatttccaatgtgcctctgtgtgtatcttggagagagggagaaagagaatatatggatcaatatacgcagacccttaaaagcttatactttatcattgtaataatcataatatattttattttacagccactcataactgaagcctctgggcaccctaacaaaaatagctaaaagaaaaaaaaaaggaaattatattaaacaaaggaaatatgactataaaaccccaatagccagggaactaaatgaacaacataaaacctccaaacaacaaaactacaatgaaaccaaggggggaaagaaaccttttcatgagctttaccctgaaggattccatgctgtgagatcacatctgtttaaagcaccataatttatcgatatgacatcaaaccaggagccagccattgtaaacctttcccgcagaaactctcagaaaactaaccaggtggtcaatggggtgcgggtgggggtgtctgtagcacatagctggggcaacaatggctttaaaattttatgttcaaatacatctatgtgaagttccagatctgagcactgagatgcaaaaattagttcattccataggtaagcaaaatttacaaacaggactttttttaaacagcaattttttttttctgagatagttcatctgttaatactcactgatgacttctcaaagtgctgcatcaaatggaccattttcaagaacagatcctctctagaatgagccactgagtcccaagttatgacagt

SEQ ID NO: 43217 - DNA, 1036 bp, Bovine  19866880832343
  misc_feature (1)..(1): n is a, c, g, or t
ntcattgttgaggcccattccagacccattccagaacctagacgagggtggtattgctgccgtacagaagaggaatgttttaaggttaccatttccttccccaggggaccctcccaacctagggatcaaatccaggtctcctgcattgcaggcggattctttaccatccaagccaccggggaagcccatgttttctaacagcaatggctaatttacaagttgccttttcttgtactgctttggaactactttgggactcttgtggactagagagatacacagcccctcagatggggtagggaagtaaggggtgagcttaagagggcaattgctatttatatacttttgattcctgaaaaatttttttaaatgtcaatggtcctaattgatgtcaggatgttaggagttcatattcatgagttataatatactctgcacttttcatatgtttgaaatatttcttaataacttgttaaagacatacttccttcttttttaagtaactgaaactgtggtgtggggcattctttttttatcatagaaatgatatttctgtgtttacctgagtgcttccatgccgattcttttgtctctctctctttctccttctctctctctctttctgtctctctctcccctccaaatattctatgggatgctgcctaaacagctttgatgttcagactgacttatgacttaaatcctaaccgccagaagcacggttacttcagttcctttaaacgcttcctactggcgggtccgctgtacctcggaattcccggggtcctggacttcctgctgatggcacagctttgagctctctttgctcaaggacaggtttgggagagaactctccctagctgggctggaaacaagaaaaggactacatttcaaaggaaagggggaggggaggggtggattagcctcgcctcaaaggctaaaaataatccggctttgtagacttcttcctccaactagcctgggccggaaatggggagggggaaagacagggtaggatctggcatcttgttaagtg

SEQ ID NO: 43218 - DNA, 3146 bp, Bovine  19866880930492
  misc_feature (1)..(1): n is a, c, g, or t
naattcttttctcagaactcagttcaatcagcattccttcctagcagatttctctgtcctccctgactagatcaattgtaacattttaatataactggctctagctctcagttacttacttctgtgtttttattctttctctctttctccctatcccctatatccatttaatttctatctccccctctagactaaactctaagaacgcaggaaccatgtctttttctatgttcaacaatgcccacttaacacttagcataattcctggtatgtaaaagctgcctaataagtgaataaatatataaacataaggatatatgatttgctaattcatttttactgagttgaagttaaaagcttcttgggaaccagtgccagttgtcttttttttttttttttttactgtattcttgaaatactgaattcactactgggcttatcgtgggcatcttttaaatattagaaaaatgacaatcattttttctgactgttctgtttgagaagactctaagggctctctctgtataaaaatataacacccctctgaagttatttgccttatccttgtactccctgagatccccagctctccccagtagctccactaatcatgaactctcccatgagagaagccctctaaaaatgctgtctttgtttactgggtgattttgaagcctagtctcttctgggaataaaaacccaaactgaaacggttggagtctgcccactgggaatttaaaccacttgactctaaggctatgatgacaggaacacagggaaaaatagatgagattctgagttgcaagaattccccaggactcactggaaagctacctaaggacagagggggaaaaaaagcccaaccataataattttctccaaagggccatactggggacagtgtcctgctcagttctttggttatagtttttccacctctagcagttgcccctgaatctggtgaagaattgtggcaccatcagtccccaagtcagtttgtgggggggttgtacttggtagcgccagtgctacatggatttttaattttccataaaacactgtctcctaggcttgaggtttttagaggatgatgagatgggcaagatgggcaataaaagaaagatatgatgttgctcaggattgttgtcattattaattccctgtcctttaacccataggtgaagtgtcctcgtcaaggactttagctgactagggtactcccctgtctttgccagatgggggatgtagaaacctaaagggatgtattttttcagtgtttacactgcatggaagtttccttaaatatataatcagaggtaattagactctgtggtgtaagaaggggtgtaaacactattgacatgctggtctcagaataggcacatctgacttgattggcctttgacagttcctgattttcaatatttttgatattttgggaagcagatgtgatgagggtaaaaaagtttaagcttgagaataacatctcttggttccaaaataatgctgcttgtttgcaatcgttcaagtttttaacctacagagagacacaggctcggggaaagatgtctgtctggggcctagtgaatcaggcagtcgaggtggcaagattctgtctgcccccagactaataagcttgctataaagctactgatgttctctgccacaggggttgacatctttcctctggggtgaatatttttttattcacccctttcagtcttgagacagatttgatgtcatagcgttttgttgtgcttgtcagcaaactgttaagtcattctcttagtattgtgtgacagtataaaacatgataaccataaaagattagtatgatttttaataattccaaaaggaaacaaatggtgtttcctctctttgatgcatttgatgtgtttcagatatgtttcccattgtttgcatactacaccagcctggagataggatctgggtattaaactgcatttatttcaaggcttggtgccttgccacagaccccaatataaatgcttccagatctcactgcttttgctgatatagaacagatatcagcataagcagagcttagcgactaaacacaacaaatatctattacttcagaagatatagtttctgtgggttaggaatttgagagtggcttagctcagtgacctggtatcttatgaggtcataaccaagtatcacttggggttgcagtcatctgagagcttgactgaggctggagaatcagcttccactgttactcacgtacatgaccattggcaggaggcctcagtttcctagcacatgggcctctttgtatgactgcctgagtgtccttatgatggggcatctgggtttccctagagtgggagaaggagagagagcaaagagggagccacttcgcctttatgtcctcgtcctaggagtcatgctgtgtcacatctaccatattctgttcctatgtcactaagttcggtttagacatagaagaagtgaacaggaattatcttcatcgtgtgaagataagagtttcagggaattggttggtatgcctcaaagctatcctgttgctgactataacctcctctacattgagatgtttatttcttgtgtgtgctgtgaggtctcattactttacactggtcctgaggatggcactgtgatacctccatctaggagcagaagctagtttataaccctctcctgaggagaagccaggctcaccttgcagggaacctatttgggctaaacctcagtcttttattttaagaggctttgtgagcagtctagtttgtaggactggaaaatgtcaactaactttctgatgaactttctttgttttgggaaaaaatcttcaaaattaaatttagttatccagaagtttagcagatcccctctcctgcactgtgctgggaggaggtggaaactcctttccaaggactttacgatccattcttcccaggtagtttttgtcaggactctatgcttccattaaaatttgtgccctaataggaatgagttacaggctgttggaggggaggaggtggctcaaagatctagatgcctgatggacttaggacaccagggcccaagttgtccttagaaagggctgactctggacataagcctgtggccaaggtttggacccctcctgactctgatgt

SEQ ID NO: 43219 - DNA, 880 bp, Bovine  19866880946057
  misc_feature (1)..(1): n is a, c, g, or t
ntacactgacatcttcatcagattatattccctctcatgcaaatcagtggaatccacttgcagggaatttgacagcaagtctttcagcaaaggcaaaggagaattattcagcttctttggctcaaaagtcaacgtgagctgtgactagaatggagaggaaataaaaagcaagagaggcatccgtagaatgtaaggtcctttcactggaggttttcattcgctccctcacagtggcagctatgagagcaggaaaatgttgaacttccgccttaagtgtcattgcctatgctgttcagggaatcagggagcttgagaccacagtaccctcatcgcaccgtgattgttaacacacacacgccacacacaccattgagactgccactgtttcctctgaatccagagctggctcctctactgagaatctcttccctgggagaggcatcaatggaggaaggaaattgtctctaccgctgggtttgttaccagggttccctcttttcaaggctcgccacagccgtgctctgagagacactgctctgtgctcccctcattgtcccactgcaccagaaacaagcaacagcaaaagaacagtcattatttgtatttgacaagaaaggcggcagtaaaaaccaggaggcagtgggcatgaaaatgtcagactgaggatcggaatgaggctgggacagcaatcacagaggagcagcctcagtggagaggagcctcaactacaggcagacaggtaagtgatggagaaggaaagaaagagagagacagtggtggggagagtccacaacacccaagagcaaacaaactcaggttcaatgctgctgcactccagaggtacagagcacaaggctgaggagcacccagaccctcaagc

SEQ ID NO: 43220 - DNA, 1118 bp, Bovine  19866881061701
  misc_feature (1)..(1): n is a, c, g, or t
nagtaaaagaaagcgtattatacatcagggtgcatttgacagatacaagtgattatactaatagtgggattatttccccacatgtctaatgtatttaggcttctttcaaatgaaatgagtttaaaactcatccctaaaaatgaaatgaagtctttaagttttattctacctacctccttcttttatctggattttaaaacctttttgtttttaatgagagtgatattgtgctgcatataatttactttaaaatactttgatacaaatagcttgattttatacttatatatctttatatatatatatgtatatactcacacacatggacttcaattatctttgtaaccaacactagaggttttactttttgtaaaaagttttactttttggttagaaatattgcagtgaccctccccctttgcataacagaacataagaacatatatactcatacacatatattcatatagctatatctgtatctacatctacctatctatatatctatctacttctctgtgtctgcacaccacaaaagcatcctcatgttggtatgtgtgatgtgtatgtatttgtatatatgacctatatctcaggtacagtctgttaccctaagagggagcatacatttctgggcaagcagttagtgttttgaaaacttcttgttagttagaagccaatactccagatgtggacttcaattatctttgtaaccaacactggaggttttattttttataggtgaaaaaaatagtgttcaagatctgtggattggttggaactattgcagtgaccctccccctttgcataacagaccataagaacatagtccagtggtccacaccttttcaaatgatgccagatgttttctttggaaatgatcctgtaccagccactgattagagaattctggtcccacaaatctaattataaaatcagctgaaacctgctgctagtctattgttacatcttcctttggcgaacctaaaactttctacagggatgagagctggaatgtcatgcttacagacttgggttgtgtgagcattttggagcttgcttgctaagtgaatgagtgtatattggggaatttgtcgggactaattttatgtaagcaa

SEQ ID NO: 43221 - DNA, 882 bp, Bovine  19866881065237
  misc_feature (1)..(1): n is a, c, g, or t
ncattagctctccttgggctatgtgttggtgatacacagatgagatgttattttcaaccttggaaaaatttgctgagggtgggtgaagcagttgaggtgttttttcttttttcttaatgatgataaaatattggttctatgacagaggcttgtacaaggttaccataggaactctgaagaggagcaattaacccaagtgctcttaaggttgtgggagggaacagtaggcaatgaaggtagaaggaaagccgggcttgatcctccatggaatggcacagggaaaaggaaaagcaataggaattaagagctggatcaaaaaaaacatgatgatctgcaattcttccctagagcatgagcttcttggcatggggccttctatctatagggggctccgtaaatgtttgtgaattaaacaatgaacagaacgcctttggaacagaacgcagacctacaagaccaaggggcattgcttcctaaatattatcacagccttgaatttctcattatgactctctgagtagtttaattaataattgctaagggaagaggagagcaaagtgataattaatagctattggctagagccactgctgaattaacagtccaattacaaaatgaacaaaccacatccaaaaagaagcatgagttccaggagcaacaaaagctcatgggtaccaaggaccctgggggatttcttcatctgagcagctactaggtgaagtgcattccgaacagaatgaatgaagaaagggtaaatgtgaatatttgctgggaaatgactccctcaccatggtttgcacttcctagaaatgcaaaatttgccactgggttccttttcctcccaaccaatagcagagattaaaataaaaacagaagacaagg

SEQ ID NO: 43222 - DNA, 1487 bp, Bovine  19866881263624
  misc_feature (1)..(1): n is a, c, g, or t
nacggagtttatttaagatcttgacagcgcccaacagtacaagtccctgaggggctgggtgtgtttgtcttgtccccactgtaattctaggcctgcacaactcctgtcgtaataacaggtgattaattcagactcggcagaatgaagagatgaatgtctgagagtaactgaggagtgtccaggctatgaatcaagtaccctgatggtgagttcagccaatctgccatcaattcttccctagtactcagtgcctgtggttagaagaatggagaatggtgaaaccatcccgcataaagggtcaaacacatataagagaggatgagacagatgagagactctaaaagaaatagcagcttaaccttttgcatccttattcgaatctaaataccctgattttgtttctcctcctccaaataaaatttttgtaaaatgagatcttgaactgaaaatgaaattagcactttcaattaaccagaatttaaaaattcttcctgaagatacagcaaaactacaaatgaatcaggagagagaaaacgtttctgccacccccatctatgcccaaaggcaatattaggggctatgtccctaggtagcagatttgaaccaatccaatgctaatctgtacttctaaaaatttatttattgagcacctactgtccgtaataccctttaagtaccacagaacacagaaaacataggcttcagacttacactacttaaaatttagctgagaagataagatacttgtgaaaatagctgtaaagcaccacaatgactgattcaacaaggcaaagcattaaaacagacaacttaaggggcagaaaataagtgcccactttagaagactgcattataaatgtccctcttactaaagagagcaaaccaaaacacaaaatatgttcaagagaatcctaaataataaattatatttttaatgggcagctgcaaaagtaatcataaaaaaggctaacttaaaggtattagccatgaaaagatagattcgaaaatttcttacagaggagagatttttcacccaaagctggtaagtactaaagaatgtattgtttgctttttatgttaagtatctgttcatgtattacttttatagcttaaataaatatttttaaaatatttacgaacaaagcctgatttagttttctaattgcctcctgaagtctatttgggatcctctttcaacattcttcatgttaatagagcacattaaattgcatttggacaaatgttcagaatggaatatttgaataataaccttcttatgttttgataagtactcattcacatacgtaagacaaagcattacaagttggaatataaatgaattctgacacatcaaaagcattttctttcctctgatattttatctgtttgtggtctggattttgaaatacaggagaatgttatcatgaattccaaatataattatgtgtttctagaaaagaaacgtcattatttgatagtacaaatgg

SEQ ID NO: 43223 - DNA, 1197 bp, Bovine  19866881271999
  misc_feature (1)..(1): n is a, c, g, or t
naaaattcttcgacagatgggaataccagaccacctgacccaccgtttgagaaatctgtatgcgggtcaggaagcaacagttagactaagcaacagtttaggccttgtaaattgcatagagtaacttgggcttgaggtgggccaagtcggagaggaggtttccaaactccataccaccagatggatgtctggaatagaaggcttcctcctgctttccaggggaaaacatcattctggttctctgtgctttgaacccatgttagcaagcagatgccatatttactagaaaagccttgggtggacacctggacagctccccttgttaattcttctttgctgtggggttattattcactcctgtgtactttggcaggcactgagcgtgggaattagacacttaaaatgctctcattccatctgaaaaccccttttgtggccaccacctcgccatagagcctcctccatcaggatttttgtgtggggtgggtcatgcttttatagggtggtgtctttcagggcaagtctattaggcttgtaggatgttttaattggggcagtgtaattgcagggtgccacaagggccctggcaagggatactttataaatcagattattatgcttagctgtgttaatgggcatttatatgccctaaatccttcatacagcaatgggataatagcccttaaggccatagttactattttgggttgggcccacttgtaaaacaggatcattttattgtgaagctgttttcagttagaggagtacataaaaccctttgaaagacagaatttcaattttgtggttgctatcttatatcgtttaaatggtagagccactgtatctgtgtatgtgtaaaaatatatgtatataaatattttaaatatatttaaaaatattaaatatttaaatatacatttatttttaaaaacttagaaccaaaaagttaaaattgtgctcctgaagcaagacttcttaataatggagacttacaaaatcttaatggaatttggccaaatgtacatcctttcccctgatcagtaataattttaaattttggggagaaagattctttttggttttgtgatgtgtctcagaggttctaatctccctggaagaccttggtctagtgacaggcagtggtgtggaggatacagactctgtgggttacactgggaaatgaacactctggcgtgt

SEQ ID NO: 43224 - DNA, 813 bp, Bovine  19866881312695
  misc_feature (1)..(1): n is a, c, g, or t
nccccattgaaaaatctcccagcagacaaaacccagaactaagcaggtagtctgggtggttgaatgactctcttcctattatctctttatgcatttcatcttcaaagcattgtgatctgtcttcaatacaccctcgggtgtgggatttacatttttaatattggcatttatgacgtggtgctttttcctggttaattggtatcagagcaaaatgtttgcctctctcttgaaataaatctcttcaagagcttcaatcacacattcttttgttctatccctcatttgaaatgggctctataatgccgctacataatcttttgcctctcacatttttaaatctgggggtttatgctttaatagctttgatatgtgtactctttagcctgttacttaaaccgtgttcctccctgcctgacaccccactccccctcagccttacaagcctggtaccctctgaggctgaaaggatttatttatcatccagaatgtttccataattttggaagcatatgtttcgaaattacattccaatatctcatactatgttctttgtcttgcatctgttctgtaaaaacaaataaaacgcacataattatattccaatggctgcagagccctatgtttcccgcaagagttggttcttccacaaacagtaagagtcacacaacaaaggcacttacacccccctgcgacgtcatccaaatctcattcttgtgttaattagagctaaccagtgataatagtaaacttccaccacgtaactgggaaactttgactcctttccaaagctatttcagttttacaggataatct

SEQ ID NO: 43225 - DNA, 1522 bp, Bovine  19866881608246
  misc_feature (1)..(1): n is a, c, g, or t
ncctctgtttctgggtgatcgctgttttgaaatctgacgctccccgaatgagttcccctttcttctctaagctcaaaagatttcaacttcctgactatgaccaagccatcaggatagaatctctcttcatcatttggattgacttgcattcactgataccccactgtaactgtggatcatctctaagtgtcttattctgtttaatagctacatcattgtgcttttgagttggcagaaagctcaaagttagccgtgcacagcaaatggcttatgaagtaatattgaccctgatgtctgatcttaaatcccaaagtcagtgctatttagttttatcatttatggattcagtccacaattacagtagatcaggcaagtctccctgaaacagtccctgctttaagagttagcctttaatttgaaggtattttccccagctggaagttgtaataatgctccattccatctggcaacacaacaaagaactgtaggatttataaactgacagatcctctaataagtgtgagtgagagatcaaatttgcatccttttatgtcactaggtaccacatctcatcacctattctgactctggggccttattaatagccaatttgcacacaagcattggcatgatgaccaaagtcaatcataaccacaatggaaaatgctccaccagacaactacaaagttcatcagcacccagaatgtacagatacggcaagctgtgaaggtcacccacctgaacatgccacctcctaatttctaaagattgacctgtctgacaaactagaggtttgagcccttcctctctggtctacaaacatccctcatatagcagcttggtcaataaagcaaattactttcccaaacagagattgacaggagacaaaaatcaggggtgtttctggttgatttaaaagcattcatggaaaggtcctggtggtaaatgcattttgtgcccattagatcatgtgtggtatggagacaggacctacaatccttgtgttgacatgtaaggagatgtccattagagtaatcctctggtctcatggtcatgggccaccccttacaaataaaatagttcatggatggagggtgaaaagtatcagttcacactgctaagttaggagaaaactatgaaccctaaaatttggtctctttcctctcctctttcttggaccagagtattgctgcaatcctagatgagtatataagctgtgaaaacgttaattttccttcaagggggcattcttagggtctagactggagagaagggcagcagaacatattaacaagcccatctggttgcatatttatataatggctaaagttaaccatttgatttccatctgactggctcctgtgttgatcttcagttggctttgatttcaggcaaggaagagaggagtgttatttatgggctcctttcaaatcccaacagcttcattacatagccataggacttgtggtaacattagttgataaaacaaaccaaccccaacatttcatagactggaacaaca

SEQ ID NO: 43226 - DNA, 1598 bp, Bovine  19866881793516
  misc_feature (1)..(1): n is a, c, g, or t
nctcctgtttataatttacccaaggtttcctgacttggaacttatttctcttttcccgatggtgcaacattctctgaattgtcacataacacatcaggaggggcagaagcctgtctgatcttctgaacagtaataaacagtgtctttctagaacccctgaatctggcattgtggtgtcttagggagctttgcaaactcatcagtaccttgttaaaatggggttcatttctgtattatggatccctctagaagctcaaatcatgatcctttacatatttcatacaataaaagtgcagtttcacaagatctgtctaaacggcatgggcttatctatctaattcacacctgggctttgtgaaacgccttggaacccactttataaatgttaagcgattatggccttgggggtggagaggatagaggtgcaagaaagatgctcattgcaaacatattttgctcagaggcttttacgagtaaataggttctcctccccaacctctctatatttcaaaactaatcttgtttgaagccctatagatggacttcccctccccccctttaaacatagttcaattcctttcttctaagctcctcagctcccagcgcagctttcattacagcaacataaataaaaagtgacataaaattatacagccctgtgtaaagtagtttaaggaaaatgtcttttatggcggcttttatggtttcaccaattagttattagattttctccatttttaatttgatgtcctgggtatgcgttctgaaaggtttcctccccctttcatctcctggcagtaataaggctggggggccttgagcccccgttgaagctgactttctagttttgcgaaggcctttcactccagcctatttgggccaggcaagttcctcaggagagaggccagggtcgaggtgttttcaagtgagcagagttttacccccttattaacactcagggtcccctgcagctcgtgaacttgcctcccgctgagggtagctgcaggctgggctcaggtttgcaccctggtcgttgcaccttaagctgataaatcctgagtttttagtcactttccaaacattcccggggagtgagaataacagagatttactcctgccaaaatttaatcatgcagaaaaagtgaaatttagatcagcgtatagattattttttaatgtgatcactcgacggaggaggcaaagggagccagaagttgagcacttagtgcagctgagtctagaccattgcaatttgattcatttgggagaattgtattaggttttaggctttggcttgggctaggctgttctctttgggagtgcatgatgtcattgtgtcaagcgtgtcacggccaaggcattctggtatttatgttggcttcagatctagcccagagtacatggcaggctcgatttattgctactttaactttgtttagtcatggagaggctttatttatgttggtaaatttcaaacagtggccaacagtgaccgcacaatgaaaaggcctgcaagattcatcatcgataaatcaccttgttgctgagtttctttaattaaggaaaaactccgtctgttgatccctgtggttgctgga

SEQ ID NO: 43227 - DNA, 785 bp, Bovine  19866881924829
  misc_feature (1)..(1): n is a, c, g, or t
nagaatgtgtgtatttcccaaggcatacccatcaactctcccctccaatccaatccaatactgaacatgcaacagtcctaagtgttttaaaacaccagaattagaatagtgtgttgcattttgaggttaacatacaaattcttgactttaaaaggcggaattttcacaacaaacatgcgttgctatagagacggtataagcctacataaacttcaggcattcatattcatagaaactcctgaagcaagaccaaatgttggccctaacattcttgttcttgccaacttccaaatagtgcacaaattatgccaaaaataaatgggtgtgactaatacaagcttagaacattttttttttaattttaccttgagggcaatatttgttgatataggagctgggtgtgtaaagcataattcccccttccataaatccatctgttttatttacacttcctaaaagacctgcatgcacattttttccatgaattgtacaactgctagtaatcatgtatcatttcaatctgtgccccagttctattttaacaccgtgtctcttcctttttgtttgtgatccattaagcacatactagaggcaaaacagtcaagacttaactcttctagtcccaattacatgctccagggctgcagaactgtcaaccagctttgcatagctgacacctccaaggtctgcaagcccagggtaaatcctattacaagctcaaggatgtcaaattggtttctgccactgaccatctttcccgtgaccctttcccaacccttcaggcc

SEQ ID NO: 43228 - DNA, 1968 bp, Bovine  19866880415770
  misc_feature (1)..(1): n is a, c, g, or t
ncaaaggtaaatatctgagaaaaataaaaaccccaccatccagccactccaagaaaactgctattaaatttgtctgtgctgttttcacaaggtacttgtatatcaaatcatctaaatgtccactttaaatatcttataattttatttgtcaattttacttcaagaaagctgaagaaaaatgttcatgctgctatttcagattttcttctattgttaaacattacatataagtagatatatgtgttttaaacagaaatagaatcatgttatatatcatagtctttttccttaaaaatctataatgaacatcattctatcattctatgtttgaaaaggaaaagttaatatgttattctaaaagtacaaaaaaagtttcattgtttaagtcataaattcagatgtaagtgtgagtttctagtattggctaatttcaggttttacatattcagattctgataactacagttacatttaattcactttaagggaacacaaatgtgctttttctcttcttccactgatttgctttatccttgtttattttttcagattgaattcaaaagggactcatctaagaaaacaacaaccctctaggctcagtggaccatttttttcataaccctaataaccacagagaagagcttcttatttaatttatggtacaaccttggaccctgaaactgtttctttatccatcagttcagttcagttcagtcgctcagtcatgtccgactctttgcaactccatgaatctcagcacgccaggcctccctgtccatcaccaactcctggagttcactcagactcacgtccatcaagtcggtgatgccatccagccatctcatcctctgtcgtccccttctcctcctgcccccaatccctcccagcatcagagtcttttccaatgagtcaactcttcacatgaggtggccaaagtactgcagtttcagctttagcatcattccttccaaaacgtgggataaaaatattcccctgctctcttttcacaagtaacctaagattcagtcttttttttgttggtcataaaaaaatcttgaaaaaatgcagaatattatgtaaaaatgtaaagtgttattatccatcattaatctgtgttttttaaagatttttttttaatgtgaaccatttttaaagtctttattaaactcgttacaatatattttttttctttttcttttttggccaggaaacatgaggcctgtgggatctcagctccccaaccagggattgaaccatactccctgcattaaaaggtgaagtcttaaccactggacaaccagggaagttcttgttaatgtgtgtgtgtgtgtgtgtgtgtgtgtgtgttttaattcctttttatgcattcaggagttctactaaatactgtcatttatattttctcaatttttttcaaagaaaaagtgccacatctaaatgtaactatataaactatataaaacttgatttttttttttttggttggtttagtagaatttatctcacttagatctatttgggcttgtgccctgtatttactctgtcccttctgtttcacactctttggacttaacaaaggaaatgacagaaatactgaaaaagggggtcacggtatacattttttaaaaaaatgctcttctacagagaggaataaatccgactctattgtctttcaattcaggatcgttcctccattcgaggtaactatgtttgaatggccaccgcacagttcacatgggacaatgtcatcatatcgtagtgacatagtgaaggtttacaattcaagacttgagactaagataatcatgggaacatttaggaatgggtctaaaaggttggctgggcttctgtgacctctcggaaggcataggcagagtgggagccaagggtggaagctccctgagggcccaggaggaaagaagcgggagaactggtgacagggccctgatgggagggacaaagacaaag

SEQ ID NO: 43229 - DNA, 1409 bp, Bovine  19866880768662
  misc_feature (1)..(1): n is a, c, g, or t
nttactgcatatttgatttgtacttacaggaatgtaggggcccttgtatgtttcaatctctgctgtatccccagtatgtaaaatagcccctactacattataggcatgcaggtatatttttgcaaaaagaaacagaacacaagcaagtgttcaaatgtgaaaactcttttttaacaactttgcaaacacattgccaaacagttttgctctcaaggaaatgagtgaaaccactccatcatcaagtatttgtcatttggtaactgaacagattgatttcacaggttctgttggcccaatgaagcatgcagcattgaacattcagcaccttatatacactctgggaagtatagataaaggcaatcggaagaggatgatttttagttgaggattcactttgaaaggaggagttttataggcccctaaaattggcccttgagcatttgtttcaatttgttccaatccagtttaatttctaacacaactagccaaaaacattaataaaagcaggaagagatttctggtttccagaagtgaattattgggctgcagtcaaagctatcacctcggatgaaaataaaatgatttaccataagagaagagtttctgtcttctttcatccatggttaggaatagggggccatgtgggacaagtttgttcaggatgctaatgaactgccatcagatgctaagtcataggatgcaaagtgatggtctgaggaccaaatctggcccacatatgtattttatttcatctatgctattttttttattgaattatctgccaatatggaaaggcaggagaattcacaaagaactctggtttcttcttttccccctggggaaaaaaataaaaacaagacctgcagcagctctgggcctacaatccaaaacatggcaacatttaactggtgttgacgtacaaattcccatgactgcctgtttccccactatagtcccagccctgcctgtttccactctgagaccgaaaacagtttcagtttgccattccccatctccctgcattgttttctttcttacagcttgcctgtctcacatgtttattttatctaatgggaacctgtatacaactactgttctaaactgtcccacaaatgttatcgttagatttccatcctctggctgagagtgaatgcacaagtgttccaatttgtggccctaccttttgttgttccaaatcaactgactgattgtaatcatttctccagaaacctactgtgtacatgtggtcactgggagagttgggaatgggatctgcaaagggactagttgagtgaaacaatcagtcattttctgtgactgtagatacagatagagtgtcttagctgagcacctcatagtaacccactagtatctattaaacataggtggactcaataagcctttggcaa

SEQ ID NO: 43230 - DNA, 3240 bp, Bovine  19866881011991
  misc_feature (1)..(1): n is a, c, g, or t
ntttaaaaagtttttttttaagaaaagcttgtttttcttacacattgaatagacatttaaatgaaaaggtaaaaattattttgaggcaataaaattatttgaagattaacctttgtaaattagatggaggcagaaatgtggttttaccatcacctaaaccaagataaatgctttttactctaattagaaaataaaacccaggaagtaaaactctagtgttattggtaggctaataaggtgcattaaacaaatccaggagactgtcatcagttccattttttcccctctcaacttaccctcttttcatgtggcatataccatagagaaggatgtaaagataccagggaaatggtgcagggagagtaaattgtggtcgacatttgagaaagcgtcttcactctaaagagagctggcacagccgagtgatgtgtgcttagtgagccagactgtaattctgttacctcactgctgtctgtgaaagtgctaaatgtctgcagcttccccccgggcaggtgattcagcaccttccacatcaggggccagatctgactaaaatatcactcttgcataaccagattactgttactgactcaaaacgagacatgatgctgtgtgtacatatcaatatgcttctgcatatttctttactggaatgtctattttttcacatgggcatactttcctacccagcctattttcatactggttaattatttctgactcttatgactttaattcgtgttactcacccttaaggacctgtttccagtcatatctgtaggtgaaaccagagaaggatagcacacacaaactgatttctggttttacttttaaaggcaactaatctctttccctattcagttattttatttttcttggctataatacctgaatgcctagttccagaaagaactatcaccaaacacatgtaatataaagtttttattaatgtattgggatggcatttagtgctgcaaaatcttgttactgtgacttgcagtgaagaacaagaaatacaaagaacaaggaatacaaatccactaactattgtaaatcacatagaggcagaaatgtgatttgtgtaaatatgtaaaatttagtctgttcatgtataaacacacacacaaggcatgctatggggaaatgagatcccttatacatgctcattcacttagccagccaacctcagagcacagtctgattaagatggctccaagtggttggacatggcagaggagcagctgcaagtgatggaaagttagccagtttcacaagatctgaagtgctgtttctcctcacaagaagcaccttttgagtatctattatgtactagacattgagaatatagcagtgtgaaagcaagagctctactcctctgaaagttatttctaatggaggatattcactaagcaaagaaagaagataattacaaatagtgattattgccatgaaggaaattaattgagaaacatggtcaagaataataaaagtgtagaggggagagaggctacttccaatagagtggttaatgcaggcttctctaagagatgaaggaagaggcagaattagccataaaaggatgaagaatatttcaaaaagagagaacagtaaataccaaggcaaagactagccttttgggaggcaaggaagagggatcagattggttggaatgtggacaactgagaaggaacaggtgtgttgtgagattgaagtcacatagggatgtgtaaagaatggtagacagttggtgttttaaatgcaatgagaaaggttttaacaggactgatctgtgatctgacagcagctcattccaatttttgaaaggacagagagttatgaaagagataggagaaaaggaaagtgaagggagtcatgaggagaacactgtagtcatccaagcaaaagaaatagtgcatagtgctacttggagcagatgaggtggagaagagtgagcagatgtatgatatgggaagcaaatggtctgcctatttattggatgtgaagcttgagggaaagggaagaaatgaagatggctcctgggtgtacaacgaacatttagataaatttcagctgaatgctgaagccttcctgtaggaaattttattttatgctgggaaccttgacttttccttacaaagaaaatggtgtgtcaggaagctattatataagactgaagaagccaatgtcatcatttagctgtgtgatctaaggctagacactgcccctctcagagcctctgaaccacttccatgagctccaagatcttattaagatactgagcttttcattggtgtagactacacatactgttagtaacctgagtagtgttggtgttaagaggaactggggcaaatagaacagttggtgcagtgcacagaccccccaatattaccaccctgaagtcttcaggtaatctccttatttctgctatttctgtagtttatctttgtacctttctgtcagcacagcattgagaaagtccgatgcagacaggactgcatgagtgaacatcgacattttaggaatcagtgaactaaaatggactggaatgggtgaatttaactcagatggccgttatatctactgctgtgggcaagattccctgagaagaaatggagtagccatcatagtcaacaaaagagtctgaaattcaatacttgggtgcaatctcaaaaacaacagaattatctctgttcctttccaaggtaaaccattcagtatcacagtaatccaagtctatgccccgaccagtaatgctgaagttgaatggttctatgaagacctacaagaccttctagaactaacacccaaaaaagatgtccttttcattataggggactggaatgcaaaagtaggaagtcaagaaatatctggattaatgggcaaatttggccttggagtacagaatgaagcagggaaaaggctaatataattttgccaagagaatgcactggtcatagcaaacaccctcttcaaacaacacaagagaagactctacacatggacatcacaggatggtcaataccaaaatcagattgattatattctttgcagcctaagatggaaaaggctctatacagtcagcaaaaacaagaccaggtgctgactgaggctcagatcatgaactccttattgccaaattcagacttaaattgaagaaagtaggaaaaaccactagatcattcaggaatgacctaaatcaaatcccttacgattatacagtgaaagcgacaaatagat

SEQ ID NO: 43231 - DNA, 894 bp, Bovine  19866881145889
  misc_feature (1)..(1): n is a, c, g, or t
ntatcctcatttccagctgcctttatagttcccaagttgtcccatcaaactgagttccaacccccattaaaatgccacactcaatattttttgtctaatcccgtaatactccaagccctggctgtcagcagacatgtcaggaaactcccctatccggaggatttggtttgggtttattttggcctgagaaagagaggaaaaggaaggaaaagaggagagagtcagaaagaacccgagtcctggcagtggggaatgacaagccttattaattcaggcagtcaggcccttgggtctcagcagtgagggtaggcagatacctcatggtagggtcccaaaggagagctgtaaccaggctgaaggagcacccatcagccaccaagtggaggaagtgaaactgcttcactggtcagcagctcctcaacggagagaggggaaggtgtccccaggatgactcagcccagcagattctgcccaaggacagttatggaatgcaaatatttagaaatcctgtggttgtttagcgctcttcagggcagtaaacacacacgatgcatccccaaagcaagaagaatgagccctgcttctgaagatccctgacctgcaaggatagaaggaaagaaacaggcagacaagggtcctttcctcctacccgctgcaattttgtgcttgttagtctttgtcagagactcattgttttctgggcctaagtgtcctcttcatggaggcagatggctttctatttggagagtttgtcttctgatgactcttcccgtggctttccatgggaagaggttagaagaggaacaagaggaggaagggaaagggattagaaatgtcctcttgatgttcttctttgctgtgtatctaagagtggcggatgatatgcttcagtcg

SEQ ID NO: 43232 - DNA, 743 bp, Bovine  19866881219455
  misc_feature (1)..(1): n is a, c, g, or t
ntttaaataaatttttgtaaaaaaggaatatacctgccctaagtgccatgaattctctatgtgaaagagagataggagatctgtaaataatttttaatatggacagaaatgcaaattttacttgtgttctatcatcacatttgtactggacaaaatgatccatatgcagattggtcatacagcttcacatttgtttatataaatgatttggtcagaataatgaaaataaccctatataaaaacatttacaaaaaatgggttagagatcactaaggatctaaatggtaaaatgtgaagcaagacaaaaacaaaaataataaaaaatataaagtattttgaaaaaaattgtagaaaaataggttatagtaaactggatcttttaccattctcacaacattaataatactgcaatatttcacatcatttaatgccatgtcattaatgtcattttaaaacttttattagtgatgtgctaatgagaccttaaagactctaatctgttacagaggatgtagtcaaggctaacacaaacagagcttccctggcaaccaagcatcagttttttccccaatataagaagactggtcaattttctattccatttgatgtttcctgttataacaatgaagtaaggtatattttctctgtaacaggacgactaatttggttattggctttctgtttcaatttcatcttttatttaaattagttgaaaatacagtctgtctattctttttccacat

SEQ ID NO: 43233 - DNA, 1000 bp, Bovine  19866881347181
  misc_feature (1)..(1): n is a, c, g, or t
nctgtcaagaacttagggtagtgctgtctgatagataatgtgaactgcatgtgtaattttaattaaaaaataaaaataaacaggtgaaattaattttgataatacattttattttacccactgtatcaaaatattatcattttaatgtcaatataaaaaatcaaataagattttgtcttttggctaaacctcagaaatgttggattagcctcattgaaggtactcagtagcaacatgagtgaagtcgctcagtcgtgtccgactctttgtgacccccaatgactgtagcctaccaggctcctccctccatgggattctccaggcaagagtgctggagtgggttgctgtttccttctccaggagatcttcccaacccagggatcgaacccggggtctcccacattgcaggcagacattttaacctctgagccaccaggaaagccccagtagcaacatggctggttgctatgaacagcacagagagcagtggcttccaacttgttctccatacatgcctatatggaaaaaagtgaacatgcatctcaacatatgtatgtgtatttctttagaagttatatacatgggttatattctaaatatatgaaagatgtcttgtttcatctgtatctcatttgacttatctttttgtatattttagaagtatatatttataacataacccatgtgtgcaatttctaaagaaaaaatttgcatatgctgggatgtaatttctttccccataggcatatcttaaaatttttcacttcctggtgattctaaaattttactcattaatatgactattattagtaaatacaatatgataaaaataagcctcattatgttggaaaatcttgatttaacatttgtaatacttttaattcagcaactcaaagatctgtcactatgttcagtttattttaatttttggttttaatggctgtcgaagctgagaaaaatatcttccaaagagaaatagatctaatttaaagaagtgcat

SEQ ID NO: 43234 - DNA, 1396 bp, Bovine  19866880440735
  misc_feature (1)..(1): n is a, c, g, or t
natttacattttaagataaccatattagccagaagatgaaagagaaactgtcctcaggcaggatacatttagtacagagtttaaactgagctgtttgttgtgtaatcatcagttccaggcttaaaggaaaaaacattttgtgtgactaagacaaaggaatgtagagaagaaaaagtatctttgttctttcctcctccttgagaattcaagactcctatctcctcttctagagccctagacccttctctcctcctctgggacccggccttcttatcaacctgcctaaaacttgactctcactctgccaccctcttctcctcctgccttcaatctttcccagcatcagggtctttttcagtgagtcagctcttcacattaggtggccaaagtattggagctttagcttcagcatcagtccttactatgaatattcagggttgatttcctttaggattgactgatttgagctccttgctgtccaagggactctcaagaatcttctccagctccataaagcacttggggaattataaaccacaatccaagtgttagtaattgtgttagagagtttgagacattcggtcctgtatgcagatatttggcatcttgtagacaaaccatttgaatgattgattgtatttctcagttgtctttggaaaactgacatcacataactgtcttgaacatactgaaacattttttcaagtagtagctagtctggcaggttgttcgatgaagacatttgtgggaagagtaagttccttttataatggtctttataagtgacattttaaaacttcctcttgcattaaatatttttagtatggtgtgtttttttggaactgaaacttgttaataaacgtatacccagattgccaataagcatatacagtggtaagtgattcagtgtaaaattcaaccagaacataactatcttctcagatgacagggcgagagacaagaaaaattacatgtaagattaagacattaatagagagtttatttgtgacactgcctaccctgccaattccactccactgcttgttagataagtggtctattttttaaactcttatattttgtagagcagttttaggtttacaacaaaattgagcagagaatagagacctcctttaccctgttttctctcaacatgaacagcttccccagccgtcaacaatcccacaacattgttacagttaatgaactaatgctgatgtatccttttcacccaaagcccacagtttacattagggttctcccttggtgctcaacattctctctatactagaatttatacatcattacagtctaagatagaatagttttcactgccttcaaattctctgtgctctccctattccttcctctctcttccgcacattgcttgcaaaca

SEQ ID NO: 43235 - DNA, 994 bp, Bovine  19866880454798
  misc_feature (1)..(1): n is a, c, g, or t
nctttacatttgaacgtgtctttttgagccacccctttttctgattcctcaggccctcttaaacttaagagaatccctccctgtcccttttcgctccagctgggctcttcctgcctcttcatctacaatgcatctcaggctgtgccttcctccctgttgccacacttgctgtctcatctcatctcacttgggtggttttaacagctttcttttccaagttactgactccaccacctccctcttctgttctttgttctatacattgtagtcgccctttcctcctaagaactacgttcttattgtcacataacttccttttgcccgtcatttctgaatcaaatattcaagatgccctatctatttacctcatcctcctgtctcaatttcttacaaaggaaaagaatgcataaaaggctacaggttaacttgtaactttttatatttccctttaaacctcctccctttccaaattgcactataggaaatgttacttttattccaaacatggaaatatgcttgtctttacttccatatttttgtacttcagactgtcccaaaatcccagatcacttttaccagtaggtagacatatccccttcaatccccattgatcagatggttatcttcactttcatcattacactcctcaactacttcaacttaatttttatttaacctcactgctctcaatctatccccttcccaatcagtagaaaatactgctgccaaaaccagctttattgcctgccagtccccagatgctgtgtttgctccctgccagtcctgtacagaattcaaatttttcacaattcatctttttggccttttcagatgaatgtctaccctggaagttcaggcaaactcagggccatggcctcttacagtgtttccatctttgtcccttattttcaggttgtgtagacactggttcctacatcagctccctaaactttacaattgtttttttccttctgcgttatgcaagcttcctttg

SEQ ID NO: 43236 - DNA, 759 bp, Bovine  19866880455607
  misc_feature (1)..(1): n is a, c, g, or t
naatgcctgattgtgatggtttcatttaaatgattgcatgagtgagcttcaactactgttcctacttaccatgtgtgccagggcagaattgtggatgccagggtacagaacatttcataattttttgctgcagataatgctcaataaagattttatatatatatatatatatatatatataaaatcacacatattctttaactacatatcatatattaagtgttcctatatgcaaatagaagctttgaagcaaatgcctaaaacacttgatagaatgatgtgtgtgagatgcagatttacgttttggattactgactttatggctatgatatatccccccccgccctccccccctgcagaatgttgttctgcccatttatgaacaaatcaaacacatttgtttcttcaatgtgttctaaaaatggcttttaaaatgtgcctttattcacgcagtttacaagaaaataagtaggactgaaaccgatgcaagctggggacattatttctcccaacaggcctgtcccgtagggcctgagaccggaagtgcacacatatgggtatgacaaggagtggtgtgcctgtgcgcccaggctcagtgtttctggacccctctggcttctcctggcacctccccctcagagcacttcctacgctccagtcacaaaaacgctggcctttctctccccccctctacttgctgctcttggataacccttctcatcttcaagaccgagtcaggggggccttccccctgctttc

SEQ ID NO: 43237 - DNA, 742 bp, Bovine  19866880500555
  misc_feature (1)..(1): n is a, c, g, or t
nttctggggaaaaaagtgccagacattaatatcttagcctgaactaccaagaccacgttttactgaggtttcttattaaaagtggcattttcattaaaatccccttctctgctgtgaaaaggcatgatgatgtattatctattttgaacaaatgtgctgcagaaagtgcctaggaggcaataacacagtttaagaaaaaaaaaattaaatatgatggctagccaaatgcaatttactcatttgtgttttttggtggcaagtcatatatcttgtaaaaagggatacacctgaagcaagagtagaggaaaaaagtttgcagttttacacaaatagaaatacatcaaaaagagttgcacaaaattcagatatttcaaaatgaaaaactcctaaaacaaaatcaaacgagtattaggtgataccctatatctttctttttttttttcagataaaaacctgttgccttttaccctttcgtccctggggcgtgaagactttctcgccttctccctgagccccaggagtggctgggcctttgggctgcaggtgaggggcaatgccatgtcaccgtccttgagggcaggactgggagcccgcacgctgggttggaagtctagtactgtcagagctaatctctcaactcacccccactccccttccgtctctggtgcacaggtccattctcgtctctgttcctgccctggaacgaggtttatctgtaacacttttctagattccacatacg

SEQ ID NO: 43238 - DNA, 731 bp, Bovine  19866880554812
  misc_feature (1)..(1): n is a, c, g, or t
ntaaaataattctattgcagtcgcaacacccacaatgtcgaaccctttgagaaatttaaaacaggattattctgacagcacctgtactagtcagctgcctgtgagctactttgggtaattaggttcccagtttccctatcaggtttcacagaaaattatggccagcatacatggcaataatgacttagactgactatgagataatacaatcttatgtgctattttgaaatctttaaatgttcgatttgcataaataaaacagggcatatattaattacatttctattcgaactcttcacctctgaatcaaatgtaatgacaagtaatttgacattgaggcagaataaatgcttgattttcctgcgagcaccatatagaactatgattctcaaaagagaaggaaatgcctaggaaggcatctctatagacacatgcactttaatattaccctgcaatctttcaggaggccaaaattaaataaatctgcaacatgtcatttgaagtcaaaacacacaaactgacttttgagatctggaggctacattttactagcttacaatttcaaacaccccaatattattaggagtatgtaacaaaagaacagattgaataaactgcagaattgcatcctttcatatttttttccctattgggaaattttaatttagaattaaatattcttgcctattagcaatattttattaaacctataattagtgattctagtttta

SEQ ID NO: 43239 - DNA, 826 bp, Bovine  19866880555704
  misc_feature (1)..(1): n is a, c, g, or t
nggtcaaatccatgggatttagagatgacacttaagtacacacacacacacacacctgttgctgcaaatatatcctgcttttaggagaacacagggatctagctgttgagtggtgcactctcagtcttgctaaaatcaaaatatgtcacaagacaagtgcaaagacctcccgactcacaccctgtatgtatctgaaggtcttccatgacagaaaccagattgtacagggttaagcagaaagtatgtcatgaggaaggggaagaaggacagatactgaccttttgctccaaacctaagattggtcatattagttctcttgtctgacataggggttttttgtaagcacagatcagatcaggaaggaataatgctaaagctgaaactccagtactttggccacctcatgcgaagagttgactcattggaaaagactctgatgctgggagggattgggggcaggaggagaaggggacgacagaggatgagatggctggatggcatcactgactcaatggacgtgagtctgagtgaactccgggagttggtgatggacagggaggcctggagtgctgtgattcatggggtcgcaaagagtcggacggatggcattttaaatcgcttgatacacccttcatcatcatgacagataccacagaatctcttcaacaagcacctcaaagatcaggtggcagagcccactcatcacaaggagaagcttgagatctcaaagtctacactcccacgctcagggtgaggaatctcttctcccagcttccacatgttcatccatcagaatcacctggacaactgattaaagctcagctca

SEQ ID NO: 43240 - DNA, 1764 bp, Bovine  19866880624529
  misc_feature (1)..(1): n is a, c, g, or t
nttgaatggagaggagctgatggttttgctacataatatgcagacttttttttccctatacagcctttaatttaatgctcatgtattcagaaacttagcttgtacctccagtattctcgcctggaaaatctcatggacagaggagcctggtgggctatagtctacgagatagcaacctgtgcttcaaaggcgtaacctattcagaggagaagtacggttgcatagactaaaggaagagccttggggcaatctaatttcctcttgaacagatcattcagttcttcccattttcaatcctggacttcacatactccccctccttctaaatcctgactttccaaagggttccatgcacactggaacccactgcatgatcataagttttaggtttttccatttttctaagtcacttgctaatcctctactttctgtcttccccaaactgttgacacttcttgtccattctctttttactgtgtgttcatcatttttttttattctttagtattatttggtggagtttcaggatgaaatgtaagtgcatatattcaaccaacaatcttaattggatagtttctagaattagcttatattcttattcattttcatgtaattaaacagagaccatttaaacaaaaggtctctgtgtttgtgtgcattattttaatcacaaaatataaattcctgcttgtaaaatagacaatagaaaggcccccttgaagtccctttaagtgcaacagaaattcctgaggtgtgaactgctgttccatgcataattgatagattattcaattcccatatgctttgtaattttgtgttcaaagttataaggacctttgagacaaagaatgagtcttgctagcacagaataaggcataaaatcgcaaccaatccatacaaccaaattttctatggattcacactgaaaaacatataagataggttcagaattgtaagattcaaaaaaatttttttactctaaaaagactttaataattacatgttcagatcagtatagtgacaaaaatttctatcagcatatttattcatctctcttagtaactcttcaaaaagttcagattaaaggacctcattatggtcatgtcatttttcaaaatagcagggtctgatgtgttgcatgaaagctgttattaggcttataaagttgtttctgatgggggttgtatgtattcagggcaatgtaagaagcctaattgctcaacaaaaaataagcaagcatttgataattaaaaaaaaaataggttgacaagtaaatgagaaaatgatactagtaatgtctaagaatttcaacataaagctaaaatttgctttcataatttatggcatttggtgcataatttattctaattgtaagcaactgattctatattgcagaagttagaaggagaaggtcagagtgataagctttgagttgtagtttaaaaagccagaaatattttcttagatttttggaattttcttacttagttcttctttttgaataataatattgaaatttgattctctccctgctagagattgcttagttaatgtctagaaatctagttatcggtattcgagtttccagttcagtcgctcagccgtgtctgactctctgcgaccctatgaattgcagcatgccaggcctccctgtccatcaccaactcccggagtttactcaaactcatgtccatcgagttggtgtcagtatagttactaataaatattaattgtgcaaaatactctaccaggccatgacgaaca

SEQ ID NO: 43241 - DNA, 965 bp, Bovine  19866880831727
  misc_feature (1)..(1): n is a, c, g, or t
nttgtggtgattattaaacagatcacaattactggaagttaatctcttaatgaaatggatagcttggcctttttccattatttcatgtattccatgggtgaccatgacttagtgctaaaataagacaggacccagcatcaacttcctttcattttcagttttttattgtcttttttactgtaactgtggagattctttgtttacataaataaatagatggagatggaagaaatgccttccattatagcagtgtcactcaaatccttgaactcctcagctaaatgccagaagtcagtgatctttcatcaaaaattattttaatcatacattggctgacaactcaattaggcccttctgcaactttgcttaaatagagaattgtagaccacttgacttgctaatagatttgttacacagtcggagccatgtcacgtgtcaatactaaaaccaaattgtctcttactttattatggtggtggagggtgacgggtggaggcaggtgggtatcgtcaacattctgagtctatataccagtgggaaagcctcatacaacccagggaatacagtttaaagtccactacccaatagtgcgatggcaatttatactacatgtatatatgttcacttctcctgatagtatactacggagtaaaactagagcacaccaatttgaatcaaatgacttcaactgaagatctcccaaggatcttcctttattatcagcaaataaacatacacacattaatggttcaaatatctattgcaattcagtgttaagacaagttatgcagaaatcttccaaagaacgccaggacttatttttatatgcccaagaagattgtatcagccaaataaggcaatgcattattagtaatactcattcatccattcagctatgatttttggaaagcaactagatgtatttccttagttggtttctgagaaatagaaaatggctcaaacct

SEQ ID NO: 43242 - DNA, 935 bp, Bovine  19866880832697
  misc_feature (1)..(1): n is a, c, g, or t
nttaattttttaaatctaattttacaggaagcttcaaactctcattgtgttaataacattatcactatggaaattttcaacatgtcttcctaaaggaacttgaaatattttcaccattttcagatgattttccctaaaaaaaaagtgaactctgtcacttacatctgatgattatatcattgattgtattgtgcaatgaaaaccagctggaattgagagcaacctgctgaattatggctgactctaaagaactgtgataaactctttaaattctgtaataacctgacaaattggttatattattaagaaatctctatgtagatatccttttttactccctttcttgtttggtaaacgtagaaattcaagccagctgtgcttgtgttctggcatcaaagggaggagccttcccaggtggcgctagtggttacaaaccctctgccaatgcagagacttaagagaggcaggctcgatgcccaggtcggaaggtcccccggaggagggcatagcaaccccctccagtgttcttgcctggagaatcccatggacagaggagcctggcaggctatggtccatagtcagataccactgaagcaacttatcaccctgagaaatgatcattcaagtgccaacactggaggtggttatacctagtaaagaaagcttttcatgctgaagcctttactaagttttgtattttgtctctccgagcttgttttcttgcactcaaaaacagaatggaatctcagaccttaagagtcaccttcaccctgtacctcagtgcctttaggggtcaataccctgactgatgagaaaaagcaagaagtctgcatgattcagttattctagctctttgtcttcaaggtcaaagccctaatctaggaagcatgttatagctaatatgtatcaagtttcacacagtactaggacttttt

SEQ ID NO: 43243 - DNA, 1709 bp, Bovine  19866880857595
  misc_feature (1)..(1): n is a, c, g, or t
ntctctctagtttttttaatatggtaaatcaattcttataactgaggagttgataggcaagatatttagggaggcagggacttctaaaaagtaaatttctgctctatgtatttgttagcaaatcagttgtgtctgattctctgtgaccccatggactgtagcccaccaggctccgctatccatggaattctccaggcaggaatactggattgggtagccatttccttcttctggggatctttctgactcaaggatcaaaccccatctcctgcattgcaggcagattctttatcatctgagccacaagagaagcctagtggtagactccaatttccagttgccacaggtccaggaaagactaggtaacatctcaatagcctttataactataaactgcaaaaagcctttataacatactcctatgcgaagatacatatatttgatgtatataataggagcattgtaaaaataaagaaaaatttgtttgttatctaaaagtcaaaatatggaccttaactcctcatgcacaaaatagatgtttcagaaattttaatgtgatcaagtattatttcaatccaagcaactggtaattaaagaaaaccaaaactgccataactcagcatttttattgaccaacttaggcctgcctttgaattcgtatgccaagtgtttaaatgtgcaaataaaatagattgtttagtccagtcactcagtcgtgtccgactctttgcgaccccgtgaatcacaacatgccaggcctccctgtccatcaccaactcccggagttcactgagactcatgtccatcgagtcggtgatgccatccggccatctcatcctctgttttccccttttcctcccacccccaatccctcccagtatcagagtcttttccaatgagtcaactcttcacatgaggtagccaaagtactggagtttcagctttagcatcagtccttccaaagaacacccaggactgatctcctttagaatgaactggttggatcttcttgaaatccatgggactctcaagagtcttctccaacaccacagttcaaaagcatcaattcttcggcacctggctttcttcacagtccaactcttacatctatacatgaccactggaaaaaccacagccttttccaaggcaaacgctgaacagttttagaaaataggttgtagatcaccccaatacttagccatgaaaccagtagcatgtgcattctgtatcactgttgtattatcacaacttatatttattccatatctaacaagtgtcaggagttttacatagaccaagcttatccttataatacaccaccgagttctatcacagtgagaaaacagacatcctaatttatagcattactttgctgccatgtgagatgagtgcaattgtgcggtagtttgcacattttttggcattgcctttctttggaattggaatgaaaactgaccttttccagtcctgtggccactgctgagttttccaaatttgctggcatactgagtgcagcactttcacagcatcatcttttaggatttgaaatagctcaactggaattccatcaccaccactagcgttgtttgtagtgatgcttcctaaggcccacttgacttccaatttcaggatgtctgcctctaggtgagtaatcacaccatcatgattatactgggtcgtgaagctcttttttgtacagttctgtgtat

SEQ ID NO: 43244 - DNA, 1930 bp, Bovine  19866880931025
  misc_feature (1)..(1): n is a, c, g, or t
naaaagcctggactctgtttttctctagccttccacttccttacctctctgtaaaagtatcctccttccctggctgttcaggaacctacaagtgactcatcatggctgagaccacaaattgtaattctctgattcccaataaactcacctttactgaagaaacctctgacgatctatttcaagtcaacagtggtaatgtgtacttgttggtaacattgaagaaaggtcatggaattctggatatatgtaccctgatatctatgatgaccccattctttatgacatcaaaacaatgttttccttactatttcaaacaaatctacttgtcttcactattgtcagacaaaacacaatgtgtattatgaatgtttcctggaaatgctacatttagtaatatcagtcttttaaaaatgacatttttaaaaatcttttcaaagcaaagatctgatttggataaaatgtaggaaaatgtatttttatggagaaatagtaatctagactgtagtaacagtttaaaaggtattttatcagttttaatactcaaattacaggtaatgaacaatttgtagaaacccatgcgattcccaaagggaattttagaaattgttatttattacaattttgtttccctactttcttcatgtatgtgttctaggtcttcagggctctcttgtgcttactattattgttactactaatgcaaccaaagtacttcccaaagcagccttttattcttcaagtcgtagcaggctatccacaggcattttccagacttaacagagtgccaacacctctttgtgcccgacaagtcaaggaattcccctctcatgattgagaatcaattagatattaaaagatttaagtggattaagatgcttattcactgaatttagcaactgggactattattcctttactgatcacaaggctcatgcataagctaccacacataattactctggagagacccttgatatatcattagtcctgggcatactaaaatcacatcactctccgaggacttcactagattcctatggcccttaccacagaattacatggaactacttgctgtgttagtctaaaatgttttaatgaccacatctctactgacagcaggtacactgtggtgggcatggcctttgatatttctaagcattactgattcaaatgtgatctgctgagttcacagaaaagcagagaaagctgtttttctgggatctttatcattttatacttaaaattatatattatttatagttccgttcatcccagataaatgtgtgtatcttatcatatatgcctgagcctagaaaataactcacaaaaataatcctcaaatagagttgttgacagataaatgatggaaatagtgagcaatggacattttggaacatgtttagtatgacagttaacaaccatacatgttatttatcttgcttttcagtgtcagatggaaaatatttcattccgagtaatggtactcatgacaagaagcaaggtttgaaaaaaaaatagtggcccttttcctgctgagtcctaaaagttggaaatcataatggaaatattaaaaatggaaaaagataaagagaaagaggaaaactggactactgcaactcagcgttttgtcatagattcatgacaaggagatgcacaaagaacattttaaaatagagtttcggtaggagagtgttgcagccctattctaaagaggacttaaccttgattaactcttagtttagaaactttttgactcctagatgatatatctttgttgctctctaaatctcagtaaagtatgatcaaggactgatgttgatacacacaaagaagtgaaattcttaaccatgataattatctgagagcctacctgtgccaggtacatgctcaaatttaatatcaatctttcatttcatatttgcaccaactg

SEQ ID NO: 43245 - DNA, 771 bp, Bovine  19866880949462
  misc_feature (1)..(1): n is a, c, g, or t
ncaaaatcctatgaacaaattactgcccaagtcattttgttttagtgtcttttatttggaaaaacatacttttaagggaggagaaaaagatgccatttgattgttgagatacactaccattttccactaaattgttgttaaagacttaaaaaaaatcaagttgaagctgctgatttaagttgctcacttcatgtcaatttctgaaaatgttaagcgtggcattaaaatcaaagatgcatttaaggagaaacatacacttagtttggagggataaatgagaacaacctgtttggttcacattaagcttgcagatttatcaacactgggtacacatgggaaagacagagcgagtgtttatgagctctcagaaaggattgatttctacaagtccctgatttagctggaaggggtgcctatatatttagttaccaaaagggttaatggacttaaccttttgaaaaatgtattttttcatgtgcatataacatgatggatagtttactgaatgcacataggtaaacataggtgaaaacaaattaattggaaggtataaggtgtttttgttttgttttttttttttcttgatagatggatctcattattttccttgggcagacaaagccataacagtttccagagaaaggagagtgacagttccaggaaactgcttacagagtggacagccagcaggctaaaaatattattgtgtccacctcatcaataagctggctccatgaagagtggcaattattcttttcctgcttatgctgc

SEQ ID NO: 43246 - DNA, 2581 bp, Bovine  19866881025589
  misc_feature (1)..(1): n is a, c, g, or t
naaatagtgaattattgaacactggctgtcggcaccctagtgggtgctaactttgattcaaacctcatacactgcctgctcccatgtgactcaacagtccgcaacaggcatggacacagattatttagtatgtactcagcctctcagttgtgtctgactcttttccaccccatggactgcagcccgccaggctcctctgtccctggaatttccgggtaagaatactggagtggtgattatttagttattagtgagttatttagattagtgcgatggaagttagctcagtggacactgggaacacttagagccctaacactgccttgctgtcagtgcaaggactcactcaggttgcctcaaaaatcagcgagacaacacatttctatttcctagctaaagttgcctttaatgttctcatttgtcatcctctgtagaaagcagttctggtttatagttgaaactattagctgtttgagaacctgtaaactccctaaaagtttcacaactcgatcaagttcaccacttcaaacaacggataaggcagtcattgtacctcagggtattcattgactcattgatgaaatgttttaaatcaaaatagtcaactacttttgctacagtctcaccattctggctaaatatttattctcataacaaatatttactgagtccataaattgggctgggagctgaagatataccaataaataataagcagtttgccttcagatatctcagtctactgggggagatgggcaggggaatgaatgatttttcatatgaggaaacatgttatgaggaatagagggaatagctctcttggtttaggataaatcgtatccctgggaatgcttggagggttgcagaatatcatcactcaactgctttttatctctttttatttcaaagatcttccaaagaagaaacatttaaaaaattctgtcatttgaattgggttcttgattttgtagaactgggcagtaattacaagaatttatttcttataacattagagataaatgccatcttagataaaagtttaagcccaaactctgatagtgcaagaggcagctaagtatgcgagcagatagctggcactttaaataaaatgggaatatatccaaatatcaagacagtattaatgattttagcaattaaaggagcaatggccttccacacattttgcaaaagagtaagttcagctttgcctcaattaacccagatttcaattcaagggtagaagaatcgtgaaccaaacggatcctccacaaatcctgcagtgaaaatgtagcatattagatctggtcactttttttttttttaaagatctgatcatatttttaacacctgttttaaaaactgtagcttaatttatatccgcaaatttcttgagctgatgatctagccatcactaaacaaaaacttaaaattaaatgtgaaaaatacagaattatcagtgcagaaaaatggaaaataaagagagttgactttgatttttcaaaataacaaagggcagaatgaaaatgagtttgttctgcccttgtaccctgatgcataataagagactgaggggacaagctcaatgaaattaaaggtcaatatacttaaaatgaatggacatatttatttgcccagcatgtataataacattttagtaccctcagttgctagaggtcatagaaaacaaataaaaatacctggaatttgaaaagaataaaataattttctaagtaatgaaaacatttatgaccaagataatggcatagttaattatattgctatacttcagcgagtgttaaataaatcatctaccaaaaactgccccatcagcaataagtacaataaagattctctacaagtctttgaagtcttcagaattttctattgctttcagtgaagaagtaactagatctcactgatttgttagccaataaaatatgtccctatattttttggggggtgtgcaaagtgggtatggaataaacaattgaataccaaaatgaaacatgctgaaatattggcatgaagttagattttaatgtaaatgtgtgttcttctatatcttaattttataattttcagagtcacaaattctctgcaccacagttttcccatttgtgaaagtggattcactgagatttccctttgaggacagggcagacacactgcagttttagctttctatgtatgcaaactctacagggctcagaggcctaaatagcaccagtagcccagcttcaataacccaccattgctcaaagtaatggcaacccactccagtactcttgcctggaaaatcccatggacggaggagcctggttggctgcagtccatggggtagctaagagtcgggcacgactgagcgacttcactttcacttttcactttcacttttcactttcatgcattggagaaggaaatggcaacccactccagtgttcttgcctggagaatcccatggacgggggagcctgctgggctgccgtcatggggtagctaagagtcagacacgactgaagcgacttagcagcagcagcagttcaaagtaaaaataaaagaaacaagtatctctaatcataat

SEQ ID NO: 43247 - DNA, 1701 bp, Bovine  19866881030591
  misc_feature (1)..(1): n is a, c, g, or t
ncacaggtgcccaatgtgggcaggtaagtgggggtagaaacctacttcatcaaggcagggagaggactgaagaaagatgatgtggccacagagcctacagtcaccattgtcttggcacaggttctgtggggcacaccttccctgagtccactttcagaagccaacagtaacaagaaactggagtaggcagggagagtgttcagaggacaattccgcactcaggatgcagtcaggtaccagacttgtcccaagagaactgaccatcttagtgcaggatccagcttcctgaaatgtaccaggcagaccctccccagagaagaggtgacggatcgagaggagaaggaagcaagctgtcagaacccaaggaatggagctgattaggcactggatcagaaaaacccaccccagcagaagggagggctgccagttcaggggtataggccatctgggtcacctgggcgttggcttccagggtccagctggccatgaagaagtccagctccaagcttggtgccagtcatcgtggttgaggacttcatgcctgattttggaaatctctgagctcattccaggcccagctcctgtcagaaatgaagggccagaagtttggcagtgaagctttcaggaggtgttggcttttcttaggaactggaagtgatacagtctgaaaggtgggttaatgtgaggtggctaaggaagacagtttggaggtggggagactctgtgagaggtgcaggatgtctcaagagggaagattgtgactacaacccaaggcacttcccatatgtcagttggtgggtttaagtttctgttttacatgcctttgtattgatccatagtgatgctaaaatgaagcacgtgacttggtgcactggacagttctctgaagcatgtcctcttgtgaatgtcttatgcctcttcaaagagccttttataactcttccacattacatcgattgcttccttttaagaaaatcttgtaatgcaactggaaaaaatgtaattgagcatttaaacagtccttgcctaataaacactaattgtttcaaatatgtaactcttgcttttctagatcattggaaaggaaggctatcctgttgcttttgtttttcttatgaaagcctttttggaaggagggattttttttgtttgcttttgcttttttttgtcaaccgattatctgcagaatcctcacattgccggaaacaattattagacatgatactgtgctctgaaaatagtagtttggaaagcaggtggactgaaatttctaatcctaaaattgtaaatgtgtactctttgaaaaatgatgaagaatatgttatttatctataaagtataaaaacactataaagggtatgtcctcaaaattgctcatgcatggaacagaactaattcagatatctagacagaactaattcagatatctagatagacttaaatgagagaagactggtcattgcttctcctcccactttaagtaccgctgtgtaatgtgatctgtgctgcagtttgattgcatgaaaatatattgtgaatccaaaggattttcctaaatataccaatatgttggatttgttttgaagagtttatacatgttcacattcacttttccagaaaattgaaagagtgagcttgggagcagtcgtgtgcaggataaaaagctgcaccctccctcattgtcttctagggtctattaat

SEQ ID NO: 43248 - DNA, 2585 bp, Bovine  19866881094939
  misc_feature (1)..(1): n is a, c, g, or t
natgtctttgctttttaatacctgtctagatttgtctggctttattcccgaagcagtgtcttctaatctcagggctgaagtcaccatccacagtgattttggagcccaagaaaagaaaagctatcactgctactactttttccagcttctatttgccatgaagaaatgggaccagatgccatgatcctagtttcttgaatgttgagttttaagactgctttctcactctcctctttcaccttcatcaagaagctctttagttcctctttgctttctgccataagggtggtgtcatctccatatttgaggttgttgatatttctcccgacaatcttaattccagcttgtgcttcatccagcctggcatttcacatgatgtcctttgcatataagttaaatgagcagggtgatgatatatagccttgttgtactcctttctcatttctcaaccagtcagttgttccatgtaaggtcctaactattgcttcttgaccgtatacaagtttctcaggggacaggcaaggtggtctggtattcccatttccttaaaaatttttcacagtttgttgtgatccacacaaaggctttacatagtcaatgaagcagaagcagatgttttcctggaattccctcgctttctctatgatccagcgaatgttggcaattggaactctcattcctctgcctttcctaaacccagcttgtacatctggtagttctcagtacatttactgctgaagcctagcttgagggattttgagcataacctcactagcatgggaaattttttcaattaaaaatgaaaaatatacatattttaaagaaggcaaaaaaggacatcatgactaatacatactaggtgttaaatattgaataaatgttgtaggtatcaaagtaactttcttcaccataacttgtgtcagtagctatgcttgcaaactgcaagcagtagaactatttggagacctcctctgtggcttagttggttaaagcacctgtcctagtaaacagaagatcctgggttcaaatcccagtgggaccttctgtgatttttcctgcctacaaaaagggtataggggagatcaaagatccagtcaatcttaaggcttccttcacggctcagacagtaaagaaccaccctgcagtgcgagagacctgggtttgatccctcgtttgggaagattcccctagagaaggctatggcaacccactccagtattcttgcctggagaattccatagacagaagagcctggtgggctacagtccatagagtcgcaaagagtcagacatgatggaaccactaagcacagcactatataggttcctatacctatgaagaagaatattttattatacatatagatagttcactccagattaaatccagtgtttttttgatccagttggacatcaggcaacacataatctagactagaatgttctagagctatcccaaaataagttctttataagagtttgtagagaaacttctcaagccatagaagtgggtattagacatgcagctcagctacttttgacatgaactgaagtcagcaaaattaaaagatggatttcattaacgtgcatctcagttttgtgggtctgagcaagatggcctcactttatctgtttctttctaattatgagttattttcagatccaggttttagagcacgtatctctagtttctgctaagaatcagtctcacaattgatactttggtgcttatgctttagtatattatcactttccaaaacaacataacagcttttttaagccaagcaaaatggttaagcttgcaaatttaacagaagttagagacagaaaatgtaaaagacctgtggattttcttccatgagtagatgtaaatgctaatgaaatgttccttaaaacacatttaaattaaacccatgagctgccttcaacgaatatatgaaagttcaagaagaattgaaaatgtaactgccatcaggataagacagagtaccgacgggctgatgggccatgtgctcaggcggaaggtagttttccttctcctacatattaataatgacaggtggtgctggagataattttaaccagattatggtgagctgtagttctgattctaagacttttttcccactgctttgcttgaataaagtatgactgaacacactttaaaattcatttctttcccaaaagcatttgaagatttttttgtgagagaactgatgaggtacttgcttttttttttttcaaaactaaataaataaatctttgaaaaacttaaagcactgatttttaaagggcttcgcagacatttatgtaaagatagatttttctaattccttaatatgaagatgcctgttcacagagcttccaggcctgaagtgtacgggtacatgtccatgcgtgtgtataaagaatgcacagaaaaagaatttctcatccttggactttaaaacaaagctaattctaattggcaagatatggaaatcttttcagccccaaagtaaaaacatctatctctttggtgtttatatcttacaagaaaaaaaatgtgtttttttctaagtaagccaagctctgactagcatctgc

SEQ ID NO: 43249 - DNA, 1339 bp, Bovine  19866881139126
  misc_feature (1)..(1): n is a, c, g, or t
ntataaagtcctcccccttgtgactataatttctaagctgtgatgaacctcttgcttttggaagagagttactgatgtaactcaacaccttgggtttttattaacgagatgctgagtgaacaaaagtaatactaatcaattcagagggaagtatatttttaagtgttctttcccacatcttggtgagatccttttaaaatacttaatgcatgggttattttcccttgtgacttccatgattttgcctgatttttcatctatttcccataatgttcatctgtagaacaatgattagagtcactcacataagagagtgaaaatagcttattctgaatattagtaatgagatgtgttagaagccatcaaaatgtgaaattaaaaatatatcagtgagtcatctttataaactcacattccttttagtatttgttgcaagcaaagaatcctgctagattctaaatcttaagttgcaaggggcaagaaaaagaaaagaaaacttaaaagttccctctattactttttagatctaataccagtaagactgtactctgttggtattgtttatcttcatttattttttgcagtatttttgtctgtaaggctaagattttgcaaattacattgaattctttctttttatagcaatatgaagttcaagataaaaatactatgctttgggctgagagctgtttcagtttttaaaaatatgatcatcttgtcatcacttatgagattttatccaccattggaattgaccctttgcagaacagaccctacatgctgtcaccagtcgtcacggctagaggcaacgaactacagccagaagggcacagcaggatggccttgactcagcagtatagaaagcggctccttaagaggaaatattccacaacccataaactacgaagaatacaaacagagtgaataattacatattcactcaggcctgaaaaatcagtaaatatttcttttcccctgtctgcaagagtaggtacatgttgtaaatgctaattttcaaatattggaaagacaagatcatagttacaaatagcagggaggataaagataccaggacacaatgcaaaacattccaggttctgggggatcatattaatagaccacatttattgagggcttaagatatgtcaggcactgtcctaaatatttgcttagttttgttaactcatatagtcctcccttaaccttgtgaggtagatactataattattatcctgtggaagatcttattgcccaaatatgattgcagtgacctctctcagcccacatgctcttctacaaggtgatccgtcactctctccatcaggatggggcttcccag

SEQ ID NO: 43250 - DNA, 1796 bp, Bovine  19866881151165
  misc_feature (1)..(1): n is a, c, g, or t
ntaattttattttaataaacttaagcatttgcttgatttttttcagagctatgcataagctcctaaagtaaatagttcattaatttttatgccagctttggtgctatttacatgcataccaatgaaaggaaaccaccccagggaacctgtagagggttggtttcaaattcatgaattaatgcaaatggtaaggttacatcatttgggtataagttataagctttggagaatggagaataagcaatcaaggtaaaatagccctcgggcctgcattatttatgaaaacaagatcctggcatttatattccgagctgctattacagaagatagagctacctatctgtgcaggtgtactagaaaggtcaaagggggctgaggttcagcctcacatgtgggggaagtagccattctgctgcatctttattcagaggaaatccacagggctttcatttgacctagtatatttccaatatttattgctgccatatctgaaacccctacaggttgagagcaatcatatttcatccattctaaggtgtcatcaatgtaaaggtgcattattatgctcagtataccactaagaaaggaaaagtacttccagttaaaggatgacttttcacaaactgaagattcatcccaatttcaacgatgggaaaatgtgaaagataaaaagtcacctcagagttgaagtacaatactgctttatgtcaaaagtgctaactaacttggaggtaaagcttacatgttgctttcagagggctatttcgggtagagatggacattccctttggagaaggagaggtcagcacattgtcactttgtctgtcacaggagctctcccattagcagattagagagtattagagcttcatctggtagggtccttgggaattctgtctctgtatctatgtattcttatacttgattccttccagtgggttttagtaagatacaaacaggcataagagcacatcagcagtgtttcatatactattatttattaatataattattgtatatttgcttaaattaaaaaaacagtccagacattcttagtagaatgccataaaaagatgtatttctaggaaactagttaatgaacaaaaccagcaaaaaccttcatctgcttaacatctcattctgttcccaaaagctcctttcttagcaacgttaaactgacagttgatggcttggtaaggatatggtaacaaggactaacttctccatatttaaggaaactcagaatttcaattcttgccacacatatatctaccctgttaattaaagcaaaaagtccacagataaaatgtagtgtcccaaacctgaattttaataaatgcaaatgagccaaaagtgagaatagtcagctaaagttccaggataaaatgtttgtcttgtatttaccatgaaattcatcagcttttactcagcgatagcggaaacctcaggagaagattttaaaaaaaaattgttccaggagtttgacaactaacaaatatactccataaattctttgaattttagtgtggggaacaatataacttccatgaaaccagaggaagaagaagccttgtcatctcttctccatttcaactccatggatactggcttccccccaccccaatgtgtttaggaatctgggttttaaaatcatctactggaagttctctgcaggattttttagccattaaatatcaagatagtgagcatgttattctcactacatggttaaggtgcactcttcaactgaaacatctctgaattgcccacaaatttctttcacattggcaaacaat

SEQ ID NO: 43251 - DNA, 752 bp, Bovine  19866881155831
  misc_feature (1)..(1): n is a, c, g, or t
nctggtttgaatattaaaatatttttatatttaaaaaaggaggggggaaatgctaatttagtacatttaaatattaaatatcttctcacaagaattagtcctgaatgtatgcactacatatttcctcaaaacatatttaatttgctccatattttcaaatttaagttttctctctttattaaatcagagaacatgacaggtataaatgttcttagatcagtgcctttgtttaaatttacaccacatttaaaacccttcctcaaaaccaactccaacctttccaaggcaataccaggcaattaatgagatgcttcttagaaccatgctttttttattttaagttatttttctaacattgttaagtataatttatcttactttgatttttagtctttcatggcaaaatgacataaaaatctatgctattaatgatgtttgtttttatctagaggtgttctaatttgtaaaagaagacatgttgcccttaaaatggatctattggttaaagttgaccatgcttccctacaaattaacttcttgatcgacaaattgttctctgtgaaggaacttgggtgttgtcagtgctgttgatggatggttgctaaacagcattataatatatcattcatttaatatggattttggattacaaatgagctttcctgatctatgtagccagcaaaatggtgctttagcaagaaatttaatgtcaagtcttacagatggaagaaatatagtattactgaaaacag

SEQ ID NO: 43252 - DNA, 1801 bp, Bovine  19866881229854
  misc_feature (1)..(1): n is a, c, g, or t
nattgtagcatgcatccttacttcgcttttatggtcaaatatgttccatggtagaatgtgccacattttgtttttcaattcctcagttgatggacatttgggtggtcctactttttggctactatgaatagtgcagctatgaactgttatgtagactttttgctcattgtcttttaatatattgagtactatgagaaaattcataaactttgcaactataccatctagcattcagacaccaatgggttgtatgatttagcacatgtttaatttctctagcccctgtttcctcatctgcaacatgtcttagcagaaaataagtgctcaaaaatgatatttatgcaagaaacaaaaaagttccaaacattgtatcctgcctgtcttcacaactaccttcacaggtggctggttgggaagtgctctctttcgaagtcaatttaaatcatctaatttttgcaggtaaaaaagaataagcctcaatccataatatttgttaatggagtaaaaattcaattgaatgtgccctttttgatgggcaaaaatgactgcctagtaaagaagatttaaataatacttatgagtttaaatgtaattttattgattttgtgtgtgtgctaatttatcagcatagaaagaaaaaggagaaatagtagtatgctttatcatctgtcattaaccaaatagactatttttttcaataacattcttgggataaattactaatttccattttgtgtaaaaatcgatttttatgtaatagtcttggtcacaacctattccataaaactggaatttactatattcaagtgctgacaatcattcaaactttaatagagtatatgaagagtatttctctcttttttcctgactatggtacattaagtctccagagggggcaaatgtttagcaacacattacttatcactatgttactgtgttagaatctaactcagaaatgtctcttgcaatcagcaatgacttcttcctgaattgctcctactaggcaatcattagcaaattctgtacctttcaagacaatttgtagacaaatagttttctctatttatgatctgctttactaagataaaatcagctcaagagaacttttgttacttttccaaggacaccatcacttttttatctcttttgtacttaaagagctttctcttcctagaaagtaaacaccacaactgaccaataaacttatagacctgcttattaaacccatccagctaatcaagagaaatagagaagtcctgtgcactggcatactattaatgttgggacttattccttctcattcacagtgtaatggaatttttcccctatggttcattcatcactttaaaaaattaagccaatttagaaatataatttgaatgtataattgaatttgtcagttgatcttagcctttacaagttaatcaaataacagagacttaagcaagtttcccacacacactctggtctatgggcagccaatcatctcctaaagagaatgtcagattctttcagggctttttgctgattagatccccatttttactttagaggactgaattatttttttcctggcaatcaaaattcctgctatcagtcaaactgaaaggaagaaaatggcataattttagctaaaatattagaaatgacaaataagtgaaatatgttaactggagtggaaaagaaatgtgtaattaagcagcacaaggaccatgtgtcagagtcttccatagtaatagatgggtggaacgtttcgactttttgcaaagaccaacacagctgtcaggaaattttagtcctc

SEQ ID NO: 43253 - DNA, 588 bp, Bovine  19866881270668
  misc_feature (1)..(1): n is a, c, g, or t
naaacactactcaattttaaacatattttaaagcaggtatgtagcattatattatagtttacattagaaaaaatattaaaaaggaccacaagaagcctttgttatatgcaacgattactgaggtaagactagaacctggcatgatttagaaccacagatattatttagcatttcctgaatatgtatagattgaatatattcacccatacacacatatacacacctacgtatatcttatactcttgtgtcttggcagcaaacgtaaagttcaccatctggtcttatagtagagtccaaacacgtaagtataaaaaatgtgttaatccttaaaatgaactatttggaagatatttgatttctctaaagggtcatataattatattgaccatggtctattaatatacctatttcatcagaaagattcttggatatcttgaaaaagaaaccttgctgagcagaattatttttcatagactagttgaggttcatgttgtttgatctttttgttttaaaatgtattgccaaaatattacaactttatgacaccataacttttgcacactgttccataaaaaagaaagagaaaga

SEQ ID NO: 43254 - DNA, 1239 bp, Bovine  19866881285526
  misc_feature (1)..(1): n is a, c, g, or t
ntgtgtgtatgtataatctacatatatgcacatctgcatatatacaacttcttgagcattgtgaaagtaagtatgagtgactgtctagaggggaggaggacggtgtaggaagcaaggaagaaggaacttcagtaacaaaggacttagctctagagctttgcaccctgtagcgtctcagctctttgtcttctccgggtctgagtacccacaagtatgaaatagttgcctcagtgagaactatgtataagggtgtgaccctttattgtttctctcactttctaagaatgtgatttctgagttacaggtatattgcagaccttcaagtaattatttttattcttctctgtcctgagctgtgttatcaccctttggctctcctctgccatttctgtatctcctctcctgtttggctgtggctcctgattgctctggcaggaatatgcgcagctttagctaattaattgcttcgacagagcagtaaagtgtacttacctagagtgcacttgcagcaggcactatggatttattagcaaagagttatggatctcgattcatagctcatatatgcatatgcacatttgaattagaattttttaaaattgtatgttaataacccctcagcaataacaggtcttaagaccattatgaatgttgagaactagatacagcaaggtttaattgtaaagacgaaaggatgacatatgatttagccgtatgtgtttatatgtaaaaagctagttatttagcatggggctccttttgcttctgtcaccactttaataagcacgaaagcatatcatcctttaagtgcagagcacactgtaaggatcctatctcaaaacacactgatgcaatcttgaaagtgcatttctactgcgctctatttttgttggtgttaaaagcagcaaataaactcccaacttgagagcatcttcaatacaacatgccctttatttctccatacaagccagatttcttggcccagaagagaatgtcctctctttggccgatgtgagaaggtgacagaggcatcgtgtaacaggcattttccatgaccataatgtggcagcttttctccctgtatttttaatctgctttcttgtcagctgtgcagctcctttcagcctcttccaagttcttctctctggggtctgaggtgggccgacagagcagtttgacttcagtgtgacagctgggaacagacccagcatggatactattattttgaatcacagctct

SEQ ID NO: 43255 - DNA, 803 bp, Bovine  19866881321119
  misc_feature (1)..(1): n is a, c, g, or t
nttgcttccttctggcactctattacttgaagaatgtgaggcagttgcagaagctaaagaattaaatggcataaatacacgtttctcaaaccctttgagcaggaaaagggaggaaaaactcagtacagataacaatataactgtgccctttatagttttcctttagattatttcttaaaaggaaattattaaattttcatgtgctctgcagagtctagccttggtttataagatgaaaagaaaaagaaatattattaactgcttcactgccaagggacagccgatacctgcctgtgtgcattagcagaattcttagtagcttgggtttcacctctttcaaacgctaacgttttaggatttggtctcactgcaattccaatgcccacgtccaaggtcatgagatcacaagctttatccagtgcctacagtcatcatgtggctgctgctgctgctaagtcgcttcagtcatgtccgactctgtgcgaccccatagatggcagcccaccaggctcccccgtccctgggattctccaggcaagaacactggagcgggttgccatttccctctccaatgcatgaaagtgaaaagtcaaagtgaagccgctcagtcctgtctgactcttagcgaccccatggactgcagcccaccaggctcctccatccatgggattttccaggcaagagtactggagtggggtgccattgccttctccagtcatcatgtggagtgggaagcaaaattacagaacatttgtgtagccggcctggttcaaacctctcctttttttaatattaaacaaact

SEQ ID NO: 43256 - DNA, 1625 bp, Bovine  19866881507247
  misc_feature (1)..(1): n is a, c, g, or t
ntttaatcctttaatttaattggcccattacttgcactagtaaagctatcagtaggaagatattttgaagtaatagaatatttacatttcagttgtgtttcttttttcatatggaggacatggatatttacatgtataaaatccctcctcctcagaataaaagcacataaccctataataactatgctggacagaccttttctcctgtttgtagtttctactgtgatttccccccatatatttattatggttacaatatttgataactggcaacccactccagtgggggcttcccaggtggcgcagtggtaaagaatccacttgccaaatcagaagatgcaagagatatgaattctatccctgggttgggaagattccttggaggaggaaatgacaatccactccagtattcttacctggaaaatcccaaggaccagaggagcctggcgggctacagtccatagtgtcacaaaaatcagacatgactgagcatgcacatatacacaatatttgatatagatattctataatcatttatattcaacttttaattcctgctctttgaataagtatccagtctctctctctctatatatatatatgcatatatacacacacacgcgagtaaaggtcatcatttgttcattcatttaggtattacaaggagttatgaaatcaatattataaaaattatatttttatgatttgtagagatgcagacaaattacacttgtgcaatatttcaaatgtatacatttccttcacctgcattaacattacattgataattataaattagtagataaaaataaatttccgctgttacctaaatatagatttgatgatgtatgagtctgagaattttaaatttatttgtaaatgtcatttctaattattttcctgtgaaatctctatttttgccctcaacccatatttttattgggtcaatggctttattgaactgaaactgttttcgtatactattgtaattaaccctttgtcaggtgtttccctttgcttggggaaaagtggtaattatttcactcctcatggcaactttatcaagaaaatattaatcccatcctgttaaaaatgtggaacctgtagtgttaacctacatatgctgctagaaacaaaggaagtctactttgaatctacactttgatgggatactgaattacttagtaatatgtatgtcaccttttactttctcaagcctgttatctcctttaattctgaatttgggaaacaatatcatgttgtgaaacaaatttattttggggtgtcaaactaaagatgatatgtatctcagagtacttccctggaagctttccctgtttagatttctcttcatggccttttcattatggagtaagtaaagaataatctgactcttaaaacaatttaaataaagaagtacatagtgagaaccaatctgttagaaaatgagaaatatattctatcacctcattagcataatttctctaatggaagcttgatatcacttctcacagaagattgattatccatgtatttttgaccagagttgaagcagaagggaaggagggaggaaaatcttatcattcattataactacccagaagttataaaattcataaatatta

SEQ ID NO: 43257 - DNA, 1108 bp, Bovine  19866881632739
  misc_feature (1)..(1): n is a, c, g, or t
naaggtaaaagaagatgaagtgatagtaatgcttataataatgaaatgttaatgtgcttgacctctgcagctacccatcattaaataattaattttctgaacctggatccatttattttctcatcttagcttaggttgaggtgtttaagaggaagagagaaagaaactttaaaaattgaagctgaaataaagtttgaccagtctcaccgacaacccattcaatgtcatacagaaaacattgaattacaccttggacattctttctataaggttaaatagatgaaagagtaatatacttcaaagaagtaacaaatagtgaataaactgagttttgaggaaatgttataatagattttttaaaaagaatagaaattctcagggaatccattactcaatttatgttatccgtttttcacctgaatgtggaaaaaaagtacagaattttcttatttctatgtggttatgaaagtacgtgaatcacatcacagctaaaagatattctcatgtaccaggagagctttctgaaggactgaaacttaataatggattcaaaattctttaatggaaagaactgttaaaaaaaaaaaaagctactgatctatgcactctttattttatatctatctatcttagagagactcattataatagctcacatgattataagacttgctctatgctaagtcgcttcagtcatgttggagtctttgccatcccatggaccgtagcccgtcaggctcctctgtccatgggattatccaggcaagaatactggaatgggttgctacaccctcctccagaggatctctgcaacccagggactgacccctcatctcttacatctcctgaattggcaggtgggttctttaccactagcaccatctgggaaaaatctgctgggctgagaggctggagacccaggactgctagaggtgcagttataatccaccagcagtttgctggagaattccctcttgctggggaagctattctttttgttctgttcaggccttcaactgattggatgaggcccacccacatcatggagaacagtcttaactacccaaattcacgatttaaatgtaatctcatcccaaatcacccgcca

SEQ ID NO: 43258 - DNA, 1416 bp, Bovine  19866881661637
  misc_feature (1)..(1): n is a, c, g, or t
ngctctgagggacaccttgttttagaagggagccactagaaaaactgaaaccaagatgggagagaagtgagacattgatcacttaatgatttaagatttcaaattcagctctgccgtatcctctagacgttttagttaccagagccaataaatcacattttgtctaagacgcttaagccacagagcattttacactgtgtaaagtcacttgatatgatttctaaactgtaggatatacactgtaaacattagtgccctatttgcctggaattctacctgtgtatttccacagaaagtgccttagagcagtgattttttttttttttttccccaaccttggctacacatgagaattacctgaacagctttagaaagtctccatgcccagtggcatcccaggtgggttaaaccagagtctctgagagtaggattcaggcctcactatgttcttaaagctccccaggtgattcgagtatgcagccaaagcggagaaccactgttttacagctaactcacaaacagggtttacagggaaaggaaagaaaggctttgactttaaatagcaaccctaagtattgcctacttattgtgccaagattttgaagttcactacttctatggcgacagcttctaatcttgtttttgttccctctggcaaattgttgctagttttctttagcaggagttaagagaatatccttttagcctcactaggtaacgctcatttatttttattctgtgaaaaaccctccaagcttttgagctcgttattttattagggactaataaatttaacttgaccatacacactaagctaaaaagcttagtcttctatatgaggcaggccaacagactgtgtttttaacccttcagcttagcttgtgaaaggcagtagtgggcttcccaggtggggctagtggtaaagaacccatcctgccaatgcgggagacctaagagatgcaggttcgatccctgggttgggaagatccccggagtaggaaatggtaccccactccagtattcttgcctggaaaatttcatggacagaggacaatccatggggttgcaaagaattgaacatgactgaagcaacttagcacacacagttttacattaatagctgatgttaaattatgtgcaaatcatgaatttttttttaggtcccactccctatggagcttataaaactgaagatccttatgataagcctagatccttctagaacagcaggaatttgaagctagcatggcacaagagcaagcactaagtagctgtgtttgctgttttcagcttcagcttttctcatttttaaaatgaagtctataatatttcatctataaatttcacaggataaatagttgtttgcatgcatgaggtttgtaaaccaaaaataaggataaagtagaagttaggcat

SEQ ID NO: 43259 - DNA, 692 bp, Bovine  19866881962079
  misc_feature (1)..(1): n is a, c, g, or t
ntcttcctgcccctgcaaagccatgtgcttttagggagcagagccccaggcgcacacaggcccatggctgcagtgctgttctgagtgaggctacgaaggagggggtgaaatctcacacgcccggcatctgcatttgctggggaggggaggatactacgcgtttgtgatagaggaactcagatcaaggcaacctgcctagatagatcagagagagaggcgcatgggatccccaaggggtattgcttgctgcatcttgtagcgtggctgtggtctgggatacgaacagcgaggagtccatgagagcaacatctcagcttggacattgattgcgttgaaccctaggtattcttttcttcttgttggcttgccgataatgcaagtcaatgaatctccctaggcctctactcttctctgataaagttaaacttgtaccatttacttactaactgactcaacttgtttattataaagcatttctttttatgatttgtattctaaggaggatcaaagaggcttacatgctaaaatgcatgtgaattaggacaataaaaaagaccagaaggcatataaatagataggctgtgatggattagtaaaatcaattataaagcagtttgccttcacaaattgcaagatgagggtacaatacacgatcataatcacaataaatgataatagcccgtcttcagctg

SEQ ID NO: 43260 - DNA, 2887 bp, Bovine  19866880446778
  misc_feature (1)..(1): n is a, c, g, or t
ncatatgggatcttcccggactagggatcgagcccgtgcctgctgcattggcaggtcagttctttaccactgagccaccagggaagcccctaatcatactcttgcatctattcgccaactggtttggaatacagagagaaaagggtctgattagtagtctcagaaattgaacatcaaagagaacctcttgaaaaaccaaaagagaaatgaagaagcctcctgatttctgctcagtcctcaaaccgtaggctcattatctgagagggaccaagaaaactatatactatggctttgctgccaaggatcaggattgagttgggggcctaacagtctgctcccagttcagtgaggttctgtgaggggacagaaggcagtcctcctgggacagaaaggatgacacagagtttgtgtgctgtgtgtgtgttagtcactcagtcgcgtctgacgctttgtgaccccatgtagcccaccaggctcctctgtccatggggattctccaggcaagaatactggagtcgtcatcacttccttcttcaggggatcttcctgacccagggatcaaacccgggtctcctgcatcgcaggcagattctttaccatctgagctatagggaagtccctatagctttatgtgtttatagtttatgtgttagacagtgacagaaagaccactgtttgaacccatggcttatgatcccaactgagtcccaggcagcctcatttcttcctgagtgacctgtatggttctgtgataatcctggtagaattcgcttactggtaggtgatgccccaactcttaagaaaataatatcgatctctgagaattttcaaaattaaatgtgaagatactactggccagggaagaaaacggaggtaggcgggaagaatgaaaggaagtaagatgctagaatttcatacaaaagattcatgtaccactgattttctgaactcactttctctgcatcctaacagtcattaaaatgtataaaaatggatattctgaagcagtaacactaagaattatcattgctgcagttgcttggcaacctgagactttggttattttatttctaaacagggaatgctataaactggtatctggtgtttgtgaaaatagttttaaattgatgttctctctgtaaatcaggaagagataatacagcattaacgtacatttaaaggttgctaaatttgcatatgtgtgtgtctcataccacacgcacacaaagattcttcctcagagtttctctccattatatgctatcttaactaaatctggagaattaatatccctttgcatttttcctggaaaatatctatttaatttccctttgtcaataatatgcatttgggtcccaaggaacaaatcttttacctcctgtgtgaatcagggaaattgagtattgtggctcatatcagtcatgagctcctttctctagcttcccagacactgtgtggatttccagttctgagaaagcaaagacaaatccaacatctatctggctactgggagaaaattatttctcaagacaaggcaaaggtatgtccaccttcttcagagatgtgactcttctgaaggcctgatgaaatcttggggtactcccagagatcctgcctatgggttccagcatggatgaggtattcacatttttaaaaagttggctttatttataaaatgtcatttctccacaatctctccacattctcttgaatgtgacccttggttcctgactcctctgtagggctttaggaggagaaagactccctttctttcacatcatccagaccctgatgatgagcatccctaacttctgtagaataatctcgtctaaagtggcccctgggacttcccagatggagctagtggtaaagaacccgcctgccaatgaggagacataagagatgcaggttcagtccctgggtcgggaagatcccccggaggagggcctgacaacccactccagtattcttgcctggagaatctccgtggacagagtagcctgatgggctacaatccatggagtcacagagtcggacgtgcctgaagcgactcagcacgcatgcgcacaaagtggcccgcggcggtatttgcttgccactgaagctcatgacagcacacggccttgggctccacctttcgtccccagagagaagaagggcaccagagagtcagatgcctgagccccagagagtgtctgtgatggattctcacacgcaaggattaggtcttggtctgaaccacagaccaaacccataaaagaagagcacagagcaccagttccatcatggggctgttcatgcagaaccatgcttcatgttgacttgggaagaggctctcagacagatacagcactagagggtcacagaatgactttccatgacctcttgttctgtggaagccgggacattataacatctctgtttagaaatagaggacagcatattgttggcaaataatcaaatagactgtttgacctattgaagtcattatttctccaaatggagtcacagttataaatgaaggaaaaatgtttcaggctttaagtatcactgtgtgaagggtatgcttcccctccatctagaaggtaccaaaaattctattttgagagaactgggtggtggttagaatttccaagtctggagagactggtcctgtagatcagctgggacataacaggactttagccaaagccaagtacacactgacagatccttgtggtggcccttctgggtaccagtttagtgatgtgtgcctgccatgctggttcctggcatgggaattcattttgatgccactatacattttttctcatctatccaaggggaaggctatgatgaggaacagcaaaggctgagcaaggaaggaaacaggcaaaatgcactgtca

SEQ ID NO: 43261 - DNA, 769 bp, Bovine  19866880526505
  misc_feature (1)..(1): n is a, c, g, or t
ncctcgaggctgatgatggggtgagccctaaagggtctgggggcgtcacctgcctgccacagcacctggcttcctgtgaggaagagaatttaggccagaaggcacatagcctcctagcctgcggcttgcttgacctcagtgaatttatatttgtttaaagtataatgagatttggagcattgtttaaaatggaaattttgtttacttatatataagtaataatccccttggacctgggagccagaactcaattaaggaaaagtttattaattagtcaccctacagggaagcagagcaaagcaaactgctggtaacgggccattagacatgaagatgatggatccaaagagttcaaattagttgtctgctgtaagaactaaacacaccatgtgtgcataggcacctggatcttatacacatatatgcattttataaacacacacatacatacacatacgcacatgagtggaccgacgaaaatgttttcaacatgtccaatcaagatagaaaagaacattctgtgttgatatatcactgctttgcagatagcactgggttaagcttaaaatatttcctggtttaaacgttgttggagaattagtgaggctgattcttcacccagcacagagccttcccctgctttgctaagctacctctgtaaaggcttgagattccccttggaaacggcactattgaggaagagaccctaaaaccatagcagtcaggagttgctccccataaagatgagtaattaggagttcaaagccag

SEQ ID NO: 43262 - DNA, 1688 bp, Bovine  19866881018039
  misc_feature (1)..(1): n is a, c, g, or t
nttgggaggaacttggttccctctcttttggaaggcatttagacctccacacgccagggggtcatacaaggtgatctgcttcttccgcgggtccacctttaagaaagagctggattctgaggtatcgcgagccagcgtggaacagatgcgaagcatgactttcacctgttaagaaacaaaggcaggaaatgacaggcattaaggtgggctgccgtctatggggtcgcacagagtcggacacgactgaagggacttagcagcagcagcagcaagacacttggatactttatgacggagcacttttatgtcctttggagacacaagtgtatatggcagtgtggaatcatctcatgacaaattacgataaaatgcacaatgaattagcaacataatcctcagcaggtcatgggaaaactgacttatttataattaccaggtagaatattttgataggtccgttactttattacagaactggcacatcacgctctttgtcttcctattaatataaatagaaagttaagtgtacccaggtggcccaattacttagatgaaaaggtaatctggactgccacgctttgggggctagcgtagttcccttgaagctcgcagatcaataaaccctggacataaaagttagctccgtaatttactccttgcctcttgcacatcaggactcttagagacaaaaacccacagttattagtgtcatcattagaggcctgggaaaatggcttgtttttaatgaccagcatttgaaatgtgttccaaggggcaaaagtgatacaagatttgtttgaaacatgttattttgggatcctattaagtgagtgcatagaaatggtcatttcagggggatgaaagcacatctctgcgggaaacaggttaaagacctgcctcttaagtcatcgaacgtggacatttctagtgctcaatccagcccagccccatcccagggctgagcagggcacttgtgggaatggactgcttgccctggactctttgagttgagtaggagtcgagctgaagcctcacgcacagttctggaggctcaagtcctgagaaaatggcagcatttgctcccttaccagctcttgttatcgtggagctagttcagtccaaatgtgtaagcacctaacctaggcgccaggcactggggctgcaaagaccataatacggtctctttgcaaagaccagaagggcagacagacacgaaggcaggggatttttttaatacaaggaggcaaattctgatgttatgaatagggttacttttattatttaaatttatatatttatttaattggccatgctgtgtggaatgtgggatcttcattccccgaccagggatcaaacccacgccacccctcaccccacatacacacattagctttgttgcaattggaagcttagagtcttaccactggatcaccagggaagtcccacataggggttatttttgaattcctctctacatcatgccctcttcatctaatcaatgttcaggcctgatgaaatctcaatcatcaattttggggaaaaagactgtaaaattttacatcaaagatttcaagcacacagaaatgctcagagaatactctccactgtgcctagcgagtgaggtcatcctcctgcttatctcagcctgtctgctgaggcacaggaactcatctgcagagggcaaagct

SEQ ID NO: 43263 - DNA, 933 bp, Bovine  19866881356872
  misc_feature (1)..(1): n is a, c, g, or t
nagaactgctggcaaaagagacctccctcttctcctggtttgtgagaaagggcgagagtggacgtgggattgttgtggaaagctaaaacaaaacaacaggtttccccgaatgactgattaagtgccttgcaaatctttgttattatccaaacgtttatgttcatactttcttgtgtacagatggtgctagtcaagatgaaaacaacaacatgaacaacaacaaaaaaatcaaacacatttttgcaatgtatttacagctcgttttctcttggtgttttagcctatttctgacttgctatttctaagtaagttgtgtttgtagagctctttcctaatcagtattgcatatgaataaatgttaactgtctgctatggttctgctgggaaggccactcgaacagaagctagagacttctgggcccaagccagtgtgtttccagggacggttggaaccacaggtgatgctcattgccacctcccaccagtggcagggtcagagggcagacttggaggtcgattatggagcacgcgcacgtgagcttgagagaaacaggtgtgtcttcagggggaaaggcgcctctatgaccctggccctccttaccctttgagtgggatgtttgtgctgaatagttgcccctccaagtcctgaggcacgtcagttcagctcagttactcagtcatatccgactctttacatgtcctgaggcacgtaagactggttcctttttacccacgacgctggggtcttcaaaaacatttttcatattcatttttattccaaagattctggatctaaagaacacatgaaccagttcaacggagccatattttttgttccccagttttgcaaatttattagagcagaggattttccccagtctggagaccttcttggacttgtagatgctcagagacggaagtagttttggtcca

SEQ ID NO: 43264 - DNA, 1759 bp, Bovine  19866881797498
  misc_feature (1)..(1): n is a, c, g, or t
natgacggttctgtaaaacttcccatattttgaatttagctggttgcttttatttgttcctctaccaattgtttttcctgtaaaatggaattttatgggcttgattaaatttctttttttgttgttgtcaaggattctttataggtggtacaaaatcttactgtgtcagctcagacaacaggtagtgtctggctgtcccatgttagtgatgctaagattgatgactgggttcagatggtaacaaccttacacactgtaaaaattttccatcattctttgatctactggtttcatatagtgatacattttccatggattagttatttcttcaagagttgcaaaatgctgatttttctaattcaattattagaattagatttcacatttatcagctaaaattcatactaatacattatagctacttggttacactaaaatacagtttatatccattctaaaaaagagtcctaacgataagtggtttttgctgccatacaaatgttagaactgctacctgtagtgaagaaatgtgacctgtaattgcatcacgtgggaaaacctcagcaagaccaacaacataggtcctgccatcgggtgtgtttttctctatccccttttaatttgagacattccagttccctgacctgaagccttctgggagaatatagcagaaagatcttggtgcttatgggtcttagttaaattagcatgtgctgctgcttttctcttgcttgtttaaacaccttcccttcctatacacttcaccacggaaacaccaagggagctttttcctttctgggcccagcatcctgggccacacgattgctagcactatatccacaaaaagaaaattcataacaccaaacaagcagaatgcctgggtgaatgaaaattttgttattatacagtctgcttgtgtttttgtggcagcattttgatttctgaatcttggagtcaactctgactgccagacctcagcgggtctccaggccctatccagccagctgtagaacatcttttacgtcagatccttctcttctgttctcattaccaccatcctgcctcaggtctctctgcctctagagtctcaccttcccactcaaactcctgttttagtccttgggcatccttcattccttctctggttcaggccctcagcctggccttgattctgtgataagacctcttgcaggcctcctccctcctcatcactgtcacatgcggagagctgatgaaagctgtgccttgggtagagaacttctcccagcaggagtgagcttcaccaggtttccttggggtgctgttccggcaagtaatcatgatgcttattccatatgtcagctgggaggcctccagaaacaacccaggcacatgcacagcaccccctgccagagctgcaaggctgctccctaaatatttatgtggaagtccccctcccagacaacttccttatcctctcctgattaaactccactttgtttttttttaatatctttaagcaaccagagcaggtacctgtcatggagtaattatatgcaccactttctctgcaaccatagaacccaagattttctttgcttctgctaactgacatgacagacatccacttaatagaatgatgattagtataaaattactttttggcctttaaatttaattatgtcacattcatagcaataaaataaagttccaaatccaggtgtgcttttcaaggaacgtgtccgaggcaattaagtacagggaaaggcgtcctacactt

SEQ ID NO: 43265 - DNA, 2142 bp, Bovine  19866880135089
  misc_feature (1)..(1): n is a, c, g, or t
ntcaattttgctgtgaatttgactgttctaaaaaaataatttttaaataaaaaagtgaaattgccaagtaaaagaaaaaaaagtaggctctgtctgggtcttcagtggagaatggactagagatgagcaagagtggaagctgaagaagcgtgacagtgatccagcaaaaggtgatgacagctggacacaggggtgacactggagcaagagagaagcggacgactcaaaatgtgttttggtgatgggatgccagaacttgctgagggattggatctgatggaaaaggaaatgagcaaccaaggatgacactggctaactagtggtactatttattgagcactggagggtgggagggagttgggggtggctgtggagctcaggggggttttgaaggaaaaggcaaccaagtttcactttagttacattgagtctgagatattcagttggaggcactgagtaggttatctttgcttgtttttactttgtggcaacagaagtttcactcactaatggcagtttctcaaaaatgacctttcctgatttggacttttaacttcttatttgcataactgaagggcccattttgctggtttttcaagaataaaagaaaaagctgactcatatatttattgttgttcagtcgctaagtctagtccaactctgcaactcaaatacgtactgtcaaatactccagaaaattgcttgcagttttgaaatgagtttttcccgctctgtttccatttctgcagaggtttcagtgatttgaggccaagtttcagacagctcaggctctagtagtctctgctgctgctgctgctaagtcgcatcagtcatgtccgactctgtgcaaccccatagacggcagcccaacaggctcctctgtccctgggattctccaagcaagaacactggagtgggctgccatttccttctccaatgcatgaaagtgaaaagtgaaagtgaagtcgctcagtcgtgtccgactcttagcgaccccatggactgcagcctaccaggttcttccgtccatgagatttcccaggcaagagtcctggagtggggtgccattgccttagaagcaaatctctcacagcgtaggtgcatgagaacacaggctcagctggggatatggaatcatacactgatgagaagacttactgtgctagacagtatacacttgtttatttctcagtcgtctccactagactgtgagtatgctattgccagggatttgatatccttagcattagcatatatacaatattggatatttgtgtattcggttagcaaataggccaactttgagccactggatttttcatttacagattcaaggctgtattacctcaagtcacatcagtggttaaaaactataaccaaacagcccatttggtttgtttgttttaattttttttaattatgaaagtataataacacatttacaggagactcagaaagtacagaacaaagttacaaaggttccactatataatctgttgctttttatatgcaaaaagcaactagttaagtccgatttctttcacaggattgactaaatttagtaatttagtagtaatttagcagaaaccctttcttacaagggtgataccaggtcagtgttgggtgcagttaaaggtttagaggttctgatgctttctttttggccttttatgagaattgttttctttttttcaaatcacaaaatgttcactttctaaaaaaaagcttgtttggtgtttaaggagaaatatcactatttttctgtgatttttttttttgtttgtttgtttgttcattcactcaataaaattctgagtgactgctgtctctgaaactcttctgggcccatcaacaaaaaatttcacatttagagtttacactttggtaggaggagacatgcaaatcatgtgtagggtgttaattgaaatactataaggaaaaaatgcaacacaccctttaggcttaaaaagaaaaaaataagtaggtttaagaagatgaagtgtagagaaaattgtgcatttgtagagaggacagtctgacttctctgaggaaataacatttgatctaagatgtgaatgaagtcaagatgggagctgtttgaggatagtaagaacgttccaggaagaacagtaagtgcaaaag

SEQ ID NO: 43266 - DNA, 870 bp, Bovine  19866880421552
  misc_feature (1)..(1): n is a, c, g, or t
naagttctgaaatgatgccttatattctctgaataaaagataactgccttcagggtaaataatatgcctgcacttgcagctctcttcctaccttaaaccatcactataatggcccaaggctctgcttctcatcactacacaggaagagagaacaaggtgtggcttacaaagctggtagccctaggcacatgtcactttacttttttgccttctcttttttcttccatttagagtcttctgtgccaactctcagattggtaaacagagggtggggctaaaggtcgaaaggtgacagatctcaatctgaactcactagcttaatcagctgcatttcttcattttaatcaggaaatcctggagtgacccagtcagcaagagcacttgtggggcgacaaagaagggagggaggggaaggagaagagggaggagtcctgtatcgaggaagggaggggcgcctctctcttttctgggctcaaaatggatcttcctttctttagaccacatgttcaatctctgacaaatttttttcctttgagattctgttggttttatcatctctttcctgactagaggggatttcactgcatttgcagataaggtctgtttccagatatagccaaattggtctacactctattttgttacattgtaaagcatacagatatttgtggtaagaccaaggatataaaatataactataaaatgtgtttatagacatgggaaatagtcctaatacattgtttagcaatagatgcagattttttttaatgtaagccaatagatacatatgtatggaaacatctatgtatctttaaatggctagcatatattgagtgattattatgatctagatgtaaagttagctctgag

SEQ ID NO: 43267 - DNA, 1904 bp, Bovine  19866880435359
  misc_feature (1)..(1): n is a, c, g, or t
ncttatcccctcccagcatcagagtcttttccaatgagtcaacacttttgcatgaggtggccaaaagtactggagtttcagctttagcatcattccttccaaagaacacccaggactgatctcctttagaatggactggttggatctccttgcagtccaagggactctcaagagtcttctccaacaccacagttcaaaagcatcaattcttcggctctcagctttcttcacagtccaactctcacatccatacatgactactggaaaaaccatagccttgcataaacatatattagaataacatcttatggatgagctggaatggaaacataagtttaagggaaaaaatgatgtaaatacttataaagaaagcataaatactttttaaatggatggtagggatattaaattgctatggtatttagatcacattaatttatattaaaaaggaatacaacattttaatttttaagtaaaatatttccctgagagaaattatatcctctgtaactatctgaacttacaataaaaattttcagctgtaacaatgtgcaagagtgacacatgcttttgcaaaattcttctgggctgcctaaatgggaaaagaatctgaaaaatagatacatgtgtgtatatatatatatatatatatatatatatatatataactgaatcactttgttgtacacctgaaactaccacaacattgttaaatcaactccactccaatataaaataaaaagttaaaaaaattctattaggctgcatgtgaataggaaagtttaaggaccattatgctacaggaacacagcatttgtctactatttgtattgaaaaagcagttatttctaaaatcttctgtagaaggcagaaaatcatatcctgagagtacagcatcatagcaatgtatcactaaagcaaacataatcttctgaaataactatttgtgtctcagccaacacctcctactattggctgcctacttcttctacaagtacatcttaaaacttatttgccagctcatcatgcatatcagggaagaaataagaatttgggaagctgctgtaacataataatattaaaccacactgtgataagtgataattctcttatataattaaaggcacatgcatacacatgatcacataagccttgacccaatccagcataacacatgtggctgacatgtaggattacattagttttccaggagttgctcccaaggactaatcaggaagttggttaccctcatgggaacgtcatatacctaaataaaataggccaacattgtacacaggaacaacaacgcataaaacaggaaatgatcatctctttgcatgttttaatttatcttcagggcaaagtgacagtaaaccattaaagttaaactggaattaacttttaataaaaatccagggaaaaaagtagttaaaacaagtttgctggagctattagaacacagagttctgctacaaaattgttcagaaaaagctttacaatctaaacacactgaaactccctagtgtaaaacactcttagctaaattatgggaaaagccaatgttgtatcagcaccaaacaatcacccagcatcagaatgaaaagaaggaaatgttgttctgaatagcttgccaaggctaaagaaaagtagaacagttgctgaagacgggttgtacagaccaaaaggacgcattttaatttgtgttgccacttaaattttgaaataggtcattatcttcaaattttgggtaaatatactgcatcagagtgaaagagagagaaaaagagagagggaggaagagaggaaaaagggcttgacaacaaacagtgaaaaatgcattttaatttttagatttctctcaattgatatatcctataactcattataggagtatgcaggctgtg

SEQ ID NO: 43268 - DNA, 2038 bp, Bovine  19866880439177
  misc_feature (1)..(1): n is a, c, g, or t
ntctaagggtccagcttgtattctgtctattcaaaagttaccttcaggtgctctctaggtgggggaaacgctaaactcataatctatatcaaattttttattattgtttattacctcatatttgtcttatgcattttttcactcttaactagtgccttatatatgattaaatatttcattttgaattgagtttttatcttcaatagattaaaaaaaatcattattcagtatcaagttagataaactgctttccctataacttactctcggttaaaataaaaaaagcctgtatttacctcatgtttttgaaaactgctctttttataatctttaaatgtagacctgcatcagtaatggtttgaagggaaatgatcataagaacaaatgcttacatttttagaatagtaggtacacaggcctcggcaacctcagttctcgtcaactgtatgattttgttccagtttccttttgtactttactggtaagtccttgaattgtgaaacacaaagggactggtccttctgttctttgaggtactgacatctaaatggtgaaactgtttgcataatgttccagaattcattgaagaagtttgtaccacagccatggaaatggttacagtctataaatcagggtcctagaaagcagtgcttatgtgaggttttctttaatcgcccaaattagacagttcagagaagcttttacacaaagtgtttcagcctagtgtttacatgtgactagcatctcaatgcttttttaaatgaactgttccttgctttttgaatgaagaatttatgtccatgactatatttctgtgactcttaaaatattgaaaacttgtttatttatttatggtgacatatataattttctttaatggttttaccttaaggtttttttaaatagagtaatgttaatattccaaaatctgatcagagatgccaaaaatccttttcaaaatgtaaacgattgaacttgtcagattaagtcataagcatagtttcaaatatttggtaatatttgagctcattccaataaggaaagcagttggattatagtgtaacacagcattttagagcatcttcattataaacattatcattgttagattatcacatccctaacatttattaagtctttactatagcactgggcgctacatacagtatatcagttaatccttaacaaaacagattgttaggtttataattattgtatcgaattggcaggggagttcctcctggaagtcacccagctagtcaccatgatcatccaggtagtaggaaccagagcaatgcttgctccacagcgtttgcttgctccacagcgtttgcttgctgtgtgaggtattaggaagactgcatatttcctgagagctggagctctgtttgcttctcactttatacccatgcataatgtaatgcctggcacattgtggatgattcatagtaaatatttgttagatacgtttgcctctcatagaacaatagcagtgacagaaacccccaacagagcaaggcttattccttgtagcctacctgaatgaattccaaagatctcacattgaaactctacagtttttttacagagaaatcatattaggtatggctggaaggtttatgatttcattctgagagttatataggtctttgtaaactaatctgtgagtttgactgcccttgaatagcatggcttcaatgcctctttagacaattttcaaatggactttgggaataaagcctactggtaagtaggttggaggttgtgaccatgtgaggaatatgatgaaatgaaccttctcttggtagctcagagtcatcattatgagtgtgagtgatagattttaagccctccatgtataaacatccagaagggtcgagcttctttaggcatgtagagatgggggactctgaacatgcctcttgcagcagcattgttcaaatgaagaactttaggcttagaaaagttaggtgatctcgtgaagtcatacagctgtttcaaccgaacagctaatttgtggcagaggactaggtgtgat

SEQ ID NO: 43269 - DNA, 1450 bp, Bovine  19866880583677
  misc_feature (1)..(1): n is a, c, g, or t
ncaaccaacgtgattcaactataatgtactttacaccctgtcaatcttctgctcatggacttcccttggggctccgacggtaaagcatctgcctacaatgtgggagacctgggttcaatccctgggtcgggaagatctcctggaaaagaaaatggcaacccactccagtattcttgcctggaaaatcccatggacagaggagcctggtaggctacagcccatggggtcgcaaagagtcagacacgactgagcaacttcactcactcaatcttctgctcagaatgttccactgacttctagcctcacctagaatgaaaggcagacaaacccctatactatacaacatgtcctcatttcctgtactctctgccttgcccactgctccagccacactgccctccttgtttttccttgaatatgctagatgtcctctcagatgagggtttctgcatttatgtctcttcctagaatgctcttctattgcatattcacatgtccaatgtctcatgtcctttaaacctttgttcaaatgtcttttccagtgtggttattctaaacaacttatttaaatttacagtttctctttgctttgtgccttggctcccttcttgctttatttttcttcatagtacttccaccattaaaattattatatattttacttctcttgtttattttctgccttttccacctaaatgaagtctgtaaagtgagggattattttatgacttgtttactgctatatctcctgtgcagtatctgacattcaataggtactactaaataaaactaaatcactacttaataagtatttgtcttaatgcacaagggaataaatagcatttgagagaataaaagcatactgtgcaggggtctgaattctggttttgactgggcgttctatgaactgtctccactgtggactcgtagttccacctctgagctttattttcctaatctttaaaacctatttaaaaataagattatttcagggagtgcagtcccctgtttgcacaaaaaggaatttaattccttcttattccccacttcccccaatatactcacaatcaaagctttatgtcaatcttacttcaggaaaattagattccctatgggacagttttttttctttttaactgccactgaaataaattgccagttaggtaaatactgtatttagagatgggaggcattaaagagaccttagcagaattaggatcccccatatcttaggatgtatgaaaaggaaagggaaagagacattagatgcctctctttctgtccttgccctcatattaaagttcaagttaaggaacgagaaatgaaaaggattttgcatttttcatggttagtcaggctcatgtggtttgcatagtcgtaatacaattcaaatgaccatttttgaagttttaatattcagtgccctttgtcccagctaggcaaaataaca

SEQ ID NO: 43270 - DNA, 1093 bp, Bovine  19866880647513
  misc_feature (1)..(1): n is a, c, g, or t
nttgcagcagtcatgaggttttggtaaaccagatgagctcatcagcttgcaaggagaacctgcaggaggaagttccaaggttggtgatgctgttggaagaaacatctgtggctgacctggagtgttattttgggatattcagtccagcatcacactgcctaggaaaacaagaatgcaacagcagttgaataccatggagatgggaaatgacaggcttttagtcatgaatttacaaaaaatttttttctaacctaataatctagttaaaggaggtaccccagatttggtgagcttctgaccttaggcaaaagagatactccatagataaaatactacactcagagcacaaatacccttctcctctaaaaagaaaaataaaatgtaagaatagcaatcttgaactgcaaacttccttttagaaacagaagtatttcttattctttgtgtaggttcaaaattggtggggacttcttttttcccccagtgagtctatgagaaccctgttgttttttttgacagaaacatgacatacttttaaaagaatacagtcatctggaaaacaatttacactttgcattttcaccttgctaaattgtattcagattctctttagtgctgctcctctcacaagacatgaagcattttggttcttaaacacttatgagtggtacactgcttgagatgtacaaatagctttcattagtgctaatgggagttatacttctgaaccaggagagaatagagcctgaagattttaaactgtccttcatgcaaatctcccagatggaataaattatgagggatgcttagaaggcagaggtctaaatatcccctaaagccatagtttaatggccgagtagcagaagtggagtcacagtaatggctttggggctaatgccatgctaagtagctgatattgactcttgaaaattcttattggattagtactgcactcgaattccattagttttcaaaggacccgagagatagttctctatcttgaatagtccactaaaacgggttcaatttggttcagctttcaaggccatttgttttaaattctgtagatttctaatcagcaagccctataaca

SEQ ID NO: 43271 - DNA, 1666 bp, Bovine  19866880699055
  misc_feature (1)..(1): n is a, c, g, or t
ntatggtgaccatgggtaaggggtaagattcagcttctctaggcctcagttttcttagccataaagtgaagttctctaaggctcttttatttatttatttattttttcttaattcttttcagttggattcttacatgtttacctgtccatgtgtccaaataatctataaattccatgcttcaaggattttctatttatttattctaaagcaatttggtacttaaaattagtttaaagattaagtaggagagctataattattaatgggtttcagtacaaaactttcccccttagacggaagaaaaatatctgcaaacttttcactcatttgacttcagcagagataaatttaggagatttgatttctgtttttgtttggtgccattaagtcttaatgctcaacagctcaaactcaagggtatttggaaaatgaacttgatttgcctagtgaatgtgaatgaatagcctttgtttactagcctaccaaaatgtatttcaatccattctcaaactagtaaagaaaggtagaaaaaaagagtaaaaaaaaataacctgaaatacatcacttgcattctggttactgctcctgtcagaaaactggaattcttgatagtcatctcttcaggaaaacatcatttgattatcttttctaattatgttcttttccttttgctatagcagagctcaacttgatccaataaccttaactgattcttcaataatcccatatgttgctaatgcttctcaagaaactgtgcttggctgactgttttcaattatgctggttgtacatgcagagtttacatctgtacagccttctgagctccttgaaaggccctcttatgtaaatacaggggaaagtagccagttcttgtatcagctgacagcaaaccatatgaattataggggcatatctttcagaatacaagggacagaattctgggtggaaaaatgaaaagtactgtttcttcatacagcaaatatttgccacttcctttgcctctccttgcaggaaccatatagttgaagatttaaacagagaacagaagtttcttctggctttaattatcttgcctgaagtttttctttttttccccaaaacgtctgtctttcactatgtttaacagtcctgtctccattccacatttgattgtaaaattctttggagttgggacctttgtattcttcttatttcacagtcttgaatcaagacaatgtgttatcatcatggcggtttgcaatggaaagcagccttgcaaagaaagcaatggctcactgaactagtgtgttccctggcactaaaaatttcaagtggaatagtaggttagatgttgagttagatattttgggaggcaaatcttccttccataacttaaagatcacacaggtgtacctttctggaggatgaatgtctttcagagacaccattttcagaagctaattatttagagctgttcttttcatttcttagcctatctatcccagtagttattctttgccgtgacattctaagcctcaggttccttatctataaaatgaagtatatctgccctcactaaaataaaagactgtgatataacacgatgaaatcttgagtttaaatcccagcttcaccattactagctgtgtgaccttaggaaaattatgcaaatatgctgagtctatg

SEQ ID NO: 43272 - DNA, 1543 bp, Bovine  19866880702895
  misc_feature (1)..(1): n is a, c, g, or t
ncagtatttatatttcatatcataaatatttacatttaatgttgtgatgcatctgttagtaatcactttatcccaggtgaattaaaaccttccattttgagacctttgcatttaataaagattagctctgtttttcttctagtgtcacgtataaacctcatattttgcttgatatttgcagccttccctagcgatccagaaattgaaatgagtggcccattagtgagtggaaacccagtcactgtaagctgcagggttcctaatgtgtatccttctgaccggctggagattgaattgtttaaaggggagagtattatgatgaataaaaccttctcgaaagatttaagtaagaaagccctagagaccaagagtttggagaagaccttcatccccaccactgaagatactggaaatgttcttgtttgtctggctcggttaccaattgatgaaatggaatttgaactcaaacaaaggcagagtacacaaacactttatgttaatggtaagtacatgtgtgatgtattcacaatagattatgatttttttttatcatgtttgccaggtaatagtcaacatgaggttcatagttgaaaccactgtgaaaaaataattgaaaaaaaactacaaaatattgattgtttttttaaaaaaaagcacctccaagcttaaagcaactgtttatttgcttatgattctaagctgacactttgagaagaggtcaaacgggtagtatgttcattatggtattagatgagtttacgtattcatttagttggttagaaggtcagtgggggggtggtcccaggtagcttcactcacacatctgggccttcgctgggggtgtctggactttcctttctccatgtggtgtctctcagggaaggtagcgtagatttagtcaccagagtgcagtgtttcaagagagtgataatgaaggtggcttcttgtggtctaggcttggaagtcctagagtgttacttcttccagggtatattggtcaaagttaatcacaaggggagcctagattcaagaggtaggaaaatagagtccaccttttcataggtggtttacatggctcatggtcatgtttaacctaccataaatgtcaatacacactatcattgaccatccagtctttgatagcaagagagtaaatacccatgatgcacccatgttctactctttcattctgtattgggcttccctggtggctcagtggtaaagagccagtgcaggagatgcgagttggatcctagggtggggaagatctcctgaagaggaaatggcagcccactccagtattcttgcctggggaatcccacggacataggagcctggcaggctacagtccgtgggctcacaaacaagcagacatgacttagggactaaacaatagcaacaacaattactctgtatctgttatagtaaattggggcagaaacttcctttggtaaagttatcaagatacaaattggtctaatccactaaactcaaagccaagttttataacattagtaaaactctttggcagggtgtaaccagc

SEQ ID NO: 43273 - DNA, 937 bp, Bovine  19866880717384
  misc_feature (1)..(1): n is a, c, g, or t
ngtctagagagtgtgtcctttttatgttcttgctctttcccctgttctctaatttttaatgtccagagttaagaaaataataggatattttactcttggactgtaagtggtcactatttattctccagataaagtgtagcacactttcttcttaaaattgacattatagttatatgctcatttcacataaccattgcaattgtcttataacccataatctaggttcacaagtgaaagctgattctgtatctgtaggaaaaaaattcatttctgtggcatatgcattaaaaaccacatggctttttaattttgttcttttctaagtgctctcatttactttaaaatctaatttaggtggtgatttagaagaatgagacctattaaagtaaaactaaccaaaattaaagttattttatagaggaggggtgaggatcccattatggtttcttattataagcactcttagaatagtccacaagacaacatataaagttaaagaatgacagcagcttgccccagtactttaatttactatatagatattctttcattctagaagatgaatttccttccagagctcagatttaaaactgagatatttcttttaatactcaatctgaattctttcaaccaattggaaatcttgaaaaaaaaaaaaaaaaggaatgaatgccattaatacaatctaaagtgtttttggtccagctaatattgtctaatatgatctctaataatgtcataaacacacacacacctttgcatatacatatatagacacatatcttctttcagatgcccaaactttcatttttatttagctttacagtttaataaagacacccaggacagagaacccatctcaacaatgacaccatttctcctttattactttgctttgatgtttaaaaaaagacctagtaggcatgtagggcagata

SEQ ID NO: 43274 - DNA, 1327 bp, Bovine  19866880781112
  misc_feature (1)..(1): n is a, c, g, or t
ntcacattctttatatattgattccttttatacaatatgggaatttcagaatttagataaatgcaatttatctgggtagtatgtagaccttgctgatattagtaactttgatgtctgttccgattttgatctctctcgtcttttcaatgggaaatgtgacaggtggtaaattgggtagaaggaagttaatcttcagtttgcaggagtgaaagtttactttccacatgtccggacttttgttttctccttttaggagagtcaagccccacccggcgagaagctgtgaagagaagaactgcagaatatctcatgcgagcagagactctctctagcctttgtgcgaaacctcagcttgatgatgtgtctcaggtatgtcttatgtttcattgtgcatttccttttagccatctttgctgttttttttttctcttgattttattttgaactaggatgtttgagaattttggtctttggaattttatcagtgattttctttctttcttttttttttttagcagaaattttattggaagaattctgatacactcatttattattttttaaaaatacgtttgaggttaaaatatatccgtgaatgtcttcagttagaaaaaagcaaaatatgagcttgttgtgttgttcttaggcaaatcataattgctcactctagtgtattcaaaccaaattaaaacatagtctttgacacttcaaccctagccgtgtattcagacgttttagaattgttttgatggcatcctcttcaccaaagaaatcaaacccagatcaaacttggccatatgtttagaaaccattaaagacagataggtaaaatgttgtaggggtgtttaaaatatacaagaaaggatttggcagtttttcattcacagtatttctgacacagaagacccattgtgtttcttgatcagactcacaaacgttcgggcaaaatatcacttgggcagatatatcactgaatttgctgctcttagaggaagcaatgagactccttggcaagctcttgacaggatacctctagttcaaaatggcagctttattgagcctaattgatgtatgatacatgatacttaaaattcaaaataaagctttttcgttctgccagcaaaagagaagttttacattggcagcagcaatgaaaagagatggcaaataagtaaaacccaaagaaataaagagaagctctatgaaaatttattatttagaggggaaaaagagaagatgaaaactattctaggaatattagatcacttaatgaatacatgtagtgctgcttttatagaagcaccttcaagatataccttgaaagagt

SEQ ID NO: 43275 - DNA, 1053 bp, Bovine  19866880781983
  misc_feature (1)..(1): n is a, c, g, or t
natcactgccctgagcagggctttgtcatttccctacctttctaaaggccaaaaatgctaatactccaagagaaggggtgggagtaaagggaggcagtgctaaaaaaaatcaccagttttcttaaaaatgcatataattgatactatgatttattttgttgtaatgtgtctctctcaagattcttcttgagatttaacgtaaacccaagtgtcctgtttatccgcatgggttcaggaaggcctgtggagagggaacaagacaccagagagggaacaggcacaggctgtgatttgccctcagtctctaacctcccacgggatagtcttgagtacagaagagcgactaagatgacttctaccaaggaaacaatccactttcccccacgcctccaccttcgggtggaagaagatgtgagagttgagaaagagattatctaaaacctcaagagattctctgaagagaatggagattttcctttgtaatttgacttctactgcacacccagctcaccccacattcttgacagtgatgtggttcacttagagatttaatgcaaaatatgacatgtcctttcattcaaaaccacgaaagcaaaatgatgcattgagtttccctcattttaaatcgctgtcagccatactctttatttccctccctttaacaattaaaatgttttagggctcttatttttttctgccagaggagatgaggacagaaggggacaactgctaaatctgatgaatttccatatagtattactgatatacatgtatatcccattaaatttggatttattctttctgttcctgttatatttacctactgcttgccattaactatgccaatgtggccctattattaaaaagttgtttctaaaagaccaacttttttgatacctttgtttaaatacttatgaaagttaaaactcaacatttgtttacttatagagctatttatttttttctctgaacattgtttcaacaatttgtatattttgactacatactttctcaccttgtcagtcagataaacatatggctaagatggggcac

SEQ ID NO: 43276 - DNA, 1061 bp, Bovine  19866880799798
  misc_feature (1)..(1): n is a, c, g, or t
ntgtgtccctccctcctgatttatgaatatgccacctgtggatcctttatccgagatcctcagtacatcctcactgaagtcatgtgtaagagcaatgtcagagggatgttatttagaccagcctgtgtttcttgccagttggtgtttttgatgaaactaatacctatcttttctcttcacagttttcagtctgattttcccaagtccagtgaatatgtctggtaataaccaatattcttgacatcaaaccccaggatgagagagtcacttcctttaacattcagatcaccataatgtacccatgtgttctcctctttgttggtgatagttaagccccaagtccaagtgcattgtattctcaaacttctgagtgataaaattacctccaagacatcagtgtattggctgatctgtttttgtcaggcttcccaatggctcagtggtgaagaatcctgccaagcagaagacacaggttcaaccttgcagtagattacacagaggctaaagcatccctactctcccatcaaatcaatatcttgtttccttgccaactttaagtttctattgagaaatcatcctctatgttcctttttggataagtgttcaacaatatcactaccttttatccttacaaaaatgttctataccatttatttattcatttaacagatacttattaagcacatgtgctttattagttttctcgagctacagttaacaaagtactatagactggggtggcttaaacaacagaaattaatttttttcagagtcctgcaggctgcaagtctgacatcaaggtattagtagagttcagttcttcagagggctctgaatcagggatgtggtccagacctctcccctgggcttgtgcatggctgtctcctccctctgtctccacatcaccttccctctgttcatgcccatgtaccagtcatactggattaaggccctctctaatgagctcatcttaacttgattacctctttaagaaccctacctccaaatatggccacattctgaagtccttcgggatgactttaacctgtaatttagaggga

SEQ ID NO: 43277 - DNA, 974 bp, Bovine  19866880879907
  misc_feature (1)..(1): n is a, c, g, or t
nttgcttaccttgaacaattaatttcacctcttttctgtctttcccaacagggttatttccttcacacacataaatcccagaatcttctgccctcatagaaattaaagtgagagttgcattctcagaaaggagctgtaggttcccattgtctaatttcttgctccagagaatccgtggagctggtaaacctgcactggtacacgtcatcgtcacggagtcgccttcctgcagccttgtggagggattcacggatatagctgtgtctttgggggagactgagaaggcagggcacagtattagtcattgctaggcagcataatggtcccacagggcgactgtaaatactctcatggactgtatttacagctttctcaatctgacaaacttactctgccaaactagtataagaattgctgagtcatgaaaattagtcaatccagtttctgactgatttgatggagttactttttttgatggttggtgttttcagatggccatagacactcagaaattaagaaaaacccttagaattatgtgattcaatctcccaggtaaggtacaaattccagctcagcttcctcgccaaatgttcacgcaagacagcttcagtacttctggggcacaaggcagtccacggccttataggaaatattgtccatgtgatttttggacagctctgattgttagaacgttttccctctattgagctgaaatctttctctttgtaactaacttctatacaccggtcatagttcagtcctctattgctaaagaataatccaaatttcacttctacatgacagccattcagatacttaattatagctctcatttccaagttttatgttcctaggaaaaatatctcctatttctgactattcttctcaaagcattgataaaatcctttccatctcattttgtctcagctagacatgttgtagaaggcaatgctccttttaactatggtgtctag

SEQ ID NO: 43278 - DNA, 922 bp, Bovine  19866880932634
  misc_feature (1)..(1): n is a, c, g, or t
naaggtcctctggggaacttttaaaacattctcaggttctgcctcaccctacctccagaacccccacctctaagattccagtttgataaatttaaattggttctgtttttgtaatgtagtcactaagtcatgtctgactctttgtgaccacatggactgaagcccaccaggctactttgtccatgggattttccaggcaagaatattggagtggattggcatttccttctccaggagatctttccggtcaaatctgtgtctcttgcacatgtctcctgcattgcaggcagattcttaaccattgaaccttttatgttttgatgatacgctagttaaatgaccagaaaatacatttaaggaatggacactaaactgaaagggatgaaatacaagaacttctaaacaatgtttaaccatatttcatgattatatatatgtaactacttgcacttcttgggggatttctattcaaattggacctctgaaaacactacatcttattattctaaagttacaaatgcatttcagtttctttagaatgtgttaggcttttgctgactaagcagcattacctcttagtagaggtccaaagctataatttgacccctctggcaaattaaatacaattatgcaaattaccaggatttgggcataatctaattagtacgatacatatgcaccagataataatttccctggctgaaagctagattgtcttatttcatgtttgaaatatgttttagaaaaacattctactatgtaagtaagatttcattatcttatatatactatttgctcagctccacaatggacatgtttagaaaaataaagccaaaattggaatcttcaagtgatgatgtattttgtcagaaattcatagttaccaaacaggatattccatgaaactagaaagaaaattcaa

SEQ ID NO: 43279 - DNA, 1534 bp, Bovine  19866880950366
  misc_feature (1)..(1): n is a, c, g, or t
ntttccaaagtgatcagtttctgctaaatgcttattaataggttttctttaccatctgtatcttatgactttttttgcttttttggtgcaatggcaccaatttggtgtcaggccaggtctctttgggcagctttaattcttactttcactagtacagaacactataaagcacttattttacctttcaaaattgttcttttttcttttacatttgctttcttgctgacttttaatttctttctttcaaagtttccaaattcaaaaggtatgaatatacattaaccgtcaaacacgcactcaagaaattcactcatgatgacagatggccatttcaacacagtagctcataagtttcttttaatgtcaacagaaggaagttaagtgtccagtgaataatcttggatatttagcattaataatctaggattcttttctcttcagaaaacacacaacaaaaacttatctaacagtattatcagccctttgtcctttccataacacactgaatacctaagacaaatgtcttttttaaggttgctttcaatctgtccttcaaagatatctaagcctgtagttgtctatttcatgtgcatgaattaacagtaacacggtatagagagtaacagtgccaattctagaatcagatcaagcatagtctgattccatagctctatcaattactaaatttagggaaactacttaagtattccagttcagtttttctattggccagataacagtacttagctggattaatgtgaatattaaataaaataattcatggaaagcactcagtccaggatagtagtagtagtgttagttgctcagtcgtgtccaactctttgcaacccagtggactatcgcctgccaggttcctctgtctatgggattctccaggtaagaatactggagtggattgtcattcccttctccaaaggatcttcccaagccaggcatcgaacccaggtttcctgcactacaagcagattctttaccctccaagctacagggaaaatccttaatcctggatagacatgccataaattctcaacaaatattacttatcagttgtttttacaaaggtaccattaaaaatgtgccagacacatcaaacagggatttgttccccagctttgatcagcctgaaaaacaggcaccctaattctggaagcaatgggaccactgccgaaagaaaacttaggttcttcttcccctaggcatgtcattaatgttgacattgtttattgagtaaaaagaaatatgttggcttatgctatcattatccttagatcctgaaggtaatagtattagtagcatcattgctcaattgtgtccaattctttgcgaccccacggactgtagctcaccaggctctcctgtccatgagattctgcaggcaagaatcctggagtggattgctgttcccttctccgaaggatcttcctgacccagggatcaaacccaggtctcctgcattgcaagcagattctctactgtctgagctacaggggaagatcctgaagatatatttctt

SEQ ID NO: 43280 - DNA, 949 bp, Bovine  19866881014932
  misc_feature (1)..(1): n is a, c, g, or t
natggtgactacagccatgaagttaaaagatgcatactccttggaagaaaatttacgaccaacctagacagcatattaaaaagcagaaacattactttgccaacaaaggtccgtctagtcaaggctatggtttttccagtggtcatgtatggatgtgagagttgcactataaagacagctgagcactgaagaattgatgcttttgaactgtggtgttggagaagactcttgagagtcccttggactgaaaggagatccaaccagtccatcctaaaggaggtcagtcctgggtgttcattggagggactgatgttgaagctgaaactccaactttggccacctgatgtgactaactgactcatttgaaaagaccctgatgctggggaagattgaaggcgggagaaagggatgacaggatgagatggttggatggcatcaccaactcaatgggcatgagtctcagtaaagtctgggagttggtgatggacagggaggcctgccgtgctgcagttcacggggtcacaaagagctggacatgactgaataactgaataaattccaaaaagggctttttccccccaaaatgtggtatatatctggaaagagaaaatgacagtgaaagtcaagcccacacaaacacttgttcacaaaacacaggcaacaaataaatcacgtttgggaagcaattgtctttttcagactatatacaaatggaaaaagtcttcaaatgcttcagtaccttcattttgaaatgcctgtcagcctcaggagctggcccttataatacatttctggcaatatttgtgcctcattgttttcagagctattaatcaaatgctaaatattatgcaagtgctgtttaaaaatggagaaggcaatggcaccccactccagtactcttgcctggaaaatcacatggatggaggagcctggtaggctgcagtccatg

SEQ ID NO: 43281 - DNA, 1731 bp, Bovine  19866881018754
  misc_feature (1)..(1): n is a, c, g, or t
ntctttgtcttgacatcatgaggcagaaaatcttttgcatatgtcaagacagatgtgttggtaagggcccttgctccttgcagtgctctttaaaccttggactcattcatttattcagtcaatatttattgagtacctattatgtgccaacactgtggtaggcattgaggatcagaagtgaatactacagaagttatctctgtcttcatggagttaccactgtaaagaagaaaatggaaacgagtgactgatcataatcaagtataataagaattgcaagaaggaactacagtaatgtggtgcgtttggcagaagcctatcatatttgggaatttgagaactgctctctgaagaaatgagaattacactgagatctggtgcatggaagaacagaaaaaaattacctaggtaaactggaagagaggagagtttcacacaaggtgaataccagggtgaggtggacataccaatgtcctcctgtaaggaaggacttgattctccagccttcggcagtgctgacaacctcttcaggcattgcttcagttgcagggagaatgtgacccttgcccaaggtcacgttttccctgcacatgcagaccaactctgctgggccatttctgtttcatagctacctgcacagttggctgaggctgtcaggcttgcatcacagcttgatttctcaatcctgctcccaccccctcccttccatgggtgttgatctcaagaacactccctaataaacatcctgaacactaaaccctgcctgagtctacttcctggagagcccaaactgaatgacaacataaaaagctttgccaaatcaaggcattcagaatgactgtagtttgagagacagagatgagctgtggtcaaaaaggtagacaggggtcagattctgagctcctgataaagcatgctaaggagttttcctaaaggcagcagccaataggaagccatagcaggatattaagcaggaatgacatcagtaaatttgtagttttgaaatttgcaatgcatgacaagggtgctttgaatatcaaattcatatctttcaaaaaaaaaaacaacccaacttcttccttctttcagatagtaatggtaaaataaaggtaccaaattgtttttcctatccttgaatcattgcttttcattccactccccttatcaataaaaactactaaatctgctccatggttcatgcagttataatcctatgaaatattacataatattaacttcttgaaagacttccgtcattgatcaatgtaaagaaatagaagaaaataatagaatgggaaagattagagatcccttcaagaaagctagagataccaagggaatatttcatgcaaagatgggctcaataaagaacagaagtgatatgaacctaacagaagcagaagatactaagcagaggtggcaagaatacacagaagaactatacaaaaaagatcttcatgatcccaggtaccacaatcagatgaatgtggtaatcactcacctagagccacacatgctagaatgtgaagtcaagtgagccttaggaagcatcactatgaaaaaagctagtggaggtgatggaattccagttgagctatttcaaatcctgaaagatgatgctgtgaaagtgctgcactcaatacatcagcaaatttggaaaagtcagcagtggccacaggactggaaaacgtcagttttcagtccaatcccaaagaaaggcaatgccaaaga

SEQ ID NO: 43282 - DNA, 1463 bp, Bovine  19866881089359
  misc_feature (1)..(1): n is a, c, g, or t
ngaagtgttcacagatatcttttaaaaagtaattcatataaacagaaaacaatgaaatcatctacacaatcagactttcaagaagcttgtagtacctcaaacacattgtttaactgatttttgtaggtattagggtaagactgctgtttgttcagaacttttgttaaggactattgctttgttaggtgaatttatctatggaaagtggcaaccttttaattggttgccactgtattggttacaaacagaaacaatgtgacaaatgttaccaatgaacacttagttcataattcttttcattccaaattcctatttgtctcaggttatttgactcacagatttatctaattcatataaactgaaagtgaaagtgttagtcgacagttgtgtctgactctgcagctccatggattgtagcctggcaggtttctctgtccatggaattttccaggcaagaatactggattgagttgccattcccttctctaggggatcttcctgactcagggattgcataagcagctcatatacccacattagtaatcttgctttgtatttccattatttgcactcctaagttttttatcttcctcattgtctctatggattaatcaccatttataatatcaagatgaaatgtgttccatctggagttttcaactcctaaataaatggtgaacccaatataatataagtcaatatttaactgcatacatcctataataacaagattccattcaatttggttattagcactttatgatagcatctgtcttctaattgcatttttaatggtagttgctcatgcacttcatcatcaaagagaacctaagagatggtataaacagatatcatgtgaacagaacatatcaacacattagctaagtataaacatctggatataataagaaggagatagctcttttaatctgacctttaagtttctttttaggaaactgtaatgtgtgctaaggtgtggaacagaaaattgtgcattcatttacaatctggaaacttccatatatttcaagaatgcctaaatgcatgtttatttagtatacccatgaattcataaatcaagagggataacagaagtaaaagattatttttattgctaaatgttaaatcacataaaatcatacatcatgaattaattatgtaaaaatagagcaaatagccaccattaggaaaaggttaagtgtgaaggagcttttacataaactgtattaaaagacaatattggccttatttattttcctattccaaattattaaacttctaagacttctaaaggaaaataacaagcatatacaactcaatttgatctttaattaatgaatcaatttcaggccagtaattgccccaaataagaaaactctccttttcataaaattaatacaatattctctcctcaaaaaaaaaaaaaaaaagaggcatgtcttttttcaaaataaacaaagaaa

SEQ ID NO: 43283 - DNA, 1017 bp, Bovine  19866881159873
  misc_feature (1)..(1): n is a, c, g, or t
ntgctcaagttcctgaaccaaggcaaagataataatgtgtgtcattttagctatgctctttttgtgtaagttgttatcttaccatcgacaactaatagaaccattctgtataaagctattagactaatctaactaaaatcagaatctgactctatatttccctcaaaaaaaaggaaaatccattagcagctccctactgactggtgtgttgcagtccttggggttgcaaagagtcagacacgactgagcgactgaacttgaacctgcctggggaattagatgtaaactctagcttcacttcctatcattcttgcttcacattttacgctctctaaaacgtaaacacactgtacttcactttctgctgtttcttcctttcacgctttgtctcatgctgtaacctctctaaacgtccctaaactgtcctttaatctggcttctagtccttctttaaaatctcagtgtcaccccttgcaggggatattccctgatcccaaactgtcctccaaactctatgaagttcttctctgtgctcttacaaaaaatttgtgatatctatagtaaggctggaggttaaatgggtggataacaactagaattggggttaaggatcttgacagtgaaagaacagtggttatcctttcattcaacctgaacagtaatgtctgtttctattcactgtgctgttattaaaaaggtgaaggttccctggatataccaaaaaggcaaaaaaaaccatcatagtagaataacaaggcataattcaattatgacattcttctttcctctctccatcctcatttctcaggaaaaagaaaggatccataactaaatgcttttatatatctaacttaaacaatttttgttttcctactttccttattgtacttctcaggagatgaggtacaaaagtagttcccccagaacaactgtttgagaataggaaaaaagtatttttttcacatgcccactaactttagctatttgataacttcttcttcaatcctatctcaagaa

SEQ ID NO: 43284 - DNA, 970 bp, Bovine  19866881163130
  misc_feature (1)..(1): n is a, c, g, or t
natgagatggctggatggcatcaccaactcgaaggacatgagtctgaatgaactccgggagttggtgatggacagggaagcctggcgtgctgcaattcatgaagtcgcagagttggacacgactgaactgaactgaactgatgatatgcataaagccataggctgcccataagcagagtcagtggaaaatggaaaactctaggatacatctacctgaagtatacctgaaaatagatgatgagcaatcctgccgtgtggcataaggagagtagtatgaacacacttgctacagtggtctttgtcattatctccgtgttaattataaatgtacaactgtttgttctattatttttcatcacttttcaacttacaataagctctgttagcagtaatgaattcaaatgtgtgtgacagtgtgtttaatgaaaaaatgagtgctacatatttatctctgagaaagttaatgatacccatgtaacacacaaaacttgtcaacatttaccaacaactatgaaggtcatagggatatcactgaatacattcaaagacacaaatctgctaaagaattctcagcttctgtttcaaaaataactaagactgagtgggaaaataatgactcaacatgtgctgccgaagaaagtgcatttacacaagactctgtgaagcctatcttttcatttagagcaaatgcctgttcttctaaacaaattttactcattttgattccacgcatttttgtgcacaagagtgaagcaatggctgtgaacaagttggctccattagcagcagcagaactgtgcaaactgttaaatggtacaagtttacaggacttgtaaactccagatgctttaaagggaagaaaagttaactccaataaggatttgattttctcatccagttcaagaaattagagtattatgttgcaggagaatgatctgacttatcatgaatgctatagtaaattctattt

SEQ ID NO: 43285 - DNA, 2133 bp, Bovine  19866881179595
  misc_feature (1)..(1): n is a, c, g, or t
nccttcataccatagacatatgcaaagaaccgaacaccacctaaccagtaaaatcaaattgtcatgacggttgctatgttaaatacaaaatgacaaaccaatttccaattgctgaagcataaaataaaggtacaaccatactttcagatctcttttagcaaatatgtataacagtgatagtggtggtgttggtaatatgtgatgggactagaaaggggagtttggaagagataaacatattagacatctatgtaagatgagtttgtgcaaatattaaaattcagtgctaattgagactacccattgaaagacaagcaattataaagtggccagctcctatgcaaatataaagtatgaaatctgttttacccatctattaataataataataaaaaaagctcacctcttttgtacatctttcagtttgaaaagatagttgtaaaatatgccttatggtctgatagtctgataagttattccactaaagctaggagaatcttaatgtgcctccctaggagctccccaggtggcactagtggtaaagaatccacctgccattgcagtagacgcaggagatgaaggttcaatccttggattgggaagatcccctggagtaggaaatggcaacccactccagtattcttgctcactctcagcaagtacttcagctggttctggttcttcacctgattaaatattcctaatcttttggggctttccaactggcaacccactctggtactcttgcctggagaatcccatggacagaggagcctggtgggttgcagtccatggggtcgctaagagtcggacccgactgagcgacttcactttcacttttcactttcatgcattggagaaggaaatggcaagccactccagtgttcttgcctggagaatcccagggacaggggagcctggtgggctgccgtctatggggtcgcacagagttggacaggactgacgtgactcagcagcagcagcagcagcagcagcaggtagcttagtggtaaagaattcacttgccagtgcaggagattcaggagatgctggatcgatcattgtgttaggaagatcccctggaggaggacatggcaatccatgccaatattctttcctggaaaatccccatatcccatgtacagaggagtctggtgaactgtagtccatagggtcaaaaagagtcgaacacaaccgagtgactgagcatacagggttctagagcaaaatcatgccttgagcaggggagaattacacattcagacagcagctcttggcaagctaccaggcacatggaaaatgaaaactttgatcatgaggcaataagtaactatctggctagagttgctcctcataagttgacttttgtcagacctacaaagtcataagatcaaatatgaaagtgttaactgctcagttgtgtccgattctttgcaacccaatgaattgtaggccaaaaaatactgaagtgggttgccattcccttcttcaggggatctttctgacccagggatagaacctgggtctcctacattgcaggcagattctttactgtttgagccaccaaggaagcccaagatcaaatatgctcagcaacaattcactgtaggatagaaatggaatacctggaagcaggcatagagctggctggaaggcacaagtaagctacagaagtaagtataccagacccacctctcacttggcactttcatgggccctcgccctcaccttacatctatagccatgaaagtggaggggcagggcatccctttataacaagctgatggaggacaaaaaagaccaagcttagtttatagtttatggataggttgactcaatgttgtaagtgcaagctaaaaaaaaaaaaaaaaaaagactgttgaatactaaaatcctactgaggactggctccaacattcaatcgttgagggtaggtcctcccaacaagcagagctttatagagtacgtactattctttcttaaaagtggcctaaaatgagaatatacatagactcatgggtagtggtgaatggattagctgcatatttaaagtgcctgtggaaataaatacttgaagatcagggataagaaagtctggagaagagacatgtggataacctaaagaagtggaca

SEQ ID NO: 43286 - DNA, 1176 bp, Bovine  19866881179816
  misc_feature (1)..(1): n is a, c, g, or t
nggcaggaggagtaaggggacaacagcaggatgagatggctggatggcatcacggactcgatggacatgagtctgagtgaactctgggagttggtgatggacagggaggcctggcgtgctgcgattcatggggtcgcaaagagtcggacacgactgagaaactgaactgaactgattaacctctatattagagtccaggcaacaacacagaggatgctccttttccctggtctaaacagaaggcagagatggcaccaacatatgaggcgagtcagcagagatctgacccccagcagatcaagactgctgagggcagagccaagctgttcagatgtcagaggcagcagctgcagaatccagatcaactaacagccaggtcagcagatctttggggtaaccagcctgaagtggtaaaaggagtccaagcagaacaatcaagtaggtggcacagtgcagagcagcagaaatcagccctggggagtagccaggttgactgcaagtacttggaaaacacctcctaagtgagcctccaaaccctcagcagagtgtgctctgacagaggcgatcataattggagtgtgagtgctaatggaccctcatttgtgttctctggctgctcaatcctgggacagttggctttagtttatgtcacattggtcaccttttttaggaaagcctatttttattgttgtgacagctgtctgagtaaggagtataacctgacaggttggtacacagatttttctggtaataactaggcacaaaactcagatgtgggagaggttcttcttcatccaaatccccaaagccaggccatagtgctcttgtgggttcagatgtgacagctgggctgaaaacaaggctctgtgtcactatttgagacagtagagtgctggggttggggactgacatcatcagtggattttttccccatttctaacacttttgattcaaatgaaaagcaacttagtaggtgaagaagggaagctatcagaaaatatggctatgtcctgaatgattttcactttataaacttgggtgtgcaagagatatttttaaagttttcttaaaccagaataaaactcagccacccctctctctaaaactagcagaaaattcagccttggtccttcttgaagttttctgtcctcctgctcctcaccagtttcctcccct

SEQ ID NO: 43287 - DNA, 2713 bp, Bovine  19866881273914
  misc_feature (1)..(1): n is a, c, g, or t
ncttggcctcagggaatttctgagctctgtgatcactctccccccgactcggtccaaaaactctctcaagtcagtagtgggaggaatcatagagtttacttgtttgttttccatttctcgggggttaccatcactcattttctaattcaaatgtcttgaaatccattgttcatatattttgtccagttttcggcttcagactagagagtaaagctggcctttgttactctatctttgttgaaagcaaaagtccttgtgcctcaatctctcagtaaatgtttatccttctaacaaatagaatgtagtagaaatgagactcttgagagagaattctctatgggtctgttgcacttcctcacgtcttccaagcagaggcactgaccatatttgttatacactaacttttgaaggatatttaggtaataaactgacctagaagataatatctccctctggggcaaagaacagatttgcttaaagtcttaaaatagagagtgtctctctccagagtgaagtataaacatgtttatttcagtaaaatatatttggatttcctaagctcaatgctcctgttctagaaacgcaacgcagtgtgtgaggagcttgaccctctatgcaacaccctgtgaaaccgggcctcaaggcgttggtgggagagaatgcttattcttcatctactgcttttactgcaattaatgaactgtcctttgtctttgacctaggagtcttgtgccttctgccagcgttcacgaaaatgtggcaggctaacctgttagcttgtaagcaatggaaactctcatactcatcacagttcttgacagaagaattgaatagtctaggttagaaagcagtacaacttccacttggcttattctcttgaggcgcatgccttgggagtcctgagttgatatgttatatgtttgactaccttgaagcacgtgtgctggaaagattacatggagagtctacatttgagatactgaaggagttccagctgctctagttgttaggggtttgagtttcctcagtccaggtgccagtcacatgagagagtgaatcttcagatcatactcaataccagcctttgagccatactgataagcagtggtgggaagcaggcagagagagtctgctcgcctaatttgcagattagcgagcaaaagaaaggctactgctttaaaccactaagttttggggtgatttggtatacagtactgggtaactgaagcactatgtaatctatagcttccttatgaactttttgctgattttgctaaatcactttctccaaaaggtttattatttttgttgttgttgtttagtttttaaatttttgtttatttatttggctataccaggtcttagttgggacacatgggttctttgtctccatagtcaagatctaattccctgaccaggaattgaacctgggccccctgttttgggagttcagagtctaagtcactgaactgccaggcaagtgcctccaaaaggtttttgattttttgttttgttttttttcaaaaaaggttctagcatagtaaacgtgtgagacctaatatgcccaaaaagaaatgtatttttcaatcacatttcaataatagcttagttgattgtgaaagtacaaaagtgaagttcttttctttcaaaataatatctgttgttttcttacattccagttactgttagaaaatctgatgttacctttatacttacttctttataggtgatctgtggtttgtcccaacaatattttagattttttccttacttaatttttaatattttattatgagatgtttaggtatagttttttttcttatttacactattttatactttatgagctctttcattccaaggtctgagtagtattcaattgtatatatgtaccacatcttcattattcattcatctgttgacagacatttaggttgcttccatgttttggctattataaacagtgctgcaatgaacattggaatgcatatattcttttgaaccacgtatttcttcagatatatggccaggagtgggattgctggatcatacagtagttttatttttagttttttaaggaacctcccatactgctttcttcagtggctgtaccaatcttttgattctgctataggatttaaaggaaaactatcgcattattcctgttgctgctgagtcacttcagtcgtgtccgactctgtgcgaccccatagatggcagcccaccaggatgccccgtccctgggattctccaggcaagagcactggagaaggtgccattgccttctccgattattcctgttaagacctcattattccattctgctcttcttccaaagttcagtgacctcctggaaagatcaccactcccctgctcatcttagtcttaccactgctgctgctaagtcacttcagtcgtgtccgactctgtgcgaccccatagacggcagcccaccgacagcccaccaggccccgccgtccctgggattctccaggcaagaacacttgagtgggctgccatttcctcctctaatgcatgaaagtgaaaagagaaagtgaaggtgctcagttgtgtccaactcttagcgaccccatggactgcagcccaccaggttagtgccaaatccaaaagatgaaaccaaatccagaagatggtgataatcaggtctgatgatagaccttccactaagagatcaccaagatgaatcccatct

SEQ ID NO: 43288 - DNA, 1099 bp, Bovine  19866881328030
  misc_feature (1)..(1): n is a, c, g, or t
ncattaagattcagttcttatatgctagtcacttcaatcagtgcaggtctattgacttctgtatcgaatgtctgtcatcacagctgtgttttaatctaaattgaccacttgggcatctgttaacctttcaacactgctttgtgatataggtgcaatctcaaagctttcctgattcagtcttgcgagtctgagctttccctgacatcattctaatgcactagaacataggagatttcacttctctcactcattggcaagtatctcagactcttaagtgcatctatctcccagtgctcctccatgtcctttcactctgctgcctgttcaatactagattatggaactgaaactctaagaagggacaagaaggcagcaatggagaagtgatcggaaaggttgccattgtccgagtctgcgataaatatcctttcccagacattatgaatgaggctgccttcttgaggaaggattgatttgctcaacagaatgtatggaaaacgacagagaaacactaggaagcagagggagtggtggggagcaagatgagtagcgacttcagaaagtttagactctgtttttaggacaatgactccagggattgagattaaaattaaaatgagaatctttgcattattctcccaaactcttcatgtgatttcttttgagtaaaggataataaatgcagcaactgaaaatactgggaggaattatttatcaactactcttttattgcagggagttgtttcccctcttcccatggcccactctaaaaaatcttctatcttcacaggggatatacagtcccctcagaactgtaagataaggggagggggatagtcctccttcctgtggagataattggaattgaaacatttcatatgctttagagtaggaaattgaggaactaaattgtacacaaagaacaaaggaagttattcagcatgtcagccttgcccctgtattggctttgaacccagtctggaactgaaattaagctttgccatagcaacactaaagatttctttaggctaaaagcacctttgtaggaaaaaatatgggatgatctcaagagggacagggtgtgggaggtagaaagaaa

SEQ ID NO: 43289 - DNA, 814 bp, Bovine  19866881368550
  misc_feature (1)..(1): n is a, c, g, or t
naaaattcagtggaaatgattgcttttcactaataaagtataactgtaacactgctataacttttctctttatataactacaatcagtgtcaagtatgatttaatggagataattctgttcatttaaacgtaaaagtttaggggtttaaaactgacctgaattaaattcataccaataaattccagtcacacactttctgaatggtatttataatcatgagattgagtgcactcttttttaaatatgtgaaccctattagcattaatcagtattacatgtatgcactgagcagaaatcaggaaagattttttttagagctccttactgaggaaactaaggaaattatcccttttatgtagagaaaaaaagacgctttctttttctttcttcctacaaaagtgatttcatatgtgagagaagtactgactaatagcattggatattggccttttatataaaggaaattaatgtgcgggtgtaccaaggcctccagtgcgctattgtcatttccaagtgtgtgaacacagccttctctcatttattcttagcttttccaggagactgccaacaagcacagccagctctcaagctgtattgcgcaaagatttgcagcccacaaagatcgggagttttttccaaaggtaacgtcaaggtcataaaagccccttaacagctgttagggagtaacaacgcttaagaaaacagtggccctgtgttagcctctttgttctgttagcagagaaatgctcatttttggtggataaagaggagaaaaaagtcctgttaattctatcctttcttaatctacttata

SEQ ID NO: 43290 - DNA, 1142 bp, Bovine  19866881426288
  misc_feature (1)..(1): n is a, c, g, or t
ntgtgttttacgaagaaattgatctgcatagatattttcccactgtacttcattttctcataatgtacattcccctttaactgaaagggaaaaatttttttaatattttaattttttggagggggaaccctgcaggatggaaatgaatgtttagagtgaagataagtaataagcactttttcactgatgtggcagaaatcactgttggttttgtcttaagtttcagagtacctattgccctacttctgacctacagtttatgaaatacactgtaaactacagactacttgcttcttgcttttctaaaccactgcagattgccatgaactatcaatagtctcctttttctgcagattgcgtagtattttcaaagtatttttacgtactgccaggcagttctgaagcttaaaattcctgtcaacagaatgcttttaactaaacagttgttaagatgtttcaagagggaaatataaaaggaaatgtgctgataacggtactgctttttcactgtaagtataaggagtcacttggaagtttgcatccactgccaagcctgagacattctttaggttttggcatattgtggagagtgacgggtttgtatcaagggagggactttgatgtgtgcctttaaaaactaattatgtgaaactgtactgctacttagcatacagaggtaatatttgcattggcctataaaatttaccagcgcacactgaagatccacgtctgcccttcactgagtcctccgttccaagtgaagttttctgtcaaaatatgcatcactttaacttttacactctcagtacacaagtgcgtgagtgtggtttttaggacatttgaccaagatgaaactctttattttgcacctgttataagagatctccaattcatatcatttagcagattggcattaacatttatgatttaattaaatgttcttaaacctgtgtgtacaacaggaaaacaattttttttttcttactcttaggaaatacttttgtcttctcagttttcttggcacagatgtattgctaaagtagataatttcactgagaaatactacttgactattcttataaaatatatttagaatgtccctattggagattctaatgtgggctaatttgggggggggaaat

SEQ ID NO: 43291 - DNA, 717 bp, Bovine  19866881864853
  misc_feature (1)..(1): n is a, c, g, or t
ntaaataatagttatgtcccatagacccaaggggtacaacaaagaaacagtcattgtgtgaagttgcttttggtacctagaggagagaaaggaaagggagttacagagagcaaaagaattgaaaagagggttaaggagaaataaagacagtttatggtcttattggaagttactaaaattagttacaaatcaaaataactcaatatagtaaatgcactgaagcagaataacccaccagctgaggtccagaaaatgctgctgctgtaattactgtatggcggttgttactggtggtgctgatgctgatgttgctgttctccaagaggttctgatatatctgaagaacaacattagaaagacagtaggcataggagtgcaaaaccacaatgtagctgagttaccccaggacttccaacacccagaggagtaagaccatgaaacaccaacatttcttccctgtaaaaataagctctttttctccttctttgatcccatagatgtggatataatgagattttatcaaaaccactttatcctattgttagttctgccagagaaatagtggattatagcttcctggctttgttgcagacagtgaaactttctaatagattgccaattgctttgacacaaaagctagagaaaatgtaacttatcccagaaccttgttccctatctgtctccagcactgcagctgtcaaattggcccctaaaagc

SEQ ID NO: 43292 - DNA, 1796 bp, Bovine  19866880084765
  misc_feature (1)..(1): n is a, c, g, or t
nttaaaaagaatacatttgaatcagttagaatgaggtggatgaaactggagcttattatacagagtgaagtaagccagaaagaaaaacaccaatacagtatactaacgcatatatatggaatttagaaagatgataacaataaccctgtatgcgagacagcaaaagagacacagatgtatagaacagtcttttggactctgtgggagagggagagggtgggatgatttgggagaatgacagtgaaacatgtataatatcatataagaaacgaatcgccagtccaggttccatgcatgatacaggatgcttggggctggtgcactgagatgacccagagggatggtacagggagggagaggggaggggggttcaggatggggaacacgtgtacacctgtggcgtattcatgttgatgtatggcaaaaccaatacaatattgtaaagtaattaacctccaattaaaataaataaatttatataaaagaaaaacaattcagcaaattcatagattggatttaacgggttgactctttccagccttgccccattcacgttacagcttcagcaaatcaatctctattgatagaattaccagagattttctaatatccaacttccatgtttaagtttatgacaataactaacagttatatggtacttacagggttgcagagagtgtttcaaacacttgaaatgtttaagctcatttaataagcatggtattcccatcctgcagatgggcaaagtgaagcacagagaggctgagtcacccaaggtcgcccagatagcaagtgacaaagttggaatttacatcatagtctaactttaaagtccttgctcttaactagtatacactcctgccactcatagtatataaaccagagtgcaaaatccttccctcactactcactcaacacaggaataatctggttgctagattcaagcaaacttcacaggatttttcccaaggtttacagaacttgtggtctcttgatgtgtttattaccttcattaacggcatttctaccattttagggactgtgtttcgattatctggggctgagagaggagaaatgttgaaatacaagaggaaacattctctgaagcgctctcggcaagccattgttttgcccaaggaagagatcttgtctcgaagtatcgctcagatctgccctggtctgtagtcatgggagggctttcagaagttgttctggctttttggcaggaaaagagctaccatcagtttgaaaatgaaagtgaaatcgctcagtcgtgtctgactctttgcgacccggtggactgtagcataccaagcccctccgtccatgggattctccaggcaagaatactggagtgggttgccattttagatctgacctaaaaatattcccttgctccaaagatgttgttgactcaatgatgcttcctgtgttatacatggaccactccccttggctgtcagtgcaggctccgactgtctaacggcttcattctccgtctgtgaggagctatacccatctctttgattcccctggcccatctcgcccccagtgcaaacgtctctccacacacatgttgagatttagcctgtcgttttccagcaaagaagttcctccagccctgaggacgatgatcaaatggcagacaacagggacagcgcctgtatccgagtcttgagataaacatcacccagcttcctgttccttcccttctgagaaggaagagcaagatctggaaatccaggaggaaatccaggaggaaaaagggggccaaatagagatgatttattgaaaat

SEQ ID NO: 43293 - DNA, 2273 bp, Bovine  19866880255192
  misc_feature (1)..(1): n is a, c, g, or t
ncacccttgttgaatacctcaatttgtaacttgtttccggatcttttgagcagagctgtttaaatatgtttgaagagatttgatgtgtgaagcttactcattttctagccagaggtctctttagatgttagggatttgtggcagaaaacccctaaatggaatttcagcacatctgaattcaaatgtccgagttgcctgacaatagggttggcagcctaacaacttgcaagctgacatgccttgatttcctggggagagtgactaaaagcaatttacacattacagagggttgagagtgccttttctttacctgctatggagagcacagtaaccaatgccaccacagatatttaggaagccttttctacatcctccctgttctgtgctgtgcttagccgctcagtcgtgtccgactctctgcgaccccatggattgcagcccgccaggctcctctgtccctggggattctccaggcaagaatactagagtgggttgccatgcctcctccagaggatcttcccaatccagggatcggacccaggtctctcacattgtaggaggattctttaccatctgagccaccaggggaacccaagaatactggagtgggtagtctatcccttctccaggggatctgcccaacccagggatcgaactggggtctcccacattgcaggcggattccttaccagctgagctacctgggaagcccatatccttcctgctgctgctgctgctaagtcgcttcagtcgtgtcagactctgtgcgaccccatagacggcagcccaccaggctcccccgtccctgggattctccagacaagaacactggagtgggttgccatttcctgctccaatgcatgaaagtgaaaagtgaaagtgaagtcgctcagtcgtgtccgactctagcgaccccatggactgcagcctaccaggctcctccgtccatgggattttccaggcaagagtactggaccctccctactttttaccaactcaaatcacacccatcgttctgatccagattatgaaggtttctttgacacagtactattttcatctatctaatcagcaaagacaaaaaggaacaattctttagcctatttttggtgagaatactgatgggaacaaatatgggtaaaatgtttttggaaggtgatttggcaaaggctgtcagaaaccttaaaatctacctaacttttgacacagagttccacttctaggaatatgttttgtagacataatataaaatgtgcccaaaggtttttccaataaggtgttcgctgcagttaatgtttataatgttaaaaaattggaaatccacaataagcaattagttgagcacatacaggtaaacctatagtaaaactttttaaaaaattaaaaatagttattgacctgacaagatgttgattgttgttgaatgaatctgcatatataatatagtctcatttatatgcaaaatataaaattttatttgcttagaaaaattctggaaaggtatataaaagtggatttttcagggtgatgatatcatatgtgatttatttttatactttctcttttttggccgcttggcttgagagatcttagttcctccaactagggattaagccctgggctatggcggtgaaagtactgagtccaaaccactggaccaccagggaactccctatactctttttttttttttaatctgtgttttcctactttgttttttttcaatgaaccagaattatcatacactgttttttaaaagttatttaaaattgtctgaatgctttgcttttctttgactctggaagtaagctgttcaaagtcaagagtcttgaaaaaataaaaattctcatatggaatatgtaacattttggatctgagatgttcgaaggagagcctttatctgcctaagcctcatagtcatgtgtgagtctaattttccattgctctgagagactgtgacaaagaatcattacccttgaaatgggtttgtatgatataaaaaaatcagggtctcctcttcatttagtgagtgtattcacatttgtgggagttctcatgcatgtgctgagggaaagtcctgtgatacagcatttgtgctgtgttgagctcaatcacttgtagaaaatgtgcaatgtaataggggtattacacagggtgatattatggaaaatcctaattggtaccaaagtaattcttactagagtggactataaaaccttcagtgccgctctaactaatcacccctgtggcattctgagccaatgcaggttaat

SEQ ID NO: 43294 - DNA, 1807 bp, Bovine  19866880364108
  misc_feature (1)..(1): n is a, c, g, or t
ntattttttgggggctccaaatcctgcagatggtgattgcagccatgaaattaaaacacgcttactccttggaaggaaagttatgaccaacctagacagcatattcaaaagcagagacattactttgcccacaaaggtctgtctagtcaaggctatggttttccagtcgtcatgtatggatgtgagtgttggactgtgaagaaagctgagcgccaaagaattgatgcttttgaactgtggtgttggagaagactcttgggagtcccttggactgcaataaggtccaaccagtccattctgaaggagatcagcactgggtgttcattggaaggactgacactaaagctgaaactccaatactttggccacctcatgcgaagagctgactcattggaaaagactctgatgctgggagggattggaggcaggagaaggggacgacagaggatgagatggctggatggcatcactgactcgatggatgtgagtttgagtgaactccgggagttggtgatggacagggaggcctggcgtgctgcgattcatggggtcgcaaagagttggacatgactgagtgactgaactgaactgaactgaatggccagcagaccttgggaggtacacagaagaacctatttttttttaactttttattttgtattggggtatagcccattaacaatgttgtgatagtttcaggtcaacagggaagggactcaaccatacatatacatgtatccattctcacctgaactcctctcccatccagtctgccacatgttatctttaaaagaaactattacaaagcaaagtccacataaggtttgcagtgcagcagataaatcaataaataaacaataaaaggtgagcatggctttatgaagagacacaagagggagttgaaggaaggaagtccataaaaagctattgaaaccctcctccaggacacagcccaagtggtccccaactagagaaccaagatgtggtcatttccattttccctgagagctgtgttattccactgtcctgtttctttcctgccagatgagaatgtcccaggtggtgctagtggtaaagaacccacttgccaatgcaagagacataagataggcaggttcgatcccttggttgggaagagcctctggaggcagcatggcaatccactccagtgttcttgcctgaagaatctcatggacagaggagcctggagggctacagtccatggggtcgcaaagagtcagacacgactgaagagactgagcacagttcatggcacttggcaggctgtgctgagacactgccaccattgtgtgcctgctctgcacacttcctcaacaatgctgaggccatcttccaaacttaaacacacgagcaggcagagcagagaggctggcatgtaaaacccaccccgtatctcatcttgctgcttgcctccacttgagaaatcactacgcactcttgtcctacctcccacattctgcagaatgataaactcaccgtaaaaagaaaaacgtagacttttttggggaaagtcactgtacgtgttcagttgttctagaaagttctcttgggagatatttgttctaaggacattttcttctttgtagaaaggaaggcagaaagaggctaattctcaaagtgatgacagccccctcagtcccctatagagagcaatgctgtcactcacttgtctgggggaaatgtgtacattgagagtgaatctctctcctggatcccatatatgaaataaccatttacctttgggtgatgctgaagtatctatcaccccactcaccttctctcatct

SEQ ID NO: 43295 - DNA, 1696 bp, Bovine  19866880489547
  misc_feature (1)..(1): n is a, c, g, or t
ncttaagaccctcctgttgctctccctttgcttatctgcctcagacaagcgccatgaccttggaagccatgggtggggatgttggagccacaggtgagatgggtggagtctgtgttcctgaatcatggtttggaagagaggcatcttggaaaagaagctctaccccatcagggtggcaccagacccaaccaccactggcatgtggggggtggagaaagtgatgttgcagatgaggaagatgttagagatggaatagccaagaataaaatggtgaaagcagtgtcaccaaagtgagggaggggaaacctgcccttgtgctattcctggagctgtgaggtttatctaatatggcattgctgctgctgctgctgctgctgctaagttgcatcagtcacgtccgactctgtgcgaccccatagacggcagccaccaggttcccccgtccctgggattctccaggaaagaacactggagtgggttgccatttccttctccaacgcatgaaagtgagaagtgaaagtgaagtcgctcagtcgtgtccgactcttagcaaccccatggactgcagcccaccaggctcctccatccatgggattttccaggcaagagtgcatcaccccaattaaaacaggttgttatgtttctgcgctaagctctgactgataacagccaccggggtgaaagtcagagtaagtcactggtaatactgacatgaaagccatatatgccacaaatcccaaaacaaacaaagcaaaaagtgaaacaaacaaaccagaaacaacatgtaagctggcataattcaagtaaaaaaaaagagttggagatcagcgtaaatttctcaggtggaaggcccaggaatgaaattcccttgatgtcatataaaccccacccctgctcattgctccatcctcatcctccatcacccaccatatacactgaactgcagaaaaagcccataaaagcctccacataaacttaggtttcttagccctttagtattcctacagggatgaggtctaaagaaccatcctcacaagggaatgcctggttccaaggtgtccagggagggcacccaagcagaagccccctctctggacggagtggagtccatctttctccacagtggacctcgataactggggctgttccctttgaaagtgatccaggagcagatgacaatctcagagacgagtgggcacatcccaagctacagatgtgaggcctggcagcccaagtgacagctcaaacagtatcgctcatggatgagccaggccagctggtctgttcccccggctgggagcaggcctcagaaatgcgtctgcctctcattttctcatgtgtcacaatttacccttttgttgttccggaacattctggagcacaggaggctaatcatccatcgtggtgagacatctgcttgtgaggactgagggctcaagcccagaacatcccagcatcatcctgaaggcggccacatagtcacgcttcgcctgttcaccgccgttgccctttcaccgattcacgaatcaaggagaggaaaacgcactcttaagtctggcagtgacaacagatcccaaaagataaattcattttattaagagtgaagcacaaaataaatactcacccatgttctgagaagacaaatgtgcttattattccagcaaaaactgggtttccattcccttctccagggtat

SEQ ID NO: 43296 - DNA, 1987 bp, Bovine  19866880660911
  misc_feature (1)..(1): n is a, c, g, or t
nctaaagagagccaactattaggacagtgggccggctcaagggggagccgatctttacagcttcaagacaaaggaaatccctgttggaagggtggcattgggtgcttggttggggcattatgccagggtgggtatttttgcataatatggggtcagcaagctggctggtaataatcagggcagtttttggcaaaggttacaatggggctcagtcagttccaaagatgactttgattctgggctgtgctctctgtgatcttggtgtagggctccacaccaacgtccttctcagatactaccaaccaacaggtatcatctggttgtttgttttagtcggtaattcatatctgactcttttccgaccctgtagactgtagcccacaagggctcctctagtcccatgggatttcccaggcaagaatactggagtgggttgccatttccttcttcaggggatcttcctgagccagggatcaaacctgtatcctgcgctggcaggcaggttctttaccactgagccaccaaacggttttctggacaaggatgcagagagtggaaggtggaaatgttaccaccacagtccttccctcttgtcctgacctgtgccaaggacattttcgctttttgagcatctactttgttcaaggcaggatgctaagagcagagagaggaaacgaagtaaataagatctggtccctgcatttgagaagcttggcaagtagcctggccttgagtagcctatcccttctccaggggcatcttcccaacccgggaatccaaccggggtctcctgcatcgcaggtggattctttaccaactgagctatcagggaagcccttcggcaagtaagggagaccagctcttgggaagcgaaccaaggcaaggagggttgatatcgggaagaagtgtcaggtgagagctgcttaaagggccagagctgctctagcagagccagctctgactccccagactgggagagggccctgcttggctgccctgaggccgcagcagcagaggagccccttgggggaaggaggcagctcacctggctgcaggtgtcgtggctccactcatgcgaatccacaataatcgtaacttcacacgcgagttaacttcttttcccaggctctgccgagcttctgtgccagatggtgcttgcctctcacatctgatttactgtggggcagagcagctgtgcctccgcccagggcaggcccacatctggtgagcagttggtaaaagtctctgcagatgactctctccctcacagcctattcctcagggcaagtctctttctgtcacggttttttatatgctttcctctctgggcttatttctaggactgagttgaggatccgtcagccacagatctgcgtaagcaccttcatgctgaggaaaggctcttgctgcgatatacgatatacacgtaaggctgctaccgtattctgtaggaaaaatactcatggagaaagtgcagagacagatgtgttggcttcctacccaagagccatccctccctttttccctgtgtttgtgggaccctgattttatttcaggaggcagtttgctccatacagaaaggacctcggcccccaacttcaaaggatgagaactgactgcttcaaagtgaccccatccctctttccagtaattggattgggaatgtgaagatgaaccaggagtagccaatgctacataagtgaaaatctgctgggaggcttctgcgaataatttcactccatctctaaaagagagagagagatgccaagataaataaaaacatacgtgcagacaaatactcggagaaggcaatggcaccccactccagtactcctgcctgaaaaatcccatggacagaggagcctggaaggcttcagtccatggggtcgctgagggtcggacacgactgagcgacttcactttcacttttcactttcacgcattggagaaggaagtggcaacccactccagtgttcttgcctggaga

SEQ ID NO: 43297 - DNA, 1635 bp, Bovine  19866880726459
  misc_feature (1)..(1): n is a, c, g, or t
ngatacagagaagaccacacctacccagtgaaaactgactcatttgaaatgaccctgatgttgggaaaaattgaaggtgggagaaggggatgatagaggatgacatgtctggatggcatcactgactcaatggacatgagtttgagtaaactccaggaggtggtgatggacagggaggcctggtgtgctgcagtccatggggtcgcaaagagtcggacatgactgaacaactgaactgaactgaactgaacccagtgaaagctacccaaatcccacacgtcatgtctgaataccctgtaacacaatccctgcatttgcttaagagatgcttgcatgcagcaacctacaaagtgtgcattcttcctaagtgcatggcccatcaatttctatcactttctctggtaccttacatatgctcctaactctcatccaacacagcacccagcaaaagtaacttactattggcagtgaattaagatgaggaggctggacaaaacaggccagtgccagacaggatttcagtgtgcctgtcacagagaccgatggcttgggttcaaaccccgccattttttagtgatctgactctgaaaaaataaaaaaagattaacttttttatgcatatcagtttattgacctgaaatttgtaaaatggaatggtgatgatgatgatggtgggtgatgacgatggcatagctgaggagaatagttaaaataaaccagacaaacccagagcttctaataagcactcagatgctgtcatcattaaaccactgcaacttcagagccattccctgccactgagctgctgtgtgatctcattttagtaactagccttctctttacctagttccccagttgagaagctacagtccttattgaatagagttgccataaaaaaaactttattacaattgtctttatactctctccaataagctcatagcgcaaaccacctcaccgtcactccagggagccctgcagaaggccagcagtcaaggttagcccaagaactctggttagatacagggggaaaaaaaggtgaaagtgaaagtcgctcagtcatgtctgactctttgccagtccatagtagagtccatggcatcttccaggccagaatactggaaaggctagccgttcccttctccagggggtcttcctaacccagggatcgaaccaggtctcctgcattgctggtggactccttaccagctgagccaccagggaaccccaagaatactggagtgggtagcctatcccttctccagcagattttctggacccaagaattgaacaggggtctccagcattgcaggtggattctttaccagctgagctaccaggaaagctcataataaaagctgtcaaagcttagccagagaagaaatgcagaaagaagaccaaaaaatatgttattctgtcttcaacatataaggagacttctgatactgcagaattcaaagaatctccttactcactgcactggttgaccagtgaccatgcccctgtctgtttttaggatccccataacttcacaccacatctgtcatccatgggcctattgaccgtccttcttctagagagggacaagtttgggggtaggtatcaaataccttgcaggtataaagatagaaatca

SEQ ID NO: 43298 - DNA, 1719 bp, Bovine  19866880746351
  misc_feature (1)..(1): n is a, c, g, or t
ncattatttaggagaatgagttatgctcttgcctaattagtgttttaagatttgtttacaacttttacagaagtagacttttcagtcctgactcttccctggggctttccaagtctttgcaggttatggttactctatctactcctaaggattttaaagttttccatgctttaactcaaataagttaaagcttccaggaacaggaacacagagcaatcataactagcattaccaagcacttactgtgtgccaggcattgtgcaaactactttacatggattattttatttaattttcatgagaatctaggaggatagtactattaacatcctctttaaagaagaggacaccaatgaaccatgcatatgtaaaatagctagcaaatggaaatttgctgtatgactcagggagctcaaacaggggctctgtaacaacctaggggagtgggatggagtgggaggtgggagggaggttcaagagagaggggacacatgtatacttgtagctgattcatgttcgtgtttgacagaaaccaatgcaatactgtaaagcaattattcttcaattaaaaatacacaaattcattaaaaagcagagaaagccatgtctccaagatggtaagtaacattcctgaggttatctaggattatctaggttctctgggattcaacctcggagctatttgactccaaagccctaataagtagtcactttattgtaagaactctaactggaagccagaggacttgggttctacatgaccctatgtcaccagtcacatggtttcagggacagagggttcccagaagtgatgctctcagagtctgaaggtgagtatgcatttgtagcagaggaaaacacacttcaagcagagtatcttcaaagaattcaagagacatgaaagctacaagcactcaggttggcagcccttgagattctacaaagatgtacgtttaggtagcaacgggaaaccagtaacaaccataggggctttctcaaaatgattttggacacttttggaagacgtggagtaacctcaagagtgatcgaatctgacaaagttgcagggtaacccaatagcactaggctttagatgtcccagaaatagaattgtgacctggtgccctgagcttctccaagcagaggcagctcaagtcagaggccacttgagttccacaagacagcaagtctgtatcaatgtcttgattttgtttagtcattctagtcatgtccgactcattgcgaccccgtggactgtagcccaccaggctcctctgtccatgggattctccaggcaagaatactggagtgggttgccattcccttctctgggggatcttccccgcccagtgattgaacccatgtctcctgcattggcaggaagattctttaccagctgggaagccccatcaatgtcttcccatcctctttactgtaaggaattctctctcccacttcattttttactgagctgacaatcacagaaatgtgccctctgattaccagggtgaccatcattccaaggaggtcaattaagaccatctgcagggagtctcaatcttggacaaggaagggagctcaaaggggtaacagctaccatccaatgatctcactaaagggtgctggtccaactgccaaggtgcccagaactgccccagtgtctgctggcctaagtgtgctggttcccctacaaccccttgtaatgcactctaagcctgc

SEQ ID NO: 43299 - DNA, 869 bp, Bovine  19866880779654
  misc_feature (1)..(1): n is a, c, g, or t
ntgtaaacgttcaatgagaaattatttgcatcctttatttctcagttaactctccccagcatttaaatagtaaatatgtgaggaggggcaggcattcaccttcatcttacagagccttttgaatgagtagtttctggagctgctctgtgagaaaattttcttgtgtgtctaaaaatcgcaaactatttggaaaaacaaacaaagctggactgatctgagttgattgtttttagaaataacaaattgaccaaattcaactttttcctccctactcccatcagccaattttgggatagctataatctcattatgaaatctgaccgagcttgattctatgtgattcaatctccaggtttaaacaatctggaatgctctgtggaagaccttgaaagatttcccagcaggaaatggaaggctgacacgccagagaatgaatgaattcaggttttcagtttctggtgaccttgattagcacccagcgaagtttcttggctgtctgtctcctggcattcaccctcttcctctctccatagtttgatcgctcctattctgtctggaaggaccactgcaagaaatttcagggacgagaagggtcaacagcctcacccggctgatgaggaagcttagatttaatgagtttgcgtgaccagcatctattactctttgatgctttcctcatggttccaacacaatgctccattctcttcaagcaagagctattgagggaatttccaaccattttccagtttccatgttcttcatatcaaaacagaaaagtatctgtattaaaaatgtaaaagtgtcagctctttagacctgggtacacctatctgggggacgtgagtctgagtgaactctggggagttggg

SEQ ID NO: 43300 - DNA, 677 bp, Bovine  19866880823870
  misc_feature (1)..(1): n is a, c, g, or t
nccggtaatcagaaacccaactgggcaggtggatgggggtcagcccgtgacaagccacgagcagcgggggaaggcgtctgacctggccccggagagcctggagcacagtcaaaaattatttcagcgggagagtaacgcgatcagagcttcatcatcagtcaactcaaccgtattttcaccttaacaggtaacagtggcagcgagctgaccccagagaaccaagctcagctgcataaggtcaggcagtgggtggcctgtgcccccacgcgcctgagccggagaaataaccgcttattcaatctgtcagtcaccgagtcgctggaagcaccctccacgtgggaatgaccgcgagcacttctcctacttacttcttagcagcaggatgtgccctgctccacagctgtcaaccgggaccaggacaaagaagaagcttaagaggatctgagacaagagtctgcagacgcttccattttcactggccgtttccgtgagcttggctgaccgtgctggtcaatgttgactttttttttttctcctgcatgaaatagaaaagcagaactctgttgatttttgtgttttatggctgatcgatgggggtcagagcgagggctttgagacatgccgagggggaggaactgggccgctttttgatggcctcatttgtggcgtgtcttctt

SEQ ID NO: 43301 - DNA, 1152 bp, Bovine  19866880824153
  misc_feature (1)..(1): n is a, c, g, or t
ntctttttctggctggaggtatggggccttagcaatgcccacacggcatgacttggtcaagcaaattggcagttgtctgagagtctgtagtcaggattaagagagagcacaaacaagccagtcttgctcttttttttcttcccaatctctccagctacagtaaatcaagctgcctgacaatttttttttccctgccgcatctgaatctaatgcccttagcttagaaatttccattatatcactaagtgcatggcaagagcaatgggtgtctctgattagtgaagctgaagagtagaaatgaatcaccggacctttgtattctagaacgtgggtctgggatgagtgaatgcaggaggtcggtcaaaacacagccccggtgactcaattcttaaatgatttaaaatcaacataagcctggggacttactgtgaataaatatcaccatttaacaggcaataaggagaggggtgaggtggtcaggctagggaaggggctgggaagacacctgctcctggtgatattttgctcagtttccctcgctgtaaaatgaagccatgtgtcctgatctgctctcaggaggctgtcgctgtgagccttataatttagaaagtggctggctgcccttgctaagttgcttacttgtatcaggctctttgtgaccccatggactgtagcccgccaggcgccttggctgtggaattctccaggccagattactggagtgggttgctatgttctcctccaggagatcttgccaacccagggatcgaacccacgtctcttacatctcctgcattggcaggggggttctttagcaccatctgggaagcccaaaagtcaggcttctctgtccgtggaattttcccggcaagagtactggaatggatagccattcccttctccaggggatcttacaacaaattaaaggcaacttcacagcatcaagcattgggctttataccatgcaaggaggaaatagcagatctagtctccaactaaacttccaaccagggatgcaggaatgactcccattcttctcagaaaacgggaaaagatataggggctcttatgagccaactggaataaaagctagcacactcaactttctatcatttgaggatcaggtagagcaggagagaattctaaggacat

SEQ ID NO: 43302 - DNA, 1121 bp, Bovine  19866880841218
  misc_feature (1)..(1): n is a, c, g, or t
ngtttaagttctggttaaaacattttgctgtaggaagtgttcatttttatcacctgaaactacattcaagtaatttggtttctgtttccacaacagtgtcaaggtacaacatcaacagaatttatttgcttttgtgttttttttttttgaagaactcttccaccagctcaaacctggagttgaattttacagtcaatcttttctcctagacagaggcacatttcttaaaactgcactgtatgattttataatttaacatttctgatgaggaacagaaccttaggcgaaacaccaatagctcttaagaaaccttttatttgacttttatattacaaaacaggctcagaatcagaaaagatatagaatctgacacattgctaggtacaaagaagtcaattcaaaatgtgactgattgatccaaaatgattgaaggagagagtaaaatcagcttggttgaaattcacatgaccatgtgggatggtacggaatgctgctacttccagggtaggaaactctgtctcctcactagggaaatttacataaagaaactcaagcgcaagcaagcgctgcacgtttttttcttctctttttccagtagcttttgctttggttggacttggcaactatcagtagagaactatggccaggcagctcttttatcatgccttcctagcctgcctcattctccacattttcatgcaccaaactcaattattcattcacttggagtatgtttaccactttgtgttcagagagcagaattcaaactgcctctttgacattgaatgaagctgatgtccctcttacagttaaactaggataagtgatcaaatggatttggaaaacaaagcagcatttttcaacacatatttccttaaacattagactcactagattatctgcatcaaatattggtgatcaaatgcaggtgccaaatgctgtgtgcgatggggctcaaactgtgatccgtcaaacgatcacgcctgtttacagcttgtttcccgtccatctgttatgggacacatacaaaaaccaagactaaacttttagaccctcgaggagatatttgacttcagattttacatctgttaaatctattcataaaaataggtcgtatctta

SEQ ID NO: 43303 - DNA, 915 bp, Bovine  19866880843645
  misc_feature (1)..(1): n is a, c, g, or t
naccacgagctggttgcttttgtcatcagacagagggacttattgagaaaaaagacacgaaggctttcataatgacagtgggcctgattcactgggcaggaattgggtctttgtctcctttagtcagagcctggaaaattgtagatgccggtaatgtgaattgaacacagcttgagtgagaattgatcggtgtaaggtgtctgtggggtccacagggtggatctcgtacccttccaaaggccaatgggacatgcacttatttttgctgcccatcccccacattatactcacatagagattaagcatctgccacagaggaagacccatcaccattagttttatcatctctgaatgcaaggaacagaaatatctctaatgggaaacactgatcaaacttatggaccattgtgatgtcagttgagcaccctgggctgatgataaacaggatgggagctggggagtgcacagcgcgaggacagagatgttcaatacaggacagggcaatggctgtcagcagggctcataattatttgcctgcctttcaggtgaacttcaggacgaaaagttgtgagctggtggtttctagtggattgtctagaaactgcttgatgatctctgctgttttgggagttgacagagctttttcaagaactctcagaatggcccagccctgtcttgtgcagctaattgacctccccttgtcaaaatgcaatgcgagacctttcttttggtagacagttgttagaataagctatttcttcaaaggtctataatacacggttcctcctgtaaaaaccttggcacccttaactggaggctttccaccttccatgtgagtgataaagctggttcccaagaaggctggcctctctaacaggctcctggcatgacctgtctagtccttattcatccctg

SEQ ID NO: 43304 - DNA, 810 bp, Bovine  19866880844754
  misc_feature (1)..(1): n is a, c, g, or t
nacgtgaaagtgaaaagtgaaaatgaagtcgctcagtcatgtccaactcttcgagactccaggggactgcagcccaccaggctcctctgtccatgggattttccaggcaagagtactggagtggggtgccattgccttctccgcctgggggcctatagacctgaaaagaagtcagactgtagggaagcacagtgaaaagtgaagactgtggcctaaggttcagggtatgttgctgggggattagaggagggaaaggagaggcctggggtctctctaggaggtgttcccacatgaagctttgggagcaagcacccgcagctcagggtttgtccctgggatggagagatccattgctattctccacaaagggctttgttatttatctgtcatgttgtttgtttatcaagtaggtatttgacagacatgcactcagcagagcacatcagcggggatggtgttttaccagcaaataaattagaatcatagagttagcaaaggcataactaagcgcgcagcataaatatgtcatttggcggtgatgaattcattcaagtatagggatccttccagcatctctagcaaacctttaaacgaaaagctctttttctatcaggcttgtattttaattacaagcagcgatagtattagagcctcctccaggagccggctggttcagctctgagcggaagccccgagggacgccccccgcccccgcccagcacccccagccctgcccggcctggtgggccgtgtcctgaccccttctggccattcctcaggagccctgcctctctccctgctgaggtggcg

SEQ ID NO: 43305 - DNA, 980 bp, Bovine  19866880851920
  misc_feature (1)..(1): n is a, c, g, or t
ntgcgcggcttgacgacagtttcagcccacttcctatcagcctagctatttatattcagaggcacggattccacagctgtacagagtgcctgcgagtgactcaaatcagtctctcctcccttctcccttcccatctcagggaagatgaacaaagttgttgttcaagataatcgtggcaaaaaggcagactcgtcagggggtggaggaggggtctcttgttcccttcgtaagcttcctcttctgtcagagatactgttcctttctcacctctcattcccagataccctcatcccttttataatgaaacaaggagttggtgctgaccttgactttgcagaaaaggtattttgctctgggccatctctacaaagactctacaggtttccgggttagggtcattctataagtcaagctactaactctggctggaagaggagaagagacctgggggcaaaaccagaaagtactgatggtttagggccatgtagtgtcgggaagggcattgtttcgtgaggccaaaacactcgtcagctgtggagaggactggaacccaggccaggcttggcctcggagaggccggggtgacacaggcaagtctgctcacccttctggcctcagctttctcatctgtgaagagagggcgctgctcgagaggacctgttgtgtcgctttcagctatgaaattctgtgatagcacaaagatcattttccctatttctgtgaaacaataacagctctgggtttggaaaatgatctgacagccttgttccctgaatgaaaatgtgtctaagcgttttgctgagaacagcccagtctcccgcctagaaaaacaacgccccccaccaaatgcaaacgcggtggtggtggtggaaatgaagaataataccaccactttgtatttttacctctcgtgataaaacagtagttttagaaatcgtaaaaatgtaccagtttgacaaatggcacatttaaaacccgat

SEQ ID NO: 43306 - DNA, 1153 bp, Bovine  19866880852912
  misc_feature (1)..(1): n is a, c, g, or t
ncttttattttaatacctattatagaattttttgatggcaacctgctgttagagtacatctaactatgttaaagctccccaggccctgagcatgaaagaacctcttcagaacacacgctaggacaggtctaccttgttagcatggaaatgaaaataaaaagagctgctctggggcgaagaggaggaggcgggtgttctaataccaacacttaggaggccatctggccttgttctcgctggcaggcttcgggtggtggaggccgcatggtgacgatccttctctgcattctgctcagtgcctggcacttggtttagagtccccgtggctagtaacctagcttgcaaccctggcgctaaagggcatctctggtgcttttaggctgcagttgcattttggtgcaaggggatcagcaggcaggaaaacctgtaggttccctcctgagctttggtgacgtttcattagtgaaatgaaaatatatataattgaaataagcaggcgagcaccttccttcatctgcagatatgtaaacaggagccgccccagcgtggtccgagtaacagcttctgagagaagactgccttcacagtccttaaacgaagttccacttgccggctgccacaggaatgtgtgtcttgagtaattatttcactctagaaaatagtaatatgcaggtcatcctttcttggcagtacaaattagaaatacccaaggcaccagagccttctgggcctcagtcttcaggcccagaagaatacagagtggatgctgtaaataaaattaataattgaagtccatctgaataaaagatggttagacttgtttgtgctagtggtggaggcgacagtcattagccatctctcacgtattctggaaggccaggccctgcgaaaattgtatgtaatgatcagcctctcctggaaggatgatgcgttttttaggatgtttgtggtccatgatccaatggatccatgatccaattagggttagggttaaggttaggtgttcattcaggactccatagaaggagttagaatcattaacatcttctaaacattgtttatggactttttatgctattaataacaacagaagttgaaccaagaagagcagattgttttcgagagagtttggccaaacgatttccatgtaagt

SEQ ID NO: 43307 - DNA, 1599 bp, Bovine  19866880868775
  misc_feature (1)..(1): n is a, c, g, or t
nggtcccttccttggcatggttttcaaagacacatttgttgtcttttttctttcttttaatctttattgtagcttcgcagatgctgcaattcctaaaaacacaggaagttcgattggggtgggatcactgtgtagatagatctttatcttttcatctatgtaaaaaaatatacaaccgttaccccatagatgcagaatgtgtataatcagttttacaaaccaatcagatcttcttcctagttgggactctatttctccactctctgtcaaacacagtatggctaaaaggtataatacaaacgtagtatgtgggacctccaatgtaacacagttgtgtatgctgctgctgctgctaagtcgcttcagtcgtgtccgactctgttcgaccccagagacaacagcccaccaggctcccccgtccctgggattctccaggcaagaacactggagtgggttgccatttccttctccaatgtgtgaaagtgaaaagtgaaagtgaaatcactcagtcgtgtccaactcttcgagatcccttggactgcagcccaccaggctcctctgtccatgggattttccaggcaagagtattggagtgaggtgccatcgccttctccgacaattgtgtatatatttattcaaacttttgtgggaatctactctaggaattcatttatttagtacaactggttggacaaaaaccgttaggctaactctcttctctttagtatcatgaaaggatgcttacataggacaaatgaggtgtaaatctgtaataatgatctgattttctggtcaaaacatttcacctaagggaaagatgtgctatgaataatacatattcactgctcctctgattattgtctttggacggttactcactcttaccctttcgttggtaggtacaggctgagccattgctctccagtgtcagtgtggaaagcaacgtaatttatatgagaagtgtatgcatgatttcagtctcttctgtaaatggaggaagttgccacaatgaagccaaacacctagagagaaaggatgctgacaaatgcatttctgagctgtggaaacacctggaaaaggttgggttttcctggaaaatgcttctatttttctcctttctttctctagacaagaggactcatatgtcatggtgaacatccacaaattagccaacatctaccccctccagtattctctcctggagaatcctatggacagaggagcctggctggctacagtccacagggtcgcagggaatcggacatgactgagcgactaaacacatcacgttaacttgagagttttgcagcatctttctgtcactcattccttcactgtgggtcccagtggtgagcagagaacacaggtacctgtttctggggggtttctagtctagctaaggggaaccctgcaggaagaacagaagggctttgctcactaactgaagttctagaagcaacaccaagatgcttcaaggcctaagaatgctgcttttcttagccctaattttgtgactacagatcactttcttgagatttaaaaatgtcaagtttattttcgatagtgtcaagacctgacagctatccttaatatttagca

SEQ ID NO: 43308 - DNA, 1851 bp, Bovine  19866880875455
  misc_feature (1)..(1): n is a, c, g, or t
naaaagaagttggcagtctgcaaggtgaaattctgtcaccagaaccagaccatgatctcagacttcctgcctccagaaccgtaagaaaataaatgtctgttatttataagtctatgatactttgttttagctgcttgaacagacactctccttgacaccttacctcatttagtttgtatctttttatggaccttacattattttgtctctgttagactcaattgttaataatgtctacattgtctttattctccattctcatgcttccaaaatggtaaaatttttgaagacagacactatttatatctgactactctataactcatagcatactctcctggatataataggagctcaatagatatttgttaaatttaattcaataaaggtaaaatcatgtagtcctcatgagaaaaatgtgctggccatgagaatcactgtctaccagggaatctcccaaaagattcatgtatcaatttaaggactttgtaacctacaaatgaaaaggatagtttttaccctacttcatattttaagcttttcccttggacatgggggaaaatatctcatccactttatttatttattttagggaaattgtgcttaaacgagggaatgagaattatggtaacaagtatcctgaaaatgcattggaattttctcaacatcacctttctttagactaaaacaccttcttggcatttcgattactaaagacaccaggatctgtgagtgactttagggttcctggaaagggagtttttgcttaattaggtctcactgtatgaactgcagtttgattcacactagtggggagaaagggccaggaaaaacagcaatcatgctgcatccttcctgcctgcttcttcctcacttcttttcctgcatctctttctaaaccatctctcttttctacttgcatccttccttcttgctgcttttcacccttctctggttgctcaattataacttagctccatttgttaaaaatgtatctctcgcccctatacctgctttgatttttccttatctgcacacaatttatctttctcagagatgaggaagaagttcatttagtattgtacagacacatcttctccaaaccaccctagaaagaatgatcgctattcagtgggtgtactctgatgattaaggacaagggggagatttagcaacccgagatgcctgggcagcactgggcagaaataattgctaattagtatcttcctaacttgggagcattaattggctttgagggacctgctttccagactctaagtgtattttgttcattttagcttgctatataggatgagagaagaatgacaattagagaaatagtttcatttcagtaattcaacctaatgaagacttgtcatttgaatgattattcagtagttggtccttgttgttctgccaagttttcagaaaaacaaactcagatattcctccaacctgagaaaacacatcctttcctttaaaataattcagagaattttattttatttgtggatgcaggaatgctcctccaagaactgtcatcttacacaactatataagcagagagaaatggaaacagggtatcttttgaaacatatcattttcatttcagaacacatcatgcaatcatataaaataaagtgcttcaaattgatatctttaatttcctcctagaaagaaaatttgtcagttgttttatgatttatggagatgaaagacatatgtgagaacaagttttgtgattaattaagtgaaattacttgagcataatactcgtaatgatattatctttgaattaaaatgctcttgaataagattgatgacattttcaatcagcagattaattaaact

SEQ ID NO: 43309 - DNA, 2466 bp, Bovine  19866880895038
  misc_feature (1)..(1): n is a, c, g, or t
ntgaaagtggagagtgaaaaagttggcttaaagctcaccattcagaaaacgaagatcatggcatccggtcccatcacttcatgggaaatagatggggaaacagtggaaacagtgtcagactttatttttctgagctctaaaatcactgcagatggtgactgcagccatgaaattaaaagatgcttactccttggaaggaaagttatgaccaacctagatagcatgttaaaaagcagagacattactttgccaacaaaggttcggctatggtttttcttatggtcatatatgggtgtgagagttggactgtgaagaaggctgagtgccgaagaattgatgcttttgaactgtgttggagaagactcttgagagtcccttggactgcaaggagatccaaccagtccattctgaaggagattagccctgggatttctttggaaggaatgatgctaaagctgaaactccagtactttggccacctcatgcgaagagttgactcattggaaaagactctgatgctgggaggaattgggggcaggaggagaaggggacaacagaggatgagatggctggatggcatcactgactcgatggacgtgagtgtcagtgaactccgggagttggtgatggacagggaggcctggcgtgctgcgattcatggggtggcaaagagtcggacaggactgagtgactgatctgatctgagcttctccacccagtacaatagccattggccacacgtggctaatgtgaccaaggaactgaattcttcatcatattgaattttaactcatttaaatttcagcggccacttgtggcaagtgattactgaactgggtggacggcccatgctggtcagatcttgataagtccagaccgtttggggagacaccagtggcctgcccttgcaaagactctgttatccccatggtctgagccagtcctggagtgaacaaggtacagcccagatccttccatcccagcacccagccttgccgcccctgggtctcgtcagccgttcatggagcctctcagtcactgcactggggatctgacctctcattttgccctggtcttctgtctcactgtctgcctagcttctcattcacagctaggggaggaattctaccgggagctctagcccagatgactgaagccttaagacttcctcctgccacccctgttccctgcagccctgtgtctgatggagctgctgctgtgagtgaaccgagtgcccaacagcacagcatcgccagccacctgtgttcagtttacacccatggccaaaatcggccgctgctctacccactaagcaccaggcaactctctcagacgtcaggctagagaaatgacccgggctcccccaccactttggccacctgatgcaagagacaactcactggaaaagaccctgatgctgggaaagatcgagggcaggaggagaaaggggcagcagaggatgagatggttggatggcatcactgactcaaaggacatgagtttgagcaaactccaggagacagcgaaggacagggaagcctggcgtgctgcagtccatagggttgcaaagagtcagacatgatttagtgactgaacaacaaccccagtggtgctatacacagcttcttttcccttcctactgggcctctggttacagttgggtttcagattcttcattcagcctaaagttattcagagttaagttatgttcccagtagaactataaaaactcaaatgtacatgaacagctaggtaaatattttgtttacattcataaattccccgagaaagtaaaatatagattcacttattatatttgtggccataaaaagactacatctagaactctggtaaaacagcctgctgctgctgctaagtcgcttcagtcgtgtctgactctgtgtgaccccatagacagcctggattatataaaatcctcatgttctctgacattgacggttcatataatttagggaaacatctatcaaaaccaggaggctcgtacgggcaacttggtttataaatacttgacagaaacataaatgtgtatattccccaaatgcaactgtctatatgagttgcagcgtttcagaaagaagtggctgtttctaaagtgtgtgaaggtgattcatcctctacaggatgatttaatccatcattctgcccgagaaggtgggggaggtggcatgctggccctgcggttctgaactctgtcgtacacacttggcggcccttcacttggggaggcacaggcttgaaaataacatcctttgagttccgagtgttctggttggaaactcatatttctcagctgggagatctgagggcaaagggtacttgaagcgagtacagcctgtagctgttttcatgatgtgatgaaagagtcctgatgccttgagatgcctatggtcctgaacaatctggaacaacttggaaatagaaaatgaaatagctctaaatgtttta

SEQ ID NO: 43310 - DNA, 3150 bp, Bovine  19866880895411
  misc_feature (1)..(1): n is a, c, g, or t
nacctccccccagcttcttggcgtgcccttccttcacgctcctggtccagccacgctaggtttctctgggtcctggattcacccagccctctgacctctgagccttcacagctctttcctttgagcccagcaaactcttaggtcaagtcccagcgtgggtgtcctttctgctgggacagtctgcccacctcaggccttggttaactccctgccgtctgtacctggaaccccctccacgccccatcacatgtgtgcatgtgtgctaagtcgcttcagtcatgtctgactctgtgtgacccgatggactgcagcccgccaggctcctctgtccatgggactctccaggcaagaatactggagtgggttgctgtgccctcttcctggggtgtcttcctgacccagagattaaacttgcatctcttattctttaccactagcaccactgggaagcctctccatcacaacacacatcgtgcttgatctttgtcatttaggaggtcatcttgtctttctacactgttagactgtgtgcccaggaagatgaggatggtctttattccacattaatagctgctgtagccaaggacccagcacacttcctagccatattaggctctcagtaaacgtttgttgaatcacaaactctggtgtgagggcccaagacaatagttctagatctttccttttgcagtgaattctacctgttgaatcgagtgacttcttcccaccctgacacgtaaggccaggtgagggcattggtccatttttatgcggttgcacagcatatctgagcaagggcaatcagcatagagtcacccaaagggaatgctgtcaatacagagtcttgccttgtagcatagacaattgggataatccatataacacaaatgtaatatttttctctaatgtaaaaagattttttttttaacctccaaagggcaactgagttatccagaaagttacttcaacccctggcttcacattaggtgatgctgcctggacctttaccagcctttcctgcatggatccagtgactgactttgaggcagctacttgataactccttacctatcatccgtgctgcctcgtctcagaaattcctttcttttaaaaaaactttatttacttatcctatttttgactgcactgggtctttattgctgcacgtgggctttctctcattgtggcaagcagggaccactcttcactgtggcgcccaggcttctcatgctggtggcttctcttttgcagagcacaggctctagggtgttgtggctcatggtgtatagagctcagtagttgtggcacatgggcttagctactctgcagcatgtgggatcgtcctggactagggatcaaactcatgtcccttgcattgacatgtggagtcttaaccactgagccaccagggaagtcccagaaattctctctctgttagagctgaggcaccgtgttctctctccttgacctctgcagtctgactgggaaaagacgttgttgctgttcagttgtcaagtcatgttcacgaccccatggactgcagcccaccaggcttccctgtcccccaccatctcccggagtttttccaagttcatgtccttgtcctacggactgaaggaagaaggagaagagggtggcagggggatgagatgactggatggcatcaccaattcactgggaagaggagaaggggcatccgttgaaagtcaagtaaataagcagaggggagagagggacagaggcttcctataaaaggaagagagggactttactgtgataagttacactgcataaaaatgatgcgtatgtgcatgatagctttctttctcattgccttctgacacttgggagtttccttttacatagccaatcgtctctcctaaccaagacattacaaatgaagcagagagaaaatagcaagtgaagaagtgagagagtttctgagtttgacaagccaaggcgaagttaaaacaatgatgactggtgattatataacagtcttcaaagttggcatgtgaggtttatggtactttcgttaatgagatgtttgagtggagaaacaatagctttcaagttaagttcaatcaaagactcaaaatacctttatagctttttgtttttctcttgtcttctcgagacaggcaaagagaaatctatttcttgtggcagtgcctatgacaacaaattcatttcactttcttacttctatgtacatgacagacaacaccgagggacttttggtatcttttctacctacgtaattaagctcctggaggctgcctcccactcctgaaacgatttgaactcatgcttgggaagtaagggcaagagtgtgggtggggactggatatagttaataaaccagagaccaggaaaggatcatgttgtcttaatcttggatatccaatcatccatcttcatggacagtaactctagtcttttatgggagaagttgtgaattcaggaggatgaattccaagggaagcaagagagggtgaagttctaaatgcagaggtattttttagcgcttgttataatcagggcaagactggagacactgggaaggaagtaaaaagatgtaaaaggcaccttgctctccttgttggctgacacattagcatgggtatctgtgtgcatgtaactcaaggcagaatcttgcccttatagactgttttaaagttaatttcagtcttggacacccaaacccagcaagagaatctcaggggaaacccatttaggaaaagtcccatgagatgagcctatgccttttaatttttataacaacaacaaaaaaataggtcaactattttcatagctgaagagctattattttcagtaatattctggttaccatattgtctagggggactttctatcttaaatactttgattaaataagatattttaggattctagacttgtgcatgcgtgtgtgtgtgtgtgtgtgtgtgtgagtttgtttgttttcaattaagtgtttgtgtgttagtcactcagtcatgtctgactcttttgtgaccccatggactgtagcccatcaggatcctcagtccatgggattctccagacaagaatgctggagtgtcatttccttctacaattaagtgtttaaaagatcctaaataatgaggatattttctagcatttcac

SEQ ID NO: 43311 - DNA, 1505 bp, Bovine  19866880911681
  misc_feature (1)..(1): n is a, c, g, or t
ncaaaaaagaacagatttaaaagtggagtcagatttgtttttcctaattatacacatgcccaggttgttgtttagtcgctaagtcaggtccgactcttttgcagcctgccaggctcctctgtccatgggattctccaggcaagaataccggagtgggttgccatgccctcctccaggggatcttcccgacccagggattgagcctgcgtctcctatgtctcctacattgcaggcaggttttttaccccctgagcacacaagcccaggaagcagccctaaacactaccatgttaggaagcatcttctgagtgtgccattctcagaggcttttgtcaagtgacggtcttgagtcccaaacaaatcagtcctggtaacaaagctgttttgttttcctgctggttagattctaggggaagccaggcagagcctacatgtggatggcatgaaagggttgacaaatgcctgaaacaaaagtcagaagcaccttcagccctaccaagggctgaagagccacaaagaaatgaagaggcccccagcgagactgcctccttcaccacacaggcggctcactcctgaaattcctaaaatatgagtgtctgcaacactctgcaggatggcttggcctacactccagcaatccgggacctctgatcccagccatcctgccatgattagtctacctgccaggaccaggtgtcccccaaggtagaggtcagcagctggaaatcctcaggtgtggatccctctctcctctcgcagagcccagatccctacctgcgctgctgtctggcagggtaatgtcactggaggcctcattaacagcagacaggacagaggcatcctatgacttctggcctttccgcagggtttgaagtttatattacagaaggaaggaaaagaacagatgtcacaacttgtcttttccttttttcatcccatagctgtcactcacagggttccaaacagaatgaaaagagcccaaaggaagcctggcaaatcacccggcctgggagggcatactggggtgtcgcagtcattgcgttaaccagagaggacagtgacccagtgtccttccctccttctttctctttcaagattttccttcgacttgacacaggcttttggctgccgagattcagccagatcccagcaggcacctgcctgggccagtactggacgcagcctgtctgctcgccttaggctgtcttcaggaatccttgcagagtcacagggggagcaagtgagtgcatttcatcccctctattcctagctgtgtctgctaacgaaagctttctgttctgggatgcccgggggataggggtcggggaggagacaggctgtcccatccagggctctctggcttcccagtaagattacagagcagaggggagacacattttggacagcatcctctagctgatgcaacgattccttctctagccttactctgcaatgccacacagagtttctcatcagacagaggactagaaacgagttatgagctg

SEQ ID NO: 43312 - DNA, 1112 bp, Bovine  19866880932314
  misc_feature (1)..(1): n is a, c, g, or t
naaaaaaaaaaaaaaagaaatgcctgaacatctaaattctttctcttaattatcctcccgaggaaagcaggccaagcaccagggtgcaaaaaatttaaaccataaataaccagccgaaaggaaataaaagaaatgacaccagaataaactaagctattaactgaaagctttacatctccgtcctcctcgggtctgaaaaatctaagggaaggtggttaagtattaattttccaaagaatgtcattaggatctgcaggaattaaaaatggatgaaggaaatatttccttcctcatgatttccggtggtacttgggccctgacgcatgaaacattttggagagtgtagttgcattctctccctgaggacaattggtgctaagggacctctgggtctttgtcgggggtggggtgggggcgccagtattgcctgggtgtcgggaggagggccggatgggagagagggaagtgagcaaagtaatgggtggcgactgaatgcttcccgagataaatgcgctcctgcctggatctgctgcataattgtttcttcaaataaagaactccattcacacctgcagacctgtcaggcttccaattattggctcgcggttcaatttcctggctgcaactccagccttgggagtggagagaaggggtgtgtgtgatggcaacacggagaaagaaaggcgtgggcactggaggcgaaagcttcaggtgtgcgggctgcgaggcggaggactctgcttccttctcagtgcacccaggcagcagcagtttgatgatgcttgcagagtcacttccagctgcctggaggcctggggagtctttgtagcttcaagtctgcttttccaggcggacttctgtggcgaagacggagcagagcccggagtctgcaagtgtgtgcgaggggctgccagaaaccttgccctttgtctcgcgccagctcacaggtctgggagccagcccttggctcagcgagacagaggaggcttggcttctccgtgcagttgaaagtaatatgagaaaagccaggtgcaggaaagcgtatatgagatctcagtattgtaaaaccaaccttgaccagccgcccaaattctgtgtgtatttatttaggg

SEQ ID NO: 43313 - DNA, 1102 bp, Bovine  19866880934217
  misc_feature (1)..(1): n is a, c, g, or t
nccatatgattcattattaataaaagaaaaagtgtgtattcccatttgctaattatttttcactcatttaaggccaaaaaaagtgctttaaaccctataatttggtcaccaattagtctttgatttactctgatgtacttagaggttttttagtattaaaaaaggcttgcagctgaaaatttacatttaaaaagtaattaatgccaattcaatgaagaaatcctcagtttcctgtagaatcacattgaacttcaagcccttttaaaggatggaaagaattgatcatcagctaagaggtgcttccttggttctctgttggacaaaattctttgtccaggtaaatggacatcagaccccttcccacttctctttagctttgtccccatcactcttcatacctacatgtgttgttactcagaagacagcatttgacgaacggttactgtcaagttccattcctccctgttccagccgagcgcttcccagacacagacggtcaccaggacagtgactcaagcagagccgcttgcgtctgatgtcagctgaagtcctcccgcccatccctttactgctttcttggtttctgagccgtcatacacagagttatctcccccgtgtgaactcaccgtctcattctccatctccctctgtcaccccccaaaacaagagcccctctttggggtgggagggtgtgagggcctgaagcagctggcagccacagagcagtgttctagcctgcaataatcatcctgccattagaagagctgcaactgttggaaaattaacctctgcaaggctttctgatccagataaaggagagtgtttgacagtctttttagtactagaatgtggaggcgttccatcttccttttgtttcttgggtttctttaattaaaaaaaaaatttttattttgtactgggcttcagcctgattaataaccttgtggtaatttcaggggaacagggaaggagctcagccatacatacacatgtatccattttcccccaaactcccctcccatccagactgccacacaacattgagcagaattccatagctctacagcaggtccctgtggtatccatttcaaaacagcaggtc

SEQ ID NO: 43314 - DNA, 568 bp, Bovine  19866880965887
  misc_feature (1)..(1): n is a, c, g, or t
ntactctctgaactcctctttggagagtgttttagaagagtttgcaaaaggacattgatggattcctgcagacaaaagtttaaaaagtaataatatctgagctgggtgaaaaaaaaagaagatgctgaagtgttcccactgtattctgctgatgctttaagttctacacggtagtaattggaatgggatttcattacaagaagtttttacccactcagaccaactgcatccttataagagtgacgaagactaagtgcacctgttctgaccattaccttcatggtctccagggaaacagcccaaggaagttatcaaagctgtaaaagtagaggaggcaatcataagacattgccaacaagctcaacacttcaaatacttggagctgtaaaataaataacaaactcatacaatttggcttaaataatcatgagcaaaaaaagtcttcatctccttttctacttatttattttatttaaaaacagcccatttcccttgaaaagtattattcatattcctattttcttcagagaatatggtctccataatattggcaagaacggtgcatttt

SEQ ID NO: 43315 - DNA, 1420 bp, Bovine  19866880982335
  misc_feature (1)..(1): n is a, c, g, or t
ntttgattttctcctacaaggggtacagacttgtgagactgtaggcagtaggtcatcatattctgacccacgaattaacaaaggactatcttgtacctttttgtgaaagtccttcagtcgtgtctgactctttgcgaccacatggactgtagcctgccaggctcctcgtccatggaattctccaggccagaatactaaagtgggtcagttcagttcagttcagtcactcagtcatgtccaactctttgcgaccctatggactgcagtatgccaggcctccttgtccatcatcaactcccagagcttggtcaaactcatgcccattgagttggtgatgccatccaatcatctcatcctcaagttgccccttctcctgccctcaatctttcccagcatcaggttctttcaaatgagtcagttcttcacatcaggtggccaaagtattggagtttcagcttctgcattggtccttccaatgaatattcaggactgatttcctttaggatggacttgttggatctccttgcagtgcaagggactctcaagagccttctccaacagtgggtagctgttcccttctccaggaacctttttgaggcctctacattaaaaaaataataataatggggagatagaggaaggtgtgaatatcagagagacagaactgtagtaataagtggtgatttgtcatcaagagaagctgagcttggtgtgatctttccagaaacagttatgctccttttcatacattggggcactcagcctggggactgtgcctgactctgaaagtaagcacagtattatttctgcagaattatacagagcttgaccagactaggaagtcatttcattctgaagacttgaatgaggactttatccaaggctcaatccaacaaaaaaaaagaagaaaactaaaagagataatattattttttcttgggggtaacatttataagcacttcctactaaatgctttttgagtgggttgtaaatagtaacagccttgagacaaaggtggtggtgtttacctgggagcctggaaatatatcacttattctacctgtgcctctgaattccaggctcttctcaccatcgcaccctgaactctccagttcttagtacgaagaagtcccaaagtagtaatggtgtcttggaagaaaatagtgttgtcctaatttttcaaaatggaccaggaaaataggtcaagatgaatcttctgaaatcactgaattgtaaccattcaaaggtttttgagaaaggtatggaaaaagtaaagagtgagctagctttaatgaggctaaagtgacagtgcaaatctcatttggcagaaatattgtatctgatctgagaaaggagcattactttcttagagctgggttctttcatgccaagatactgggcaacgtgggggtgaggtaga

SEQ ID NO: 43316 - DNA, 1435 bp, Bovine  19866881051020
  misc_feature (1)..(1): n is a, c, g, or t
ntggagatgcttctggagattgaccatgggggaggctactagaggagtgtcctatacatctagattttggaaagacaggggtaagctttctcatgggctaatcggacactctgagcgaagtagcgagttcagaagcatgttgagaagactctaagagatttgcttgtcagggcagggtgtctccaacaaaaaggctgaaagggatatatcactggagcagcattgagaggtgagtggtggtctcggaatggtgttggagatagtgtgtgtgttttggggtgggtattttccctttaattccattctaagttcccacacccaccccagtgtttgaggagccagaaaaatgtttgtgatgcagaaggcaaagaaataaggaagatctagataaaaactgaaaaagtaaaaaaaaaaaaaaaaaatctaccgaaatgatcagacatctgttgtactcagtgctatggatgctctcctgcatatccttttcacctaatgtatcaatctgccagctgccgtgaaaggtggctgctaatagctcacagctgctctgtgctgttgagacgtgcccttggtcaaacaggaactaccttgccccaaaagttgtcagtctcccgttagctaaactcaatacatctagtattttatagaaatgatcaatttttgtgctgctgggatggcatgttaaacatattataagtgttttggaggaatgtgtgtttctggtaatagtgaaataaataaacaaaatgtactttacaaaaagtccatttgaagcattggcaagctcctaaagcaactacagttggaggagccaagatcttggaaagaaaagtgccaagagaggaatttgacttttaggcatgcttttcccttcaagatatttgccaattccaaagacgcagcagagaggctgagaaactgagcagaaattgacagctgaaaagttgagaagtcaaacggagtttctggtggtctcatgggccaggggacaaaaagtggacttcagagctagttcaaagaagaaaacacggacaaatattccaggattgtaataggcccctgggtggtttataccgcgggagtgagagagagccagaaacagattagccctacaaagcagagcccagatttgagtcagcttattccctgatgagattaaggtgatctttctctgttctgtcagaaggaaagctaaaaactgtcttaaaagagttgacgttctccagaatctcaaactatttcatatatgttatctagaattcaatgcaaaatcaccaggcaacgcttgaaggtaaacacgttcttgaaagcagaaaaaaaagcagaacagaaacagatctggaggggatccaaacaatgaagtcacctgacaaatttaatgaatggactaaattaggaagttagctgaagcaaataataaataatcaaatgtaaa

SEQ ID NO: 43317 - DNA, 1291 bp, Bovine  19866881095023
  misc_feature (1)..(1): n is a, c, g, or t
naaatcagatgatgtgttttatgatcttaaagggtttcccttccaatagggaagaaagacacacccaagtgacagtcatgggggtggtggtgagtgaagtaagtgtgttaataagagaggcagaaggatataggaggaaaaactatgattgattccgctgggaagggggctgggaaagatttttagggcaggcaacattaacccaggtcctgaaggatttgaaacagttgcttctgatcttgctgatgagaaatacccagaaatatacacccagagccatctactcggaaaaagaatgtggaagaacaaagcttattaaaaaaaaaaaaaaaaacagatgtgtagagatttaggaagcaaaggaaggaaactatgtcagaggaaatctcaagggtagggcaaagtctaattacccaaattgaaatctggcctttgtagcagacctaagacttctcttgaacccataaagacctgctggagtagcagaagcatgcctgaaataattagctttgtatttcagctcttgtttgggaattcttggtttgtttcagcctttccccagaaagcaagagaggtatttgagagtggctagaaaattgcctggacagtagcagggcaggaaaatgtaaaatcaataaataatcaggctgaattttaattgaatatatcaccaaggccctgctgacatgtaaattttaaaaactactcactagagaaaatcagccctttctcccttgtggagactgggtttcaggagatgcataaagcctggcttctgtataccttccttggcagatcgcatattctgggtttcctggtgtgcatagaggcctgtggtcagccacttccctgcctttctctttcctgcataagggaatacatatttactttggaaaaaaaaaatcagttaacctcaaattcatgtagaaacaaagatctgagagaggaaggcgggctgctttgatgttgaaccagtccctgaggggagaaatgtggtttcctctcagaagagggtttaggctccgtcagctcatcactgtcactctgctttgcgaaatctcaaggccgatgagggcgtcacatttgtatcctagagatcagtcttgttttcatttgacttgtgctttctgtaaatattttctttgtactctcgggtagcatttggcccagtgatgtcttgaatttcgagtgagattcgggagcacagaggcataccggagagccactttgactcaaactggggctcaggaagcccccgccccaaccctgcacccctctcccccgggaccag

SEQ ID NO: 43318 - DNA, 1315 bp, Bovine  19866881109823
  misc_feature (1)..(1): n is a, c, g, or t
ngttttatttttctctattttctgaacaatccttcacctataagagacttaagattatatggcctatgatttttcttcccttttgctttaaaaagagataataactaacatcatcagggtttcctaagcacctgatacgatattatcttatatagtccttaagacaatcttgaaagtgaaagtgaagtcgctcagtcgtgtccgattctttgccaccccgtggactgtagcccaccaggctcctctgtccatgcgattctccaggcaagaatactagagtgggttgccatttccttctccaggggatcttcccaacccagggatcgaaccctggtctcctgcattgcaggcagatggtttatcctctgagccaccagggaagccccgagacagtcttacaagatactgttattatccccattttgcagatgaagcaagtaagatacagaaagatcaactaacttgcccagagccacacagcaaatcaatagtaatgttcatattcaaacctaagcaggatgattgcagagcctgcagtcagcagccatgttttgtttcttttcaggttaagtgggtatcccagagtatcctaacacagagaacacacaaaaggatgggtggcccaggacctgagaatggtctagggtttgtgagcatctgacgctgggatcaatccaaaatcaaagtttaaacaccacttaccttcacccccacactgtctcattatctgactgctaagtttcaaccaggtctgtggagtgtgttgctctgcggtttggtataaatattgaaattcactatgccagttttgacagaccaacaaatgtcggggggtggggggaagctttctttaaaatacaaagtaagcagtcgaaggaaagagctggttgcatttctagaaagcaaaccccagtaaaacccagcgactgagtaattctaagaggtgtctacaaagtgtgctttagttacaagaatgaattggatgcctctgaagagctgcctctgttctctgtttggacaaacactttctgccaacttccctagaagctttatctgatagagtgagcctgttggaaaaagaaacggtgggctctggcttttttctttttaagttaaaaggttaaaaaataacccctgtctccatccatccttagaattacactttcctgcaaagttcttttcctggtagatataatcctaattaaaaataaattacatgctgtatagaatttgaaagggaaaagataatcctattacgtatgagagtatatcccgattttctttcccgctaaactgtaggagatatcagatctgg

SEQ ID NO: 43319 - DNA, 1149 bp, Bovine  19866881115024
  misc_feature (1)..(1): n is a, c, g, or t
natgattttacctagactttgctatttaatacttgtaactacactataaattaggtattattttcacagtgttacagaagaggaatctgaaactcagaaaggttaagtaactcacctaaggtcacacaattaacaaggggagatttcatcaaacaagagaagctttcgtccaacctttaatgtgtgttaagccttttactagctgcttccacatttggtgtgtcatgttaattcttaacctttgagaaagggataaggatattttttacagatgaagaaatatcatttcaggggagttattaagttactcaaattcaaccaattcaagagtgaagccctgggccttctgaattgaatgtatgggttttcaggcttcccatccaccctgctagggcctgagagggaagttctgactccttagtcactgaagcccagtttggtcaaagcagaattaaggggtagacaattatgacatttacctgtttcattatttctattactggagctttgcatctgccattagatacatatttaagactcctagggggaaaaaaaattcctgctgaattatcagtaaccacagtgaatcataaacctgtagcgcttagcacttgaacaaatcccactgagatgctaccaaaattagagaggatttgtgtttacgcgtactattcccagatggcctcctgcaaggcacacagcaaacagaaagagcccatccttactgatgcaaaaccaagcctttcaaacaagttacatgggaccaggggcatggtcctggtcctacaacacctcatctcttccacgttggtcatgtgactgcagactctctttgaacatcaagtgggtgaactgtgcattcagcctatctaaatgtgtggatttccagaagggattggaggtggtcagtgagggagcaaaagttggcagaagagtgatcagcctgccttctgagctaatctgagacaaaattgaatagaacttactctgtacctcattgctatacctactgggtcaaatcaagcatgctataaagtcctgatgtaacaagaaagacagtccaaaaagaaggaccagaagtgctctagcaataagctatcttctgagagaaaaaaaagaaatacccaggacagcttgaaaagaagggct

SEQ ID NO: 43320 - DNA, 1979 bp, Bovine  19866881139566
  misc_feature (1)..(1): n is a, c, g, or t
ncaacatttactgtctggccctttaagaaaaaggtccctagtctaaactgcagactagtatcaaattattatggggtggttccatcacagtgaaggcacatgctggaagatgtgcaagaattatacttgacatgattagaattaatcaaaaagtttccactagctttgagggacaattccaaaggtgtgtagagagtagacaaagcataagcctttattgaattacccgaaatggaaatttgtctttaaaatgccgagtcttgtttttcttcattagaaagccgtcgctgatacatgtacagtatggattcatcacagcagcaacattctaattgcaggctgtgaagagttctaattgaaataagattaatgaagagccatgccagcctcctacaatatcacaatctgtatgaacacttagcttctgtgagtcattttctgccccaaaataactcagattaaacagcaacttccaaactaatggcaacattttccgtccagatttctttttatgtcttgcatcatgttgcagggtacagcacatgaagcaagactcatcttctgccatcagctaatgttggtaaatgtcaggcatttaataaagttaaagggcaacaaagttttaaaaatgtattctgcctggcaatcagcccttgagaagccttggaaaaacttggtgctttattgactggatcagaatgagaaattttcttatcaggttctggaaacataacccaaagcccttagatattctaaatctctatgaaggatgtccatatagaatacacccacatgtttgcatttgattgtacctatgtgtgtattttggagaggggaatacccactccagtattcctgcctggagaatcccaaggacagaggagcctggcgggctacagtccatggtgtgacaagagtcggacatgactgagggattaatacgcacatgtgtgcatatctggggtttccctggtggcacacgtggtaaaaaaaaaaaaaaaaaatacccgcctgccaatgcaggagatgtcagagactcaggtttgatccctgggtcaggaagatcccttggaggagggcatggtgacccactccagaattcttgcctggagaatttcatggacagaggagcctagtgggccacaatccatcgggttgcaaagagtcggacacgactgaagtgacttagcaagcatgcatgtatgtatttagggatatttttgaaatataatggtaagtgttctcgtgtataccccaaatgtggattttgtgtaatggcaatttaaatttaggtgtttgggagccagggcacagttcgtaaaatgagctctcgagatgtcccagttgctcagacagaagtattgaatactctctacattgaccaaagggatggaatcagcagagccgtgacaactctgcaaatggatgaggggtccatgcttgggggtcacccagtgttctttagggaaggaatgtcttcttttcctcaatctaccttcttttctaccactggactcaaagatggaaggatgaggtttctctccttctattgcctcagcttcctctttgagtatgttgcgaggcggaggaaactgttagaaactgaggagaaaagaaaaatttgaaaatgccacattagagcatttaaaaaagtcaagtttgctaagaaaaggtggtagggaatattggcaatgtcaagtctctccacttattgggttcccactttacgacagacttcattcagagcactccagcagaggtatggagagtgaaacttaaaactttgtgggtgtcttcttgtttctgtaaatacgatgggactgctatctctggcacatgtcttaaaataaattcatcaaggaaagagctggttttaatgtaatatgtaaagtgaacaaaacagaaatgctgagtacccttctactctagaagcaaatgttaaaagatatatatatagagagagagagagagcgcgcgcg

SEQ ID NO: 43321 - DNA, 794 bp, Bovine  19866881144397
  misc_feature (1)..(1): n is a, c, g, or t
ntcaaatgcaaactggaaagaatgtcagtcacttcccttccagcaaagttgggaatggacgagaagcactcagcacagtgcgcgttcagggagtctttatctggagttggccattattttttaagatgtgctcaataaatatgtggtgaatgaatgaagaatatctgttctgatcgcaagatgcttcaggcagcattttcaattttaagttatgctaggaagaaagcctaatgaaatgccagcctccccgaggaaccttgtaacttctgattgtctccagcaaggctggctgcgacgcttcctgtgtaactgtggctgtctgcgttttgcagcaacagcaccccgcagatctgatgcgagcggaagtggaattaggtggggctgaccgagcagggccccagggggctggcaagtgcttctatagctattcattgtggatgctgtttgaactctctggctaccaggcaccattctaaatgtttggtgcttacaaccacaagcctaccagcaggcactctgattattcccattttacagatggaaaaacctgggacagtttcagttaggaagtatcttgaagtgccttggcttgtaagggattgaactgagatctgagtccagaactggtgtctggctccggctttggccctgaccactgtgctctgtggcttcgctggtggcgttagtggtaaggaaccctcctgccagagcaggagatgagggtttgatccctgggtcagaaagatccactgaaggagaacatggtaacccactctaatatttttgcctggaga

SEQ ID NO: 43322 - DNA, 872 bp, Bovine  19866881236229
  misc_feature (1)..(1): n is a, c, g, or t
naaatgcaaaattcttccttgatgtcaggatgaaggggcttcatttgtaatattgtgctcataaaccaaactttcatcctttcccaagtaattggcttcctgctgtcaggagctctaaagagacgtttgacaggagttcaaattggtgtgttagtacctttcttacgtatctcttttcatgcgctgtttatacttcctcctgttagcatacccttcacttggtaaagatgaatttgggttttcaatgtcttcttgcacaggcttatttagtgatttgtagttgcatggagttttcatggctttgtagctgtaaaattcgcaagtaagccagaccatgtgaaatcctaaggtcttggaagtctgagtggccccaaacagcccctggtttttgaccttttcctattctgggctcgtttgttagttctgaaagactcagttgaattttgtaagatgcagaagatagttctattttcagcgttttgccctttagcctattacagagcgcaattcgattcttctttcagaggatggttcagacctacactgaatgattgcttttggggaaaaaacatcccagaccctaacgtgctgagactgaagtggttctggggcacacattaataggtaactaaatcagaatgaaaacatttctgaggatgcatgtcatattaaagcaatgaaagagctgcagaaattccttgaagtcagggctgattggtgaagtcagggcttagggatgcttttactggaataatgggtgggagagaattcagaaagcagttttttgcaataacattcctttctcatccccactgccttctccgttctcatcgccacccactcctgaaccatgaggtggaattgcagtgctg

SEQ ID NO: 43323 - DNA, 1291 bp, Bovine  19866881279277
  misc_feature (1)..(1): n is a, c, g, or t
nacagaaggctgacctccttcaagggcccgtggaacgacagactccacccaggcttggcaggtgggaagtctcagagacaggccccgagctcccatcacttcatcactgggaagtgtgggtatctgtttctcaggctttcctcccagaggtgacctgagaaagcaggccatctcatctttcaccacattcatcctttgaaatggagaggtttcatctaggttctcaagtttgcaggtttgattttttttttttttttttccagttgtatatggaccacctgaattatttgcttgtgttgacagagagaattcttacctgagcctgtggaaaatctgaggtcagagatcagtaactcagggctaacatcatagctgtcggtatcaaagaaaaaaaagaaggaccgatgcttcatgaagaaatgtggtcagctctccagacagatgcacggtccctaatgaagcatctgctgaacagtcagtccatccaacaccgctgtcagcatccagcctcacagcaaggcagccagagcctcgctttgggtggaaaaaattacactggccttcgttcaagcctcctcactctctttagctgagaattttaaaaagaaatcaaaaaccagaaagaattagaggtttgccgacttttttcctcacatccagaggctttcctgctcctaggaaacatgaggttcatcctgaagctctgtttacaccctgcacaaacatatcaataatcgtccaatgatacacacacctcgactgtatttacaaaatgtgaatataaattatctggcacatcatattaatgtaaatacacttaaggatgtttgagtgagacaataaatggatctgtttgtaaataccagatgccaatgcgcaatcacttcagtgggtccatccgagagcctggtgctgtgctgcggggtaaggagagcgtagattagcttacttggaactgctgtttctgcagcaaaacagggtcagacatcggccatttaatacgtttcaacttcacacaaaagtgaatgacacaaaccctgggttcaaggagtcagtggctcaggagaaaagattcagttcagttcagtcactaagtcgtgtccgactctttgcgaccccatgaatcgcagcacgccaggcctccctgtccatcaccaactcccggagttcactcaaactcatgcccatgcagtcggtgatgccatccagccatctcatcctctgtcgtccccttctcctcctgcccccaatccctcccagcatcagagtcttttccaagagtcaactcttc

SEQ ID NO: 43324 - DNA, 812 bp, Bovine  19866881300173
  misc_feature (1)..(1): n is a, c, g, or t
ntttgtgcttcttacttcccttcccctgcagtgcccctccccttcgatcaccccactggtaaccatagtttgttctctatatctgtgagtctgcttcttttttgttacattcactaatttattgtatttttaagattttacataaacgtgatatcacagtgtttgtctttctctgtctgactgatttcatgcagcattttctggatttcaatacccgctccctccccttgggcttaggggttggtaacgttaggtcactggccttgggaactacacagtctcctgtgttttcctaaactctgcccacgctgttgtacattagcccctgaatgaagacagttggattgctcatcctgagggtgccatttgttaccttcctggactttgatggatacaggtacactgagtcactttggtgacatcacatttaatgttttgctgtgcacccattaatgagtttctaccaggagggagatgatttttgtctcttgttttttccctagttatttcttatttataacttctggaagggctatttctttgtctttcatcttccttttgccatgctacttgctctttgaattttccctttccccttcaaatcgagtctgtaagacctgaaaaagccagtttccattctgattctccaagagtgagtttctttggtctccagagtctcagctctattcttttattaatgcttctttgcgaaactgtctgttggattgtcttgagaaaacaatgcacattttctaagcttctaggggaaacgattgttgccctaaaaagaagaggaaataatgaaagtatat

SEQ ID NO: 43325 - DNA, 1075 bp, Bovine  19866881426737
  misc_feature (1)..(1): n is a, c, g, or t
nctgtccatgggattctccaggcaagaagcctggagtaggtagccaatcacttttccaggggatcttccctgacccagggatggaacctagggtctcctgcattgcagatagggctgcactgatagttatactagagactggctccagaggaaggcaaggaaagatgaaggcaggatgtttcactataggccagacatggtcgtatgtgttctgcatgtatattatctcatttaacttaataaagcaatatatttcctcaaacatatgcttgagaatcagcatttctcaagaaaaaacagagagcttctttcctctagctcctgtttctctgaaagttcctttggtgactcttagatgagtacccttgtacccttctctctctttctttttgtttttcatttagacaattttaagggctgaatttcgttttaatttttttttttcaagttccaagcaacatcaggtcttgtaatggtcattcctctagggaaagataggacagtaaagtcaaagagattttgaaaacgaaatctggggggcagggaaacaagtttgcagagcacaaaataagataacaaaataaggtgacaatgacactattttgcttttgaaggagaagagctggcaaatgccttcagagattggatgcttttaggctgctaatgagagattattcatttttttgctctgcatttgaagagactggctcaagaagaaagctttggatgttggaatgggaggtctagctggggtctggtcacatccagcattttgttccaggagctgaggtctgtctgggctgtttgagctcatcaggtgcattttcagctcaactgccagcagaaaccactgaactctgcacaggccatagggagtgaggcgcttgtgagcacccaccctgctgttcagcttggagccaccactggtttcaattatgacgtcaacaggcagctttgagggctccactattcattacagcgcctcactctctattattagtaataaaggaacacaggcacttcacaaatataaagtgctaacccatcatcaggcagtaaaggcaatgcattggga

SEQ ID NO: 43326 - DNA, 776 bp, Bovine  19866881529762
  misc_feature (1)..(1): n is a, c, g, or t
nctccccagtttctcttataatatgatgatttctaatcttccctttgtcccaattttggtagataatagagatgaccagcctttattatctacctcttatctcacccctactttgtccccatgtccatagataataaactcctggaaggcaggacaggactgtgccctctgccccatatatcaccgcgcagaggcctttagacacggggacactcatactgagacagacgttctctgacacagccctgctctcatgctgccacagagggggagctccacagctgtcacgatttactgcttttccctggagaggcaattataccactttatcttcccctttggcttgcagccagtggctctgcacctagtctctaattttctttttgtttaaagggatgttctgtctactcagacaaatgctgatggtaatgagagctgctgctctgtgttacacacctactatgcgctagactgtgctttacatataagatctcactaatcttcataaaaatcttatacattagctagtattattctactttctggatgagagaatggaagctcagagaggttgaaaaaacctgtaccgtagccctaaagatgtagatcagagttggcgtcaagagttaaacccagatctactggcctaaatctttaccagaaatttccacccaaaaaggatgacttaagggtgaggctggatgatgcgatgtatgtaaggctctgattcaatattcttgagatctaacaccctgaagcttttcagtggggaagtg

SEQ ID NO: 43327 - DNA, 1387 bp, Bovine  19866881682305
  misc_feature (1)..(1): n is a, c, g, or t
ncttagtggaatatatttcatttgaccctcatttagagatgtggaacatgtggccccaagaagttaaatatatttgcccaagattcataactagcagtggcagagcccaggactgcattctggtcttctctttcctaatctttgaaataaagagctcctccctgtaattatttgtagtgggccaggttcccctttgaagtctttaaaagaaagtttcacagtcggactaacttcactcagtacgacaatctctaggtccatccatgtgactgcaaatggcattatttcgttctttttttctggctgagtgataaaagaaagacaaatatcatgtgttgccatttatatgtggaattaaaaaactggtacaaatgaacttttctacaagacagaaagagagtcacagatgaaggaaataaacttaggttaccggggggaatggagagggaggggtaaattgggagactgggactgacatatacacactcctatgtataaaacagagaactaatagggacctactggatactgggaactctactcaacattctgtgatggcctataggggaaaagaacccaaaagagtggatatgtataactgaatcactgtgccgttcagcagaaactaacacaacaatgtaaatcaaccacattccaataaaaaaaaagagtttcaaaatatttttttaaaggcttgggaaattctctgtctttggatttatcatggccatctgaaaccccccagccccgcttgtggtcacaataaatcaaacaaacaaataaccatccccattgttttgtggattatttccccacgaggcagatgtttactttttccaaatgaaagctcattgttgtcaggaacatttaagaggcttaacctgtctcctctggcatatggcgctggcttttcatgatgagactggttctgtgcagcagcagacgaaattgcaagcctgtctccgaaacttcatcagttagagccacggaacgtcgctgctgtcctaggtgggggcttgtctgggcctcttccaccgtgaaaggggaaaaaaagaaaagctgtttcctttggtagcaaatacccatattttaatgggcatgatgtcatgaattattaaactagcttaactttaaagcccagctgaaagaacacagagtgaagaatgaccttgagactcttgaaaaatgggattgttgactgtgcctgcagactcgaagatggatttctcctttagtttatatttatgcaactgtgaaacttggtcccttgttcccagagaaatcctttgtgcagccgtgtggagaaagttattacattttagtgcagaagagctgtaaagtttcttttctgtgtactcgggaaactagagtgctgggcaatccttgt

SEQ ID NO: 43328 - DNA, 714 bp, Bovine  19866881831055
  misc_feature (1)..(1): n is a, c, g, or t
nctacaattatgtcttattgttgttagttgctaagtcatgtccaactcttgccatcccatggactgcagcccaccaggctcctctgtctatgggattctccaggcaagactactggagtgggttgccatttcctactcctgggaatcttccctacccagagattagaccccagtctcctgcattggctggtgggctctttatcacagagtcatcagggagacccacaggtatatctaaacccactgaaactctgacccagttagatacagccgaggaactaggagagacaaacacagtgtttgtagggctttaatctccaaaccctgaaatattgtggagatgttttatcttccattgcacacggaggagattaaaaagccgtgataaatggtgtactctccgggagggaatgccatatatagggcaatacataatttcctgcttctggtaccgttcgggataattgtcctggtaacgtgaaaatgggagggatattaatttaagattaaagcacaattataagccctgtcatactgctaatttcttttaaatgttcctctgaataattccacctttgcaagatggaataagcacacaattaaaaactgcattaaataaatgaataactaattaatgaataaaaagaactctgaaaataaaatgggccatgcaaattctaaacaataattttaacagcaggccagaacttaatc

SEQ ID NO: 43329 - DNA, 1088 bp, Bovine  19866881934600
  misc_feature (1)..(1): n is a, c, g, or t
nttctgtttcaaaaatgctttttggctttcattattttagaaattcttctgaagtattaaatagaattgagaggaggtgaccagaaaggactaatttaatccaatgacaagtataatggaatatatattcttaagagtactcattatttggatactgcaaattccacatccagacaaaagagagacattcattgaactgttatgtttgtgtcaattagaataagtttggctgcatgtgtctaaaatcctcaaatagcaagggctgaattaacacagagattggttttcccctcacagagataagcagccacgggctggtatgataccacaattaactgtttatcagagacccagtttctttatacgcactttttttcattattcccaaaatatttctcctacttcatgacccaagatggctcctaagatccagctggtatgttctcatttcagaatgtatgaccaaaaaaatgggaaaggagcttttctctttaagaatatacctagaatgcttgcctttcactcttgtttatattcagcctaataaaatgtaggctagggaaatgttgctttactcaggggagtcacgtgctccaccttaaaaatcagagattggatgaaaatgtgtagtctcttggcatatgtctcatatagttttaactctgaggctatattacttcatggaaatcacattgacaaggaacaaccaaatggtgagcaaaacggacagatctttagaacctggccatcacccagtgaacggtcttagaatagtagccaaacagatgctagttgttgctatgttttaggtaggacttcacgagtccttgacatttaaaactagatcaccctggggacaaaatgttcctcattgaaaggagggagagagagagagagagggagagagagagagaaggggagggaggaaagaaaagggaatgagaaagagagagaggagacatatttaaagaacaagacacatttctttcattaaaatattgatttttcattttaagttggagccaaatatcaatataggtaaaattggtagttcccagaactgatgagaattcaccgagcttaacaaa

SEQ ID NO: 43330 - DNA, 905 bp, Bovine  19866882059374
  misc_feature (1)..(1): n is a, c, g, or t
ntctgtatgacagactctaggtccttccatctctataaatgacccaatctttcctttttatggctgagtaaaattccattgtatatacataccaaatcttcttcatccatttatctgttgatggacatttaggttgcttccatgttcagatattgtaagtaatgctgaagtgaacactggggtacatgtgtcttttggaatttttataagaggtacaattttaatctcttggtcaacttgtgaaataataaatgttattagtagtagtagtagtagtaatttttaagggaagtttattttggatccttcatatctaaggatttctccctctaggacagaatagtttattatctttaatccatgataaaatgcttgactatgtgacagcacataagttttccttaaatattttgttgctgttggtttgggatatttcttttccaggagggcaagattcaattaagcaaacaatgcctaaatcttctaacctacaagaaaaaagtgactttctatcatttcctcagggtgaaatgtcattgaacaaataagttctcaggaagatattttaaccagaatatctggttagtagcatatagaaactcaaacagtttttgttatcattaaactgaacacaccgctaactttattttaataattcatgcattgtttcataaacaaaagcaaacaagcattcatctgagagatcacttttagaagaggaaataatactttataattttatttattatttctttagtggagagcagtctcttggctgaacatgcgttgcttttttatttatgaaatggtgcatgcattattaaaataaacccgcgactgtgttctgcttaatgatatgcaaaattatttgaggtgagtacagagcagtttcatttctctacctg

SEQ ID NO: 43331 - DNA, 1058 bp, Bovine  19866880421720
  misc_feature (1)..(1): n is a, c, g, or t
ntttgctctcagggatcttgagtccaaatacacccagaatttgaatcacaaggcttaggcttttagtttcatctttgcctcaggaagaaaagtaattataataagtaaatgttcttgttacataacaacatatcaataacttgcttagtgcttatgtctttatcacaaagtggaattaacaaacctactctttaatctttccccaaggatgtggcaaagctgaatatttttttaaaaggatattcaataaaaatcaaactgaagaaaaacatttttccatggtaagaataaaaaaaaagatcagagtgaccacttgtaagaaggctgtttgcagatagactgtggaagagtgaggtgagacacctcaaatctgccaaacctaaacagtgagcaacaggatgctaattttgagaaaatggaatgaaagtcacggaccgtccaaatcgacaaggatgagcccagcacagttaccaccacccatcgttggttaagaagctggtggggagcggtagtcccggttgagtggtcgagcacctccctttctggacgtggagaccagtcccctccggggcagtgggcgcagttgctgcccgagcttctgggctgggcacagcacctggagacacggggcaggatcgacagtttttattctctgtttccgttttcctccagagctctcagcatggcggctcctccacttcacttgcatccaccaaagtctgcagctcaatggacgagaacgacggacccggagaaggtggtaagcttgggatgtggtgtccaaggagaaggcgtatcttgtacccagacggagaatgggttggctaaatttagtccaggaaactgacatttctccagcagaatgaccctgaagcagctcagggtcattgcaagggggtgggaccgaacgtgggtctcaccaggggtggtatctgctctctggggctgggaagagggagtcagccaaatgtggagacctctcccaccctccaaaggtgtaagcattcttagaaggccagctcttgctctccttgcaaataaaaggggctaactgttgc

SEQ ID NO: 43332 - DNA, 1509 bp, Bovine  19866880437879
  misc_feature (1)..(1): n is a, c, g, or t
ncattttaatgcctagatgcctagacatttattagaggttagagtttttatttcaaaatgcattaaaatatcttttcctcatcacatgagaaatgctttcaggcaaagctactataaagcaactgaacaccggcgtatcagtccttgagcaagaaagcattggtcttttttttgtttgtttgttttttaatgggcaggaaaatagtatttttccataattatccaatatcttttaaatactttgaaatataatgttgaacatgcattaggtattttactattaataaaaatgacataaaaacacgatgttaattaaaattacataatattaatattgtgcttaatattaatactaaatatattgcttgtgatgtcaaaaagatttgttagagatatggtaaacttaaggaagttattacctgtttaaggcgtagctgacagttctgatctatattggcacatttttaaaaataaaatgtatattgagaaattaagtaagcttactgcaactagaaattttttgagtatatgcatcattgagacacctatatttgcttgtagacttcctgtaatctgcaagctaacgaagcttttacatcaggcccccttactccacagggccttctgagagatcagagttaccaaggattgtattgtgatctcactttactcaattgccttaagacgcctcagggaaaagaaataaaaacctccatttctaagcctccagtatttgttgtaattgttctattttcattctaaataattattcacttacatagctaatttttatttgtaactttgtattttttttctttaaaaagtcatttcaaataatgtaagcttatttgacactttttaaaaaattttatttaatgtatatttttttatttagtgtcctcctcccttcccacccatgttcattctttccattgttctttaattataacaattctgcagtgaaaaatctggtacatacttcatcttgctttgttgagtgtatatccacaggataaatccctagaaatgaaactgctgcattaaagggcatatgtatttgacatttttgataggcagtgacagaatgttcttaatatattatactaacctggactttccccatcaatatgattgcctgttttcctcacaatcaaagttttagattttgccagtcttatagataaaaatagtatctccatattgtttcagctgtactctgggggaggttaatcatgtttttaatcaagaaagagcaatttgtgctgttttctggagtttttttttaagcagaattttactgtatctcagtgtttatagaaggagattggtaaataatatagtttgtctcatgtatctctgtgtattagatatatagaaatattaaaattatatacatatgtgtatataaacatgtctttttctccctacttctcatctagattaatttgttattcctctgtggaatacccccaccctagtcttaatggcattagttatgaggataaggat

SEQ ID NO: 43333 - DNA, 5003 bp, Bovine  19866880446301
  misc_feature (1)..(1): n is a, c, g, or t
naaaactgcttttgaagaacttgccaggtacttgcctggtgctccagtggttaattaagactctatgcttccaatgaagggtggggtgggttcaatgcgtggtcagggaactaagatcctacatgccacacagccaaaaaaaaaaaccacaaattgaaaaaaaaagaacttgactgattagggcagtctcaccttgataaccttcctttcaccatactgctgctgctgctgctgctaagtcgcttcagtcgtgtccgaccctgtgcgaccccatagacggtagtctatcaaagctacccccgtccctgggattctccaggcaagaacactggagtgggttgccatttccttctccaatgcataaaagtgaaaagtgaaagtgaagttgctcagttgtgtccaactcttagcgaccccatggattgcagcctaccagactcctccgtccacaggattttccaggcgagagtactggagtgggttgccattgccttctccatactaggtgatataataacaagagcaatatctcatcaatttcaagtacttaaaaataatttttgtatttttgtgtattatatacacaatggatctgtttttaggaaacccatttactccctcaacaataaaagaagtattatactatttaattagcacatattatttacatatataggtaaaatgaacttaaaatctgaaatgtaaataatttaatttcattaacatatttagataaacagcattatgtagcaaaaaatgcataagcatcaatgccaaagagaagaaagacagaatcccagatctgccaactttgtatgctagggtttagtttgaatttcaaattttaactctatcttgaacttttaacctctaaagagccatgtttaatatgtttacatctattgtaataactgttaggtttggtcttatatcatcttgtttgatatgatcatttttaatgttttcctgcttttcataatgatttgagtttttttgaaaatataaacaaatttttgcctacttttttgtgatttagaatgtagacatcttgttattaattctcccaaggatatgtttaaatttttaataccctttaaaatatatttctcttatttttgaactcaaaaaggaatcaacattttatatcacttctacatatgataagaaattttactcaatttactccttattcattccttacctctgtcaatatagttttctgcccagaatctatactattatataaaagctctatctacccttaaggaagcaggctatacagggtttctgtaccagagtgggaatttcagaattctacctactataagaatacttcagttcagttcagttgagtcgctcagtcgtgtctgactcttttcgaccccatgaaatcatgtagtattaacatacatgtgatacataatataaaactataatataataatgcttacttaaacaataattatgcttactatatgccaggaacttacaaactacatgtattttatcacttaatcctcaaaatagtattatgagagatagtattatattccccatttcacagattacagaagtaattcaggcttagacaggttaagtaatttgctcaaagtgatgcaactagttaagtggcagaaactggcttatacccagctcagagagcatagactttggaattggatagacccgttacatgctcctagtgccctataattctcctttatagcacttgtcacactgccaattaaataattattgtgaaataagttggttaggtagattacgagtgtcatcaaagcaactgaatttattttagagtgcattcagtaagaactaacaggaaatctgactaatagtagcttaaacaaatagagatccactttcctcatctaaaaagaagtggctactggtaatatatcagaggctcaacaatatcatgatgtccctttgactctcttgggctttacttcatgggtggctgcagctccagccatcacatccaaaacaaagctggaagaaaggaaaagggttgaagctagccatatctgactcattttagtgcgaaagcaaactttccattctggagcttggccataactggttgtagtgaatattttgtaagcaaaaataatttctggtaaaggcagggactgcatctgtcttattttgtcttctgcacccagttcagtggtttctacactgtaggctcttaattgctgtgcatgaatgtttgctaaataatgcatccaaggacttccctggtggagtggataggaatatgcctgccagtgcaggggacatgggtttaatccctggtccaggaagattccacatgccatggagtaactaaacccatgcgccacaattactgagcctgcactctagtgaagactacgtgccccagaacctgtgctctgcagcaagagaagaaaccatgatgagaagcctgcccacggaaatgaagagtagctcccacccaccacaaccagagaaagcctgagcaaaagcaacggagacccagcacagccaaaaataaataaataaaaacaaaaatgatgcatgtgaaatgcttagctacgtgcttagtgtaaaccggatagttgattaatgatgattactagtagctatatcgttcgtgagtgcatgctcagttgctcagtcatgtcctattctttgcgaccccacagactgtaagcctgcaagtgtcctctgtcgacgggattctccaggcaagaatactggagtgggttgccatttcctcctctaggggatcttcccatcccagggaacaaactcatgtctcctgtgtcaccagcactggtaggcagattctttaccactaagccacctgggaaaccccaactacatagtttagtaaccccaaatttatatatgtgtgcatcctgatggatgcttttcaacaccccactgattgattcaaggtaagtgccaacagctgatagctctgttgggcacattagccacaggggctggaaggggtctactctgggttgaggagtaaagtgaagtctaagtctctcagtcatgtccaactctttgcgaccccacgtactatacattactttgccaacaaaggtctgtctagtcaaagctatggtctttccagtagtcatgtatgaatgtgagggttgtactataaacaaagctgagcaccaaagaattggtgcttttgaactgtggtgttggagaagactcttgagagtcccttggacagcaaggagacctaaccagtcaatcctaaaggaaatcagtcctgaatattcattggaagcactgacgctgaagatgaaattccaatagtttggctacctgatgggaagaactgactcatttgaaaagaccctgatgctgggaaagattgaaggtgaaagaagaaggggccgacagaagatgagatgtttggatggcatcacggactcagtggacatgagtttgaataagctccgggagttggtgatggacagggaagcctggcgtgctgcagtccacagggtcacaaagagtcagacacgactgagcgactgaactgaatacactccatgaattctccaggcctgaatactggagtgggtcgccattcccttctccaggggatcttcccaacccagggatcgaagctagtgctggaagaagtctgctctttggtgagtaagtgggaagcagtgaatctccttctagcctgctgctgctgctgctaagtcgcttcagtcgtgtccgactatgtgcaaccccatagacagcagcccaccaggctcccccccatccctgggattctccaggcaagaacactggagtgggttgtcatttccttctccgctttgcaggctaaggctggccaaagagggatagccctgtagtaaatgttcagctgctgctgcttaagctcactttatgcaactagtgaaagtatggttactaaaagtgttcttaggctaaaatgaaaaaaatccctgccctgatggtcgcaagacttctctgtctgaagctgaggcttcagaaaaagggtattaagacttctgtatcagcaccatgttttggggaacacttcagcaagcttactcgtcttcaccttatttctctatctttccaactgaggaccagataataaggtatatttagacttccaggtgaaatatacactctagactctgctcactgtctcagaactagaagttgcaacaatgctgggaattgccaataagctgcttccctctttcattgacaggcactgtgtgacttgggtgaatatattagttttctagagctgccataacaaagtaccacaggctggtgcttaaacaacaaagattaatatctcatggttctggaggtcagaagtttaagaaagatgtcagcaggttggtcccttccgagtgctgtcaggaagggccatgttccaggcttctcccctagtttctggcatttttctgacaatatttggtgttccttgctttgtctctgttggcttatagaagcatcacctcgatctctgcctccatctccacatggtgttctccctgggtgccgtggtctctgtgttcaaatttcccctttattgaatgaggcctgtcctaattacctcatcttaacttgatcatctgcaaagtccctatttcaaataaaatcagtttcacaagtacttggggttaggatttgacatctttttgtgggggacacaattctactgaaaacaatgagaaactcattgtgtatgttcctttgtttaaacacaaaccaatagtgatccttgggtctcctacaatgttaaaatcacttccaagatcctgtgcaagagtcaggatctataaagaatgattctatgacctggatttttaggataacattgactccatgtaatgtttttctataaaagcaattgattaaacataattaaaagagatttatgtttcatgcccatatgaaatttcatagataaattaatgaccaagtcaggaaaattaagatttgattacagttacgat

SEQ ID NO: 43334 - DNA, 4456 bp, Bovine  19866880461473
  misc_feature (1)..(1): n is a, c, g, or t
ntttgtaagctactcttgtgatcattgcagatggctacagtcagaaaagttgttctctagggtttattatatggctataaagacatcccatgatttgacaggctaaatgtgttaaatggcaacaattatgaaaaaggttccaattaaaagctgaaggcatgtcctaccaagaatagacctagtgaaaggtcaggtacgtaggtttttggtatgctgctattttacacaggattttctttttttaaaggagagtttttttgtttctttttcatttatttggggtttcgcagtagttgtaacttactgaacagaagatttggggcatatgtctgacctcgcttggatgagaaactgagaccatttgaaaaagttatttgaaaaactaaaagatttaatacagggtcataaaatgcagccggtggccataaaataatatgaaaattcacagataacctgaacccagttaaatggtttctgagattcccataatagagaactaaaagctgactaatgtaacagatgtgttggaacaaacataattgtcaatgataatatgaattcaaggataaccctgttgaaatattggctaatgaactgtccggaaccactgaaatgtcttcacagaggagctcaataggtactaaaaattacttcaccagagagaatttaacaaaactggcatgaaattgacaaagctatgacaaaaaagtgaatttactttttaacaaatatggtatcctttaaaaaagacatttatttttcttctagccacagaatatggcctttatgacactttctaaaaacagtggattaaatttaaacctttaagaagtgaagtataacaacatttatgcagggaattacttagcaaaatgtattttatgctccacatactttagaattaaggctgctaaaaaaacttaattcttaaaaaaacaaattcattttatacccacatgtaaaatctttatgaaacaaaagttatgtgaaataataaaaataaaaaaaggtgtacagaagtcagaagaggcttggcaacgtaagaacaaaaaataaaatagcttttcaaagtgttaccctagagatgtctgtgaagatggagaagtgaatgcaaattccaggaaacctgactctcatccgttctttaaatcagtcatgaaactatctagaaaggagttctacgcagctgcagtgagatacagcaaaaatgcacattcctgactacagtgattgtacatcccagaattctgttataactgggaattcagtgtcaactgctgtttttaaaaactgttacatttttgtcacacaagtactatccaatatgtcattgtaggaaaactggaaaagacagataacattacggagagaaaagaattaaactcactcgcaatcttgacacctagaaataaccattgttaaacatatgggcctatgaacttccaaagctttttctctctctctttcctgttctttttcactggactgcataccctgaacgcgtgccccagtgaataagcatacatgtgtatcacgatttccagtgcctgctggatagtccattgtatggatgcactaaaataataacccgccagactactgcccgctgccatttactgagcccctgccaggcctcatgtcgaggattcatgcttaacatcccacttaacgttcacaacaactctgttaagtactatcaccggtatttttgcagatgaaaaatattgaggctcagagatgttaagtaacttgccgaatgttacacagctaataaatggtagagccagaacttaagcccgggcatgttcaagtccatgattctaaccagtatgtcctcctgcctcccccttatgccaatattttaaaaaatcagtgccctgacctatttctatatatacatttttcctttccatgctaaaaaacactgagatgatgatccctttgtatgtatacatatctgatatttttttttctttaggtcacatttctaaaagtagaattacttgaccacagagttcatattatttaaggctgtagttacgtattaccaaactacttttcggaagagttccatcaggttaatcttgaactgagtcatatgagatgactggtttcctcctaagcttgccaaccctgcatattattattatttattattaatctttgctagtccagtaagaccatgtcatttaaaaataatttgattgacttatttatttatagctgtgttgggtctttgttgctgcgtgggcttttctctcgctgtggcgagcaggggctcactctctagctgtggcgtgcgggcttctcatcacagcggcttctcttgctgtggagcacaggctctagggcacacgggcttcagtggctgtggcacaagggtttagaaattgaggctcccaggatttagagcacgggctcaacagctgtggtgcacgggcttagttactctgcggcatgtgggatcttcctgggtcagggatcgaacctacatctcctgcactggcaggcggtttctttaccactgaggcaccagcgaagccccttaaaatgaagtgaatgatggtattctacaccacagtgacagaggaatgggcagtggaacagacagatgctggcccccccggagacactgtactttgacttcctgtcttcttccccctggtggaatcacaggtccttgcagaagtgaaagtcaaagtcactcagtagtgtctgactctttgcgaccccatggatgctacagtccctggaattctctaggccagaatactggactgggtagcttttcccttggagaagggccctcagtaaatgcttagtacaataactggcatattactgtagtaaattatgtttggggaaaatgttctttttcttatccaaatgcagatagaaggactttttttctttcctaacgttttcagtcactcagtcgtgtctgactctttgcggccctatggactatagcctgccaggctcctctggccattggatgttccaggcaagaatcctggagtgggttgccatttcctgctccggggatcaaactcacatctctggcatctcctgcactggcaggcacattttttaccactagtgccacctggaaaaacaagcattccatttcttcttggggatttcagtgattaaaagctactgacttttcaaacaggtgtaattgttagaaagtttttccttatgtcaacctcaaatctgtcattaacgtcttctccttagtttgagttcagtgtctcatacgcagcacagaaaagctctcccatctcccgtccggcagcctctgctgggccactctgctgcgctctctccatgtgtctgggtcccgccccactgagctcacgtggcacgagcaggacagaagactctcgtgagagtgatgctctttcagggaaagcgtctaagggcacattggtatttttagcagtcatgtcatactgactctcgtaatgaacttgttatggtcaatgaacagcctttaaactagcccaaatcttcccattactgtttttccacaatggtcattaaaacaaccacaccaaaacagacctagtccatcgggacttatgcttttaactcttgttaaattccatcttactggtctgggacctttatggagccaaagatagttgcagatctcagttctgttatttactatatagaatacatcttcatgtcgactcactggtaatggtgataagggcagggccagtgacagactcctgtgagatccatggctcccttccttagggtgacccccagtctgttcatccacattctggtggctcaagttcatcttgcagatctattcaactgtctttgtttatgacctctactgtccatctgtggcactggccttatccatcagtggagtgagctatctgaccacaaaatgagtttacttgaggattaagacagaaggaaatccattatttggtaaagtcagtgttgacctgaactggaaactaagaagagcaggaacacaacctctggttatcactagagaaaaacaagataatttattcctagattcaacccattttgtgaaaatgcaggtcattagctgtacatgccactttgatgggcagcaaggaacaggcacaaataccttgacagagtttctaaaaggaattttctgacctagagaagcagtttccctgagaaactgctttttcccaaacagtatttaggagtttggaagcaaaaagatttttgaacagaaattttttttatatttcaagaaaattgctgtttatttctggaatctaataaaaaactagttatgatcagttatatttttgccagtaggactttaattttcctaaggagaaggcatctgtgtatacatttaaaaaagacggtcccagctcactgcaagaaacaggctgctttttgctgccaagggtacaagcttgccatctagtggtggctcatgaaa

SEQ ID NO: 43335 - DNA, 1018 bp, Bovine  19866880490231
  misc_feature (1)..(1): n is a, c, g, or t
nataaatataagggaactgcagaagcagcatccatctgaacagctctcatatttttaaaggcccaaaaaacaaatattttctgttaagcaaagaaagaaagaaaacaacagttaaacaaaaaaaaaagtaaggaaatgaagcattaaattatgtttggatctgaccaatatctcctaaaatatcagaacacagtaacttttccctgaaagtcgtatacattttgggactttggaaaacagaataatttctgtctaagcatattagattatcataaaggtaccaaagagtccttgtttgttttcaaaaaaaaaaaaaaagaatcacacgtgagttttaaaattattatattttgcaattctttaaagtatggaaataaattttctctaacaaaatttattagtaaaaaatctgcaaagttaatgctacttggccactggctcccattataagattaaagaatttgcacataagagaaattctcaaagtcacaatggacaacttacagtaatatgggtaactgaagtcatctaggaaggtctttctccataagagtccatattaggagatactagatgtttgccctgtttttccttattggtagaggtttttcactggctcagggttgagacttgtaaattccatctatgacatcacttgacctcagtctgaaaatgacctaatctccatttttcacattatttaagctgcttgccatctcctttaggattcctttaagctctaatgtggtatgttcaaaagtatactaagtgagggctttgtgtaatgcacgccatttttccagagtaaaaacttccttattgaaaactctggaaatgaaaattcactattgtgaattacagtaaaatctgggacagactcaactgtatattgaaatctctgaagttgaactgagttaaattacatgaagtacataatttatgaaatataatatcataaagtgccttctggatattatattttataaacctatctcagatgtacacaaaaacatctcat

SEQ ID NO: 43336 - DNA, 2887 bp, Bovine  19866880521302
  misc_feature (1)..(1): n is a, c, g, or t
ntaaccttcagtgcctgcaaggacactaacaatctgtcctgccttccaatgatgtgcaaagaaagtgaaagagttactcgctcagtcgtgtgtgactctgcgacccaatggactatagcccgccagggctcctctgtccttggaattctctaagcaaggatactggagtgggttgccattcccttctctaggggatcttcccgaccagggactgaacccatatctcctgcattgcaggcagattctttaccatctgagccaccagagaagccctcccatgatctgatcgcagacaactcacccttcctgggccatccaactctgtcactcttcccctctgctctttagacaactcctttatttttctgtcttacatgacttccactcagtcatccagaagagtcttttttataccccctctgccctcttctttctctttgtttcatttgaaacaaacctcattccttggtaatagtgccgggacataattttatcaaagaaaagatacatataccttgaagttatataaagcataataaagaccaaagggaagggaactaaagttatgagcactttttgtgcatggcactgtattatctcagttaactaactcaatcatccctattatcctttaagtgggtgtaattatccccgttttacatctgagaaagatcacactctctgaaatggaggaatcattgtttacactgtgctgtgtttaacttcagaagtttattttctcccagtgttttcaaaagaaatcagaagtatcttttagaatcttcagaaacctttgtgtttcccatacaccaggctcttgtttaagaatcctcatctttctcaaagtaaacatacattgtccgttaagtatcagcaatcaagagaaacatgatggcaatattctattcagtagcattacattttggtcttaattacaatgtttgcattaagtgctcttactatttttttttccccactacaaatatatactgccgaagatatattacagtttaaataggcttttgggtaggatttcaagacaactcataatttatgaagtaagtccccaattctaaacaatttatcaattaacttgttgtacaacctatttaacttcctaaaaattatgattaaatgtttgataatggagttttgaacaggtaggttgaatatactgaatttggaacttgaataggttactaaaggatataagagtccaatttaattacttcattgaatatattttatattcagggtaagatttaaagcaaaaatattctaagtaaaatgtgtccttttatactatttaatgctgaacaaactctaaaattctgtaatagtttattcatcatttgcccaacagcaggttagcagagaaacagctttttcagaaacgtgtaatttagacaagtgactttactggtggtgtgtctaaaataatactttcaaatttcaagtaatgaggtatatagctaatttgcattttaaagcaattattatcaatgtcatactaaatatattgactgaaaactaataatgagtttaatgactttgggtctagaaggcttgaaagataaagaaaagatatttattttaatctatattttatttttatgaacaaattttcattgacacaaattttaatgtattttctacttcataaactccttgagatgggagtgaggaaatcacaattccctgggccattaggttaaacacttagtaagctattagactgtgatacttctatttataacagtacaacttgagatgcattggctaaatgagttcccataaaagcaaccctatagatttcttctttcaatgcaggtcacatgtgactactgagtacttaaaatatggtgagttcaagctgactgtgctataaatagaaaatacatctggatttcaaagaataccaaaaaaaaaaaaagtgaaatatcttatttacaatttttatattggttacatgttgaaattacaacattttggatctattgggctaacaaatatatttatgaaactaatctcacctttttactcttactcttcttacttcttgtttctttttactcttaaatgtggctactagaaaatttaaattatatacgtaagtggcttgcattacatttctgctgttccgcacagctatagacaattctaaaagggagtgtgtagggtaaacaaggatagcatttctgctgtacccctgcagagagtcaaatttgtactccatttctctagaataagaaatacatttaggggtgaattataatttattatttgataaaatgtttagtttatcagggatagaagtgttaacttaaatcaagctgttgataataagcatttttataaattcatatttaaattcttagaaaaccaattttagacttatttgattatacaaaagccactgaatattttatatatttcaaaatactataatacataatatgtataatatactgtcatataattctcaaaccaactgacttgatagtggttttttcagaaatggttcctgacttgtttttaatcccaagatgccctaaaaaggtgtcttacacctccgcagggtgatggctcattacaacaataactgtttcttgctttttgttttcttgttggtctatttttgagctcagataaaatattttacatttattgtaaaggacaccagctgtttgaaatcttgactggtgaatttttgggtttctgtgtttagttttgacctgtggctgaaactgctgctataaagttctctatatatgtgtgactgtaattcagaaaagcctttatctctttttatgagcatctagttattttcttacacctggagagaattaataagttattacaacccataaactaaaggtgttttgtt

SEQ ID NO: 43337 - DNA, 1304 bp, Bovine  19866880550207
  misc_feature (1)..(1): n is a, c, g, or t
nccattgttgggtgtctgttttctgttattcaaccctagcctttcaggattatgctaatctccctgtatgactcaggaagcttcactcttatcctgaaggcaagtggaatgagatttgtaattatcttttggactccatgatctctcaaacgattatttcctataattccatttttgaaagagagttccttatttctttttttttttctgatgcagtaagcatcttgatagacttgcttgatagacttgataatttaaatttagtatttaaattttaatttaatgtttatgataatgggttgcttgccttccttcccattatccaccatcacccacttgtccatctgccccgcccatggtcactgttaattttccagcctttactcacaatggaacaggccaccgcaccagatcctgaggttgtgaggatccaagaggctgggattccattgcagaccatttagcccctcagagtctcacttgccttatctgtaaaatgagaggttggatcactctagcaaatagtagttaagagttcacacagccggtaacaagatgagcaacaacgtgggccagtatttattgagcagctattatgtgcttttaaatatgccaggactaggtggtacccctggtagctcagtcagtaaagaatctgcctgcaatgcaggagacctgggttcgatccctgggtcgggaagattcccttgagaaggaaatggcaacccaccctagtattcttgcctggagaatcccatggacagaggaacctggtgggctacagtccatgggttcgcaggagttgtgatagattaataatatggtggaaaatgagttcaagagaagccatagaagctgtagaagcatggcatgagtccacaaggttttttcagtactccaaaaatcaaatagaacgcctacattagctctggtaagactgagccgcctgacaaaaatacccagtttctttctggtggctggaaacatgtcaacttagtgtggtaacagcggttctattatgctgctccagaaccctagctggtaggtggagcccagaactagcaatttctggcacctgtggcaaacagcatgtgacagaccccaaaatcaactttttaattcactttgcggctcacagatgggtgttattaccagtgtgcgccatctggtagctttctattttaaccattcatccctgctaactagacgccgggcttttttaaattattattttaaatttatgtgacctctaaatgttcacgacctaggaaaaaaaatcctagttatcctgcccttccttgtag

SEQ ID NO: 43338 - DNA, 2536 bp, Bovine  19866880589903
  misc_feature (1)..(1): n is a, c, g, or t
ntactttgagctgacattgaacccagcagcggcccccgacttaggtagggaggacatggcttatagcgcccttcatggtaccaagtcactctggtgctctgctaggggagcttggtgctctgtcttttggaacttcccagaaaccaccctctagggattggtgaagctccttataggagggttctcctcagagcacgttgccataaaagtgcctggggcactgaagtgctggaaaaaacttctagtcaccggtgctgtcggccaccccacactgcaggagccaggccctggagaagcccacgctctgcagagacctgctaggtgcgcatacagaatggggaagaaaaaccccttgcctcagcatcgtctcttcagagtcctttcctgacggacctcaacatactcctggctaccaaaggaaaaattaagggcacagattcattttcacatgataagcaattaagggtgactccagagctgagagccaatcattgaataactggcacagttggtaagacagttttacatgaagcacttagactcaacccaacttctatgtgtgtgagccataggtatcaataaaaggtattttattgaatacctgctaaagatattcaataaaataaaccggtaatatgattaatggaaaataatactaggtccaatatccattaaatcatggtcctcaaagagaaaaataaaaataaattaatgtgtgtatgcatatacacacactaatatatataaagtctaatataatatatgtagacataaaatcacccatcctcctggcataccacttttagtataaaggtgccatcatagctctcatggaaagatctcttcttgtttctgagattatactcattttgttgttattcagtcactaagttgtatctgactctctgtgaccccatggactgcagcatgccagactttcctgtccttctctatctctgttaactccaaaaatgtgtttattgcagatttgactgccgcagaataatcaaatgtgaatttatctgtattatgaaacaagaagtccacatatggatagttgctgagaatgttccagcaacttagtattagggtcagcctcccctgggattcccttggccttactctaatggctacacaattgcttctatagtttctgccattacatctcccattcaagtaaggaggagatagaagtatgccagctacatatgacaccttttatcagcttttctggaatatccccaaatgactggtttcattctcattagccagttctgggtcacatgtccttacttatagttgcaagggaatttggagaaagcaaagatgactttatcatcactatcttagatcaaaggtcagacaaattctggcctcaggaacaaattcaggccgttgttgcaaataaagttttattggaacagagtcgtgcccacctacttacacattgtctgggactgctttcctaccacaatggcaaagttgaatagttgtgagaaggacaggtgacctgcaagtcctaaaaatttttactgtttcacattttaccagaaatgttcattgacctcaggcttagaccaatcatgaacccttgcttggggttgaccactttgaggactaaatggttttccattaaggaggaaaaatggcattggaaaagcaccaaccatatatatccagccacctggtctaaccaatcgtatataagaccaccaaggcataacacattttctgttttgtcacagggtcaccttgaacttacaacttttctgttcctttgttccttcatttctacatgagccaggtacaaaaaatttagagaggtagaagttttgtaaatatacagaatcaaatgattggcagtattgtgatacatcatgaattcaggaagataacccctaatttactgattttatacagcactaaggtattgtcagactaagtctgagacacgtattccactgactgacacttcccttccaactttattttaggtccttgcgtacactgagggacttcatggaaaatggatgttcagcgagatacgagctgtattttcaagacgttatcttctacaaaatactgctttggaaagtgtttatggcaaaccgaagtaagtctccttaaatatttttttaaaaacgtgctgttcatatttgaatgttaacgattgacatgatgtgacactgacttgattttttgcattgtatttctttctttgatatgctgctgctaatgcaaaaataaaaattaaaaaagaatgtatttgtttgaaaattttaatcctaggataaacttataaggaaatctaatttccatgaagattcattacctttacaaataaatcatgaaaggcacttgaaaaatgatttctgaaattgatggttagctctcctgtggttttctaaatcatgttttttcttcttgccacagcttcagttatgtttaatttccctgatcaagcaacagtaaaaaaagtcgtctatagcttgcctcgggttggagtagggaccagctaggtttgccacaagccagg

SEQ ID NO: 43339 - DNA, 1955 bp, Bovine  19866880591323
  misc_feature (1)..(1): n is a, c, g, or t
ncgttttctgaatgttgagctttaagccaactttttcagtctcctctttcactttcatcaagaggctttttagttcctcttcactttctgccataagggtggtgtcatctacatatctgaggttattgatatttctcccagccatcttgattccagcttgtgcttcttccagcccagtgtttctcacgatgtactctgcatagaagttaaataaacagggtgacaatatacagccttgacgtactccttttcctatttggaaccagtctgttgttccacgtccagtaatttatataaatgtacgcagctaagaagaggcggaactgtgctaggatcacagggcttgcacgtctaaccacgtgctcttccctggatgcctagctctctctctgggtggccgatgggcccatgtgtaggtgcccagtgcccagagccaatgagcaagccagggcatcaggcatggaggaggaggccataaggaccaggaagattgcagcggtagggccgtgtttcaggagcctggctgggggaggatcgcaatcaccagtgttcagctgtgcctttgtttgggagcagaatgtccgtgtgtagacaatgaaaaacaattttcagctggaagcctggcttggcctggcaaatgggatctgattagtgtttctgaactttgattagcatttgaacgaaatacccaaatgacacaaagccaatcctagtagcggagacttaacatttttcactctttctctaaggcagtcaggcaccttctttttgcaaactactttgggtctctgataagcaaatcatttccacaagcatcctcacattcccctcccagaaaccaggccggaggaggtgggtcctgggagacttaatttacatcagcggctgctgggctggagaagtgggagccttttcccagcctcactggaccagggccaagggcagatcccttcacgtgatctccctggaccggcttctggatctgacaggatcccgcccctgagagctgagtttttattgccccttttgttgtaggttttccattttagggagaattgatagctgaggctaagaataaacacaatctctgccagttagattctggggggaggtttttaaaaggacctggccagcaataatatttatgttgaaactcagctcttgcttcacagcgtgagggcatgggtgctcaagaaaggaattcccttctccccatacaacacttctcacccgtctcaagaaagctggggagtatgtggagctcaaagtaaattctgcagtggtttcttggttgcctaagattaggattaaccctttaaaaagtctttttatgccaagacggaccttcccaggtggttcagcagtaaagaatccgcctgccaatgcaggagacctaggtctgatccctgggtcaggcagatcccctggataaagaaatggcaacccactccagtattcttgcctgaaaaatcccatggacagaggagcctggtaggctacagtccatggggtcacaaaagagtcagacacgacttagtgactaaacagtaagaacaacaatgccaagaggatattttcataattaaacttttcaaaaattgattttttttttctaaagaaaaaaactggtatctcactctttctcataacttttatcaatggcttcgaggcatttttgtccaggtcctgactcactaacccaataagagtttaacttcttttcacactgaaatcctttagcatttttttctttttggccataccacgcggcgtgtgggatcccagttccctgatcaggaacagaacccaagccccccgcactagaagcatggaatcccaactattagaccgccagggaattcctagcaacttaaatcattatttcactagttaaatgtcatgaagggtaggttcagtcacagtgctccagtaggtgacaaaaatcaatgcttcaa

SEQ ID NO: 43340 - DNA, 1690 bp, Bovine  19866880598568
  misc_feature (1)..(1): n is a, c, g, or t
ntatttttttttaattttattaggaaattaataatagtctttttcattctgggtgaaagaaaattattaaaggattagttgagtgtgaaattaaatagtattttgctcatgcatactgaaaaggtgggctcggaacttgatgtatttaaacaagtttctgaaaggtttcaatttggtgcaagaaaaaaaattcaatgtttcctttgaaaatactgaatttatcaattgctgcatggatcagatggcacaggttaatctttgattttcaaaatcttaatgaagtaactatcaaatgatttgtatccatgattaaagctggaatgagatctgatttttttcctaatctctcagtttaagctaataaatgtaggttaatgtggatgaaatcatctgtgatatattatgttcatttatcaactgagcttttttgatgttgcctgtttttatgtaaaacatgttcttaaaggttaataaaagaatagtacttggtgtatgaactactacgtaatgcccgagctccaatgtccactcctcagttcactctgccgcaatggagtaaaatttcatttcagttcagttcataattgacacattcagtccacgaaggaataacccagctgtgttcttggggggaattctctctatgcaaggctttaaaaattagtcatgcggtcagagtgtagctttcccacatgtccttcatggcagagtgtctatttcatgagcataattcaaaaacaactattccaaaaatgtcccttttcatatattaccttcccgcctgggccagtgactcggatatacacaaagaaatcaaataccactcagcccgactttatccttccacctatctgccccagctctccagagaagagtgttgttttatccactaccctgtaaattagctgctgttttttttttatagtgatgtcctattaggcaacccacgtgtgatattgacctgagagaaaattgcaaaaatgtacagcggaatcaagttctttcctacgtgagttgttcagagataggagattgaaaactcggccagcaaaagtgattccaggtcccctggtgtcctatgaaggtgccagaggatctcggagcacttgtaaaattagcgatccccttcccagccatctacatgcggccgctgccgccgcggctgttgttttgccttttgctcctctgcagtgaaattgctaggtcctttctaggctttcagggcaactgctgtgaaacaatagctaaagtgattgtttcctaaggaccattaccttgttttatgaggctggcagtttccccaaaaacctgccatcagaaaaaacaaaaaaattgccccgacacagaaacgtcaaacgctactggcatctctgggattgaggagggtaatactgccatgtcaggaaactgggagatgggcgttccagcggggcgggactaacgttcagttaaggaagttttgcacatggaggtaaatgggtaacagggaaagcggcatcccggggaattccttacacacaagagaggctctgccttgtcttcgaaggtagccagcttccccagctccagaaggggcaccgagggaagacggggagccccgcccagccagctggaccagccaaactcacgctggccgccagctctgcgacagatgtccttgccagcttgcctgcacatccaaatcgttcat

SEQ ID NO: 43341 - DNA, 676 bp, Bovine  19866880610942
  misc_feature (1)..(1): n is a, c, g, or t
nactagagcccaggacagacaggagccaggcccagagtcactgcaagttactggggccccagggctgtgctggggccacagcgaaagtgtgctgatcaagactcagcgaacacaagcagcagcctcctcaccagccagtcacaagtggaacagaagctttaatcaaagttcctggagtcaggggccctgagcctaaaaaatatttctttttttttttttgagcagaaatgaggcaagtcgggagcgtactcctatttgtgggcaagtctgggttttccgaatctttcattaagttttcctgaacccgatgttttttcttacagccaacatgctagactctggcaaatctgttcccccagcttaccacgttctaaaattataaaccggaatctgcactccgttgaaacctcacgctctgggctttcacacaccctctgctcagcatgcgtcacaaacaaagcagtcgctccgggctcctccgcggccttacctgagctggtggatgccggggatttgctgcgccgggaaggccctgggctcttggtggtgctcctgcgggacgacgaagctattttggtgtaggaagtggacttcaccactcgacattctggggaaagaagaaaggccacgcgtcagtagaggggcatggcgcgtaccattcgaaatgtacaataaa

SEQ ID NO: 43342 - DNA, 1151 bp, Bovine  19866880806193
  misc_feature (1)..(1): n is a, c, g, or t
naaatttaattttcttgtgattttcctttgagtttatattctcaacaagcaaggaatcaagtttattctcagaacatttaacttcaaaatatactataaatgttgcaaatttggataaaatttttataaagaggttgatatatttcctgcttacattttgagttgcctggatatgtattctcttaaaaaagagcatttggtgttaaaatgttttaaacagcaacaggttttaaaacttcgtccgttgaggccatcagcagggttttatagagtgaaatgctgaaaggtttcattgagctccccggttttgaaagctccatcactgtgctgtggtttcattgtacaatgttgtacttcgtgtttcacactggaccatgttattcctctcaatgttgttacgcttacccttagaataactgcataataaacaggaaaaactgcctgtgttgttcagtgactttctttcagaaaacttggtaagtagacactgaaaatgaaatgactgtgtagagtaaggtttaccttcattatcgtatttatggtgtttggtgacgtgattagcatcggtaggtgagacttaagagactgcagagtgagagcgcgtgacatccaaagtatcagatacggacagttaacagtgaaataagactatctggcgaagaactctggtttacttgggtttagtaaaatcattcctttcctctcaggtttgccttaagagtgaatatatcaaacaaattggcaactgtttctcttgaaaaaaaaagaaattttaaatatactttctcctaggcatgaaggcatttttcccaaggttgcctaatttgcagggggaagaatgtgtatgtgtatataggtacatgtgtgtgtgaaagttattttaaaagcaccaaatgagattatatatttattataaataaatatataatgttttattatatgtttatataatataaaaattaaataactataataaatatataataaaatacttgattgcccaactttaatatagaattaaaaccaataatctatttcattcataatatgatattctagttggaaaaaattatttacattaaaattattatagaagtctgaaattctatataagttttaaatctaacacacttttactaggttcattttaa

SEQ ID NO: 43343 - DNA, 1674 bp, Bovine  19866880836217
  misc_feature (1)..(1): n is a, c, g, or t
natggtacatatttattctctaataaagtgaaataaaaaataagatcaatttggttatagaaattccttaaagaacaccaccacttaattatttcaaacttgaactatcccaagaatgtcgtgaaaaaaattagcactggctaagaagcaaaagcagtctgggtacacccacgtaatcagcatgccttgtgcttgtctgttaaccctctgagtacatctctgacattcaggatctcgatagcttagtgctgaaaagattgcattccatctgattactcaatatttctacttgacaggtctcattccactatttattcagcatagatcattcaaattctgcagcgatgcgctgggatccccatgctgaacggccctgcattcttccgagcggcccctctgcagtgttatgggaaacacgccacagctttacacagtccacagtccttcaagacttgggtgaaaaaggcctgagccatgcactgtaaggtatgtacactagatgctggcatcatacacacaatgcccatggaaaaagcagtaattaattcagagaaagaaagtgaagtaaagtgaaagttgctcagtcgtgcccaactctttgtgaccccatggactatacagtccatggaattctccaggccagaatactgcagtgggtagcctttcccttctctaggggatcttcccaatccagggatcaaatccaggtcccctgcatggcaggcagattctttaccagctgagccaccagggaagcccagtctcctaacagccactctgtcagggagttggctctattccctgaggtccttgttccgttgttagtgtccaagtaacttgggaataaacatagtagattaacaccagaggagtcgagatcgaatcttagttctgactaggtcaaatcccaaattccaagggttaaactttccacaaaattgtctctagtatacccaagtctgacattctataacttgcatgtattctcaagatactaacattttgatgattgttttctcttcatatgactataaccaagaaaaggttgcaaggtgaaatgtaaactattacaaatatttcaatatgtcctgacaccaaagtaggaagaaataatttaaatatctggttggtcaaaaagttcatttgggttttctgtaacattttacagaaaaatcctaatgaactttttggccaaagcaatagaataagagatacttaagcttgaatttttgttgaaagttaaggatatcaaatagtgtaaaattttgttggcaaaatgtgttatcttttcagaaaacaaataaatgaaagatatattaaaaactaaccattaaaaaaagaaaaccacaagagtttcaaactcaaatgcttgcaaggggtatgcctttaatatagacctgtgatatttgcctcgtattgaaaaaaaaaaagtaagtgctaaaatgcttacctaacatttgaccataataactgcctagttcccttgttacactgccttcataaagtattttgtgatcataacaaatacaccataatctgtttagtgatccctgatatgaagcataaaagcacaataaaatgcagaagatacatatatatgtatttgtttagttacctctatttaaatatgcatgtgcatagacacacacacacaaaaccatgatgtaggaaaga

SEQ ID NO: 43344 - DNA, 1212 bp, Bovine  19866880912486
  misc_feature (1)..(1): n is a, c, g, or t
ncaaggaatgtagcagaagacggctcccgctatttccttttgatttcggtgtgtaaatctgctctcacctacagcttgaccacatgatggtgcagacacacattaaaccgattatttctgtctgagctgcgcatagaatgtgcactctaaactgcacataaaaatgttccccaaaatagtaccacctgcctgcagaagtatcattttctttcacaaagacagaccccaaatgtgtttctgggatcccgcagcctctggctgatgagggttgccaccctgtccctgctgggcgccagcccggcctgggccttccttccctctgaaggcagggatgccggtggtctccctggcatgtcttggacagaagacattctcagatatttagggagcagctcctcccgaatcaaagggataagagaggacaagtgggtgggggggagcaggaataaagagagtggggagcaaagcagaaggtaaaagtacaacacaaaccatcacaacccaagacagagctctcccagaacaggagggataagcaaacccaggaagaagaagggaaagggatgtaaaactaaaaaacaagacttgtttcagtttttaaaaggcacaatgaaaactaatcccagagaggcaaggtcaaattattgtgctctctcctgattaacgagaaatgttgaatatcctgttttctttcaaacatctgctgcgccctcaacattcaaagggaagggtgtttagaaagagaaagaaaggtgttttgcccacataggggcacacagagagcttttattcttgaaagaactcttccctgacttactaacttcttgcccagagacaggggcatctttctggctgcccatccagcacatctcgtcccatctctgggggccatggttgcaaactctctgtttcctaattgtctggtgctgcatgcccagagggaaccacacaaagacctgaatgtcttctgaattttcttggtcattttatgctcttgtaacagagctttaagactgtacacatggaagatagtagaacgtcttagcagtaagggtggaagcattcgggactatgtccttgtccatctatgtcttagtcagcttgaaaggctgagattgcagctgccttctcacagactttgggatgttgtctccattcctaacagcctggggaccgttcatccttatcctaagtgaaatgaagtgaaagtag

SEQ ID NO: 43345 - DNA, 757 bp, Bovine  19866880927328
  misc_feature (1)..(1): n is a, c, g, or t
ncgctcctctgtcctgggattctccggaaagaatgctggagtgggttgccatgccctcctacaggggatcttcctgacccaataagatagtccctctgaataggacctactgtccctgtttaagaaaatgcagacagattgtgaaaatcagggttccaattcatctatgaagtcagcacctatgaagatgaaacaaggaaaaagcatttttctcaagagttctcccacccatcagacacttgtctgttttgtctttgcctaggttgactccatctgctttttccttctctttttctttctcgataatgtggcaggcaatggacaagggctgggaaaacatattttagagtatctacagcctcctccatgatcagggagtgagggaaagtctaaggcaagcagccagatctcccgggaagcctgcctgaatcaccaccccctgaacacacagacggatagatggactcacatgcgtgcaaacacgttccctcctcccatgcctgcaagtgcagcggcataaatattaataaatgagccaccttagttcaaaaagaagatagtgaaacagcaagatagcttttcaggtccaaaaggttagtcaccttgtaatgagatggtcttgcatggagattgttctagcttccagaccagtttgagacattcaagcatttggttttcacttgctgtctgagccttttactaatgaaactgtaaagggaaaaaatcctttaagtttacaaagggtttgctaaattca

SEQ ID NO: 43346 - DNA, 1349 bp, Bovine  19866880934686
  misc_feature (1)..(1): n is a, c, g, or t
ncgttattctcagtgaaaattgtttccttcttttcccgctcacaaccctatgttacaaattctcaaaacctggcacctcatggcacatcccttttgaatgcctttacttctgcatatacctccctatcttctgaatttaattcatttcctgaagctctgcacaggacttccctggcagtccagtggttaagactctgcgcttccaatgcaaggggcacaggttcaacgcctggtcaggggaataagatcccacatgctccatggtgtggccaagaaaaattttaaaagttttgcacagaaaatgagctctaataattcacaattatttccaattatcttgttatcatttaatacaagaggatttttactacattttaaggagtacttctaatcgcaaaacattgtttttcccaagtttcagttggtaatacaagagtgatctttgtgtcctggttctagaagtattttttttgtctagactaaatgtttttgttcccaacttgctatagcggtgcagcagtaattgaactattttcgtggttctacaaacagcctagagcactgaagttttaatgttatcattgactagatcacaccaaaaatttagtaataaccttttgacatttcagctaaaatcaattcttgactgtctcagtcttcacattgacaaaacatgggaaaaacacggttttcagtctaccaaaacatccagtaacagcacctaataatttgtacagtcaatcatatctgtcccccactatcctaacagtgaaagtcaagatgccttttacgttaggacctcagggcttaggaggcttgccggaaacatttgcctccttagtttgtctgcgtgtgtccctttgtaaatcatgaaacagaggagccagaagaggcactgctttggctcatttaggataatcagtcattttagagtagataaaactggctctcagaggcattaagagcccactgagaacgatttacagacaagattaaaagaatcttcagtactatttacaatagccaggactcagaagcaacttgaatgtctattaacagagggatggataaagatgtggtacatacatatacaatggaatattactcagccataaaaagggacacatttgagtcagttctaataaggtggatgaacttagagcctattatacagagagaagtaagtcagaaagagagaaaaaccaaatgttgtaggttaatgcatgtatatatatggaatttattaatagaaaggtggcacagatgagcctatttgcagggcaacagtggagtcgcagacatagaaaaaagactggtgggcacaggggagaaggagagagtggggcaaa

SEQ ID NO: 43347 - DNA, 1873 bp, Bovine  19866880992621
  misc_feature (1)..(1): n is a, c, g, or t
nctcagttgaggagtccccatgctgagttttgcaggcacagtccaggcttgttagactggtcacccggagagaatgcacaaaggctaagtgctacttcgctactgtcacctgactaagcatattactgacaatcggattaagctttcccacaaactgtgttctgaactattaagccttttcctcttttatacctcatcttcaaatttaatttagctctccaaaacccagccaataacagggggttgctaattagtttttaatggcacccagaggggtaagcaggaatgatttgaagctcttgctttaaaaattaaagtcattgtgaaattactattcttggtcctagataaagtataatttacaatgttgtaattaccaaactttatttggtaataaagcatcaatatgaaaattttctgaataatgaaactgacctttcttggttggaataagcgatcaacatttttatctccctcaatctcaaccatgaccataacctggtgttagtacaaactaaaaagccttcaccctcagagaaaaaaaatctgaacttgaagtaggaaaaaaaccagactttatctataaatatagactaatcactaagttaaaagaaggccaatagatctaaaacaaagtataaagaatgaaaatttaaagtccctagaattaacatttttctatacagtaaatgattggttaattaaatgctttgttggctttaaatctttgcagaaggaaatcccacattccagctgccaccagctcagctgagtgattctaagtagaattcctggaaccctgggtgctcggcacaccctgatggagaaaacgatctgaataatttacaactaaagtagaaattactcacgcctttggtcagattaacataatagaaaagccttgagcaaagtacagctttatgaaaataaaacattcaattttcaaaacttctaattaagaaaatttcacatatggaagtagaggaaataggtgggctacctttcacatagattcaaccatcatcaacatctggccattcctatgttatatgattgactagaataaaaacataattttatgtggtgggatgagattgtacccgtcactgagaggcagtattcacattattattaacagggggtgctgtttttctattaccctggagtctaaaagttcaaagcttgtttttatgataacgaatgatacttttggagtagttcctggaaaagtgagcagtttctgctggagtaacaacaatcatactggtatctaacagtttgtgtcacagaagctggtgaaagggatttcttttaccttcagaacaacattcctagcaatatctcatttcacacaggaggggcctgaggtacagagcggtagacccaaggtcagggactatttcggtccaggctgagacttgaactatggggatacaattctaatgttaagactcttaaccgttatgccagtgcacagcaatgagattgaatactgctgagaggaaatgaaggagagagctccatcatacaggaaagtgaggtgctgtatataggtttacctcttttaccaaaacacacacctttactaattccatgacaagatacagctcagttggcacgtccatctcttcgatcagaagaacaatattggggtgcttcactcttctcaagatagacacctcattctggatcatgtgttcctattcaagagaaagttatctccatcaagacacacagcaaaacaatgaagggctaactcatattaacaaaaccatactatttaagggtttcccaggtggctcaggtggtaaaaagtctgtctgcaattcgggatacctgggttcgatccctgggtcagggagatcccctgtag

SEQ ID NO: 43348 - DNA, 795 bp, Bovine  19866881073616
  misc_feature (1)..(1): n is a, c, g, or t
ntccctttctggtgtccgattcagagaaagaccatgtccccacaagccagcagcctccacggcccctggaatcccagcttcctggggcactggctcacatgctgccaagtacagtgtttgtgcggatggcaacccagctcactcatccctgtgggtgtgcaggatgcctggacacagaggacaccggggaacacccactctgcctatggaaacccataggcgacgcaaccctcagaggagagaatcacacaccacataggtaaatccttttgtgacccacaagagagacaactagaagacaaagtccatgggatagtcccatcactctgatctggaccacatttccaacaacacacaactaacatcttgaaatacataggctttaactgtgttctgaaaagaaaatcaaaagcctgcttcctttacacaaggtgggcacatgagcaaaacaaataaaccgatatgcaaatgagaacgacgtccaggctcatacgagaaagaaaccaacctaagtatttcatagttctgaagggaaatacataggaaatgtaataccaaattgagcgaagcctttggaaccttcagttatccatgttttcatttaacaaacattcttaagcatgttttgtgctgaatactgccatactgacataaatgggatcaaagggggctttgccaattctagctgggatcttaggcaagttactaaacctttctgaacctcagaatgacaaaaataaatggattaaaaaatccactttgacatacagccagtgaataactcaaatattccag

SEQ ID NO: 43349 - DNA, 1859 bp, Bovine  19866881079918
  misc_feature (1)..(1): n is a, c, g, or t
naatagtgaaaaataagataaaaattcacagaacccattatgatgaataaataaaccaatgaataggaaaatctctagcatggtgcttctgtgtgacacaattgctcagaaaaacgttaactattacagtagtaaagtttccattattatcttaatggatggcactattattcattaaataatcaaagatgaaaatctggaacttatctgtaaacgttactttaatccctatctccaactgatgactaaacaatgttgattctagctctaagtgaaagtcactcagttgtgtcagactctgccaccccatggactgtagcctgccaggttcctctttccatgtaattctccaggcaagaatactggagtgggtagccattcccttctccaggggatcttcccaacccagggactgaacccaggtctctcacattgcaggcagattctttaccatctgagccaccagggaagccctccaaaatagttcacaaatctgccctttcctctccatttccaggtctaaagccctcacttggccgacagcaagtcttttaactcgatctataatctgttttgatccatagtataccctgtaaattatgtgtatggtgcactcacttctccccagtcatagctgattgagaccagggtgaacacctgtttcagacactagacaatcagatcccctctccttgaaatttgaaattggaattttagtttgtattggagcagaaataaattgtagggagccagtgaggctactttggggttttgagcagggagatttagggaaatctaatcagtggagagaaataacaacggagcagaagcagagacaagagacgacatggccaaaaaaggaagaaatctagactctccaaatctagaaatttaggttttccaactctcagttccagtctcccatcaagctccagctgtacttgtcattggatgtaataaatcaccactaactgcttaaaataagtgctcttttagtttaagctagtttgagttctatttcctgcaggcaaatgattcctgaaagtttatacttgtgataataatggaatcaggattagaacttgtgtctggcacttggctgcttacatcctatcagattctattttctcctgtagggttcttgactaagaaaacacacaaaaataatactaatcaggtgtaaagctaagaactttaaaataagtaatagctgatactatcctctctcactgcaaggctattctgacaagagttagattgaagaatttactgtggatctgaatccaaagcaaggcttccaccacccagcatgaaaagaaatttgggggtatagagacctggatagctctgtggggaaaaatggctgggcttcaaaagagacctatctcaacttgatgattctacagaagaaggtagaagaaggcaggctggctagcctatcttgagtgatcagttctgtccagatgtgtttacctcatgggagccctgacaatttaacattatactgaccctaccagtagtgaatttttatgggtcattgaatactgcaaattctggaaaatcagagtagaaatttctttcctatgggaacaaaaccaagcagtagtttcttctctatggacaaagcagaaatgtgaggaaataaaagatctcccctcaacagaagtcttagcagtaaaaattgtccagacagaaaaagttgggctatggtatgtcataaataaatcgtgagtttcaagagcaatctctccaactgaggcaataaaaacccgctgaaacctccaatggactttattctggtttaagagagaggagacttgtgagaagtgtgaagactgtgttattttcccctgcagggt

SEQ ID NO: 43350 - DNA, 804 bp, Bovine  19866881156900
  misc_feature (1)..(1): n is a, c, g, or t
natggtaaatattaacagactctccctttgaaaacagacatttctaaggagcaagaaatcgtgatttctttgggtgttcggagcaattcagtttcactgaaaatctcagtgggtaagcctcctgccatgtttttggctttcgtttaagtctcgtacaaagatctatagtgttccagcctctctctgccatgtctcagctccccttccctcccaggtcctggcaaaaggacaccaggaactctttttttctcagagcccagaagtttgcattggcacagagtccagtgtgggggcggttttctgctttaaaaaaataaatcatgaaattaatatacactgcaaggcaccctggaggtgttggataatgatgcaactcccacggaaatgatcagcaaaagcacatcatatatataagccccagacctcccccggtgctttccatggtcgagctgtctaaagaaatgacccattctgctgtctctgggtggaatctcctgagtaatgcctgtctcttaggtggattgctttgaaaaagttataggtggatatttcagatgcttactgctatgacagaaactccagctgctgtgctattcggtttggggcctgtgttgaaatgcttctttatctttcccgctactgacagctgatgttcattttctgggaggccgtcatcctggaggaaagaaataaaaaaaaaaaaaaaaaaaaggagaagaaaaaaaatgagataaatgggaaatgaggccaagatattccagtaacaggcagtgatcttaaaattcataacatttcaggaagaaa

SEQ ID NO: 43351 - DNA, 2163 bp, Bovine  19866881174640
  misc_feature (1)..(1): n is a, c, g, or t
naatttatccataaatggaaataatccctttgccacttgaaagatgggaatacggttgagcagtaaggtgattcaaggctagtaattcaattggaatgattggtgagtttggcagttaaggactcattggtgcttttctttctggtgtgttgaagaactgagaattctccagagatgttgataaccaagaaaggcccaaaatgaatccacaaagattatgcaaacatgagctgaagggattagtgtagaaggagaggatattaccttcattttctaaatttcttaaatagctattgctttgttttgtagtaatgaatatgaaaggaaatagctggactgtcccattattttattttatagtaaagaatatggaaggagatagcttgactgtccattattttattttattttattttatagtaaagaatataaaaggaaatagcttgactgtcccattaagcacatttagcttttgggtgaagggaaatgtgtttctgcttctagagcaccttccaggtatcatggctggagataccttgtgaagcgttgctgtaccaagtctggggttttaacttcttattttttaacgtgatcctcctcattctgatgggctcctacccagtccactagagttccagagagaagggtatctgttcccatcatctttgaatcctcagagtctgacatagttgctgacaggcagaagacactcagtaaatgtggaaatgaactgaactggtttaatcataagggacagtggtcaagatggtgtgcccccatgcaaatcccataatttgaaggaaaatgcaaacctcatgcataatggaggaacggattaacgtaatcccttggatggaaagggaatgttcattaaaaaaacaaatgaaataatggagtctaaccctcacatgtcaagaccgcctgaatgggtagatttcatagcagataaaggaattggtactgggattcttaaaggctgtgaaccagattattattttgtcatcttctgaggtgggtcagtcagtacttgatgggttagaagcagtattaaaattaaaatcaatttttcttgattcttactcaaatttaatttctgctacatcattgctggtgtttaagtccaccaataatgtaataaatccatcggtgaacattagacttaaaccactacgcctgtgttgagacttttgttcttggatgtgcttattttccttgtgtttgctctccagtagtttttttagtaaatcaaggtatttaaggttgactaagaaatcctatttttctctattccatggacttaattatttagaagagattagtaaatgatcaactattaatgggccagaagagtttaatgatgacatgggatatgtggtaaattttattcaattatattatgaaagtttaacaatgcattaaacgtagttaagtacaagttatgtgctggagctggcttaaaccagcttgttagagctgacttaaaatttcaagagttttctgagccagttgttcagcagatggtagcttgagattggtcatagatatcatgctgggaatatttacaccacagacatcaacagttgcttcaaatcaagacttcctcacagtccccaccctgaaagccagttgctcaacgttccagctctccagtggcagtgagtcttatttttattaaatgatttttaagtcaagtataatacttagggggacttcccaggtggctcactgctaaagaatctccctgtagtgcagaagacatgggtttgatccctgggtcgggaagatcccctggagaaggaagtggcaacccactccagtgtccttgcctggagaattccatggacagaggagcctggcaggctgtagtccatgggggtctccaaagagttgggcacaactgagtgactaaacaacaaaaataatatgttcagtcagttcagtcgctcagtcgtgtctgactctttgcaaccccacggacaggagcacactagtgatgtccaaaataggatgttagagtggttctttttcatttttatcatgacagttctatgattattgctacttttactgtctttccatagagtaaaggttatacttttttttttgaaaaacacttcttaaaaactgcaaatataattttaaggaaaactaaattatataatt

SEQ ID NO: 43352 - DNA, 3427 bp, Bovine  19866881199485
  misc_feature (1)..(1): n is a, c, g, or t
nctaaagaatggaacatagaattggaagataaaagtgatctaccccttaagaaccatgggttcaaaagttcacaatatgaaggactctatgtttgcaaaagcagtcagcgttcatgtcgcctaatttgtttaggctgtctgtttacctcttttatttatctagcactaaataaaattacgagagcacatgtgggtcacaaaaggaaaagttctggcaaaaggcatacaggttacatagatcatctttaaaaacttgaagaatgtttacatattctagttactttagaaattgtgatttcctcatttaacttatcttttctataagaataaactaaaaatctataattaatagtaaatattttaccatatgccttatctcatccatattaatcaagatgaaggctatattttctttggttgggataatgtttcaagaacctttgagtccaagtgtcttagtgtacttgagcttgcatttttcagtctgttccagcccacactatacctactgccataatgctggattcccagatttctggtatctgagttttcctctcagctctggactggagtctctccaagatggctaagatacgtctttactgactcctgtacactccttcacctaggacagggcttaacatacatacagtaagtgtgtggtgtgtgttgaattaatgtgtgtgaatgtgtgttgaattaaagaatggacacgtaaatggaggaaagagaggaactttggtctgtaagcctcctttcatcataatatcccagttgatttcaaagaaaaagggctttcttccctgtgctaaaaataatctgaaatacccatagcagtagttaactcatgaggttataacactatgtaacatgctacatgactatctgaatgataaaatcattttctgtaaaattaaataaggatgaactatattatatagggaactacatgagaggaattctcatgtaagatgctatatgagaatctacactatacatttcattgtgtgtatataaatatatatacatacacacatgtacatgtatacacacatagtgtctaatacatagtgacttgaattaatgttaagtaaaacacatgttaataagattttgttaaagaactaatttaacagttttcacctccacatttataagttagtttggtcttgttttacatctaaagattatacctcaatcttagaaattcatgtcagaaatgcataccgttcaaacatcctaatttcaataaggatgtaacagtgtatatttatcatccttatttgaaacttgaaagataattcaaagtatatatcaatgatttactacattatatttatacacaatgtattagctaatgctgatatgccaggtgctctcagtatttttacacttaccaattcaacaacaaccctattattactgtcctcattatacaagtgaggaaactgaggaaaagagaaatgaaatagttgtctaaagcctcaaagccagtgagtggcagaattaggatctgccaggcagtctagctacagagttcttgttcctaacctctatttactgcttttcatgtacttccctatataacatagttcattcttatttaattttacagaaaatgattttatcattcagataatccataatcagatttgcttctgaagggcaggccttatgaattctgcctgactctgaatacttatttgtacacagtaaatgattaaagatttttgttcagtgcaatcacaatggaaaaatcattacttttgcagccatattgaaattcagttgctagcacttttctaccagctatgtgactctcaataagatgctggctaactgatcccttatgtccctgaagtatctgtaacagcacagctaaaatcagcaatgagctagcaagtttgatggggaagtcccataaaatataagaactagagagcgaagggcagataacatggaaaaattagtacacaggcttcagccacaggctaagaaacattccatatgtaataacagctcatattcatgaagtgcttctatgatccaagagctatgttacattctttaaacgcacatgtcattagaccttcacaactgtatgaagtaggacttattctcatattacgaatggggatactgaggcaaagagaatggcttcagctcccacaactataagcagtgacatagagaacttcaacttatgtggatctaattttcaaaggcaagaaaaaaaggcaagagaaggtgtgctaagttaaaaactgtctgtgagattaaacttaaattggttatattgctcactttcctgccttgcagggcttatactacactttttcatgagctctttaaccttctccccgccaaaaccaaaagtatacacatatgcacatatgcctttcatgctgttgtggaatactaaactagacaaccaaggaagacagaaaatccagagtggatgagctgaggcttaaaatggctaaactatctaaactttatggcctggctatgactttagctgaggctagagagaagcttttggggctgagtatctagttcttcactgaatttcaaagagtttcatatcccacattaagttttgtctcagcaaatgaagtgaacgaaccaaaaattggctttttattcttatcattcattatgtatttttttcttgctatttttgggacaaatcttcttttatcttaacagatccttgataaattagtgtgtcctactttctttttccttataaagcttctctccaatgtatgtatgtactacggttaagataacatgtctatcatctaagaaatatatcgcataaattattggtcatattttgtactaatttgaagtttctggcctgaacctttaaaacctagaatatcagaacaacctgtccttacatatgctattcctcaaatagccatttcattttgtctatactagtactaatttaacttcttatagcttaactcctatgttaagggttgatgaaatttagatgctgagtgcaaaaagaggaaacattcagctttacctttcttacaacactaattgaacatacatactctggtagaaatgtttttagagtatagccttacaaagaaaattgacttctatgtatttataagttacctttgatagatccctgaagtttcccggaagagtcaaatccagctcttctgattcatagtttgttaatacccatggaaacacggggtattggttcagatcattgtatgtccgtcctagtaaagaaagagagacatgaaatctgtatacactaactgcttaggaaagtgttgaccatctttataatcaatgaggcaactattgcattgcagaagtaactcttttgtttattgaactatgtctgtatttaatcaaaagcacttacaacaacgtgtttcaaggaattcactca

SEQ ID NO: 43353 - DNA, 1079 bp, Bovine  19866881227933
  misc_feature (1)..(1): n is a, c, g, or t
ntcccagtcttaacgggtacacagcttcctagaaagacaggcattttaaatcaatactgaaataaaaggagaaacgtttccaaatgctgtggggtttaaaggacaaaagaactaacgccctaccttaaaggatggaaaagaaactactgtacctttaggctcaggatatgttgctcgatgtcattatatgattgatgggtagattacatgcacatcaaggtcagaggggacatccctggtggtcgagtggctaggactttgagataccaatgcagagggcctaggatcgatccctggtcaaggaactagatcccacatgccgcagctaagagtttgcacaccacaactaagacctgggaagccaaataaagaaaagtcttttattttaaaaagtcataaaatccatactgtgaaagggacttccttgaacccctagtcaaaccacaccctcactccccacaccctgtgtgtacttgaacctgctgccaaccttccactaagcaatcacccagcctgagtactgtgaccgagtttattcagagatagcacgtgcactgtctctgaggcagtcgctgcctttgtagaactccacttgttttccattgttgctgttagtctttcagttgtgtctgactttttcgaccccatgggctatagcctgccaggctcctgtgtccatgggattctccaggccagaatactggactgggttgccgtttccttctccagggtatcttcctgacccagagatcaaatctgcatctcttgcactacaggtggattctttaccccagagccacctgggaagcccttgttttcccttatatttagccaaaatctcttttctctcagtttctaccaattggcaccagttatttcctccaaattctaacgaagagtacagtccaattacccaagatgcagaactaagtaaaccactgtcaaaaagagtgctggattccaggcgacttggtctcttcactcaccacgaaatacagagcacctacattcactacattaaagggactgtgcaagaatcgacccagaggaagaggaaggctctgcccccctcaaaatca

SEQ ID NO: 43354 - DNA, 1132 bp, Bovine  19866881379698
  misc_feature (1)..(1): n is a, c, g, or t
ntggtgcagagggtacagagaaaaaggaatcttgctccactgttggtggtaatataaattgctatagccgttatggaaagcagtatggtggtgtaaaagctacaaacagttaacatatggtctagcgattcttctcctgggcatatatctgaagaaaactataactcaaaaagatacatgcatcccagtatctctacagcaccatttataatagtcaagacatggaagcaacctaaatgtccatcaacagatgactggataaagaagatgtggcataaatacacaatgaaatattactcagccacaaaaaagaatgaaatcatgccacttacagcaacaagggattatcatactaagtgaagtaaaccagagaaaaacaaatatcagatgatatagtatgtggaatttaattaaaaaaatgataaaaatgaactgattttcaaacagaaatagactcagacatagaaaacaaacatgattaccaaaggggaaagggcaggaagggataaattaggagtttaggatgaacacttatacactgctatatataaagtagataacctacaaggacctactatatagcacaggggaactgtactcaatatcttgtaataacctataatggaaaagagtctgaaaaacaatatacatctgaatcacttttgctgtatatctgaaactaccacaatattataaatcaactatatttcaatttttaaaaagttaggggtagctttaatattgatccctgtattgttttagcaataaataatattcctatgtagatatactaaccatctcattgagatgaatttcccatagcattttaactttttatgttttgtaattatttttcaaagctcacaatatatttatgctatatggttataagctgataatatttctaaaaacaatttgtttcagaataaaaatgttaaacacttaaaattttatggttttaggaatttaaaatactaaaactttaattcattagtgtatatgctttctgtagattattagaatataatgatcaatatacgactttcaagcacaaaatacgttttagaatagctaagtttggaggagagatcaaatggaaatatttgttgagtaagaaagaggaattacataa

SEQ ID NO: 43355 - DNA, 824 bp, Bovine  19866881960285
  misc_feature (1)..(1): n is a, c, g, or t
nacacagcagaaacgtgcccatggagcacggacaagggaggctgtggaattttaattatttagactgtagccatgcccccacatcatccaggtaaaagatgaaagaatcaattcacttcgtatttcacataaacactgtcgggaactggcttgactgatctttccagcacagtggtgtaaccgcactgaaaaattacactgcatcatgtggacatatctctaagctaacttcttaaatctctggaagcatgttagtcactcagtcatgtccgactctgcaaccccatgaactgtagtccaccaggctcctctgtccatgggattctccaggctagaatactggagtgggttgccatgtccttctccaggggatcttcatgacccagggattgaacctgggtctcctgcattgcaggcagagtctttaccatgcaagccaccagggaagccctcttccatcgtctggcagcacctaaattgcagctggttattagtaattgggggtcctctcccagcagctgtgcggagtgcctgctcctttggctgtgcccgcctcacagaccagagcgccgactgctctgctgcctgctttcgctcacgctagcttgttttaatctcacgctcccccatgctgtcactaactctgttattctttctgttttctttgctctcctccctttctattcaacagtgtttccttccacagagtccactcatgtttaaagatcagatgcagcaggatgtgatcatggtgctgaagtttccgtcaaactccccagtgacgcacgtggcggccaacacactcccccacctgaccatccctg

SEQ ID NO: 43356 - DNA, 736 bp, Bovine  19866882049364
  misc_feature (1)..(1): n is a, c, g, or t
ntcgagctctagatggctgaatattcccttatgggaacatgtactcctcaacaatggaaatattgaaaaggcaattaaaatttaataaaactgccaaaccaatgagattgatatctttagagataatttcccttgctagtttttagaaatgatataaaagtcatttcaaacatcctcaaagcttttcaaattaacttacactacagagacaccatacaggctctaagaaaagtaagagtatttagaggcttcagagatcttgttgttgttgttatttatttactaagacaaagaaaaacactccagaaaaaggaccaggttaaaaacaaaatgcattatctaaatttgcttttgaaagaaaattaaaagggcatgtaggactgtttgatattatttctcttatttgtggcgcttccctgatgactcagacagtgaagaatctgctgcagtgcaagagacacaggttcaatcctgggttgggaagattcgctggagaaggaaatggtaacccactctagtattcttgcctggagaatcccatggacagaggagcctggtgggctatagtccctggggtcacaaagaatcggatgcgactgagcagcagacattcttacttgtattgttttcttgaaatcccaaagtcatacaatgaacaaaagggtcagctgagcgaacacatatatttgagataagctactgctcagcaatggagcggatagcatctctctcattt

SEQ ID NO: 43357 - DNA, 1668 bp, Bovine  19866880438288
  misc_feature (1)..(1): n is a, c, g, or t
ncatgtattttgcatagtgggataatactgtagctttcctaaaggaggaaaaacactcgtgtactgtcaaaaagtcaacagaccaaaatgttatatttgagtattggagttgagacttctttttttcccctgaatcttagtgaagggaggggttttcttcaagttgattgagattgttttttaacttatggtgactttggcatcttctgccacgttgttcgtagtggaagctgatcctgtgtcctgagctgagccacatgcagacctgcagccctgagaaactttgagcaagagctgtgctcagctctgagactgggcgccaaaaagagactggccccggtggagagctgccatgggctttgcaaaggtgttgtgttgttggttgtcagggacacccctcagtcccccaccctctcacctcctggcactgagccgggaggagcgcatggaggatgagggaggggacagttctccttgacatgaactggaccttgacattggtccactttccacagaaacaacatagagcaaagtggaactgtcctcatattccccacacatggtgggctatctctgcattcatggtgaaatacagaactaagaaaccggaaaccactcagaaccttctgtcttaaaaaaaaaaaaaagaaacttaaaatttaaaaagttaatagacatttagaaaatgtaaaaaaccttgaaaagtataaaggaggaaaaaaaggtcttcataattgaaaagcagctgttactagcattttggtgatttcttgccagttttcaatgccagtatagtggaaattctgccctgtttccccccagtagcttatacgatactatgtctattatttttttttttggttttctctaatatcaaaccccaagtatctttttcactctactgtactcttagtaaacacaattctaatggcttcataatactttgtctcataacagatggttcattcacgcagccttccctctgctactgggcatttggttatttgtattattcccaaatgaaaatacagtccaaattccaagcagctggtttgcaaaaaaacaaagtgttttttaatactttatcctgctcttaagtttggaagtgttattgctggtggctgagagaaaaacagatccacacatggcagaactattcacacatcagaatggtgatggctgatctggggcgggggagggtctggggctccagagaaatagaacttgaaagtaaatgttccttaaaagtttcttcttttaatttctgtgtattacatgtttatttgaaatgttatgacaagtgcatttcactgcttttctgaatttttcaatatattttgaatcagtgatatctttgtggagttcagaagtcaaaaaagtataaaaagttatgcagcgaataggtctctgtgtttctctgctgcaccttcgcgctccccctagttagcagtgctgaccgtggcttatgtccttcgaggggttaagtgtgccctttgtcactcattgagcctctctgctgtcttggcttcaagctggcatccgggggcagccacagacagtcacggggtcagagccttctgccaacggaccaaatctgtgcacattctattatcctcttgttgaagtctttccaggccaggcccttcagccagaagggcagcattcagg

SEQ ID NO: 43358 - DNA, 2356 bp, Bovine  19866880453876
  misc_feature (1)..(1): n is a, c, g, or t
ncttggagctctgtttattcccaggaactgagggctcccgtgtgccagcgactgagccagagctggaagggatcgaagaagccaagggaatcaacgggactgtggagggagacaccagagggagcctgccacgcttcttttgggcttccctgatggctcagatggtaaagagtctgcctgcaatgcaggagacctgggttcgattcctgggtcaggaagaccctctggagaagggaatggctacccattccagtattcttgtctggagaattccatgggcagaggagactggtgggctaaagtctatggggtcgcaaagagtaggacacgactgagcgactgacacttcagactagatgtaagcagtcgcacatgagcacagtgactgatacaggacaagagccaccacggctggctccatctgagtaggaaaagcctggcaacggcctcagtgtcattcgataagggacggcagaacaaacgatggcacagacgtaggattaaaaagcatgaggcagttctaggtacagaacagaccataataaggaatgaacctccattcatgttgagggtaggcaacccatcgaaataaaatcatatatacttggtacttgggcttgcacaagtatctttaaaaagacacaagaaactgttaacacaaatggcctttgaagaagaggtggaggacaaatgtgggaaagggggcatttttcactgtatcttcttttgccactaatcaacttacttatcaagggcttcccaggtggctcagtggtaaaggatctgcctgctaatacaggagccataggagacacgggttcgatccctgggttgggaagatcccctggagtaggaaatggcaacccactccagtattcttgctgggataatcccatggacagaggagcctggcaggctacagtccatggggttgcaaagagtcggacacaactgaagccacgcagtaagcacgcatacaacttatcatcatcaattatttcagaataaatacatactctgttaagtgctttctaaatgactcccaccatagaccatcgcagtaaaacccacctttaactacctcccaacaagcttttgaaaaacctactaaaacattagaccttgatgcaaggtctcagctatgccgagcccagtgcttggcaggggccagaaggaatactcctggtttctccttcaaagagcttctgatgtggtgggttcagaactcactcgtgccaagccaggtggtgcacaaccagcagctgttctcagagaggaagtgaacgaatggatcctaatcaaaaccctcagctctgcgagaggctgatcctgaccgctcagcctcaacaggggaagccagagaaccacacctttcttcagaaaggaaacctacacttccacacaatccactcagagtctattttagctctgaacccagaatggtacactgactattataaatagcaaaaccaagattgcagtttgactgattcttgttctgttgttaggaaagaggtcagaagcttaagtcagttgtagaccaaggggtctagagcaaaccacagtgtgaacacagtcatgctgcgctggacggtcaacgcttgaatctccctctccaccacccaccacccgcccccgtgttgcctgagtaaccgagtcctgtggcttcagtgtgcagaaaagcacctgagaaactaacgaggctgtagggaggttctgtgggagtctgccaaaaccagaaaggaaattcttcaaggaaagcagctgtcctttcccctgaaggcagacgagctgagtggctcacctttgttgtgagacatcgcgtacagcaggcagagcacgaagagcgcatggtagtcatcgtccgggctatccagggcgtggtacaccatatccaggaagggtctggaagagaggggccagcgtgagcctcgcctgcacacaggatgccagctgcctttgcccttcacagcgcccaccccctgcctcctccaaccagcagcatgggcttcccagatggcttggtggtaaagaacccacctgccaacacaggagacacaagttcgacccctgggttggagaatcccatgaacaggggaccctgccggctacagtccctggtgtcgtaaagagttggacacaactgagcacgcacgcaccagcagcatagagcacagccaccatgtgcccagttcagccccaggtacggaggacacagagatgatcgacaggcaggctctgccccaggaagctgtcatgtttggggaaactgactaaggaacagctaaccgaccaattactcaacaatggtccacccgctgtccccgacactggggataagtgtggtcttatggca

SEQ ID NO: 43359 - DNA, 2475 bp, Bovine  19866880498234
  misc_feature (1)..(1): n is a, c, g, or t
nctggactgatttaggttttgctggataccgcatcttgtagtgtgctggtctctcagttgtgtctgactgtttgtgaccccgtggactgtagcctgccaggctcctttgtctggcaggaattctccaggcttgaatactggagtgtgttgccattcccttctccaggggattttcccaatccggggatggaacccgggtctcctgcattacagagagattcttcaccgtctgagccaccagggaagtcactcggcaacaaagtggttctctttccagttgtctttcggctcttctgattccatcaaggagaagatgcgtctctgactgtaattttccttcttctctctctttttttaaagctatatttctttttattagtcacaatatcacaggcagtgtgcactctttgtgtctggcttctttgactcagcacaaggttttgtgaatcatccatgatgtacatgtagtaggagttccttttgttccttttcattgctgagtagcgttccattttatggccatgtcacactctggctttgtgtgtgtggtcatgacgcatgcttgcagagtctagttccctgaccagggactgaacccgggtctgctgcagtgaaagtacagagtcctaaccactgggccaccagggattccatcagggggaagatgcttcttcaattctagctttccttctttaacctgacagagcaggtctccacacagccctttggaggacaacaacactgaaccagaacttgtgaaatttttttagtgggggtggctattaattttcacaatcaatcgatgtggcgggtcatgctgattttccattcccagggagccagaagatttcttcttgaaatacatatatttctcttagagagtggatttatttaatgacaaatatgaagtaaaatcttacagtggtactcaggaaggaggtgagccgatgactggagtttggagaaaccttctaatgtttagggctcagttctgaggtgctgtgtcaggaagtggtgaggtctccagtcctggggctcatacaaatggaggctggttgctataaaaataatccaggcagaggctggggcaggggtgattctgtatgatcgcacagcacccttagctgagactgcatgagtctgcgattctcattgtgtggggtccacttcccaattccacggctggatggtgtcatagctgcagatgcatatcatcagaggtggcccagctggacgggcaagtggtctggggggctgcctttctttccagccaggcaatctcacagttccccggacaacccggggcatgacggtggtgatatgttacagggtgattccaagttcatggggaccactccccagctggctcagcatctgtcccgatcttggatgtttaacagagcgcatcccttccttttgttcctttttcattgctgagtaggattccatttaatggctgcgtcacaccctggttttgtgtgtgtgtggccaccacatggcttgtgggatctagttccctgaccaggttccctgacctaattaaaggacatggcctgccagctctcgggttagtgagtctgtatgggctgcataggtatcccaaaggagagctgctttggagagagagagctgcaaaggagagaacctatcccaaagggttctccaagaaacagagccaacagaatgtgtatacatttgtgtggcagaggatgtgatggtgagatagcatcactgactcagtggacatgaatttgagcaaacttcaggagatagtgaaaggcagggaagcctggtgtacatggggttgcaaagagttggacatgacttagtgactgcacaacaacaacaacaataactgtatatgtgtgtgtgtacaccgctctccacatgtacatatatggagagaggtttatttctcaggcattggcttatgcagttatgaaggctagcaagtccaacatcaatgggtaggctgggaggctgggcacccaggggaaagctgatgctgcagttcagctccaaagggtgctgggggtggtggtggtagtgggtgtaagtgttttgttctatttgaaccttcaactgatcagaggaggcccacccacattatggagggcaatctgctttactcaaagcccactgatttaaatgttcatctcatccaaaaacaccctcacagaaaccctgtggcccagccaaactgacacagaaaatcaaccatcacagatgcttcaggtggactagacacacagcattaaataagatagtgctgtgttgtgcttagttgctcagtcatgtccaactcttttcaacctcatggactgtagccccccaggcttctctgcccgtggggattctccaggcaagaatactggagtgggttgccatgccactccagggatcttcttgacccagggatcaaacccaggtctcccgaagcccttttaaaatcattcctttttaattccctcccaa

SEQ ID NO: 43360 - DNA, 2264 bp, Bovine  19866880506617
  misc_feature (1)..(1): n is a, c, g, or t
ngtgccaggtcctctgccctgagagggcacagcctctgttggaaggccgcagggccagagctccaggtgaagggctgtgcagtctggcgggctccgaaccctgcccgcatcttaccttctgtctctcctgcccccacattcagttggtgggaccttgaaaccctcatggtttggattttcagattttgggctggtttagttagaagagacctggttctggccctccctaggtgtgagcttgggccagatcacgtggccttcatgggtctcgagcctcaagtgccgagcggggctgccacgagggtcacgtgaccctagaaggagggtcctggcaaacaacaggtgctcagcgaggtacagtggccccaacctgagcctgtgggtaatggcacaaggctgcctccttgacttttttttattgtaaatcttggctctgaaagcaccagaacgatgatgctgaaagaggtgagctttgtcttgttcgttttaaatctagagtcattgtgtgatttctccatacggagcttctcaccaaaatgacttcactcttctctgctctccgaactgttggtccaggccatccgggtgttcttcatgctccgtgccctgtccctgcaactgcggggggagcccgagacccagctgccactgacgcgggaggaagacctgatcaaaacggatgacgtccttgacctgagtgagttggtcatcttgagtcactgttgggggtggggggacaccgccaggctggctctcgcatcactgggaggctcgtgggtgacctgcatgtcgtactggggttgatccatcaccgtgaacttacagagcgtgcatgttacacaaaactttcggaaaaggggccctagattctggacacttggagtcagtctgtgggccctgctttctggagaccaaggggagctgcgcagctgttttgctgaaatatctctgcatggtgactggggtctcaagcaggcgtgggcacagctctgggatccctgccctccatatagtcatagcagcaccaggaggttggttgtgtgtgttaaaggtggtctgtatgattttaatgactaaaggatcctggctgcttaaaaaacggaatgttttaaaaaacacaagccaccagcatttaggtaaagatgaaggctttggaggcccaagaaccatgtgctgagcctgaaagcctgagcatccaaccagtgcctcagcgctctcctcttcagtgtgagactgagatttaaaggggacagaatataaagcctagttgtgttcctgtaacccttctcccattcatataactctctttttcctgttatttgctgtaacattttgatatattaggattctttggttatgagaaatagaaaggccaacttaaactaacttaaggaaaaagaaaggcagattcactgatatcagtgtaaaaagctagatcttctttcaggcatggcttgatctaggtactcaagcaatatcatcaggaaaccgccaccttccttctctcagcttttctttcctctgttctggctccatcccccagaaagctctcaccaaatagtgacaagatggccatcagcacctctaagatctgctgaactggctaagcagccctgacaaaaacagagcttctctttccctataacttatatagaagtccagggcaatgctctcattggcccagcttgagtcacatgaccgttcctgacccagtcagtgatcagcagaatgtgattcactgattggttaggtcaagatcacatgcttagctgtgatgctgggaaggtgggacctgctccttttgaaccccatcgcctggggctgaggaaggagggggcccctaaagaaacttgaaaagacgagctggaagctggagaggcagaaacggcaggtagccactttgtagtggacgatgagagagagagcccttgttttaaatcaactttattgaaatacagcttgcatccagtaaagttcaccgagttttagtgtacagtggaatgagtcttgacaaaaactattcagttgtgtggcctgcagttatgatgcagaccaaggagggtttgtatcttttgagccagaggcccctgcccagctctgtattctctcaagcaagtgattgaaaccaccacgacttttgtttccttgcctggaaaatggggatgatcttcattatgttacagggctgttttgagacttgagtgaagtgtaatatgaaacataagatgaccaagtctagtgcctcacacataactgtgctcagg

SEQ ID NO: 43361 - DNA, 1671 bp, Bovine  19866880511997
  misc_feature (1)..(1): n is a, c, g, or t
nagaagtgaaatgcttcatggaaggcctcgcgcagcaggtgacacggccaaggaatcaagcccaggtctctctgttggggccgaaggtttgaactcttcgctgctgttctttgccactacttgctgtgtttaactccttgactatattttgtcttgtatactctgatctaccttttatctgtgaaaatgggccccccactcccattcaccatatattgagcacctacagtgtatcagacattctggagtcttttggggtcaccaggatcagtaagatgatgttcctgacctcagggaactcaggtctcgtgaaggaggcagatcactgcaaaatcagagtggtctgtgcagcagcaaatgcatctgggtacagaggtgccagagaggagggagcaagcaaatccactcgggcaggagagcgggagggaggttcttgaagaaggcttcaccgaaaggtgactgagctgggttttgacatacgtggaagagtttgctggttggttaggaccttggcaagctgaactggcctcagtctgcgggcctgggagacgctctcttgaaacctgagccaggcagcactcccagggcattggccaggctgctggtccctgtgctgctcaggaatggcctctgcgattctcttgcccgccaggataaggccgggcctctggtctctgcacgtgtgggtgggtgggtgaggtacctcgtcattgcctctcgaatccactccacttccagctgcacacagcgggtaagatcactgcccttgaactgcaggccacccacttcatctgagccatcagtcctgtgaaggggaattagggcattccaggggcgatcatggtggcttgtgatttgtgccccagccgctggctctgggccctatcctccctgacctgtgactccaggtctcatctctgcagcagccagacagcagctcttaggcgtttggcgctgagctgtgcatctccattggttccagcagcctcagaaccacctgagagtgtgaaaaaggccaccgcctggccttccctccgcacccctgcacttgagtctccggtgggctctgtccccgctttgtcccgctgtcgaggccattctcttgcccacactggagcgtgagcacacctgtcttcaaaagcttggcagtcttgcttcggtttgggttggtaagttgctggttatgtaacagttcgaagtgtcgtctgcctttattctcgggtggtgagttacgtctcctctgaatgggaattgtgctgaccaccaagtctgaaaaacacccagccaaactgttgataacatgccgctcatggtccctgggcctggcttccgttctggcggtcaccttgagttctcctttcttcccttcctctcaggtacctgtaccacgtgttgaccaagaacaccaccgtcacagagcagaacaggaacctgctggtggagaccatccggtccatcaccgagatcctcatctggggggaccagaatgacagctctgtgtttgagtaagggtgtctgttttttgatccttcttctccctttgcatgtttttctaaatgcgagccatgagtcattcccaatgacgtcagggtttgacgccagtttggtcctgcaccttctctctctctctctctctcaaatgtccttgaaatgctgtagaaatgcctgctg

SEQ ID NO: 43362 - DNA, 856 bp, Bovine  19866880753521
  misc_feature (1)..(1): n is a, c, g, or t
natcgtatgaaaagcatctaatttatcagccctaggccatttttcttcctgcagtgcactggcaataaagatttcagtcaaaaatcatcatcctgggttatcaggattataaggaagaaccaataatgataaagatgacaacactatcaataataatgacagtagttatgaaataatcatagtgggagacacttacgacatgggccaggcactgttctgagcatgttaagtgcattagcccattttattctcctcataacaaagtaaatcccctcttttgacaaacgggacacagggcagggaataagagggcagggcctcgccccgggctgcccaggctcctacgggcctggtcacagctgtcgccaaaggccgggcagtgtagagtgaggcacacaggtgtctggaacgacaggcgcacccagggacacacacggggtgccagacaggacggcccagcgggcaggctggcggtggcgcgtgcactcaccttcattctccccactcgtcttgatgccttttgaaccaccctctgtacctttagccttctcggcgtcttcctgggcatcctcggcaggccctttctcctcgtcttcctcctccccaacgtttttgtagttgggtctcttttgcacccgcctcttgcccttgtgcttgttcatctcaagggaccgctctagtgtctcggtgggtttaatgaaacaccgaatgctcggcttagcctggaaagttgaaccaagacaatggacagatttgaacagtggggtctcactggctcctatgggagctgtctgaaggtttccaccccaagaatttccctccaatacagcaaattttatgtcttcgttgatcatga

SEQ ID NO: 43363 - DNA, 771 bp, Bovine  19866880862350
  misc_feature (1)..(1): n is a, c, g, or t
natgagaaaatgaggcccagaaggggctaggtgacttgccctaggctcttctaaaataatagtgcttcaccaggagctcaaactgagttccctgcttagcactctttaaatagtatttatatgcaaatgaaccaggtccagggagcaaagatcaaaactcgtccctcatctgtttagggcaggattctgattgaagagtttttctctctgcagggtccaggtgatattcagacatcactttgtcattgaaagacagaaacgttttaaagcaaacttttccattatctcgattcagtctatccatctgaatttatcccaaacaaccacctactgtgtcttctgggggccaccataccctgccaataagtggaatgtgctctaagaacgcagattaatttcaataatgctcaaaacaaaacctaattgaaagttaaattagcatccaaatccagacattaatttttatttacgtactttggattattcatccacgaaaacgacagataaaattgagacatgattcaactgtccaggaaacccagatagtgcgttacagatgccaagaactgagagcccagagacgggagcgttccaggcgctcacctcttgacagatggcatccatcagagcccacttaggaacgcagcgctggatgctcctcaccctttctggaaggactcagacctggtaggtcagcgccccaagatgaagcgactgcttcctctgatgaccactcactcccagggaattgcatgccgcatgcaaccgaag

SEQ ID NO: 43364 - DNA, 1352 bp, Bovine  19866880935142
  misc_feature (1)..(1): n is a, c, g, or t
ntgaggaaggggtgaccccaagtgggttcctagctgatcctatactcctttcccctctcctgtaggtgagatgcccccggccagccaaacaccccccatccagcgggcctgctgtccagagccttcccaagtccccagaccggcctggctctgccagcccctttgccccgtctgccgctgacctccccagcatgcccgaaccggccctcacctcccgtgcaggcctgacaggtaagaatcagctggacctctgagagttaccggaaacagaactaaaggttctggggaaggagttgcctcagacaacgagatccacccacagaactgcctgcagggactggcaagttgtgtttgtacaaaacaggacagggtgtcctgggaggtgggtgcaagggagggtgggcgaggggaacagcaggagaatccatgtcaaatctcagcagcttgttacatggcaggaaaacaggcccagtgcagcctgatctgaattgccagcagaacctggagatcttgattttagcatacatattgtgatttctgaaacactggtgaaaattttaaaagtacagccggccaaagaaagacatctttgagtaggatacagcctcaggtcaccacctggggacactcagcccatgtcagctctgcccttggcatactcaagggactgatgacccagagggagggaggtccccggggtgcctctcaccctaactctaacaccagcttcttcccctccagaggatgagatgtcccccaccaaatgcccagcagctggcggggcctccagcaaacttcccaagtggcctggtgagtggtagcagggtcccttacttgttggctcattcattcattcattcaggtgctcatttggtcccaccattatcccatcattcgttccaccagttacacctgcacttagagaaaggtttactgaggacctgtcccctgtgagcccatgctatgtgtcagcattttcttgtttgcaaagctgggagaatgcaggagggaagggtgggtgacagagagtggatgaaggcaagagtgggtgatgagtgtgagagggtagaaaggaaagggcaacttacagaacagccagacggctgagtcggactctatcccagacacacttacaggcacatgagatgtatgtagtcaagtcaccaacgaccccagtatgatcccggttttacaggtgaggaaactgaagcatagggggtacctcacatgctcaagagaacagtaaaaagttgaaccagattcgtggagtctactatcttagctcttaacacccctccccccatggcctccctacggtgagcaaatagaagaatgttagcaacaaggtcctg

SEQ ID NO: 43365 - DNA, 1299 bp, Bovine  19866880957494
  misc_feature (1)..(1): n is a, c, g, or t
nagatggagtccttaacagttccagtgtccacatcctgggtttgctcactcacctggaaaaggctcagaaacctggggcgtgcccaagactacccctggtcccccgagcagccggtgagtttttttaaacactggtctgatcagcacacctccagctaaagcaaccacttggttcccactgcctgcatcatagtgtccaggctgtctcttgtcctggcacttcgggctgtcttggatctaatccttgacaacactgcctgcctcatcctccagcttgaaccccacactccaaacccaggttagtggtcatccccaacatcgcttatatgtccccgaagcctgaccttgaccctggtcagctgttcctgcacctgaatgcacttcctgtctttccagaaacaatgactccttcgagttgattccaggtgtgcctcacctccctcaagggcctcgaggtttcttaatgacaaacaatagaatccagttgtggctcatttaaatagacgaccatactgaacaaatcccggggtgctcactgaacccctaagagggcaggaagtccacatgaagaaggcaggcggtaagaagcaagactccaactccatttctgccacaagccagcatgggcggtgcccacgctccttccaaggagcccagggaactccatgttgccgaggcctccctcagaaagaccttccggatccttcctttccactgcaagaggctcgttcaaactccagactgggtgcctttgattggctgagcccatgtcacatgaccatgccctagctgcaatggaggatgggaaagtgggtgtggcctatttgggctcctcccttgggaggcagggctgtgtcctgcccgcaggcatatggtgggctgggaattgaggttcctgatgtcggaagggggttcagaaggtgggggactcaaaggtgaccaaagcttgggtgtctgtgaccctcagcattctgggagaggcacatgtgcaatatcctgtcacttcttccttggatacctccctccgcagccccccacgtccaatacttcaccagtcctgtagacgggatgttttgtctccctgccctctctgtgcccactccttaagggaccacccccccccccccccccgacccaagtcaggggagaagacgggagctaaagggacatgacagccccagtgtgacacattgtggtgatggaggagtgtggagggagcccaaaataggcacatgatcctgctaggggtatctgggaaggctacttgggaggtggaatgctgtctcaaaggatgaatag

SEQ ID NO: 43366 - DNA, 2440 bp, Bovine  19866881125047
  misc_feature (1)..(1): n is a, c, g, or t
ngggcaatacccagactaggaagactgcagagtgggtggttcttgcaccgttttccagataaggacattggggatcatctggtcagttgcacaagtggacagagtgggtgtcaggatgactcactggctgcacatgtgctcattctgtgccaatggaagccgagtggcctcttggctccatctttgcgctggggctgtcaccatgctcctcaggggcccaggtggtctgtgggccttagccgtgtactcttgcccgttttcccacagacttctccacggtgcaggcggtccaggccaccatgatcctgtccaccatcctctgctgcatcgcctttctgatcttcttgctccaactcttccgcctcaagcagggagagagatttgttttaacctccatcatccagctcatggcttgtaagtgaaatgacgggcttcccagaataaacactcccttcgcagccaaccatgagtattctggtgggaggagagtggcaggtgaggaattggaaaggaggggtcagcagctgggatgttttttgcacttcagagtttggatttagttagagcgtcaggaaaggtgtcctaaaaatgggaagcctgagctaggatctgtagggtaagtaggagttgctgccttggtagagaggagagaggcatagctctccccgcaaggaaaatctgggtacttagccttattgtaccactaatatctgtgaatgctgatggttcagtaaggatgttttcagctgcgattaagagagaaatccaatttgcaatgacttcaggcacaaaaactttacttttttaatataacaaatagcttgaaggtggaaggtgccagagttgttctggcagctcagcagtagcatcaggaaccctccactctttccatccttctgtgctgtcatcttcagagtgtcagtgatggcctcctcatggccccaaaagggctgctgcagctcctgacattcatcctgacctaataaaccaccaccaccaagagtttctaaagcagtaagcaagggaaaatacagcatcaaaaaatgctttctcctctctcatctccctcttttcaggataatacagtaataattttcactgtagaattttctgtggccagaactgggatatgtagaaccataaactataacaagtaaacaggacaggatgagtagctgcgatagagaccatatgtgtcctgcaaagcagactacttcctgcctggctgacccatgtcctggagcagttatgaccctctgggctgggtagctggctgtccaaatgacactggattcagccagcaagaatgggcagctgaatggctacagggcaatattctgccatgaaatactagttgtaatctttccaagagactaaaataaatgcctgctaataataaaacctgaaatttgtcttcagctctgaccacagtcccctcgggtccccggttgcacactgtggtctgtgatttatttgggccctggctttcttccaacaggcctgtgtgtcatgatcgcagcttccatttacacagaccggcgcaaagacattcacgagaagaacgaagaactgtatgcccagacctcgggcggcagcttcggctactccttcatcctcgcctgggtggcctttgctttcaccttcatcagcggcctcatgtatctgatactgaggaagcgcaaatagagtccaggagctgggtggctttcgccgcagttcagaatccacataaccgttttgtatataatcagtttttttgtgtgtgtggtttttctagcaaacacattgtttcctttaaaagccaaaagaagagtttttatgttcttgagatcagagaatagactatgaagtctggaattcggaactcctgcccatccgaaagcctcaacatgacaaagccaaaaatcttgcaatgctcaaatccaagtgttcagcaggataaccacagggatgtaatgggatggacaagactccgaaaaatccaggtcttgggggcatcttcccctaggtttgggctacactgagccccgctccctcacctcagcttcctgtactgaatctcggtgtgtttagtggtggaaggtggggagaagggggtccgggtactggagaaaacttccttggatgcttagccaagttccacatgagaaacgggtataggccccacggtgttctgtctacatccagaccagagccccaaccctcctgtcatggactggcttcagaaagtgccacccacgtttgctgacagtgtcacctgcttgccttcaggaaggtgagctttaatctgggggtctgatttaggctcacacgtgatcccccaggcaccttgtaaaatgcaggctctccgggtcccttcctagacctacagaatcagagtcttcagggatggagcctgggaacctgcatttgtaacaagctccttggtgatgctcaggtg

SEQ ID NO: 43367 - DNA, 1251 bp, Bovine  19866881207051
  misc_feature (1)..(1): n is a, c, g, or t
ncgagaggggctgctctgttgggccccctacgtctcgaggcactgtgtcagcatggtgggggcgtcttccctggaggtacagagatctgaggttggggggcacggctgtgtcagagcgtgacagtgctggagccgggacccccgctgccacctgggtgccgtccacggtcctggctgccctgagatgcagttgcatccacttcccaagggtgttgacatgccgcagaagatgttcctggagcaaatctaacccacaggtcccctgagatcagagaaatcaaaaccgtggccccattttcaaatgcctggcaaggactgggatttgggctggcgggggtggggggggtggtggaaaatacttaaaagtggaacgtgccttcagtggaaatgatcattttactaggcaaggaaggagaaagctcaaaagccagtctctacactcaaacgccttatctcctccaaggcacaggatgcaatcgagaaattctgccttgcagagagaaaaaataatcatttttgtctttttcggaactgtctaggactacttttaatacataacccacaacagagggcatagccattaggtgaccttgtgatttcagcagaacatgtctctctaatgtagctcgattatgattgtaagtttataaaaacagggaaagattacaggaatatacattaaaccacatcaatgagtgctactgagaaaaaaaaaagtccagtagacaggtaccaatcaaataatcaatatgtaggaaacagctacatcaccctgctttaagagaaccaaataatgttgcaattggatttgctttaaaattttccacttgaacaaaactgacagctgtattataatcacatttccagtcactttataagacacaaatttcatttctccatatttctacttcatttctgaaaaggggccagcaacgttattcatcaggcacatggagaggcagcctaattcatggggcagggggaaaacgctgttaattccatgttttccatttcccgagagaattggtggtttaactcaaacatgatttttttctgatcagtctagttcagggttctagtttcaaacaagggtagggggaaaaaagcagcattttagtccttaggtaaaatgacttgagattgttgaaattaggactatctacatttttagaaaacaccagggtggatttaagattcttggtatattcttcatagaaaaagtctgttataaaaccggctattcaaatatca

SEQ ID NO: 43368 - DNA, 1654 bp, Bovine  19866881214442
  misc_feature (1)..(1): n is a, c, g, or t
ntggtaaagaatctacctgccaatgccggagacacaggttcgatccctgggtggggaagatttcctggagcaggaaatggcctcacactctagtattcttgcctggaaaattccacggatggaggagcctggcgggctacagtccatttggtctcaaatggtcagatacaacttaacgactgagcacacccatgctgtttgggactttcacgtctttcttttttccaccatgtaatgaacacagatgtactgtgagcagaacctgagggctgagtctgagtttttcccattatggaaatgtttggcactgagatccaaaaacgtctggctgcttgactgcacttctagtttgcagcaggagtcttggcaccgcagggacagagcttcagagtgctcccaggtttgaatttgcctgaaatacagtcagaaagactaacaggaagcacgggagtttgctcccaccacccatgccgttaccacccaagcgtcgagtccaggatggcccaggggatgctctgggcaagttcgaaagcaagtcgccatgtgtctcccaacacacaaggtgcacagaggccagttctcttggcccatcttctgaaaagacagagtgcagttgggcactgagaaggaaaaggagaagaaaaccgttcctgttgttaatcgtgtcccaggctgtgctcttgttttcctgggagcttaagtacaatcataaatattattcctgcagactatgagagcatcctttgtacttttctaaatatttttaattttttttttttaaaaaacatcctcttcttcctttctgccaagcaattgctcaggaaaacaatatttttccaatcacttgcttaaagtgtacttactgtgactctttcggtgtggcaggcacttgggaagacagcagggaacaagctggtcaaaaaacctttgctccctggaacttactaaccagccctggtcagctgcactcactattgtgcttgacgctgatatgagttttgttatgctttgctttctaagattcctggctatgtctgtgtatgtggtttgtctcttagactgtaaaaccatggacgcattcccctcagctgagtgactgtcaacccagccaggtgactccagcctcaggactgaagccgggcttacaagtgcctaggaatctttgggtatagagaaattggggtgccttctatttccaacggaaggtacacgcacacacatacataggcatacacttgcacaccacactcatggtccagcagttcaaaattcaaagagtaacaggacaggaggagacccagaaattcctgtccattcgatgcttccaggcaagaaggtatttaagccattctgggcacttcttgatcggcaagttcttatatctgaatagtctggaattccgtccttacctgggataggactccttttggacacagcccatttctgtttgcccccctgcatgaccacccctgagaggctgatgccctggataaggcaacttggtgttcagcttctgcctcctgcaaccagcacagaggaggtgctcagacacaggacttttctcccctcacactgtttataatctgtaactgtatttgttaattttttatttatgtgctctctcactcattgtcttcactccccgatagaacat

SEQ ID NO: 43369 - DNA, 1862 bp, Bovine  19866881226204
  misc_feature (1)..(1): n is a, c, g, or t
ncactctggagagaggcagagtggaatttgagctcaggtgaaccccacgctgactccccctccatcttggccaagacttacgccagtgtcttcacctgagggcactttctcaggccagcggcaagctgctgagccccagcggctgtgaacttgttgtactggacactggggagagaaagccattgtggatcctggccctggggaccatccagcctcagaccaaggtcaacaccacgctctcgacaaccagcccttccagggatgccagcaagagaccctcggtcctcccaagccctgcccgcatggcccaggctcccacactcactccagcacccggagggacaccatgtctggaagcgcgtgcgccaggctctcggctcccgcgtcgcagatacagttattgtacaagctgtgggagacagaggtcaggccaggggtcgggggtgctggggcgtcagggcctggcagcagacacaccagctgggactactgccccattcgacagaggggaaaaccgagtaacttctccgtggttactccgtgagtctggggaagcagcaggactgagtggaggtagcttcctgccagggacacctcaagttcaaatcccagctctgcagcttgttgcctgacttttggcaagttactcagcatccctgtgactcagtttgcgcctccataaaatgggcatgttagagtaatagtggggaagagtaaataagttcatgttggtaaaacacccagaacagggcccaacacgtggaatgaactacttgttaactatggttattatatctcccggggggttgtgaggttatatcagttactgtagtgcgcccagcactggggctatagcagggaagagcgagacccagagtcactgggcaggcttggctttctataggatactcagtcaccatcagcagtgtcaaaaatagaacatgggtgtcgcggatgcctcattaacaagagtccttataacaagccaggtgcggccgcggttctgatttcaaggccgtgactctgcctcgaaccggcctcagagcagcgctgcaggactgcatgaaaacgcagcaggtctacactgcggcaaagggattcacgctacactccggggacccctgaagtcaggagttggctcgcaccaggggaggaaccagggagaggttttgcaatctcttcctgggatggaccttagaacccagggggcccttcctcccccgcacagggagaggattcttcccatatttcactgatgccaagatgtacgtgttcacatttgaaaatcactgagatcaggatgtgtctgataatcaaaggatgtcatcatttagttaacagtgttttgtcctcttaatgatgtcttaccaatggaaggcatcttaaagtccttaaaatatgaggtttgtttttttttcattttttggccatgccgtgcaacttgcaggatctcagtttcccagtcagggatagaacctgggctgcagcagtgaaagcccagaatcctaaccactcggccaccagggaactcccaatgtgagtgaggttttttaaagtgtcactcaggtcacacatcacccccaccgggcccacctgcttctccattcacaccggaaaacccccagtctccctcctgaccctaacgaaggtctccctgtatggtctggcctcccctgacctctctctcctcatttcccactctgggcctagttccttatatccagccacaggggcccaccccccttctggctctgaaggacccaacccctttcccacatcaggccctttgcatctgcatcccacagaagggggagggccacctcctcagagctctcctgacctccctggtgaattcaatcctc

SEQ ID NO: 43370 - DNA, 797 bp, Bovine  19866881494065
  misc_feature (1)..(1): n is a, c, g, or t
ngcactgcagcttccgcctgacctccgagcattcagcacgccgtcaccaggatgacctggttgtgggctgggacggcaaggaccaggtaggtgttgggctggaacaggacctgggaagcccacgttgtggcctgagtgggacattcggggccctgccctgcccaggagcattatgggtccaaatgggctgagccccggtccccaaaggaccacgggaagagcactggcggggaggagggagcctgggtcccagcaccacctggatgataacaggaagaccagtggctgatgcatagcgacggcctcttgtgtgccaggcaggccagccccctttcatagatgaaactgaagctcagaggggaatggggctactgaaaggcagggctgggattcagatccatgaaatgcttctaacccccagtcccctctctgtcgtatgcttgtccctatctcctgctctccaatcctcaagttactcctctgaaaaatgggctgaagctcccagagggcctcccccagtggtgggccagcagtcctcactcccttgaccctgatgaaggaggtgacctgtgctgggtggtggagaggccctctctgggggaggcctcccgctcagcctgtcccctccccaggtggcgctgtcctcctctctgcggctggggaagggcaagctggccgcacgcctggccctggctcaccctttcagcctctcctggcggcaggccgaggccagtggccttgctgagagcaggggcggcaggcagagctggcaggtgagcggggagcagccacggggc

SEQ ID NO: 43371 - DNA, 835 bp, Bovine  19866881679538
  misc_feature (1)..(1): n is a, c, g, or t
ntgctgttatgaatctacttacttactcattaaaataatgtagttgaattttccgaagctacagaattaaaacaagtccattttttaatccaacaaattggaaaagatttttaagagtagttgccattgttaatgagggtggagggaaatgggtgttctcctacacttgtacttttcatgtaaattggcacagtgtttgggaacacagtttggcaatgagatggaatatttctccagaaggtctgggacctaacccattctagattagtgatattccaaagtgtacagatcttaactcgaaaagaagctaatgtttgaaaaatctggaaccagcctcacaaatccctgaagcatccttttgctcttatgattttgataaatggattgaggattgggaaacatattgtagaactgtggttgaccactttaaaaacaatcagaacccacccgccccgcttgctgaactttgtgtgaacgtgtttcaggtttgtgagtcctttgagcacctgccacctctcccggagccgccgctaccgctgtcggagctggcagacaaagtccgcgacacgcttcctcctcagaagcctgagctcaaagtaaaacgggtgctgcggcccaggggcatcgccctgacgtggaacatcaccaaaatcaaccccaagtgtgcccccgtggaaagctaccacctcttcctgtgccatgagaaccctagtaataagctgatctggaagaaaattggagaaattaaagctttaccactcccaatggcctgtactttatctaagtttttagcttccagcaagtattattttactgtccaatcgaaagacatttt

SEQ ID NO: 43372 - DNA, 1382 bp, Bovine  19866881714041
  misc_feature (1)..(1): n is a, c, g, or t
natatacttattctagtgatactttagacaatattttaagtgctttatacttgtcgagctgacttaaccagcacgacctacttgaggtgtgcactaattttacacctgtgtaccatctcagcatcccacagcccccatctccctcagcatctcgaagccccccctgatggagaaggggaggcagaagcccagccaaacacacagtaatggggccccatgaaacatccaggtttcccaggaatgaaacacatcatggcaaaggtataagcgagtcacttccactcagggtctacaaacagctgcagggagaacacacgatttctcatcactccctgcaggtggccctggagtgtctgtaccagagagagaaaaggatcgggattgatttggtccatgacaacgtggagaaaaatcttatccgggtaaagtgccccctgggtctggccaactccctaagggaagtggaagatcagctggtcagagaggtttctgagctgccagtcaagagtagaagcaccattgagtccccgcccccacccccacccagccccccacacgccatgcaaagttaggactcagaaagtggggcaggggttaggttgcaatttagaaatagtgagagatgaggtcatttgaccctcagtcttttcatctccaaaatgggcattataatagtgtgtgctgtggtgtcacttcagtcgtgtctgactctttgggacccggtagcccaccaggctcctctgtccatgggattctccaggcaagaatattggagagggttgccatgccctcctccaggggatcttcctgacccagggatcaaacctgagtctcttgcatctcttgcattggcaggcaagttctttaccactggtgccacctgggaagccacaaagtgaaagtgaaagttgctcagtcatgtctggctctttgcaaccccatggaccatacaatccatggaactgtccaggccaaaatactagagtaggtaacctttcccttctccagggaatcttccctacccagggatcagacccaggtctctggcattgcagacagagtatttaccagctgagacacaagggaagcccgcatgaatactggaggggtggtcatttcctactccacaggatcttccaaatgcagagactgaacttctgtctcctgcattagtaggtggattcttcaccactgagccaccagggaagacatatccctgtgtaataggtggtatataggcttactaggtggctcagtggtaaagaatctgcatgtcaatgtaagagacttgaatttgatgtatgggttgggaatattccctaaaggaggaaatggcaacccacaccagcattcctgccggattttttgcattccataaagac

SEQ ID NO: 43373 - DNA, 1349 bp, Bovine  19866881935088
  misc_feature (1)..(1): n is a, c, g, or t
ntactgtgtttctcataaaaacatacagacccacagaagaatgggggggcccgtccgagatcctgaggggtcctgacctgcagaccagccctccctctatcagcgtacttaaaatagactgaccttctcgtggtattttttgtgtgtgcttgacaaacgccagagagttactcatgagttcatcttcccagaataactgtcagaacagggcccaaggacagcaggaagaccctggcctgaccctgtaaagcccggggctcctggaaagcggggaatgcgtttcaccattgtcccgcctgctctggagcatcgcgtctggccccagctttgcgcaggttcttagtgattccgggagagagagctccggaggccagaacagatcgaaggtctatgttagggacccagcagtgtccacctgcccgggtgccttccttcatccttcccctctttttctggtttaaaatgctgaatgtggtagaagtcctggaaaattcagacaagcacaaaaaaattaaagtaaaactcaccctagtaaaccacccggtgctcccacgacttccactccagtctgtttgcttttctcccggtacaaggagagggcttctgtggggagtcagttggtaaagagtgtgcctgcaatgttggagacccgggttcaatccctgggtcagaagatcccctggagaaggaaatggcaacccattgcagtgtgcttgcccagaaaatcccatggatggagaagcctggcaggctacagtccatggggttgcaaagagtcggtccgacatgactgagcaactaacactttttttccgtacaaggagagagacagagcctggattttgtgtgtgtgtgtgaaaagtttgagatgaattggcagcaaatttttttttttaatgaggaaagtcttttttttttttttaaatttttggctgcactacatcttcgttgctttgcgagggctttctctagttgcagctcctgggcttagttgctccgtggcatgtggaatcttcccagttgttgttgctcagtccctcagtcgtgtccaactctttttgacccgctggactgcagcacaccaggcttccctgtccttcactatctcccggcgtttgctcagactcatgtccattgagttggtgatgccatccatccaaacgtggatgagatcaggtgagatccaaccatctcatcctctgtcatccccttttcctcctgtcctcagtctttcccagcatcagggtcttttccaatgagttggctcttcccatcaggtggccaaagtagtggagcttcagcatcagcatcagtccttccgagaatattcagggttatttcctttagga

SEQ ID NO: 43374 - DNA, 1327 bp, Bovine  19866881977393
  misc_feature (1)..(1): n is a, c, g, or t
ngcactaactttctccctgtgacagtctctctgctgcatttatctggtaccccaaactatgtgtgtctaagtatatcatatttggggtaacactttctaatatgtaatttatattttaatccaacgtcttggaataagaatgatgagtggaggactctttctctggggaaactcagggcagtttgttgtgtaagtgggatgggggatggcaatggaatccagggagtctgcagaactcagcaggggctttcagcttatcttgaggcatctgtgaggctctggccctagcgccaccctacagaagatggcatatgttggcaactggcaccagcgtggttccactgtggtgaacaccgttttagaatgactgtgttgaagacactccaacagtcaactcactatctttcctggtcatcaccccatttggtacacaacaaggaaccgaaataaaacacagggagtgtttaagggagcgtgggcaaattagagcatgcctagtaagagaaatctggcagcactgatcacctggtaaggggagaattttccgctggtcccttacttgcttcttttgcatgtttgcttagtcttggcgggctcctgaccaggtgtagggagactggccagagatgaggctgcctgctcctgaattgggcacctgaagacctcactgggcaagctgagggcaccaggaggggctgccagagtccggaagttgctgcctccctgtgtttcccacaccatgcgttgcctggctccacgccctgccgggtcctacctgccagagccccaaggtaaaaaggcgggtgggggatgttgggactgaaaatgcttcttaatttagggtgacatcccgccatcccccaaaaaaggagacactgctctgaactaggggggtgaggatggcaggaaggggtctttggcctgctggggcttttggaagaagtgaggtggtttgccgtttccttccactgagggacctgctcactcaggtgtctggaatgtaagagaacttgatcagcctgaagggtactaaagggatgacttccagggggcgtgtcgttagctctcagtgttgatggccaggctctgccaaccgcaaggtcctctctctgccaggtaaacactgaggggtgcccttgaagggtggaacccctgccagacccaccccatccccaggaagcagggacaccaaagccagagtcagcccattagtctagacattgagcctggtggggagtagccaggcacctggcccgatgctaccctctcccccatttccaactggcgctttgtggaataagtgggggacaggggacagacggtgaga

SEQ ID NO: 43375 - DNA, 1463 bp, Bovine  19866880401332
  misc_feature (1)..(1): n is a, c, g, or t
natgtggaagtgtatatatagaatgctaccctttgtatatgaatggagaaaaataagaatatattcatatttgattgcatttgaataaagaaaccttggaaggttaaaaattattagttatgggatggggcagggcagaggtggagtaagacatttcactgtacacctctgagtttgctctgctggttgaactgtatcaatgtattacctatgtttttaattaaagaacggaattctattagatgtgggcaatgctgctgctgctgctaagttgcttcagtcatgtccgactctgtgtgaccccatagacggcagcccatcaggcgcccccgtccctgggattctccaggcaagaacactggagtgggttgccatttccttctccaatgcatgaaagtaaaaagtgaaagtgaagtctctcagttgtgtcggactcttcgtgaccccatggactgcagcctaccaggctcctccgcccatgggattttccaggcaagagtactggagtggggtgccatcaccttctccatgtggacgattagataggctatagacataaagggagaactagaaccagctgtcattttctcagctttgggtccatgggagagggggtgagtctgtggtaagtgtccctttctcagaaaaggtgctccatagggatttccctggtggtccagtggttaagactttaccttccgatgcaggggtgcatatgttcgatccctggtctgggagctaagatcccacatgcctcgtggccaaaaaaccaaaacataaaacagaaacaatattgtaacaaattcaatgaagactttaaaaaatacccacattaaaaaaaaaaaacttggaaaaaaagaagagtgctccaggctgggaaggggacccctagagtggcctttctggagggagagcaagacctgctgcgtggatcacagtctctgctgggtcctcttctttggccccttctgcgccaaatgcggtctcccaagggaaaccagccatcactccccctctgcagtcaaatactctaccactgagtgataccctcaccactcccctctggatgggaggagacaattagcttcaggtctctctctgtttggggccttacaacagacaccctggggcccaaagcccaactttctgctcagactgaggtgcagactctgaatcagaatgatccctcatggggctgccacccaagaccatgaatgacttctttggcttagttcttcacctcctgtgtgcttggcatttttaggggtgacagaggtgaggtgggcacctgcccacaggagctccatgataaggattcagacttaatgcaaagaggtgtaggtctggagagcaaaagggcactcatttactcctggaatactcaaaagaacgaactaaaacaccaccaaatcaatacgccagaattaaaatagctgaattctattccagcaaagaaaacgaaa

SEQ ID NO: 43376 - DNA, 1177 bp, Bovine  19866880417517
  misc_feature (1)..(1): n is a, c, g, or t
nattctgtcccaggtatcacagtgaaaagaatcagtcatggagccttcaactacacagccactgctctctcagctcggttcagtcacccctgaatcgcagaaatgtgcaaatggtccttcttgcccttctcacaagcgtaagcagtgaatggccatgcccaggaagtagaaagatcccatacttggcggtgtcaagccttggaccagttccttgaacacgaatcagccttctgaagtgtgcattgctgctgctaagttgcttcagtcgtgtccgactctgtgcgaccccatagacggcagcccaccaggctcccccgtccctgggattctccaggcaagaacactggagtgggttgccatttccttctccaatgcatgaaagtgaaaagtgaaagtgaagtcgctcagtcctgtcgggctcttctcgaccccatagactgcagcctaccaggctcctccgtccatgggattttaatgatatacaagttccctcataagcttggattccaagattctgtgtcaaggacacatacacagatgctctaaggccctgttgccttttcctcagaggggcggttttacaatcctccgtggagcccctgacctatttgcatagggttacttcgtgggaggacacgggggctgcaggcctggcgcttgaggctcactctctaggcaccctgaaaaagaccctggagcagccaactcccaggtaaccggtttgcacagcattctgctagccctgagaggagttcaggggcagagggagggccagcctggacttgccactttcccatgcccaaacccctcaaactgcaaggggtgcattttccttcctttggaaacagaagggactggcagcttctccaccattctggcattgtttgaatgggaattcatgcctgaaagggccgaggtggaatgaaggaaggagctaacatttagagagagagtgaaagacagggaagcctggcgtgctgcagtccatggagtcacaaagagtcagacatgacttagcaactgaacaacatttagagagttcctgctgctgctgctaagtcacttcagtcgtgtctgactctttgcgaccccatagatggcagcccaccaggctcggctgtccctgggactctccaggcaagaacactggagtgggttgccatttccttctccaacg

SEQ ID NO: 43377 - DNA, 2256 bp, Bovine  19866880511302
  misc_feature (1)..(1): n is a, c, g, or t
nccgtaactctgtctcctcgcagaggccactgcagccttagtatttcctccagactagaggcgtcgcctcgtgctctggccccaaagtcagcctcttccctcctccattaagtgaatacagggcccctcccccaggcatgcattcaagcaggtgcacgtgctggaacacgtgaggacctcccccggccctgcctcttccggggcgccccgggctgtgccctgtgagccccaccctccacccgccctccccacgggaaggacgtgctggtcacaccaggtctgtgggcggctgcatgggcccccttgtgatctgctgctgtccctctgcttttcctttcattgatccattcaagtaacgttcactgagcatctctgggcgtcagcactgtgttaggtactggggaccctgcgtgagaagacaagcccctccctaaggagcgcgcccttcagccgagaaacccgtgaggcaagagggactcgtgaggggctcctgccatgcttcctgctgaacccctcttctggaccacagttcccaggatacctcactcccatcccacccggaatccttgctcagagacctggaaagagagacagagcctcttgccacaactggagcatctgatggtttccaaagtgtctttccaggcatgcacaggggggacaggcagcccagacccgaccgacctggggagctgagagctgcagcgcaggggaagcctgagggcagggacagcccctcccccaccatggtgctattccggagctgggcagacaatttctggcatgtctccggccagtccccagcctccagtggagtaaacttctgaggacctgatgtcctcctgttgacatccctcccttcaccaggaatgaaagatgtgggggtttctaatttaaatgtgggactctgagaaattttgttaaccgggggtgcattttgggaaaaataaatgcctttgtagaaagctttttctctgtaaattgtgtggcagcagggctcgactggaagaattccctcctggacgtttgaggcccagagtaggggtgcttggatctccttaactctcaccgtccttaagtccctgggtttccatggccctttttctaacttcatttacccacttgataaggatgctggctgtccagaaagccaagtcctttggtcactgtatggggctccacccactcttagaagtgtcgcctaatatctttatctcagaagattcagactctaggcttgtttaaggcctaatgcccccattttatggatggggaaactaagacccaggaagaagttaacgtagaaaaggaactctacgtgctctttttggctgacacagtggaatgggcaccaggcctgagtcagaggtctaggtccaagacctcatttagcccttccctgtgatcctgagctgggcatttcacttctctgggctttagattttttatttttttggctacgctgtgcagcatacaggatcttaatttctcaattagggattgaacctttgccccctgcatttggagtcttaaccattagaccaccagggaagtcccagggccttagttttcttatatgaaaaatgggcttgagatttttcatcaccttccagttttgaagactaagaagaagaggtgaacatggcaagcaaaccatttccagagaaccaggttcaaggatgtgggagcctgcaaagtgcactgggctcctttacccttgggggccagggtctcagaactggcccaccagtcagtccccaaactctgcgggccctagggcagcaggaagagctcgggctggaggtcaagacacttgacttttgtttttaattttttttcttgttttcccttttgacttttgttcctggctctgctgctgacttgtgacctggtccttcatccctctgaaccttcatttccttatctgttagaaagggggtgaaagggacttccctggtggtccagtggttaagatgctgtgctttgaatgcaggggtcatgagttcaaaccctggtcaaggaactaaaatcccacatgccacgtggccaaataaataaaaattttaaaaacagcaaaatatgtttaaaaagaaggggtgatgatacctttggaaaggtatgtggaattctttccaaagggtgcttcttctaaagtcgatggccctaggagtgagtccagtcaccttactagaaggcccccccgactggtgctgtgggtaggttttagattcaaaaacctttcccgaggctctgtct

SEQ ID NO: 43378 - DNA, 2195 bp, Bovine  19866880539634
  misc_feature (1)..(1): n is a, c, g, or t
naaccccttacggagggtaaagtggctatagaattcacactaaagtgtaaatgattgacaggctgggttcttccctgtctgatcaagacctggcctgctggtcccaaacacggaactctgaggggccattccagatagttattgtctccagggctgtttgaccagatggataagacagcacatctctactggtccctctctccttggttccaacatcccatccctccgttttggccccaggagtccactttggtagaggattattggatttaattaatatgtccttagcttgacataattctcattctggctcagttgtgcagggtccattccttttgcctgtttcaatttcagggctgaaaagaattcccgacgcttttaaggtccttctcataaatcatctcccatggctaaacatgaatggatttataattctgttctaaagataaggaagccaagcctgtgcaggtgatggtaaagggacgtgcctaatgtcacactgggagaccctggcaaggctgagtctgaatcccagggctcctagtttctgttcttgcacttggctcagggttagtgttcccaccaactttccagtctgccagcaaaggtatcaactacagtggttttaccttttttacaactgccagctaatgtcatcctttatttccagttcttcctgcttagacatgagtgcctgctttcaggaagaaatagggctttgtcctcaggaggctcatgtttgggtgggcagacaagagtgtgactcagggagcaaggagatgcagcaagggggtgcaggctgaagggggtcagtgcatgaacaccaaggagagctgggagatcaccgaggtcttcccagaagagagcacttgggagggctcacggcccactgcaggctcagggcagcttcttgagtggagtgtcagcgaggtgatgggctccttttgggaacagaggctggagagtcagtgaagattctgttaagtcctccctacctgtagatatttacttttttccaccacacaaccccttactcagcagagccctccatatgcccagagtccctggtcaagcttgcttccttctccagaggccagatgcccttcccaggtccaaaagctgaagatgggcctccagagggagcctggatcttatcctcactttttcccgcctctccccacccccagcttggagcatattctaacagagcagcagtctccctcaaagacttccccagggacttccctggcagtgagtctagtggttaagaatccccgtttccaatacagagggtgtgggttctatctcttgtcagggaactaagattacactcgcatatgccatgtggtatgaccaaaaaaacccaatttttttaaattgaaagaaaacttaaaaaaaaatctagaaatttattaaaaaaaaaaaaagacttcctcaaagtccccagtggccttgatggacgtgaaaggctgggccgtgggggcagggctagtttgtgtcagtcatactaacacagtctcgtctctaggggtcaaggtttttttctaaagtgatcagtagaatgaaggctcaggttaggcccaaaatgaagtcctgtctctggacagtcagggctcagttgtaggagtcagtgatgaggtgtcccaaacagtggcacaacatggtcttcgtcttttgtttcagaaagcaggaaaggccgtgcagccgtatgcacatgacttcactgtgcgtccttcccaggacccgccccaagccaggtgcatgggggaggtggaggagacaaaccccctcaaggagctcccggctccggggccagatcagccttactcagagaacagttcccaagcctgttcgattcctagggctgccacgtaaagtaccacaaacctggcggcctaaacaacacagttaattctcttacagttttggaggtcagatgtctggcgcaggtttcactggttaaagtcaaagtgctgaccggactgtgctcccttctggagactctaggggagaatctatttccttgcctttcccagcatctagaatctgtcctccttctttggctcatggccccttcctccaatcttcaaagccagaaatgctggttgtgtctttctagtacagcactctgacattgacttgtttgcctcctgcttctgcttttaaggaccatcgtgattgtatgcatgcatgct

SEQ ID NO: 43379 - DNA, 2219 bp, Bovine  19866880552823
  misc_feature (1)..(1): n is a, c, g, or t
ncaggaggcaaaggtctgaaggtgagacctggggacaggaagtggtaggttgaagggaaattaaaattaggacagtgtgtgtgtgtgtgtgtgtgtgtgatcatgtgcgctgagagaaagcagctgtgtgtgtgtgtgtgtgtgatcatgtgcaatgaatgctcgacatgtttctgagccagggaaggaaggaatgtagtgaagtctgggtttgaggcatgttaatctggagcccatacagaaaggactgggaagggagagatgaataaggaagtaacttctctggagcaagcaaaaacatagactgtgactgactgtggttgctctagggagttcagtctggaatggggccctccatgcacaggtctgcagagagcagtgagctgaaggctttgagaacccctctgcatgtatctgggaggctgggcagttcccagggagggatcccagtggcttctggaactgcacctgtaaaccccctgcatctggggtttactttttactccccttctccatctggattccagggtctgagggctgagctgcaagccctgggctcctgcaaagccaacacattccaagcccacggcgaacttctgtgtagcctttgtaagagttttaaaaggctgtcccctctgggcagatgcatcctcttggcagatggtgcctttgagccaagcaagaggtgccagcgtgggctggatttcaaacccccacttcttccttggcaaagccccagcacatacaccatatgatcattcacagcagtcctgcataattcccagcattaagagaaactacaaaggtgacaagtcaatcttgaaaaccacaagcagccagagatgagatgttcccccccaccccacccctcctcattcctcctcctcttctggatcaggggccgagagctaccaggggcctggatgagggggagcacggggtgggggcaagctggctgggcccagggagtcagagaagcagggtcacaggcccaggcacaaggtctactgtgccttgtctccttgaaagtcagacaaaaacaaccctcggagggagtcacagcggagactagaattcgttttcaaaacactgaggccaaaagaggttaagcgacctgctcaaggtgacacagctaataagaaaacggtggatggtgatgttaggtaggtagactagggaaaaggagtccaaaatggtggtggctaaaagacaaggaagggaaaagcctgcgaaaatagaacaaaggaaggtccgaggaccggagtgaggacctcaggtaaaacaaacaacactcctggctggcccgatttacataggacaggcccagggagagaaaaacatataaaaagaggagccaaagctagctctctctctcccgcatgctggggcactcttctcttcgcgtctggatcgatgtgccctcatgcctcgaagatggattttcctgctatcttcttaataaaatagagctgtataacactgatttgtctaagagctatcacatggtcctttcgagacctgagagctataacacagtctatccaactggtgagggggctttaatgtccgtcattccaaatctttgttgtgacgagacaaaaactgaggaacatacactcacgtgacaagactaagtctattggattctttatattgactctacaaaggaatatatgaatatcatgagacaggctcagatgaatgtcatgaaaaatccaaacagggagaaatcatttctcaaatgcaaatgattgaggcagtttaaaaaattttttgcatcagtaaaaattctctccatttctgttaagtatgttcactaaagattacctgctttgcttgttgcctcagattatccccaacagactctggctcaatcatcttccattcagctgcaatactcctgaaaacatcagctccagtgtttagcacttgaatgagacgacgatcgtgggataaatgagccaagatcctcagctcaagttgagaataatcagccgctaatattaaaccacctgaaacaaatgattttggaaaagttggcacaaagacaaaaccaacttttatagtactgaacaggatgacagaaattcagttccaacaaagaaccttgagatcatgcatccaaaagctaaaatcttgctcttaatttgactcagttcaattctgtaacatgtaagaattttttctgcttggctttcaaaggtatgtaatatatataa

SEQ ID NO: 43380 - DNA, 1445 bp, Bovine  19866880569717
  misc_feature (1)..(1): n is a, c, g, or t
nttcttctgaccttgtattcctgagcttgatcttaatatgccttactcaggccctttctggctcattcactaattaagagactcttgtctcttgttaccagggctttctggagctagggggtctcctcccacaccctctgagctccagcccttggtttatttataatgggtgcaaagtgtttttgccctaaaccttacttgaggaacagagtccatctcaagaggattttgcaatcgtttaagtttccaaaatgggtctccagcccactcactcatcttttcccctgcttccttctttcaaagattgagggcaggaggaaaagagggcaacagaggatgagataattggatggcatcatcaacccaatggacatgagtttgagcaaacaccaggagatactgaaggacagggaagcctggtgtgctgcagtccatgggattgcaaagagtcggacatgactgagcgactgaacggcaacaacttcttcaaagcagtgctgtatccatccctgtttggggcccattaggggtcagactcagatttcccccttcccattctcagacattcaggtccttccctctaggaagccctccctgattgctccagttgagccccaacacccacgggatattgaaactctgaaattcaagtcacactcagagatgtactgggctatggtttctgtgtgtgtgtgcgtgtgtgtgtgtgtgtgcgtgtgtgtgtgtgtgttggagggctcgccccttggagctgagctgggatgaacctccataagtgctgagcagcaacagcacaggctgattgctccatcttaaatgaggagtcatttcattttcccagcgaagcttccctctgtggacacactgaggatgtgcaaagggaacacgcctagcccactggaggagggaaccgccaggaaataaacactgagcccgactattattactttttttgttgttaatttattctgtgcttagcttctaataggctccaagatgactaaataaacctgggaattgactccctgctcccccaaaccccatcttcagcaagggatagctctgtctgcggcataaattagcagaagccagagtgtaaaaatatgattctgtgaacaaacaaaagcctccagtcatgagaccagcagcggctgagctgttcccactgccgtcagctctgtttccaagcaattaaaagcagaaggagaagagacggcagtcccccagcggggccaggaaggaggctggcagcagggcagaccccaggaccccgctgcagccctcgagaccctcagagcttgtgctggggcgggcctggcaggcaggagacctgggtctgtctggcctcaggctctgggggaccctggggcatgggttttgcctactggcctcagttttttcatctttaaaatgagcatttttttttttttttttaagaagaggga

SEQ ID NO: 43381 - DNA, 2005 bp, Bovine  19866880632906
  misc_feature (1)..(1): n is a, c, g, or t
natgttaatagtggctcttgctggagaacagggcttcatatgactttctttccttctttctacctttagatagtctgaaaagctggtttgaatttagaaaagtcagtttctattatagatagttccttgagaaatgtcaactatatacatatacaccaaaccatgcagtccatggaaagggtagaaaacctacctacctagcagaattaacatgaggagtgagtaagaaggctaaggcaaggctcagaagcaggtggaccacacacacagctgaagccgtcttcgttgcttgggtcggtgcatcttttgcctaatcttccaaactgccaagcatggtcagactttgttttgaactctcctaatgtttaaatattggcagcttagtcaactgactttaaaatactacaggttaccaaagaagacagagatgacaaataaggatgtgaaaaacgtgcagttgtatatgacatcgtttatatgacattccggaaaagccaaaactatatacagtatggaggactgatcatagttgctaagagttgagggtttgaccttaagagtagatagcagtgagggaatttctgggggtgatggaaatgttctgccgtgattgtagcaatggacacaggcctctacttgtcaagcctcatggacagaaccagagaaagacagcaagctgtgtccttgggatagtcagtttgtaacctatttattacattcagaacccaatttccatatgatgaacagctcacacccattcttccacctattaggtgggatggatgaactaagtggagttcattcattgataagacttctcaatctacaaacttaatcagcactgtactcttcattaaagcagtcagtatctttgcaaatcactttattagtatacttgaaatacttaaggatacaagtttacctcactttgtatgtatatttagaaacattatgtaaaggaacttgcaaagctaattaacactaatttttggtgtcttatttcccaaatcttaccttaaggcagtttttctgtgttctagtactcaggctgttgctttcccctgtaatctctaataaactactcttttggaatccccacagtctctcatggcatcagaggagctgccacttgtttatgaacgatctgcatggaatgcggaagggttaggcccctttctacgcttgtgcctcatggatcagaacttcccggcatttgtggaagaagtggaaaaggaactaaaaaagctgacagggctgagtggttaacattctgtgtatctacagaaattgggagtaatggggaaaaaaatgcttcctcctaagattatagagaataaagagtattattccaacaccttttatcagttttatttttaaaaacaggtgaatccactttttacatcattgcacttcagcaattacacaaaacacaagtacatgcatctaccaattacgcaccgcgtgagacccctgctgggtgtgaaaatctacactcaatcaatgaaaaaatacagtgtcaacctcaaagaaaaactagttgcatagaataccatgctttaacatttcaagatcattgaaaacaaaaggtaaattataaaagattgccttaactcaatgtacaattaggttttaacacatcagtgcaaaaggatttaggaatttacatgatttaacaaaagaaaaaataataattgtaaaagcaatcatatatatatactgtaattcattatatccattcagtgaattgttccagcttcttatcaaagtcatgttaagcccttaaaattatagatttcagtttatattactcatctttatgtaccagaactgaacagtttcctcatctgacaacatacaataaggaatgagtatcagcagcttaaaaatgcttacgttgagatctttaatccattttgagtttatttttgtgtatggtgttagaaagtgttctagtttcattcttttacaagagatgaccagttttcccagcaccactgttaaagag

SEQ ID NO: 43382 - DNA, 1767 bp, Bovine  19866880930942
  misc_feature (1)..(1): n is a, c, g, or t
ntgtcaataagggagcagttaccctagattgttgatgtgggcatagaaaagccaataattagttttcttttcccttttgggagctgtgcctcataatatattcatttccttcaagggactgacatcagcaaaaaatggaaaagcccatcataaagactaggaaggtcactatactgactgcagtaaaagatccacgttttatcttactttggaacaaagattgcataccgtctaattgcttaggtggagaatcagtgaagctaacagtcctggctgaacaaaattttccaaacctgagtatatagaagagctagccagatagataccacattaaacaagccagtgaatctgaaaaacaaaacgggatctggggacaggcaaatgctgacagccagtgtatctcattaatttgcagtgcccttttatccttaaagaggccagacttacctacaaatcacacagacaaatcaatcacatgctgcctttaattagctgtatgatttatatcccctggcaaaccagcaaatgtgggagagatgcaattaaaaattttaagtgtggcaaccacatcaaatttattttactgtaagtttaaaaatagaactaaattgtaacaataacaacaataaacctcttattttaacagaagtagctgcctttttttctagtctgatatcttgtctagttttagaagacgcagcttacccaaaagccaccccaaataggtgatgtgtattgtgtacctttattcaatttcttctgcaaagaaattcggatgctaacatcgtaatagcattttgtattttttaaatacacaaatcacattgctaactggaaaatgtttctaactgtagttaacaaaatcctgaaagtttctataagcagaaatccttgattttcttgttcacaatttacatgatttaaatttctagataaaaccatcaaacaaagccgtatctttaggatacagaaaactgggcatggctaggtagtggtaaggcgccatgcccacagacactgctgccccttttctgcctctctcgggttctcttcatttttaaattcattaactttcttcccctgagtataaaggttaatccattatcattgccccctccaacaatgaaaaaatatgaatatttttgagtattgcctattcatttccttagtcatttttctcttggatgaataaccccaaattatcaagagtcttcgaaagctaaccccctgaaggaaagggaaagaactgatgagagaactccacattcagtttttggtaattctatgaattttacgtgaaactgagctttcttgtttacaattaattagctatttccacctctcgctagttgagactgtacaaatgggacatctatatgtagcacctttgtatcagctatctccatgatgattctgtaattaaccttttgagagtaatcacataaaaaattgcacctcatcactagatgaaaactatataaaggaacagataattattaagtatataagcagggcaaaaatctcagaccacttgtctagaggtatctacctatctatgtgagtgtacacaacaatgagtttggacagttagtgtttctttggaatgtagttccaggaaatgacagggaaagttgtatgtctgacagcctaactgatgatttgctccatgttccttctataaaattcttagacagaatttgagcttatcatctgaaaccagaaataccacctcaatacatgtggacccaagataaagccaaggcacat

SEQ ID NO: 43383 - DNA, 1511 bp, Bovine  19866880941494
  misc_feature (1)..(1): n is a, c, g, or t
ntacttaaatgtagacatgatttatgctatagctagacatcattctggggatatatttacctttcttctctactgtttctggttaccctttagttgcctcatgtgaactgacacaagagtcagatttttcccctgctagtatgccatgagatcagtgctgcaaacctgttccagctccacccaagctcctggtcatgctctcaccccctgccttcccacacatgcctggagcattcctgtctagcttggtcagctctcctctcccacaatctagtttaaatgttagctcttctccaacttcccttgactctttccagcagtgtccactcactctgcagtgtggctctatacataccctctgttggcacttcttacatgttcctggcaccatccctttggaggtctggttccctctggaggtcatttttatgtcatgctctccctttctcaccttcctcttacgttagatataaaacatgtagcatatattcgtaaatatctcttgactaaactttcttttaaccttgtaattctgaaaggaagtggaagttatgaatttcctccattctgactagtagcaagttcttagcattgtttctagaggaagtttagggaaactttccagaattcaccaagtgtgaagtagatgtgctgaatctgaagtaatcaaataggcctgatgttaccggatacatacctgaccatggagctcacaccctttctccatcctctttctagttatggagttcttatctggtgtttggaacaacatcctagattaagtcatgttttctgggtctgcagggaaggatgtcccttcacgccattaaaattggagaagtcctgattctgctagaagcttactgattggttgttgttgagattgaagggaagtcagtgatcaagtattcaaagttccttggacaaaaatgaccctagacactgctcccctgatcccgttcagtgttttgctaaggatggagaatagtctcaccctgtggtgggcactaattcacctactctgatctttgtgtgttctcactttttctgctcctgactaggatattgtcaatacctctggccgcttcatcatcatcaacagggaaaattacactgagctgagcatcactaacctccagatcacagaagaccctggcgagtatgaatgtaatgctaccaactccattggctctgtctccgttgtcaccatcctcagggtacggagccacctggccccactctggcctttcttgggaattctggcagaaatcatcatccttgtggtgatcattgttgtatatgaaaagaggaagaggccagatgaagttcctgacggtaagagcatccctacaaaatagctgtaatgttggggctggtccttgggggtggtttccaagcacccaaagaggactataaggatgttgggatttagtcccaaaaggagagaaggaaaaattcttatactggttcctcattccctacccctaagattagccactttgagctataat

SEQ ID NO: 43384 - DNA, 1726 bp, Bovine  19866880945215
  misc_feature (1)..(1): n is a, c, g, or t
ncattcataacttctttgaagaccttttttcattctagcattgtctatcatatcaaaataacctaaaagccaaggaactggctaaataaatcacgctacacctattttagcatggaccactatgcagatgtaaaaaggcatcaggaagctccctgcctactgatgagataagaattcccaatagtactgtgccctaggcatagtatatatgcggcactgtgctacctttgtccaaaaaaaaaagcaaatatatagtcatatttgcttgtaactacataaagaaattctggaaggatatataagaaataaataaacgtatataggtaggccttcactggtggctcagtggtaaagaatcagcttctcaatgcaggagatgcaggcttgatccctgggttgggaagattccctggagaaggtagacaatccactctagtattcctgcctgggaaatctcatggacagaggagcctggcaggctacagtttatggggttgcaagagtcggacacaattcagtgactaaacaacaatatgggtgtaaacactggtcagatgggggacaaggtgggaggaagacattatcactttctatgtttttattacaatttctgaccatgcgattgtattacttgtcctaaatatccagaattaaatgtccttttaaaattctatatgtgtgtatatgggaatgcagtacccaagacagttgggaactggctcagactccaagatttcttctaactctaaagctctcagatcctaagttctgcctcctacaggaagcctcttctgattgcctcaacctacagcaatttctgtctcctacgggccacgccatggaaaagctagaaaggctggctgccctcaccagaagacctgctttccatggaggaccagtcaatcctgggcccagctccttgacaggcacacacacctggatgaccaggatggggagcagaccaggtgcccgatccagggaggaattgaaaaagcttatcctgggagagaggagaaatgcatgcaagtagccaagaggacaggttaacaggatgccactgcatttgcacccagggatatgttctaagagcactgcagagatgggagtggctcaagcctcaagaatgagcaagcttcctgtccctggaggtatgtgcatggtggctggacagtcacaggtcagtggtgctgcagagggaatgaccacatgagagggagtgcaggcgctttccaaccctgaatactatggctctcaggactgtgatggccctgaaatcacatcgatggagcccaggctgctgtgatcactgcctgactcctggcctcattctccattcctctccagaaccctatgtgggggaagggccacatatctggagtggggcgcacagaggggagggtcatctgccatgtctatcaagggcctgcctgccagggaccactgctttatctcctgtccatcgctgggcctaacacctcctggagacctactatgacatcaagacctacgatggcacttaggagcccagagccagccagcccttcctctgccccctcccactgaaggctccagtccaggccctgctgtcattctctcagttgctccctctcctctgtcacctgcagacacggggacagcaagactcagtttcctttccaacagaggggagctcccaacccacccggcctgcaggatggaccacctccccttcaaacctcaagtccat

SEQ ID NO: 43385 - DNA, 998 bp, Bovine  19866880961230
  misc_feature (1)..(1): n is a, c, g, or t
ngttccggaagaccccgtggtggccctcgtgggcaccgacgccaccctacgctgctccttctcgaccgagcccggcttcagcctggcacagctcaacctcatctggcagctgacagacaccaaacagctggtgcacagcttcgccgagggccgcgaccagggcagcgcctatgccaaccgcacagcgctcttcccagacctgctggctcagggcaatgcgtccctgaggctacagcgcgtgcgcgtggctgatgagggcagctttacctgcttcgtgagaatccgggacttcggcagcgccacggtcagcctgcaggtggcaggtgagagccgcggaagggggcgccctccccttggcacgcccctcctacttcctgcagccctttacccactgccccagtgctgacccttgtcttcacagccccgggcgctctttccctccactgtgtcccactgcccttgccttacctgacctctgccctctacctctgctcccctccagccccctactcaaaacccagcatgaccctggagcccaacaaggacctgaggcctggggacacggtgaccatcacgtgctccagctaccggggctaccccgaggccgaagtgttgtggcaggatgggcagggtgcgcccttgaccggcaacgtgaccacgtcgcagatggccaacgaacagggcttgttcgacgtgcacagtgtgctgagggtggtgctgggcgctaatggtacctacagctgcctggtgcgcaaccccgtgctgcagcaggacgcccacggctcggtcaccatcacgccccatagaagccccacaggtttttcttttgttttcttaaatgtcccttggggtgggggacaggggcggggagttggtccaatctccagtggtcatagtatctgaatctagctccttaccttcagtctcccagaacagtgagacaccgaataataataacagaaacaggttgcatagagggaaagcttactgtggcagga

SEQ ID NO: 43386 - DNA, 3506 bp, Bovine  19866880980791
  misc_feature (1)..(1): n is a, c, g, or t
ntttctgggtaaataggggcttctaagagatttttaaaatagattattcctttaaataggttaggcaccctttgacagcctcatttacattattcctttgctgggaaatcctttttttttttttttttttctgggcatagtgtagaagtcaacttcagcctcagtgtgaattgcattcagagactggatgaatgtggtttgggtacttagtggaggacaggggctgctctgtgccccaggctgggcagggcaaatccagaactactctggggagaaggagatgaatttccagagagcagcaaaggagccagggctttattatggctgtgaaacatttgaggtgcagtcagggatccaggggattcacagcagggagtgtgtaggatttacacaggcagagaaaagagggggcagattcagtgaggcaagagcttgagcaaaggcttataaacaggattgaatatggcccatccaactccccccaccctgtcagtcatctgtggccccttctccctcatcacccatcctccagacagagcaaaatggactcctctcctagcactatcaagcccactccacaaatgtcccacgtctggagtccctggcgcaccttctcttgcggtggtggtggtgttgaatcattaagtcatgtttgactctttttgaccccatggactggagcttaccaggctccttctgttcatgagatttgccaggcaagaatactggagtgggttgccatttccttctctatgggatcttcctgatccaggaattgaacccaagtctcctgcgttggcaggcggattcttttactgccgaaccaccagggaagcccacattcttttgcagggctgacccctatcctcccggctgcattaggtgggtggacactcagaagggcagcctggatggagagaccaaggaaatcagcaccctggccatgcttcccatgtcacaagcccttgacatggtcaaccatggaggctaagctccctctgcaacttggccagcttcgggttctcagaacgtttgctgatgtgcccaccatatagacttcaagccattatgaaagctatagaaataagaagtagcatgttcattcattagcaacaaattatcttagcaaataaggctaaatgtcagttcagtggccagcaaagatacatgttggtcccttcccccagtgccctgagagtgagggtcacattctgcaggcactgtttaggagaggatattgaaacacaagggggcttcccaggttgcgcagcggcagagaaatcacctgccaatgcaggagtcttaggagacatgggttcgatccctgggttggaaagatccccggaagtaggaaatggcaacccactctagtattcttgcctggagaatcccatggacagaggagcctggcaggttacagaccatggggttgcaaagagttcggacacgactgaagactgagcatgcacactgaaacacaagaggcaggaaggaaatgagatagggtgcagactagcaccccaggagcctgacagcctgaattatgggactagtcaggtagactccagatagctaagctttgagaccaagggagggctagaggccagagaccactcaggagggtagtggaaagcagtggtagaggaaagatgctatcctctggccactttggctgcagcaggtctgcagaacagtagaggccacagaatatcctggggcagaagcaagtttgaggcagggaggaaaggaagcaggaagagcgtgaaagctgctttcttgagcctggcacacgcgcacagcccgctgggctgcagtgagcaggacagatggtccttcccttcgtggtgctggagggagggagggaaccaggaccagccgcatgactgtgcacatctggaggcctgggggcaacaagggaaagagagggagaaggggaggcagtcggaggaaaaggagggagccccctgtctcctgtcctcaggctgaaggctgcactgtcatccctggagccccctcttttctcacttccccagagcctgggtgcctggtctgaccaagagtgggaacttagggttcctgctctcctctgggccccacaacagaaggaacaggccctcctcttcacactaaacaagatccctccccttaaccttccttgcacctgtattttctgttcttcctttagtgagaaaacaaacacccttaggtctgattcagtctcattgagaacagctggcttgtctctttcccctggtctcggaagcctctgctctgggctgtctctctgaatcctgttttgcattaacttgtaaggtaggctcaagcccctggggtacacacatcagctatttagcagtgatctcatctagctgcgtcagaacttctagggatggggccaggggaattgctattattaaaacttccttaagtgactctaaggtgcagccagagttaagaaccagtagactgctgtgatgtggagcaggagcgtggtgcccaggattatctattaggggccaaaacatcttgattcatgggcctccatccggaagggataatgaggacacaggtccagaggagggcagtgggggtgaggaaatcatatcagctgagggaggttgaggggagggggcgattttactgctcaggtgctgcagaaaggctggggacaaaggtcaaaccctctgcttctgagggctgggatgtgtgtgccccgtgaggcccagcgttccctgtgctctaacaggcaccacctcattagtgctgagatagtgtcactgtaattacctggaactggtggagccaaatggcaggtcacgaacaccctcagaaacaagtgcagaaaattgaatgtgccctgaggcacctgcatctaagtgagatgctgatgaatgtggccccatccattgtggtcaggtgtgcatgcaggatgcgcctttcagcccaaggcccacccatccatcaagaggcagacacactcacctctaagactggggtcctagaaccatgaagatccctagcacctggggaattgaggcggggcccctacaagttaggtgttgaagggtaaggcagtgcagggtgggtgggggaggaaaaagaggtccacatgcctcatccgctgctgggtcaggctccactgtgagtctgagtgcctggctggggtggcaattcctggcacccttgctgccctgtatagaattgttttgccagtggccctaagtgctcttcactagcacgttcttcctgccatgaggactggctgtaaaggaagcccaaacaagaggtaactctaccaacatttaatatctacagcctatgggcctgtgatgagtatgaggctccatactgtagcagctggagcgcaaggctgcagtatttgtctccaaactgtagaacctgccaaagtctattctagaatagcagtgctaggagatactatgtagccatttagaaagaatgaaggaggtctctgcaaaaagctaggcacaaaatagtatatgagg

SEQ ID NO: 43387 - DNA, 828 bp, Bovine  19866881000247
  misc_feature (1)..(1): n is a, c, g, or t
ngaggggatatatataattatgacggttgcacattgttgtatggtgaaaccaacacaacattgtaaagcaattttcctctattaaaaaaaagaaaagaaatgttggttaattaaatattagcaggtgaaaaaaatgataatctctttcattttgctagtgattgtctcagaaatgtgagtcagttttgggtaatgagacataaggataaattaatgaaaggcttctggtaaagattttcttatgcctaagaggaaagaaacacaggaaaacatctaaaattgtgacagtcatcttgctatcagcttgagactaagagatggcagaacacagatatggaaagaacctgggctccagatggtatcatggagttaataaatcaactaattctggaacccccctacacccggactttctgtttccttattgcttaagcccatttctgtttcttataaatgaaataatgttttatatggaaaactacattggatgcttgcccaattttcatcttttttaatgcatgtcagtaatattgttttgttcttctattgccaccttttcatagccatatatccttactttatagatgcagtttgcttgactatcttcgagaacagtaatttaatttttttttaagttctgtttcctaaattaactttgttttctctagggttgaatgtcctatttgttcatcttggttcttctcctccatgctgttggttttcctaatgtctaatgattcttaattatctatttatatttttaattataatttttaattattatatttttaagccaaaaagtgggcttaaaactcaacattcagaaaa

SEQ ID NO: 43388 - DNA, 1896 bp, Bovine  19866881000609
  misc_feature (1)..(1): n is a, c, g, or t
nggacctccgaagcccccctgcctcccccaccattgcaccagatgtggctgcaggggaaaggtgggtgcagggcccagctagcagtggtcacttggtggtcctcttgctgcagagtcagcacattctatgccagcttgccaggcctcctcactcagcacttcctcggcccaatttctagaagcagcagcaggggcctgcgcagttcactgccagctgggctggggcttccacccccaggtccgcacaaaccccatcaagagcctttgccaggggcctaggctcagcagccagggatctcagtgggtggataaggaccagtcccattccaggtgggggacagaaggcagggacacccggagtttgcctcatcctttccccacaaccatagaaacattctgacccacagtgggcctcctggtcctttcctctgcaaagcagtaaggcatcccacggctcatatcctttctcggcttcccaaaccctctgtggttgggtctgaggcctcctcactccctccagattttccagagcctggagttccagcacaggatcaaaagacactggctgtgtcccatgggaagcccaggggaggagcagccccgtccagaacattagattcttaacaaagtcacacactaccagcaagctcttgcagccctataccccagccctccaagaacacttgtgcctggttcctattgccagggactggcaacaagcctcaaccacagggctaggtcttaaaactgtgggtgtgaacccagcccctaggaacagggcctggtgaggagctgcctgccacccgcccctcacctccagatggctcaggcccagcctggtgactcgaagccctcatttgaccccagctctgcatcctttgctgcctgtcgggggtctctctcagaccccggctctgctgcttccaaaggatgtcaggatacctccagctactcaggcaaggccttgtcctgtgtgtgcagagggggaaccagctaggctcctctgggctcagagatccaagagggtcttatcagccactttgggagacacagattggaagagagaaggagggcaaggaagggagtggagaggaggagaggaccggccccaggagtgtgccctgggctgggtataagaaaaggatgcagaagacagatgaaaaagatgaaagggacagagaaaatggggaagaggggaacaccctgggggtgaagccctcccttctctcatcagtccagagggaaaaaaaaaaatagtggccacatgcctggcactgtgctgggtaggtactcttcataatccttttatttcatcctcccaaatataccacgagaaaggtattattactcccaagttatagctgaagactttgaagctctgagagcttaacgggcttccctggggagtgtctgggggccaggccaggaccccaggtctccagtctcagcagagatggctggcagggctacaatcctggccccaggagcttgtgcagaggcccaagctatgttcagagcagagtttattcaaacagagcctaacaggaaacttggctcctctgactcactctgattcgaccttattaagaaaaaagaaagaggagcaggagccagcactgggtagggtttcacgccaaaagctggctcccaggcagaggccggctgagcacaatggcctgtgccccgaactccccacagctccaaagtcccgaggcagccctgtccccctgcctggctcaagaagaagggtctggccttctccgctctgccagtggggctcccgtaccatacggccatcctctctcctccctctgttcctctcttcccttcccctccctgcccgagggtaccctggggcctgtttccactgctcctcctcctcctttcctggcgctg

SEQ ID NO: 43389 - DNA, 843 bp, Bovine  19866881021033
  misc_feature (1)..(1): n is a, c, g, or t
naagcttgcctgacagagactgagagcgtaacagtcagccctgaagcatgctgagggggtgagtggggcatgagccctgccctcagggagtacagactggaggggagcagacacaggtgactatgatgaaatctagtagtgaggcagaagtgtgagcagcttggaatgtcactgccaatcagagaagccttcctggagcaggaggcacctgcctgaacctgaggttcctcaacagtaagaggaaaagggtcatctttggctcagcctaggaccaggagcaagcttcagtgtgtggccaggatcagaatccagtatgtgatcagagtcaaggcgcagtcagaggccgggagcacacccgccccgagtacccgcagcctcttagctggctctttcagcttctctggactgagaggaagggtcgggccagaaagctttgtagagtcatctgtacagtgtttattgaaaccgagcctggagtgggggtggcaggctgcctcatgccaaatgtgggtctcatgcagcttcaggcccagctgacccaccaccacatgttgctgagggaaaggctctttgataatgggaagggagccattcctggccattcacccccttctcccccacccacaagcttctatggaccagagagtgagaaacagcttgattcggaggtggcccttgctttcagggcctgacgctccctggggaaatgactgcaagcattcctaggggcttgagtaacggggccgaggctggccaagacagcccccatcagccaggagccacctcatcctcacccacccttgtgctccgtgcttcctcttcattcctagcaggtagatcaca

SEQ ID NO: 43390 - DNA, 1709 bp, Bovine  19866881147638
  misc_feature (1)..(1): n is a, c, g, or t
ncggagcagggtattttgagcatctccggacacaatctagaaaataaaaaactctctgatgcccgaaattctaccattagctcttattttgagtaaaccattgcccttttaaaatgtcatcctttacaattcaaacatcctcagcaaggttaacattacatatggatcaattaatcaaaggttggcccacctatggcaacaatgttacttctctactcaaaaccctttctcatcatgtacaaaatccaaacatgacctcctgtcctgaccaccgggggagcatcaggtcagtgttcagggttcactttagtgggttaccgtgtctctaaggtaccaccaggtgatcctcactgtatcttaaaacagtactctctactgaactgcagtgatttctatgtatttccctattggaactcaggctcctggagacagacataacttagtcctctctctgcccccagtgcctgcctaccaggcactccatgaatagttcagtgaataactaaatacacaaacaaatgtatagtcaaggactctttcagttacagataatagaaacctagctcaaactgacttaagagcaaaaaaagattactcatgtatctgggcagtgtaggtgtgcagcttgctttaggcctagggacttaaatgttgtgttcagggctctgtatccctcctgtgttcacctttgcctctgtgtatttgtttagatcaattctttagattgttgctagttgacagattcattgccaacagccccagaccacatcctccttagcaacctcagcaagaaagagtgctttctgaaagtgccagcagcaaagccctgggaattctctgattgggtatggcttggctcacaggctcatttccaagcctgtcactgagtgggggcagggcaggggttctccaaggagccagatctggtcctcagctgaggcctgaggctgggagtcagccctaccagtaccatatggagtgggttccctgaaggaaattggagccctgttatcagaatgatccagtctagaatgaaagaggggcactctagaataaaggatgtggagcaaagtgtctagtgaaggcagagaaggtctgcccagtatctattttgcttctgtatcaaggacaggaagagaagctattaggaaggaaccagagttcaggccaggaggggaggtgataatctgctttaatgggtttgtcttctggctcctgagattgcctgtcctggtgctgagtgaacctggagatgagatctcagagaagctatcagggatatttcaggacaactgggaaagacagcagggattggatgggagtggggaaggtgtgggttgcagcatttcagtttcccactgtgtacagaatcaatccaggacccctaacccgccataaagaaggctgagcgcccaagaattgacgcttttgaactgtggtgttggagaagactcttgagagtcccttggactgcaaggagatccaactagtcaatcctaaagaaaatcaaccctgaatattcattggaaggaatgatgctaaagctgaagctccaatactttggccacctgatgagaagagctgattcattagaaaagaccctgatgctgggaaagattgagggcaggaggagaaggggacgacagaggatgagatagttggattttgcaataaatggcaacccactccattgttcttgcctggagaat

SEQ ID NO: 43391 - DNA, 659 bp, Bovine  19866881178136
  misc_feature (1)..(1): n is a, c, g, or t
nccagctgcctgcatgaagcacaggacccgcccacccttgagccctgggcagtagcctgttggcccagcagaaagcccgctgggggaagtttggtagaaaaaaaatggaaagtgagagaattgattttttttttttttggctacacagtcataaacacaaactggaagatacatttcttcctttatgggagataatcaaaaacacaatacaagtttatagagggaatgtgtcttacacgggatattttcccccaaacacttggcaacttgaaaccacttcattctagagataagtaatcaagtggaagaggaagggtggtaggaagagagaacccagggttttatgagccagaggccctagtcagttaggaaggggtggctctccctctacgtctcactccactggaggtccagtgccacctgagctgagtccaggggcccagagtcaacctttggcagccaagagcatcatctgggtcattaccataccaattctttcagtgcagcttccctgggcagctcctctatgctgggagccgaggacagacagctcagacctgctcctcactcttgagaaagaagggtatgtaggtaactcaggctgaccacaagcaaaatgaatcaagagtgtgtagacgtcttgtccttcccctcctcct

SEQ ID NO: 43392 - DNA, 1929 bp, Bovine  19866881234212
  misc_feature (1)..(1): n is a, c, g, or t
ntccccacaggacactgttcttgctgttctgtaatctttacgagagtctgtagtctggagaataagatagaggaagccaccacagttcaacctaatagtgggtcagtcaggctgggctgtgccagcagcaagtgtatgcagaccagaagatgttctgtgacagaccagagaaagctgagtagtgctgacatccctctagaaaagacttcagacagaaaaacaggctcattcttgtgccctggccaaaaccagaacctgaacccagatgagccatgagttatctctttttttttttttttttaatcaaaacacttacattttctgagtttaagtgccttcttaaattggtattttctgattctgatttaccaagtttttcttccctgtttcaactaagggcaacttggtcccctttagtaagggttatacatgtgtgtgtgtatacgtgtatgtgtgtgtatatatatatatacacagacacacaagatttttttaaaggcccataaaggtgggggaacaagttaagtgctcttagtttctttttattttacaaaagtccgggagactaaatgattcagaactgaaggcttctagaaaaactctcagcaggattccacaagggggcttggtgcacatgaagcagttatggagattacagtctcagtgtaggcatctgcaggagcacacgtcaggagtaatgtctgtcagagggagacattgctccacctgttccttcgaggcaacggagaggcaaagccaccgccagcacacacagtgactggagcaaaaaggatttcaaaaaaaaaataacaaaaaataacaaaaaataacaaaaacggaaacaaaactaaccacaaaccaatgacttatcagccaaaacaataggctagtgacacaccagtgtccacaggattctactactaaaaacaacacactattgaacagtacagagaacgaactaagacttagacacccaagacagctgtgcgctgttatacggtggagttgtacagagatgcatcgggcactgagacacacgagcctggcctggatcctccctcagcgcaaccgcccaacgctctcagcgtcccggccacgccagctcagctacatgctaggaacgaagcactgcagggactggcaggagcagacttagaagtatttttagtgctctggctgtgtacccgaaaacacagaattctaaagcaagatagctgattcaagaataccaccaatctactcccaattttaagaggaaaaaaagcaggggagagggaatcgcgatcgccaagctcatcttttcaaagcgtgacgctgtcagcaccaaccgaagcacttcacaccatgagcttttctttcttcagtaatgcggatgtatgtacaccctggtgcctgattaataacgtcatttcccagcccaacaagccgattaacgtgcaaagggctgcatgaaggggttttagcaagagtggctctggtgtagctgccaccatgcctgcaagtgggagcagctgctgttcacaacagtgtctacatctcacagccccttcatctctctccccaaattcactttcacatttacaaggaacaaagagcctcaagtctcccatttccctaacctgaaccactatctgcagtaccactctctctttacaggtcaaacaaaataacaacttgacctctaacagggaaatcggaagagagggaaagaacagaactacagaaaaaaggtacgaaaattaaagtaaatgaggattaaacagcaaactgaaatccaaattagttgtgaaagtgaatgaagtaaacttgaagaaaagtgttaacattatgaactgtgcatcgtatagactgaagcggagattaaacaaactccaaaagcatgcatatcactcacttaccaccatgttttaagggtttgatgcaattgag

SEQ ID NO: 43393 - DNA, 1027 bp, Bovine  19866881330826
  misc_feature (1)..(1): n is a, c, g, or t
nggcttgagggggccagcaggggcctctgtgtgggcaggctccggggacaggcccccctcctcctctgcggcctcctcctcgccgtccccctcctcgtcgtcacagcacagagcgtggtagagcactttgtcgctgaaccgcaccctttcccgcgtccccggggtccgctggggcagctggcccttcacagggccggcgctgaaggcctcctcactggaggagtccggggtctccacccggggcccgttggggacgggcaggccaccgttcatgagccggtagtctgggccggcccccggccgggtcgactcggggccgtccacggagtctgagggcgtggagatgtccaggaaggagcagaactcccagctgtccgagaggatgtcggccgtcataaagtccaggtggccaaggtcaaaggggccgcccacgcctgccttgtcgctgctggaggtgctgctcacagtggctgtggtccagtcatctggctccagttcaaagtcgaagtccgaggttagtttatcgatttggctcaccacctggccgggcaaggggagaggagtgagcggccagcatcaccaaggtgcgagtgtgccctgtcccagccttggctaatgaccctacaggacacaggtggacttgagttcacaggtttgctcgccctgttgagggccaaagctggaccaaggttaacacagctggttcgggccatccgcctgttttccactcctcagtgcctctgggagagggagggtgccttccagccctgcaccccatccattcacacacatcccctcctgccccaaagccagctgctgttctggggggcagccctagttctcagagttggatcttcctttgattggggaccatttgaaacagggctgagagattccagcaagtccattcagtggcaggatgagaagcccacccaccctcggagaggaaattagatgtgaaaaccgcaaaaagactgcccaggctttctgaaacatcctggaccggcctctgcagcaggtcagaaaa

SEQ ID NO: 43394 - DNA, 1626 bp, Bovine  19866881332271
  misc_feature (1)..(1): n is a, c, g, or t
ntctgcccttgacccggctcttaggggcaagtcaaataacctctgagccttgatttccttcctccaaaacaaaagagtgatactagcctttgtgcagcaagatgcaaagctgagatacactgaggcagccaaaatgctatgcgtgtaagaagcattgttactatcacaaatagaattttcttgggaatttcagccagttgatttatttcctgaagggactggaacctccaggaatggcattacccactcccttccctgccctctaaccctggggaaggcagagcctaggggaacgaggagaaacttcacccacggtcccctgccaggacatgggagaaagcctgaggtgagcatgggagcaggtgacttgccgtcacatgtgtatctcaacccctcttgtcacaggagggatctgaggtgaattccagtgtaactgctcacactcagacaagaggcagcaaaaagacccagaacaaagaacacaaaaccacaaaaatgcacatgctgccttggggagcatggaattccccagaaggtgactgggccaggaaggcccctgctcctgtcacccacctgcctgcccaggaggccactcagagcccctgaggcccagcgttgtcatggcaatgcctgcagggcagtgaagagtgaaacctcgggtagtcaatggcaagactcaaggccactcccctggcccagcccctttacttctcaggccaggtttgcccaagatcgctatggtctgtgcccatcttccattcctcagctgacagtcccaccaagaccactgactcttcacaagttattacactcttgggacacaaggtaaactaaggcccagagtgatctggtgctatgctaaagtgccccagcaggcagagcccggcccgtgtgccagccacggaactctgcctggtgcagagctgcctaccaggagttggtcgctgatcttgagcttctccatctggatctctcgaaggggcctcttgagcagggccttggtcatggcattctgggctgtcatgcgtgtggctgtgttcaggtccttcaccgtcatcaccgacagtactgggtcccagatgcggaactggacgtcggcccccacggacagcacagccccatccttagaggccaactgttaggagaggccaggaaagaggggcaggggctgcagggaggccaggcccactgagaccacctaacctgacccacttgcctggccactggctcctcgagaacaaaatggtaaccccaagtgcaggggttcgatatatacagcaaggatgtcctcccagcctccctcctcctttttctggtgtcttccccacccctcagccctgatggctactcgcaggccaaggtactgacatccacaacacacccagcacaagctccccactccctctatccaggggagccgagaagcccctcaccttgcagggaggaacactgaaggctcgtgtcctcagatctaccctctgaaaagagtcgatgaagggcaggagcagaaccataccgggtccttgaggggtgcggatccggcccagtcgaaacacgatcatgcgctcataggtgggcacgatctgctcgtaatagcaagggaaagggtcaaaagcactgagctga

SEQ ID NO: 43395 - DNA, 939 bp, Bovine  19866881370619
  misc_feature (1)..(1): n is a, c, g, or t
ntggatcctgcagaaccttgcctgccttctggtcacccagggtgtggcaccgacagtttaatgtcctgattattagacgatcatttcctaggacccagagctgccagctcccgcccccgaggccctcccggcccatccttattccaggccatgctctctgagcttcctgctctccccaccgaggggctgctctggagtcaggccactcgggccaaaacatccctctctctacatatttcacaacccactgaccggttcctgccggacattgtttatcctccagctccaggctcgagagattagggctctttggcattccatttgccttcagctgcttcgtgtgagcaggaggctggggagaaggatttcaaaggagacgaggtttatggaactcacaggaaagaggaagccaagaggaaaacaggtgaggtgtaggcacgcggagggaatgtaacctcagaccctccgctctgggcggccgccaggaaccgctgagcaggagggaacagattccttctaaagcaggaaggatttaggtcagacggtgggagaatttcctggcagctagagtatcgtctgcagaggttgtgagaggtcctgggctcttgcccaaagctggggaatggcctgaatagctcctgaaaaatattttaatctccaagtgtttatggagccatcaaacctgctctcacgggacggttactctaatctccccgtcatccacatggggaaactgagcctaaagaagggccgggacctggaacatgaggcgcagggcgagatggcagatatcgcctgctggactctctcccaccagaaggccccagctgtgtcctgccagggagcaggaagacagtcctcagccttccacaggctggtgtgggggccagccggcagctccaggcccagcccaggtgaggcgggaggacatcagacccc

SEQ ID NO: 43396 - DNA, 3181 bp, Bovine  19866881446601
  misc_feature (1)..(1): n is a, c, g, or t
ncacgctgcccttttctgtgcctccaaagccctgcccttgaagagcccagagacaggttaggggagggctggggtcctcaaatgcatgtggtaccatttgagcactgcgcccaagtaacagagaccccctacgatgtgccaagtgtgatattggcattttatgtagatgacctacttatgctcatgagaactctatggcgtaggttttgtcctatccccatttaacagatgaaggcactgaggtgtagggaggttccctgacttgtccatgatccttcggttaggggcggggagcttgcacacaagcccagggatctcactgcggagcccacgctcctatagcccacatcgtgctctcctgagaggcaggtcgtgccctgctctcaacagggcaaggtggggaagagagcacatgagctcctcagtgcttgcagggcagggttcctgtgggtggggtacttggcaaaggctcctaggggagagaggatcctcctcaagggcacaccctgagcagacccatgcctggggcctgctcccaggcagggccccacagagcctctgctctctcttaaaggctgaatgaaagaacacgacgtggatctaccattggcccttccagggtgtgtagttcgctcagagatgaagagcaagggcattaccaggaaggggaacagcataagctaaggcctgcaggtgagggtgactgctggggccttcctagagaggaagagaaggcctgacttggtgcggaggggtgctcaagacccgcaggccaggatcaagttgaactggttaggctgaggccaagggaaacgctggcagtcaggccactgagccagccgagtagcaacctctgctttggcctgacttgagtccatagacctgagaatctgggaatagctgggctaacagagcctttccagattaggtggcccaacacatcttgtgctcctgggaaataggaggcccagggagggaagggcagcttgcaggcctccctacctccttctgctggtgtgtggcggtcccaggggaacagcaggcaggaaacactgtctgaggtttccaaccatccaggaggaagcctgaaaagataaatccttggcagagaggcataaactaaggcctagaaaggacagaggcagacctcctggcccctgactgcctgctttggccccttgcaggccagactctttttttcagtccacatcttggctcagcagccctggcaccagggatgacctccctgttcctttctgtctctccaaatgtcccttggattggctggacctttatctgtggttggacgcagccccaggctctactttctccaagaattctcccaagatcgccaccacctgccaacttctcacttccttgagtggcttttagcctgagtctgttctactgaaaggaatgggacggtgtgaaatcaggatttcttcctctgtccttccacaggcctgtgttcctcccctgctatgccctgaactccctgaggtgatgagtttatcataggctgatcttcttcctcccctatcccctcagagcagtcatgctggagaggagaaggccatcaagccctggtctgcaggaaaagccaaagcagggcccctcgcctccatcccatcctgcctgccctcgtcacctgcatggcagagagatggcctctgctcctgcagtgggaccactaggctttaggcatgagattaggtgatgttaacctccacttcactcactccccagaccagccccctccccagcccttcatggatcacttcagggtcagacaggcatatgtggctattagcccagagtctgtaacagaaccctactggggctcatccagtttctctcacatgcctccagtgataggctgctcactacttgtagcatcactccatatctcgcctgggctggtcagcatctatgtctctttaagtcagcaatgcccggtgccagagattctgacaccaggtccaaagcggagcagaataaaggctggacaactcattgtgggcacatagaaacaggacaagcctttgctctccaccctggctgttgagtcttttgtctgggtagcatcgcatcacccatctgccctccctccctccttgctctgtgtgattttcttctccttctccccccacttccttgtatctaaggattgcatgagtcacttcactttgagctgccagatgtcgaatgcagttgggctgagtggaagccaattttttccctttactcaaagacagtccagggctgatggaagcccccaacatcgtcatcctggattttttacatcctggattttttacaagggttggcatggttgtgcaagctagcgctacatctccagggttctgaccagtgcctcctccattgccagcttggattctcctgctggcccggggcagggggccaggccagcctgtgctgtctagggcacactcagggccagcgccctcccccagcccctcaggcacagctgatctgagaggagtcagggcccgggccccacccctgctcccaccagggagttttcagcaagagcctcctatgcaccagctccgtgctggtgctgtgggggagacaggaagaaataaagcaggccctcgccttcaaggaattggcagtctgtttagggagacaaaattcatacaaacagtggttcatgtttttcagtctgggttgtgcctctttcttccacacgatctcatttaattctcacagctcttcagcgtggtggtattatcctcacttgacagacaggaagaacggggctggggaggttaagtgactcatccaaggtcacacgggtggtgctggtggtggtggagctgaacctcagcctcttccatccattgggcccccgtcctcactatgtggtcaggttggaggggacacagggacaagttgccagacaagaggcccactgtcctctttcccacagctgagactgagctctgctccttttctttgggttttttttcatatttatttatttagttttggctgctgtcgggtctcagctgcgatactcgggatcttcctggcagtgcacactctctagctgtggtgtgcgaagtccagagtgcatgggttctggacttcgtggcacgcaggctctctagctgtggtgcccaggctttgttgccccgtggcatgtggaatcttagtt

SEQ ID NO: 43397 - DNA, 768 bp, Bovine  19866881542155
  misc_feature (1)..(1): n is a, c, g, or t
natcctgcctatctctctctgtccattcatccatgcatctctcccaggcattcccccaccttcatttcaccccctccttctggctattacatctctcattgctccggtccatctgcccagtgagcctagtacaaggcagagccatgctgagcagctactcagggcagggagggcagggtcaggacaaagcacagaggaaggaggccccaggctgctgaagtgggcatggggtggctctctgaggagtgcacagcaccccaacctctgctcctgtcccctctcctagggcctgagcccaggctgctatgacacatacaacgcagacatcgattgccagtggattgacatcaccgacgtacagcccgggaactacatcctcaaggtagggccccctggaggcactcctccagcctgatgtcctcacccctgacataagctgcacattctggtgtacaccctctgggtgttagatctcacaggcagtcacgagcactctaaatggggcaatcacggtagacttcctgcaggaggggacctgagttgggtctaggaggctgggtggattctgggtcaagtgaacagaatgaaagagttaagtctgtgtgggaagcagtatttgaagctggaacccagggtgtaggggaaaggggaggccagtatctccagactaaggctcctccttcacactcctgttgctctgcaaccaatgatgtcccctgaggtctgcacttcgcatctgaaggtcttagtctcaagcagacacagcct

SEQ ID NO: 43398 - DNA, 1290 bp, Bovine  19866881649255
  misc_feature (1)..(1): n is a, c, g, or t
ncttgaaccctagtcccttctgcccttcaggccccttgtggggaatgggcagttgtcagtctctttgttcagctctgtcctcctccaatacagatcatcaggcagattgagcttgaggagaatccaagtcaagcctagaagccaccccaagatcgcaggccacctggccttttcaggcagatttaaggtatctgattggttgtcacatggttgcctggtatagcccctataggtaactgcaccagtccagtcaaactgttcttgggaaaagccatgggaacaggtcaccctttggttcccttggttggccccttcagaaggttttcaaggttcctggtgaagcaggcccctgccatttggcatttttgtctgtctcacaaagaatggtggagagcatctgacgcatcaccacccccagttaaacaaatagctaagcagtactgcctggcgtccttgcccaaggtggcactctcgggctggcccacggtcagagaagggagtgaacaatagcagcagaactacagccaattgttaggcattggaaagaaggagagtcttagattgatagacatacttagagtcagaaaaggttatggaagtttttatgttttttgttatggatattccatttctaactctgtgattgtaattggtgggggagactactgattaagacttggacccatagtacttcagattcctaactagctccgcagctccatcctccagccctataacatcaccagcaaaaacaaataattgaccagccaaccatgatcaccacttgcctgtcactgattggactgaaagagtgtgcccctaggctcagtggaggccagctttgggtgacggggaggatgtcaaccccagtctggctcttttgggcccatgctgtgtactggagtgctgtgccctgccccagagagctgtctgtgttcttgtggctggccagcaggatgcactgcctgccatgtgtgtcagtggagagtgctaagggaggtctggtgctcccttagaaagagtgcagccctgaaggcatgccagtggcttcaggttctctggaaggacatgtctgagagcagcagccacctctccttttcctctttgctcagcagctcctcagtctctttgcttgcactcggtagagggaggattgtagtgaggttggtgacaaggtgttttgttgaaactaacagtgtatttggatttccatccaagtgtacatttagcaatgaactagatggaggaatgggatggactcagctggaagcagacgggcctttgtaaatt

SEQ ID NO: 43399 - DNA, 791 bp, Bovine  19866881701796
  misc_feature (1)..(1): n is a, c, g, or t
ncttttaaattagagctaatagtcattattccctagccctgcctttgagttattggttgagtacaagactggaaccgctgctgtttattctgagctgaatgcttactctgatgctgttgtttgaggcacatttctggtgagtacagagtaacttgaacactggccaagggaaggaagggagagggaagcagaaccatccaatgaagaattatttgcttttcatgtgtaagatactagggtagcaagtttattttcttgtctttagatatcactgcttcttgaaggagaaaaaggcaagatgtcttgtcctgtgttggcaactacttttgaagtaattttcaatccatagattgaatgaaaatgtgaaatttaaattagggtttttcaattttataagtttaacaggttggaagctattgtggaccatgtggaaaaaaatagctaagcagctccagcattgaaattatattaatcctgaatctcaaataattcatcaagaaagatgaaataaatggctttaatgcaaaccagaaagggctgctacctggaaaagagcaagtataaagaggtttcaagtaacgtgcagtgaaatgtcattgaattactcttagacaaataagatagtgatcacgtatcaaaattatggtttctattttcttactaggattgaagtccaaataattatcaacacattccaaccacatttaggaaaagatgcagatagttatacgctgatggtaacataagacaggagaaaaacctgaaggagctaaatttaagaaaagggagca

SEQ ID NO: 43400 - DNA, 2416 bp, Bovine  19866880168434
  misc_feature (1)..(1): n is a, c, g, or t
nttgaagaaccagaggaatgacagggagcgagaatctgagagactgacgaaaagggtctttcagacttagagaccttgtgatcctttttatgttggagaacagttccctttcttctgcatatttgtttatgtttagtcttgttattgctcactgtagtctattttaaaagaaatgtctttagagcagaactgtggctcagagcatccagtgggagaactttatagccaattgatggtcatgctgtctccaacccagtaggactgtgctgaccccacccattcctttgatgtcctgaggacctcctgtactgtcagagagcccagcctttgatgtgggagttgtctttatccaggaaaccaacatactatttttatttagtgtgcatgtgtgctcactcagtcatgtctgactctttaccaccccatggactatgctcctctaggctcctctgtccatggaattttccagacaaaaatcctggagtgggttgccatttcctactccaggggatcttcctaacccaggggtcaaatccacgtctcctgcattggtaggcggattctttaccactgtgccacctggaaagctttatttttatttgcttatttatttttggctacactgggtccttgttgctgcatgcaggctttctctagttgtagtgagtccaggctactctgcagtaagctgtgcgtaggctgctcatcgcagtggtttctgttgtggagcttgggctctaggatgcgtggacttcaggagttgtggtgtgtgggctcagtagttgcagctcaagggatctagagctcaagctcagtagttgtaacacatgggtttagctggcccatggcatgtggagtcttcccagaccagggattgaacccgtgtcacctgcattgcaaggtggattcttaaccactagacctccagggaagtctggcaacacactttaaattgaacttggctgttgttgaggtcagcagcatttcaatatctgagaaaaaccatagaggaacttctagatttctgctgaaatgttgagaggatggactttgtcttggacatgcacttctccttcttccccttgatagtagggaacacagacctgggtttgaattttgactgtgccaactggctgtgagatcatgagtgatcatgataatatggacagttgatgcctaatgagtagttagtgtgtgccaagcactgttctgaacttaacacgcatcaactcatttaaccctcataacagcataacgcgaagtagattcctgttattcacattttaccaatgagaaatctgaggcacattaagtagcttggctattacagccagcaaatggccgagctgggatttgaactcagttaggctccagaatcggagaaggcgacggcacccccactccagtactcttgcctggaaaatcccatggatggaggagcctggtaggctgcagtccatggggtcgctcagagttggacaggactgagtgacttcactttcacttttcaccttcatgcactggagaaggaaatggcaacccactccagtgttcttgcctggagaatcccagggacaggggagcctaatgagctgctgtctctggggtggcacagagtcggacacaactgaagcgactcagcagcagcagcagcagcagaattggctatccttgacataagaacacctaagcctttttgtcagtttcagatttgtaaggaaatatgactttattcaatctcctcattttgtctgggaaaactgaggctcagagaagttgtgtgatttgcccaaggtcacctgtttagttagtgagacaatgatatttctgctccagcaggccatctccctcagcttaaagcatgacagtttctggtctctttaattccttccttcactggttttgtttcaagttgaataattttgagtcaattttaaaaatcggatttaagtgtaattttcatgcagtaaagttaacgaattttaagtgtatcttttggtaaatttggccaatggatacagttgtatcaacaccaccacaaccgaaactcagttactccaaaaagtcccctcacatccccttatttttagcctggctactggcagtcacttttctttctctcactgtagttttgcctgtttcaaaatttcatagaactggtttgcagcatttagttttatgtctggcttttttcacctatgttgtatatatctgcagtttttttctttttctttttgctagttactactatcctattttataaatataccataatttgtttattcaccagccgatgaacacaatagtttccaactctggtctttaggaataaacttttaaacacatccatgtgcaagtctttgggtggttaaatgcttttagttcttttcaataaaaacaggtagggaatagagga

SEQ ID NO: 43401 - DNA, 2565 bp, Bovine  19866880505616
  misc_feature (1)..(1): n is a, c, g, or t
nggggtggggggagctctgagacgctaaagcaggagagtgacgggatctgatttgtgcttttcagattccgttctggcccccatggggagagaatggattggagccagtggcagggaaagcagggagcctggtggggagactggtgccggtgccggatctggaggagacccagggggtcacagcggggaggagggtggcttctggatggtgagaagtgggtggagggggtagatgctggagatgggccctgcggtaggaagactgagtctgggttgggggaagtcagtctggcctgagtggccttgttttctgagatgggattgtgggccaagcagaagtgtgatggtcctcatttggacttcctgggtgtgaggtgtcaaggagcctttcactggagcatcatttcctcgggctctgttgggacctcctgcatgtctctagactctcgaaatgacttcacgtgtcttattacacttgttccaagctcaaaggctttgccctaatacattggatcatcccatttgccaagtccatttttcagatgaggaaactgaggggctcttacctcacctccgtctctgaactgtacactgcctccctctaaacccctggcatccacattgagaagagggtgtaagaattgcagtgatacttcaaaggaaggtggcaggaaaactcggggagcccggcaccatctcctgctgacgcctgggggtatgtgtgtgtgtgcaggagcatgcgcgtgcgtcaggcccattaacaaacagagaaataaattaacgagtattcaacccaccaaatgttccttctgttctgtataatagagcacgggaacataattttcccctggagcaaattgctacagctgaacctgctcctcgttttcctccaaaaactgcttaaaattctggaacgcttgttgatttcgggtcctttccctttctgcctcctgtccccaacccccaggctgcttccttccaccttccttgtgccaggcctcagaggagccagactgtcactgagccaaagtccctgccctgcagatgagaggatcctgggggtcagtagctcagtcagggggtggcttgtgtatggggtgggggggcttttgggatgctgaataaaacatccagggctggcagaagggaccagctccccattgagccctgccacaggtgtgctgtgtgaccttgggcaagtcactgccctttctgggcttcagtttctcctgattataatggggttgaatgggcctgctattccacggaccacatcttgaggtgtacagagtgctgtgtaagtgggaggcacatccttctgaggattccttgtgcagagaatggttaagtaagtgttagtcactgagctgtgtctgactctttgtgaccctatgggctataacccaccaggcttctctgtccatgggattctccaggtaagaatgctggagtgggttgccattcccttctccaggggatcttcctgatccagggatcgaaccaatgtctcctgagtctcctgaattggcaggtagattctttaccatctaagccaccagggaaaggcatgcgtgcccctccttcttccccacttccaggcccttctgtggagcctctggattcagggactttgtcctgcttctgaaatcctctagggcacttctaattttcttaaagcaaattaattttaatctactttaattaagcatgtcttataaaaatgtatattcatttgtagctcttctctttctctctctgcatatcctgtcattcagagcccaacacaggtctccacttataggtagcccccataggggtgggagcctgagttgggggaggccctggcatgttgactcctggttggcccagaccaggctgagttacctttgacgggagcagaatagggatgtggggatccagtgcttaggaaccttaatattctgacctcctaacccgtcttgaggggtctggttgtactttatggaagctgcaaagttccatcaatcccacagctatctctgtgctcctcggcagaggaatgaaaccccgaagaagctgctgagactttgcagacccgatgaaggagggccttggctggggtccactgtgtgaccccaggtccagccagccagaatctgacttgtcttcaagccctaggatggccccaaaccttgtctcctccaggaagctctccttgactttgctctttgtcttagtctgcttgatgactctaacaaaagactgggtggctatgatgtagactggctggcttaaaccacagaaatgtattttcttctggttctgaggctgaaagtctgagatcaggatgccagcatggtcagattctggtgagagctcccttgctggcttgcagtggctgccttctcactgtgtactcacaaggcagagggagtgaggagggagcgtggagagggggagagacgggagggaggggttcctggtgcctcttcctttaaggtggtggtggtttagggctaagtcctatcgactcttgcgatcccaggacagaggagccggcaggccacggtccatggattctccagg

SEQ ID NO: 43402 - DNA, 2034 bp, Bovine  19866880560336
  misc_feature (1)..(1): n is a, c, g, or t
ntagtgagaagcgggccgggttccctgatcccagtgtcatctgccccaggccctgaagggtctcagcacctcttctactatgaaaagggaacaggcaaggatgagatgtgtggagcggcacctatgatctaggaccttttctctaaacaattccataacgcagttacagatctgagactaaggcctgagtcctggcactgccactctgtgcatctcacttgacctctctgagcctcagttttctcatctgcgtaatggggataataacaggacccatctcccaggactgttctgtgggtgaataagatcttgttttaaaaaatatgagatggtgaagatgatacaaagaccccatctcttgtaagtgaggaagcaggaaaggttgtgggagttgtctgggtcctacactggaaagtgggaagctaggaccaaatgcagacttgtgtgactcagaatccaagctcgtgcccattgctggtcagccctgggctgggagcggggagtggcgcacagggggcctgtctgccatctgtgcatcagtggtcgtgttcccttgctccccaggtgaagtgacttaggcactccccacaacccggttcccacaggttcagcacagagatactttaggaggcggggagcactagccaaggagaacaactcaactcccacttccccctcccaccatgcctgaggctagggagctggggaagaggcagtggcccaagccccagacaggtaaactgaggcagcctaagagcaagtctacgcagagactccccagggtggtctaaggtggaggaacgggcaggtctgagactcaggaagtctgagaagaggaggtggcccccacagcaggggaggaggaataccacttagcaagcacacccttgtccacccccaacacatacacacacacgcgtgcgtgcactccagccaagggcacagagcagggggaggcggcaggactccaaaggccctggggtggggtatctaaggacagattcagggagcacccactcccactcagacagccttctggggttggaaggtcatcagtgaaggtctagagacctagaggtaaggccaccctgctgagatcctgcttaggtccagcaagtgagggacatggcagccagagccaaggtgccttcagctggcggctggtgcacattaagaattattcctctcaccagcaaacaatttgttacaatatccattgcgcgcttttcccagctgggtgccctcccatacatcctggattaatcccagaagtcactccattcattgaggacatgcctgagtgtgcctcctcttttatcagggaaatttttcattgttttgaagcactcataggttttaatttggggttgagattttaaagcctccttcagtggtgaagacgtatgaggcagcttgtggctggaaagattacctctgacctccaacctgaaagggcccagaaggggccaacagaccctctagaggaggggaacagagaacctcctctccaaagagccagagactgaaggcctcagtgtggcatgagacacacccttgacctctctgagcctccccaagagaggcaaagtcgaggaggactgcatatttgagcgaccctctactgagcacattcaggagagtctgggagatgcttgcctttaaatcctgcagacctgggggggagtggggccacattgaaagctaaaagttgggagttccgatcctaaacgacctgggacaggtgaatcattatcctctctgactaggatgagctcagtgccaccgcaggctgctgtgcaagcccaagttcaagagtgggtctaactgagggcctggcacatagtgggtactcagtaagagtgactctcctggttgggccttccccggaggtccagtagttaagactccaagattccaacacaaggagcgcaggtttgatctttggttggcaaactaagatcccacatgctgcatggggtggccaaactgaaaaaaagagtgactctcctggccttcccagcccaccacagatcc

SEQ ID NO: 43403 - DNA, 1634 bp, Bovine  19866880576740
  misc_feature (1)..(1): n is a, c, g, or t
ntgcaaagtccttctgggtactgaaggcaccacatacaccccacccccccatcctacctagggcgtggctgaggcagagagggctggggtggggacccccggagacccagtgagggaaggggggcgagagagaagtccttcatccaaaccagagggctggagtttctggcactgtgaggggctgtggagcaactagccatctgcattccaacctggtctttctctggccttggcctcagctcccagtccctgtagagggaccctctgagcctgggtctccctgccctgtcctgggacccaggcaccagcatcctgtccttccttgcagcctgacaagctccggaggatcttcttcacagacaagaagcacaaaccctgaggaggtctggcttccagcagcccaccagcgggtttcctgggcctggggccacaccagaggttattgggaagctctcagcttgcttgaaggcaccccttggaccctcaaacccaaccagcctgctctgaaaccaggctccaagacagcctaggtgcccaccagcgacagggtgggaggggaccttccagtctcctgctgctcaggactgagtcccactccccaccccagggcctcccacccatccagaggaagtcacagcctgagaggaggggggaccagccaaaggcaggggtgagcaccccctgcttccaagatgagcaggctgggggggtcctggacgattgatggagctggcctcccaccactgaacacttactgagcatgggacaggccctgtggcatggctggcattttcttagctgagtgatgtcatacagttgctccagagaccaaaaccagtccccctcactgtggccctagcagagagcatagggtgggaagtagcagtagagtgccacctcagaggggatggttctgaccctggggcagctgagctcctgggggccatcccctctgcccctctccacccccacctttatgcaggcctcataatgcaagctaagcagaccctgatctgacccttttgctgcagatgagtgggaggggtggggggcggggagggacagagacccagagaggagcagcaacctgcctgaggctgcacagtcagtcagcctgggcactgctgggcagtttctggagtcagccagtgggtgcttgctggcctccctatatgaccaggtcaccctcatctatgctctgcctccagccagtgatggcctttatgggtggctctcagacccctcctaacacaggcccaaacctggctggctgcctgggctcagcctgggcactgctgggcggtttctggagccagccagtgggcgcccaccggccatccctatgtaactggtcaccatggacctaggcccatgcctgatacaaatgttcactggaatggttctcactatgagggacgtggagatgatttttcacccaacatcggctcttcgcggagctccctaggatctggggcacagatatgtctcctcccaaggacacaggtactgaaataaagttggtgccgaagctgggaaggcagcacttaacctcaagaggtgaggtgctcatggggagatttcaaggagaaaagggatcaacaaacctttcctaacctcggcagacacagagaaca

SEQ ID NO: 43404 - DNA, 1596 bp, Bovine  19866880626708
  misc_feature (1)..(1): n is a, c, g, or t
ncttgatggagtctgctacacagatacatgggaagtgccctccaggtagaagaaacagcacaggtgaagaaagagttgatagttgggttgcaaagcagtcagaagggtgttcacgttccctctatgagcctgcgtggctcggtcctctggacatgttgctgggctgtgggtagcagtagtgccttttgccaaggattagaatcaaattgttccctgctctttgaagccaggcgtggggcttttctctgagggccttctgagtctcctgacctccttgtctggctagaggccagaggcaacatggtgcagtttagaaaatgtgggtcttagcatcaaccaggccctggtcagcatcccagcttcccctccaagcagacgtctgaccttgattcagtcacttggcctgtctgggccttggtttctttagctctagagagaacacgaagtccactgtggggcaaagctaggagggccatttggcctgggtctcacgttcccaggaagcctcagatttggacattccaagtgtctcaggctaagtctgtgcttgccgtcatgctgggggtttgtgcagatggtgaatgtgggtttgttgaacgtggtgtctagaggtgccttgtgggtgagtcccccttggtcccggtcggctgaagaccaggatccagcgtccccagagggtgcatggggaggtgtctggtgtgagagtggagataaacccacccgctccctgcagacttcaacacagacaacttcatctgcaaggaggacctgcagctgacgctggcccggctcaccaagtcggagctggacgaggacgaagtggtactggtgtgtgacaaggtcatcgaggaggccgatctcgacggtgacggcaagctgggctttgcagactttgaggacatgattgccaaggccccggacttcctcaggtgcggctccaaggggctggcttgggtggggtgggccttaataggggccgcagctggaagaccccacgaggctaagggccctcgatgctcctagagcggtggtgccgcaggccccgtgcggcccaggaggcaggccaggctccaggcccggctgccctcagcgtgtgcctggtgagcccgctgtccccagcagggccagactctcgggggaagggtaagacctgggggccctttggttgggtggggttggacacgaaggcacggctggccctccaggccttcacgtggattattcatgaactctgcgtcctcctggagggactgtccagggttggacatggggcctggttggctttctgcaaggacctttacccacccagtccagagctgctcaccctctcttggtctttccttctttccagcactttccacatccggatctgaggacagtgaccagaagccgaccatccggcccggtccccgcacgagtgtgacctccaagctccccaggagcggagccgtggcctctggggtttacacccacgaacacttctttggccctttcagcaaaaaaaaaaagaaaaaaaccttaaccagggaagggggggatgtgaggagcacggcccttcctagtccccctgtgggccctccccaggccctccctctg

SEQ ID NO: 43405 - DNA, 1874 bp, Bovine  19866880679992
  misc_feature (1)..(1): n is a, c, g, or t
ngggggcggtctagtcatccagaacaaatctgaggtggggatgggagcacccactggcataggctgcgtccccatagaccttaaaggggtcactttccatcttggtgcctcagtttcttcatccatcaatgggaatattgtgaagaccaagtcaaggtacttatgatctaaaaacgccatagaggtgtgagggtctcggtgttttcctgcagggtatcctcagggaagtcttctattcccctgaccacacagggcctccagtggaccctgaaccacagagaggtccgatcaagtcttcagaggagaagaaagactggagagaggataaggagagccagcaaggggtgagaggctgccctaagggacagagagaaggatgaagaggagaagaaaggcagccataggtgtctatgagcaagagctgcctggaaatgcccagaaccccccaccctgcacaggcctcagggcacagggcccctggtaagaagcccaaccttcagctcgttagccaagacctgctcattaatcaccacgggccgcctctccttgccttggctgtgtcaggccataataatatatgaagaacattcatttattcaccatcttcccactcagggaaagatatatgacattgtaggaatggatttatcctgacacccagctttcagcaaagtgaggctaatttaaacatttaagtcaacagctcacccctcccgttgtctcccaatttcttttttaatggtgggaggtgaagaaggggaaggaggttgaaaatgcacaagcctgcgtggttggaggattaaaggcaatggagggagaggaaagggaatctcggccagctttccctctggcctctctcccaccacccatcctggccccacccctgaaaattaaaaaaccagggcaacaagtgggtgtggaggagcgagcaccaaacttggggtccagagtcctgctccatctctaactcactgcaccctgataagcccgtctccagcctctatgcccttgtctgtagagcagcaggttgaacaaactagactctgcctaggtcatctccagcttctggagctgggttcctttgtccacttctgggcatctcctcacccctgtggtccacctgcatgctcctgggatacagaggggaagcaggactaggccctgcctagagatccatcaggaagggacaagacggctgctgtgctagggagagtcagctgaacctaagggagttcggagcaggctgagcagtcagggcgcacttcatggaagaggcaaggcttacattcaggacaagggagcagccaggtctccatctgtttaagagcaccgcctccaggggtagatgtgtacgtgtgctaggtcacttcagtcatgtccgactatgctaccccatggactataacccaccaggatcctctgttcatgggactctccaggcaagaatactggagtgggttgccatgccctcctccaggggatcttcccaatccagggactgaaccctacatctcttgatgtctcctgcattggcaggcaggttctttaccactagcaccacctggaaagcccccgaggctagatgcttggactcaaatccctcctccgtggctttagcaggctgctgaccctctcaatgcctcagttttctcgtctgaaatctgatgacgagagtgcctaccccacagcattcttgagaggatcagatggggccaccatccatgggaaacccctggtaccatgctcagcacagaggaagtgccgaagcaacaccatcatcaggggtgggccaagaggagaggaagaaacagctgggtgaggtcggtctggcccgagtctccccacttcagcccaggcccatctgggcatggtat

SEQ ID NO: 43406 - DNA, 1424 bp, Bovine  19866880749753
  misc_feature (1)..(1): n is a, c, g, or t
ncatgggttgcaaagagtcggataccactgaagcaacttagcatgcacacatggtcagacaccagctttacacagcctgtgtgcttgcctggtgtccagtacaggcaagcttggtgccagaaggtctgtcctgcctgtccatgtgagtccctgcccctcgagcctctcaggaacccagtgaccagaaggaagtgggcaacccaggaggaagtggctgctgtttactgaaaagaggaaatttgggcaatgaacttgctcccacatggccagcctctgggcaaaccccgggggaacacagagctagtgactcatcctagtcaagtttccctagcagggaacagggtgaaaggcctctaaggagcacccagccacccaccgcctttttaattcccagaccccagggtatggaattggctaagacccaaacctgccacagaagcagcccgcagtcctgtggggagcccagagagaaagtagaccttaccacctgatatgctgtgtgtcctttggcatgtctgtgccctctatgggctacaatttcccatctgttccacgagggactggatggcaaagtgatctgtaagggccctgcccacctgctctgaaatgtatcagtggcataaggcacagctgtgagggcctttggtcattctccctacaggtccccagaccagcagaggctctgttttgttttttgagccttcatgctcaaaggcctcttgattcttctagctattacaacagacctgacccttgcttttaggactctgtcttatcctgcaagcttggccgcccgctctggttagtgcaagcctgaccacttcgcctctcccctggccctgctggagaagctgtcctgacacaaagggcacacatggaggccttctgtgcctgaggcagagaggaccggcagagatggctccactgcttggggctgggggacacagtgcaactttggtggggctttgttcaacccagagcacatctggaggaagttggcctcgatggggaggaaattggagttcatgggtcaaggctggggtactgcagctgtgaatgggctgagcaccagagcgtgtgagaaggaacagggagaggcagaccatcttcagagtggggctgaattgaccactgggagacgccaccgccaccacccattgagagtgctggctgagtgctttcatacagctcagcgccacgccacctgccctgatagagggtcagtggagaaatggatgaggcgctggaagcagtggcagtgggggagggggctcccaaataaaggaggggctgtatgacattgggtggatctcccagccaccctgtgcctcagtttcctcatctgtagaacgggacataatgaccactttacctcctagagctgttacgaggcttaaacgagataaatgcaaaagtgtttggca

SEQ ID NO: 43407 - DNA, 1234 bp, Bovine  19866880752579
  misc_feature (1)..(1): n is a, c, g, or t
ncagctgggcagtgcgatgccctgtcggtcctcactcctgtttggtctcctgagcgtctcccagccactcccctctcccgcagggtatcccccagcccctcaaatcaatggcatccaccttggaactctccatcggctcccccacccaaatgccctcccccatgtgtgcctcccagccccgcatgctggacactcagctccctggctcaggtcagaagtttcaggaggcggttggtggccccacgagactgctcccctcaatgggcccgggcagcagggctggtggctgtgcctgtgcggctctgagcgaggaaggaaggagcccaaggcccatacagccgactgtatgcgtgttttccttccacaggactgcaccttcttcaataagaaggacatcctcaagtaagtgtggctcttgttcacctctctaggggtaggggtggggccggccaccctgggggtggggggtgcagggcggtggggtgtgcaaggggccgcccaaagctggagataagcttttccgcctccatcagcagcctagtgtgggctgctgtatgaactcaggaactggcccacatccttctgccaggaatcaaacgtctaccgagtgcgtgccaggctccatggtgggtggtttcaggaacattttcatttaatcctcactgtgcccttgtaacaggagaatccttttatcctcactttacagatggggctgagcagcttggctaaagtcgcccagccagggactgaagacctggcctctgactctaggctgctcgctatttcactgcccccctgaaacctatctgactaggaggtccctgtcattagacagggatccctaagagcccccacgctcaggctctgatgtccttccattcctgggaggtccagaagtcaggagcatggcaggatgccctcactgcctttgagctgtccactgagaatctctttccaggacagtccctttctttgggggtggggtgggcctagacaggagagatgaaggttgttggcagcctcagagctccaggaccagatggagggcaggactcatagaatgccaggaaacctggtcccacaggccttaccgggcccccctccctggactgttaggtggcactaaaagccagcatggtctcaggaccgctttccctggaggtcaatgggcaggctgggctcgatcctgtctacactacccaagggagatgggtctatcattgccagaccattc

SEQ ID NO: 43408 - DNA, 789 bp, Bovine  19866881071373
  misc_feature (1)..(1): n is a, c, g, or t
ntcttggagcagtatcaagtatttgctttctatctggcagagcttggcttccaggctagaatactgcagagaatgtgatagttacctccgtccagacagacacacgggaagagcaatcctcaagtacctcaagcaatcaacgaatgacaagcccagaaccaccaggaagtgagccagagagggactatatcccaggcagagatgaatttatgccacaggccacttgtcttatctaaacggtccactgggccccctcttccctctgggggaagtactggtaataaagtaataagcagagaagtactggtaataaggcttctgcgtgtcaacacacgagttctggacagcgttgaggtgaacagcagaaaccaggccacacactcattactgaggtccagctgagcacagcttggcacacaggccccaggcagccaccttatggtatttcaatactttcctaggatgctgtgacccagcaccagctcccatctgctaccttttcagacaaatcaacacatcccttgaaaacatgcaggaacaaggcctgggaagatgctctgaggactgttcaaaaggtatatgaggcatttaatagctgctgacacagtgtcactgaatttcatttgattatcactggaatatctgtgatgtctgtacactttgcaaagccctctttgaaagtgaagtgaaagtgaaagtcgctcagtcgtgtcctactctttgggaccccatggcctatacattgcatggaattctccaggccagactcctgcagtgggtagcttttcc

SEQ ID NO: 43409 - DNA, 1427 bp, Bovine  19866881267982
  misc_feature (1)..(1): n is a, c, g, or t
ncagcatcagcatcacctgggagcttcttggaaatgctgattctcaggccccatcctggccctgctgaaatcagaaactctgggggtggggcccagcacattgcattttgacaagccctccaggcaactctgattcaccgactggtattgatggggaagtcaaggcctagtgaggggagtgggcctgcccagggttgtggggtgacaaagctgagatgaccaggtcaaggtcccacttagaggtgaaagacagggcttgggtgctccctctggccaccacatctgaccccaggagggagaatctgaggctcaatcctatgtgtccaggggccagagaacccacaggtacaggtaggaggggacagctgctctctgcttatgtgcgcatccctcagggcccacgtggagctcgggtctgcagcaggaaccccctgggataactccgtctgtcctgaggcccctccccagggctgcagcagagtacctgacttacggaaaagggcgttcttaactctatgcagtgagtctggcacccctgggctgcccagtctcccgctccctgtgtcctgggctgcgggcagaggcttggtggggttgatcgccagacgggtcctatgggtgaagagtctgcaggcctccatctgactgtgctctcaccccttctctgctgtctctctgcagatgtccctctgaagagtccctgagcctgcttgcaccccctagaggtaagcagtggacgtctggggtggtgggtgaggagaagaccggagggtgaaatgtgtgaggggcaggttccaggggcctcgtctccctctgcttggccctctctgccatcttttctttctttctttctcctcttctgtctcccagagcccctgccctcctccagccatgaccctgggggtacttctgagttgcagaaagcagaaggggtttgggatcagctttcagggaagaaaagaggagagtggttcctaggtcggatggggtgaggcttactgatgctggggagcagctgctggggtttgggagcttctggcctaggaaccagtcaggagtggggctcagggaccctggaggtccctcactgagcagggggcagagctgtgggcctgcctgtgggggacaagctcagggcatgagttaggtggtcgagctcaggctttgggggcctggctgtgctctgcaatgaataggcatttgggggtcagtattctggggcctggagaatgctgtttgatgaggggctgcatggacagggcagacgctttccctcccctccccccagtttcctgtgtctcctcggacttcagctccaaggaggctttgctgagtggacgatttctaggagggctctggctctaatttggcgtcaggggccccagggtgtctgctgagtcagtctcgcctccatgcaagggaggcag

SEQ ID NO: 43410 - DNA, 2145 bp, Bovine  19866880643164
  misc_feature (1)..(1): n is a, c, g, or t
ncgggtttccttcagaggctgtttcaacacaggggttgcctaacagcagcatgcttacaaagaagcgaagcccagaacttctctgcctgattgagaaagagcgtgaagattactcgacgcaaaacagaaacacgttgtgaaatccaagagctagagcccaggtggctaccgtttgtccccagctccagggaagaggctgcaggacgggtccctggaaatgttgctttaggccaagccattacatgagccttggcccagaggcctcagattccttagactctgaggtcagctcacaagccccctgacacaaagggccatggccgggattggggtgggagccagtttccaaggaaactatcagccatttttcaggaagctgtgtgttcccaggatggtaagcagacactgtgaccttcatcatgatcagaaggtggcctgctctaccatctgtccttgagcaagtcactttgcctccctgggttctcaccttctcacatgcaaaaggcacagccagcaagtcctgcccgccctgccatgaaggtgccagcatccttgggagtgtccaggtggctccacattaccttgaggcatacaaagctggagatcacagcatctgctcttacaaattgttttgttttgttttgtttttttaaaaaaaaaggcatctcccttacaaccttattagctagaagcaagatgctgctagtcccggggttgtgaaggaaatacagagaatcagaagccttggaccccagcccttgctctgcaggactcaatacataactttggacacaagtattagtgtctgactcctggctgtagccatgtacaagctatgtaggctcctctgtccatgggatttcccaggcaagaacactggagtgggttgccattcctactccaggggatcttcccaacccagggattgaacccaaggctcctgggtctcctgcattgcaggtggagtttgtactgccgagccactgggaagtccccagttatcagtataaatattctttataagctgaagtagatattgcaagaaacactgttaatggactcacagaggcccaggaccactcacattatttttaagatcatggtgtttgtacccacccctgccttcctgaactgcagctctaagagcctttgtgggacctccctgcggtcaagtggttaagactccacacttccaatgcagggggcacaggtctgatccctggtcagggaactaagatcccacatgccatgcatcatatccaaaaaataaaataaaagcctcttttagacgcaaattgggtcccatcaattagattcatttcttcatggttctgaaggaataagggtgcgatagctatagttctatggctatgagaaaactagacagtttattaaaaagcagagacatcactttgccaacaaaggtccatacagtcaaaggtatggtttttccagtgatcatgtacagatgtgagagttggaccataaagaaggctgagtgctaaagaattaatgctttcaaattatggggctagaaaagactctcgagagtctcttggactgcaaggagatcaaaccagtccatcctaaaggaaatcaaccctggatattcattggaaggactgatgctgaagctgaggctcactttggccacctgatgcgaagagctaactcactggaaaagaccctgggaaaggctgaaggcaggaggagaaggggacaacagaggatgagatggttggatggcatcactgactttatggacatgagtttgagcaaactccaggagacagtgaaggacagggaagcatagggtccatggggtcacaaagagtcagacatgactgagtgactgaacagcaaacaacagccattgtccagtgttgtttctggcaagtatgaccaaagagacattgaatttttctaaaaagcattccagggaccactcacaagtgagagctagttgcagtgtctacagggacagctttccaattcccagatcaaactgtgtgacaagccattaactcaagggttccagggctggtctccagattttcatacctgcctgaccatggcagaggcagcgggcgccctggtgggccagttctacagagatgctactgggagtcaaagatggagcttctc

SEQ ID NO: 43411 - DNA, 776 bp, Bovine  19866880736858
  misc_feature (1)..(1): n is a, c, g, or t
nctgttgtccgcttggctgacctagtcctaagccgccccgtttgggtcccccactgccctggcgctctctctggatttgatatttaccagaaaagcgttttctgcagaacgcattgaatgtgttgtgttttgttttctcggaaggtacagtggtcccacctggcatctctcaagaacaatgtttcccctgtctcgagatcccattccttcagtgacccttctcctcccaaatttgcacaccaccatcttcgctctcaggacccctgcccaccttcccgcagtgaggtgctcagtcagagttctgactctaaggcggaggtgcccgacccagcccagaaggcttggtctagatcagacagtgacgaggtgcctccacgggtaaggagcagaaagacagaagggtgctgctttttccttttccttatttccttatttattttttaattaactgatttcagtgaagggtgtggtgacgtcaccagaattaatgggtgatgaaatggcagaggaacttctcacagtggggagaaaattccgtagtgaggcagccacattcagccctcagccagttagctcttcattggtgtctctcactctgtactgaaacacaagatgccaaaataattgaataagagtacatctacagagagtatgcatctagaacagacaggatcaaaatatattttaccagctgtcttatcaagtttatacagaagctataaatgactccgcactgctaagtaataccaaaactttcagaaaagatctcataaggg

SEQ ID NO: 43412 - DNA, 915 bp, Bovine  19866880826557
  misc_feature (1)..(1): n is a, c, g, or t
nagcgttagggaggatgagtgtccccgtgggcttcccagggggctcggtggtaaagaacccgcctgccagtgcaggagatccctgggtcggaaagatcctcggagaaggaaatggcaatccactccagtatttttgcctggagagtcccatggacagaggagcctggtgggctagagtgcatggggttgcacagagtcagacacagctgagcatgcactcccgagtgtccccccctgggccttctttccggttgggacaaggtttctaaccctggcctctgatcctgtgaaattgaatgtgtcactgtgatggagcgagcctgtctgtctcccctccttttggttgctgtgtgtgtgcatgtcagtgcctctctccagggctcctggtgtctcattttctctgtttaatttgaggctgtgacaaaagggaaatttcagttcattttccttggggaaactttatacctgtagccttaggtccctgagaaggtgaaaaacgtaaccactgtatctttggcttgtgggtcacggctcctcacatctggattgtgtctcaacagatcatctctgaacttgagcaatggtgaaacagagtccgtgaaaaccatggttgtccatgacgacgtggagagtgaaccagccctgaccccgtccaaagagggcacgctgatcgtccgccaggtacccatgtgctccgcgcggttagaggccaagctgctcctgtggtcattaacccacttgctcatccactcactcatgctgtttctgcatcgtcatctgttctcacattaaccaggcccagagggcagcggggccggggtgtgggaggcaagcgtgtgccccacacccccggggcggccggcagcgtcccccagtcctgccctctttgcatgttgtatggcagcccccctccca

SEQ ID NO: 43413 - DNA, 1127 bp, Bovine  19866880941933
  misc_feature (1)..(1): n is a, c, g, or t
ngtgggaagcggggagctcaggagggggttgaggggattggttgcaagacttgtgatttcagctgccccggggagtgaaacggttacaggacaaacacagcggtcagacgtgtctttcccctccacttatataccccacctacaattacattccttcttacgtttaaactcggctccattttgctctaatgtacagtatgtacaataacccttaactcactaaactggcaagtttatatttctgtttgtttttaattgtcattacatttccacttaacaatttgtttcactctctttgtgttttctttttttttttgtcttaagctacattattaaccaaaacactcctcttcctaaaagagcaaaaaatatgcctttgcacctttcactaatgagccccgctgtttgatacggagttgatgatatacctcaaacgatggtggccgaagcttctgtagtttctggcaagaggctcactttaaaacaagcgatataagacttaagatttgcctgtattccaacatacagtcattggacttttggggggcaggagagcaaactcgaaaacggatgaattgagatcaagacatttcaaactttctttaggagtcttcattatgattatttattaaaaacccgaggagctcatgaagtatagatgttgctggtagcttgcgcgttctgtcttactggaacgatgtttctggaaagaggggttgctctctttggctcctggttaaatagcctgttttgggggttgtggggtgcacacacagaggtgcctgcagagcatttggcgggggaagaagcaaggggaccagtcttctgtactgggaagcagagcagtgcagccgtgggttgaagtattttgtgtttgttcttttactgtcattgtattaatacgactgaaatttacattgcagactcagtccgctagtaacacactccagaaacacaaatcttcctcctcctttacaccttttatagaccccagattactacagatttctccatctagcgggacaacagtgacttctgtgggtaagtaatacagcagcaagcaagcagccaccggcagggtgcttctcactctggtgtggtgagcacgcatagtggtggtcggcagg

SEQ ID NO: 43414 - DNA, 1910 bp, Bovine  19866880966966
  misc_feature (1)..(1): n is a, c, g, or t
ntcctcctctgcgtctgttctcatcaccattcactgccagctctctggaagttcaagttcagaaccaagggcagcagacgtgggggagggctctagtcaacatcactgccatttgtaatgttacaggaatccaaagatgcctcacattatttattagtacaaataaaaatatcatggctgtgggtccactaggactattttcttttttcatctatgggggaaaaaataggctcctttaagtaaatggatagtatgagcaagctggcacgtggcatgtgagtcctgcccaaacttcttgcaatgaggatccacaagcaaaaggtcgtgctaaccacacctaatttctatccactaaactgcatctagaaaggtcatgttggatagatctttccaaaaagacaagaatttggcaggcaaaaattcaggcaaattcagagtactgacactacaatttaaaaatcctttataaaaaataaataaaatttaaaaataaattaaaatcctttataatttggaatatggaagggtctgccttcctcacacaaaaaaatggttcccatttacaaggcgtgactgttctgcgttcagagggagaaaacgttttccagagaaggcttatgagaacagagttctcgctttctttcatagcatccttccttagagactgtggtagctcacggtttcctgagaaataggcggggctcagatccagctgctatatctcagggtctctttaagggctatgaaaatgttggactcctaagttgcaaagtcaggaatggacacatgttagctcaaagtatttgtttgaaaactgcaacactcgagagaaaaagatttaattaaacaactagaagaggcaacaccaaccaagtattaggctgctactcaactcatagcattacaagccttgattctcaagagtagttcgtgattcttagcaaagctcaatgtcaaacacgctaaagatccaacagattagaataaaaatatatatataggtttgtcctgtggtgtgtgtgtgtacgtcatataggatgggttggctaggacaccgtctgtacaaggaagtgacgtctgcggagggtcacaaacagctgtgcccaggggacaaggaagatccgccccatcacttactggcgctcgccctcggtcacgcggcccccgtggtaggcatcctctatgaaggtgttgttggctgtccaccacagcagagtggttgtgtgtatgccggctcccagaaacaccttacatgggattgtcagcctggaccctgtgacagcaagacagcgcatcagacgtcagaacccagctggtggacaggggtcacgtgtcatgcggagtgaataagtcagacagagaaggagaaatattatatgacatcccttatatgtggatgagcagtgggcctttcacttcttctcagacaccctcaacacactattattttttcttaaaaggaatgttagttcccttaagctttcaccttgagtgtcagtatttactaagcatctccagctccgtcctcgtggcagatggaaagccagaagcaaacagctttcccaaggccactgggctcctacagagcattctgaagtcccaggccaccttcctccacagttcattctcgctgcctccaaaaatccgggtgtgtgtgtgcattctctttgcccactgctggtcccggctctcctgtttgcctagggcgctctccacccaggtcgtgctcatctgggattaaccccttcaaaggtcactgtgttctacatgcatggtccaagaggatgcacgcacctcagtgttcactgcagcaccatttacaacagccaggacatggaagcaacctaactgtccacagaggaatggataaagaagatgtggtatatatatacaagggaatattgtgtgtg

SEQ ID NO: 43415 - DNA, 1087 bp, Bovine  19866881330760
  misc_feature (1)..(1): n is a, c, g, or t
ncctggaaaaggacatattataccctggtcacatcacagttagccagcaaagacctcgatagaccccttactgcatacagtccagcaggtggaacaaaattagaccttgacacatgccccacccccgccgaaatccacactgcttctctctgctggatatttgttctacctgactttgttgttgttgttatttatttctttacccactgtggggcacatgggatcttccccaaccagcgatcaaacccatgccccctacactggaagcttggagttggactgaactggttgttcagtcactatgtctgactctttgtgacctcacggactgcagtacgccaggcttccctgtcctcaccgtctcccagagtttgctcaaactcatgtccattgagtcggtgatgccatccaaccaactcatcgtctgccatccccttctccttttgccttcagtcttgcccagcttctggggcttttctagtgaaccactggattgccaggaaattcctgtttaccttccttgtttccataatgccgtcaatatcattctcagtactcttgatccgggcgtccttctctgtagagtgcacggcagtgtcccatttggccacaggagcttgttcacagctcatgtgtctctgttcttcctacagctgccacgttctcctgggagatcatgcttgccccgctgtccctcatcgtcttggttctggggggcatatggatgcacagacggtataaacgcagaactggaaaagcctatggtttgatggagttaaagactggccatccagattcgcaatcctatccgagtaaaataaaggaaataaaatagttcaaatcaaaccatgtcctttccaacgggagcggctcagctttgtgaaggatgctgttcttttcctcagttatttaccaaagctactgtgtgtatagtggggttttgtagtgaaagactgaaatgtccacgtaatgtttactgtgaaaccagatcacgggaaccagggtgcgtgtgggtgggtgtcacccgctctttgaataagagttgaaaacatcaaaatgagttttaaattcattattcatttcataa

SEQ ID NO: 43416 - DNA, 804 bp, Bovine  19866881563641
  misc_feature (1)..(1): n is a, c, g, or t
ncagtaacttagaaaatattaatactattcagtcatgaaactataattatgtataattacattactttgtgtggaccacatttcattttaaaattagaataaaaaccctcttaactacccccactctctcaggaaaatactgcatagaatacaaaattgtaccttttttcgggaggaaatcatagaaggaatctctgtaccaaagcacaatgtcaaccttgaagactttgtagatgcaaacagagcatgtaattaccaatgttaacatgacgaatataccaactgtgggcttctggaaatcggggactatagcagagaagagggaaaaacacattagaacccaaagacttaaaaactgagcacagcaaattaaacattaccatcccagggaaaccatatttgggatcagtctgtaagtccaaattccagacagtataaactcattcattaccgtatctcattaatggattattgttgttgttgttatttagttgctaagtcatgactgactcctttgtgaccctatggactatagcctgccaggctcctctgtccatggtatttcccaggtaagaatactggagtgggttaccatttccttctccaggggatcttcccaacccagggatcgaatctgcacctcttgcatttacaggcagattctttaccactgagccaccattaatggaagcccctattaatggatactaatctacaaaggcattgaggatggatactgtataaaactaaggtgcactgtatttaattcccacttaagtagtatgcaataacataggaaaaaca

SEQ ID NO: 43417 - DNA, 665 bp, Bovine  19866881922506
  misc_feature (1)..(1): n is a, c, g, or t
naagggacaaaaaaaaaaaaaacaccctgaaatcagtaaaagagctttcaatgtacagagttcaatgatattcattttccatgatgtgcatctaccacatgtcaggctttcttccagataatgataatgcgatggtgaataaaacaaaccaaattcccatcctcctgggggcacacatgctagtagaaacagaccgtgagtagacaagaccatgaaggaccgtgtgcagtaagtgagatgcagacacgtgctctgacgcgccaggagaggcttcagcagagcaggatcgtgtgtgcgcatgcgcatgctcgggggccatctcacaatttgagatgcttacttggcaacgaggagggaatttctctggcagaggcgatagggactttaattgtgtaggaaggacaggaaagagagattgcaattgttcagacaggaaatgattcaaatttgggcaaagctttttaacaatgaaaaatgaagagaaacagaaccacttcagcgcggcaacacttaacgtttcagagtttgcgtgaggaaggttgagaaacttctgtttgccaaccaccgttttgtttccctgaagcctttcgcggtctttgagtactgtttagatttcggctcctgagagtcctttgtgatgttgactgtatttagtgtcctatcac

SEQ ID NO: 43418 - DNA, 1670 bp, Bovine  19866880563766
  misc_feature (1)..(1): n is a, c, g, or t
nacgctttgtccctgagtcctggaagaacttcttcagagggaagaaaaaggacccggggtgggataagccagtgtcagacatcagatacatctccgatggagtggagtgttcacctccagcctcgcccacaagatcaaaccatcgttcacccccaaactcctgcaaagatcctcacggcgagtccgaaggcagctggcattcccagaaagagactgaggccgtgtttcctcacgatccctatggatccctaggccgacacacgcacacagcccgaacctacagcgagaaggtggaggagtaccaccttaggtactcctacatgaagtcgtgggcaggcctgctgcggatcctgggggtggccgagctgctgctgggggccggcgttttcgcttgtgtcacagcgtacattcacaaggacagcgagtggtataacatgtttgggtattcacagccctacggcatcggaggcgtgggtggcctgggcagcacctatgggggctattactacagtggccccaaaactgcttttgtccttgtggttgctggcttggcctgggtgaccaccatcatcatcctggtgcttggcatgtccatgtattatcggaccatcctcttggactcaaattggtggcccctcactgaatttggaatcaatgtctccttgttcattttgtacatggccgcagccatagtctacgtgaatgataccaaccgagggggactctgctactatccgttatttaacacgccagtgaacgcaggattctgccgggtggaaggagggcagatagcagccatgatcttcctctttgtcaccatgattgtttatctcatcggtgctttggtttgcctaaagttgtggaggcacgaggcagctcggagacacagggaatacattgagcagcaggaggtaagggatttcaccatctttgttctttctttctgctattagctccctccttaaatacctatagttctcaaaacaaagccgtcgttgttgtttttaatggtctgaagttccaaaggcctcactccgtatctgacgtgctctgaccagataacccactctggcgtgtcactgctgtgtaatgtcgcaagtagaccccagatgtgtaaggtaatatatagttcgttggttgcactattgtctgtccaataggtaagagaagacacagctattgaatttccataaagaagaataacaacatattcagtaaagtaaatggcccatccttaagaacaatcttgattccttagtatggtaagacttaataaaaagcataattgttcagttgcaagagcaaagtgctcatttaaatctgtaatgaaatctgaaacccacttttcttggagtttataaatttatctcagtattgtaagcatattttttaagttttacatctgtgtatgcaaagtacagaattttaaattctaatcagtgtgaaatcagatggtgaaacacatccttataattttatgtaatttaataataatggagttcttaatatcacttcaaattctatgttatgatggctgtcactcatataattctgttatttcttttccttttcctaacagaagcttgtttttataagactttgcataatggttgattaaacttgaatgatgcctgtttgggttgctgtaacttcctaaatgttaagacata

SEQ ID NO: 43419 - DNA, 1396 bp, Bovine  19866880865578
  misc_feature (1)..(1): n is a, c, g, or t
ncaaatatgagcttattttgtcatatattagtcaaaagcacaacatttttgtaatgctgagaaatatatttattttagaatacattattaccgcacttcaaatgaagaaatcaaaattcctggcagacaattgcattccaatctgaattagaaaaattcaacactgagtttaatgtaaggcaaattgctcacatatggaatcaacatagaagtatatcaatatttgtaaaaaatatttatatagccattttaattccctggagagaagtacagaattcaagcaacaatttcattttttccaatttgtaaataagaaactctagcaatttatttttatttttctccatctaagcagttttatctgaagctttagagaatcctgtgaagaatatataataatggacattttgcttacttccaatccaacagaaggaaatttatacttttatgccttgaagaattgattcttttctgtaaatgacatctggtggtgaatcctttttgaaaataaatacttttgctttcttgctgaataggttcttcatttaaattcacaacaacatatcaaaatgtttgccatagaaatatagaatgatgaatctaagtaatatagcatttgagtaaaaaggatttaaacactttaatacttgttaaattcaatttaaattttaaagacaatatcttggaatatgctgacagagtagacacatacacacacacaaacaaacccagcttaaggaaattgtgacagctataacaacaatttcattaaagaacagaaattaaagtttcttttaggctttcagctgaagctcatagcaaataatagtaagtgatctttgccagatattattaatttacagtacacagaaactttagaccatctttatttacatagcttaactgtcagaactgaaatctgaggccatttgtgtcaatatgatttaaaaatttatttcagaaaattattttccaggaaggtaaggctgtaaaccaataaataacttcattgtttgcctcaggaaattccttcacaccaatttgtgtgagcaaacaactcttctctcagacaatagattgctcaccctgggtagagagctgtttattaaatagcagtttatttatgaagattcactccaaggctctctactcactgtctctcaatcctaaatgcttctgtcatgaactctacctcttctaatcagttactggccttgaaaggcccatcttaaccacttgagcccagacttcaacagctataaatatcacctcattatttactcatctaaaacaccctgtcaaagcagagttctcccttacagtcatattgctgtctcattaagctttgcttaatcaacatgctttaatggctctgttggggagacaatagtgtgga

SEQ ID NO: 43420 - DNA, 1344 bp, Bovine  19866880942123
  misc_feature (1)..(1): n is a, c, g, or t
nactttcctgctctattaacctagtactcattttcctgaacaaatctgacagatcatcctctctggaaagcctgcttccctttcagaaacatactagttgcttcgtgagctgaagaaaaatataatcaagtcatacatacggattattcatagcatcagtattcttagaccttatcctcacaagtcttaaggttgatagggattacttcaatgtatgaaatggttcttagtttgtgaatatattaatctggtcaaggcagaagtgttccttttcttactgctctacgtggttgcctttatctttattctgttttacttcttttttgataggtgattttaatttttgtgtttcaaagctacaaatgagttttaaaagaatcagcctcatctttaccctgaaagtgaaagtcactcagttgtatccaactctttgcaaccccatggactgtagccaccaggctcctctgttcctgggattctccaggcaaaaatactgaagtggattgtcatttccttctccagggtttttccaacccagggattgaatctgggtctcctgcattgcaggcagattctttactgtctgagctaccagggaagccaccaatctttaccctggaaagattatttataaaaataattgtttgtactctgtattcatctatatggcatttatcattgccatggtcaagtagataagcatgcatttatacttattgtaaagtagaagaataacatacatagagtcagttttatttaaagaatttgtgagatttattgtcaatgttgctaatacaagaatttttaatagagtagttacatagggaatagatgcaaaaaaatataactttatttatatggtttctttttttcaggtaacaaactgggtagacccatcatttgatggtttttcagagactacaagcatttctgctattactgccacatcattaagtgtgaataactcaagtcttagaagaaaaaaggtgccttccacattagaaagtagcagatttccagctagcaaaggaggaaacctatcttcctctaaacagatctgtggtctagaaaattcaaaagaatatctgtcagaaaatgaaccatgggtggataaatacaaaccagaaactcaggtaataattagcatacaaagaagtcttcataatttagtttcaggaaggagagggatgtgcatttttgttattattcataaaaacctttttgcctaaatgaattagaaaaaaataataacttctaagtttttttatatttccagtctcgaattttcccagcagttattctgaagatatatcattggttatttgtctttgatttaatttaacc

SEQ ID NO: 43421 - DNA, 1212 bp, Bovine  19866881039743
  misc_feature (1)..(1): n is a, c, g, or t
naagcccgtataaagccagtaggaaggttaaaagacagaagccgtaaaaccatctatgtcacctgtaagtagtggttgccagagaggagagaggtgggggaaacaaagaaactggtaaagcagattaacaggtaaaaactttcagctgcaaaataaatgagtcacaggtaggacatgtccagtgcagggagtatagtcaataactacgtagtatctttgtttgatgacagatgataacagacttatcctggggatgattttgaaaagtatagaaatactgtatcattatgttgtataccaggaactaacatactgttgtaggtcaattatgcttcaaaaacaaactcacagaaaaagagatcagatttgtggttaccagaggcaggggtaggggaagaggaagtttagggagagaaaattggatgaaggtcatcaaaacctatgaactttcagctatgagataaataagtatcagagacacaatgtacaacatgataaacacaattaacactgctgtatgttatatatgaaaattattaaaagagcaaatcctaagagttctcatcacaagaaaaaaattttttcctttctttaattttatatctatatgagatgatggatgttcactaaacctactgtgatgaacattttataatgcatgtaagttcatgatttcattacactgtacacactaaacataaacagtgctgtaggtcacttatatctcaaaattggaagaaaagaaaatcaaagtgataactttttcattaaaacaagaggaacaggaaatcagcttattaccttatttctcagtgaccatactgtaccttcagttcaatatactacctctcaggaaacaaacaactgttcaaatataattgactttaagcagagtattaacttgaagatgaacagaaaaatgaaattccaaatggaaccttgctatctctaccttgaagaaaggcagatactcacgccacgtagtctggcatcacaatgggttttgggatgtggcccgggggaataggtccactcagaagttcaggtttcattttcgttgctctcagttctttaaaattaacttcttggtctctctgtctctcacaactggtggccatgtcacactacagttagaggggaaaaaaggatttatttataaacagagcaaaaaaaaagtcaacttcattcttagaggaataaagacccagcaca

SEQ ID NO: 43422 - DNA, 1721 bp, Bovine  19866881107674
  misc_feature (1)..(1): n is a, c, g, or t
nagtagttgccacttcggaatctgaaagtttatataatactttaagaatgtaaaaaaaaaaaaaaatgtaatgtttttcctttcttacctattttcaagtcttttgtacaaaatactgttatctgttttcaggacaaatactatatgaaaccagcgttcagggaagaaatcacaaccatggtaatcaacaataactccaccttcactcatttggttttctagctcatcaactacctgtaagaaagggaaaaaataaagatgaatactcttttaaaaactgaggtcaaaaaaaaaaaaataataataaaataaataagctaaaaaaaatgatcacctcagtattcaatcaattaaaaaaaaaaacctaaggtcaactttcctattaaattttttaaatgtatactttaaaaaattgtacttactctgtcttcatctaaaatgggacagtcatactcttcatcatagccatcatataactgccctaaaagagatttacattggagtattaaagtagtcttttcttggtaactttcagtaattttctattacttttttagagataagagagggcactaatacacagtgtcacatggacacccaaatataatgagcaatgctgataagttagaattttgtctaaaaggaaatttgggtaacagtgtatctgcaaccgctttagctattgatggtttcaaaactgaaaccatcaacagagaaccaacttcagtatttgtggtcctaaacactcacatacattaacagcagattaagttccaaacttattaggccaaggatatgaaacttattaaaagcaataactggcgcttgattccacgaatgaaccctttgtcaccgaggtcacattcacggggtttggggaaggaaagtcagtatacacatgctcctgaacgtctagatttccagcatccccaaaagccaagggttaaatttcagaaggtaaaacaagaatgatgcgggcaggcataaagaaggcaaatttaaatctaacataaaaactttccagtaaattcgttctctttcaaatgaagtgtgtcgtaaggaggcgagatataccaatcccaccctcaccctgaacccctgggaggcatgtcctcacgaggcagacttagatcatccttttagccatctcaaaacacatgctatagtcttctccctcttccccctaacaatgtggcacaggttgaaatgagcttaaaatggacataagttctgaagtgacagaagggtagtccctgagggttagtggaaggcagaggcaattttaactgtcttgcctggaaatcggcctgtggaccgattctgagcacatgaaccacttctctagcatcctagtgtgacctcggacttcctgggttactgttcagctaccagaaactttacctgctaaaaagttaaactgtcttggtgtggggaaaactggttaactatatagaaaataatctaaacccttactttacaccacaagttctaggtggattaaaaagttaattactacattccaaagataactaatggaaaactaaactttacaaaggaatgattcatttgagtttgtgaaaaaaataactgattcaaataaataaaatgttaaatctcttgaagaatttttttttttaatagcagggagaaatatttatactaggacaaaggactgaaatgtagattatataaatatctcaaaaacagtaaccctaataata

SEQ ID NO: 43423 - DNA, 1240 bp, Bovine  19866881289134
  misc_feature (1)..(1): n is a, c, g, or t
nggtgcatcctgctggtcaggtctagggtggagatactgatcatctggaaggctcctagctcttgcatactgtgtacctgatatttgaagaaatttaggaatgtagatgaaatttcctagtggaggtactaagacaaagcagtcaggaaaatcagaaggtatggtctgtggatgcctgtgttcctgacctctcctggaagcctgctgcttgtttttctcatttttccccccatgacttgtgagggtgttggcgattgttttcttttgacctttagctccaggcaaagccacctatagagggactaggacagtctgttgtgaactgtgaagtcagggtttcgctgagagtttctgggtgtgtcagttttcactggctgttggatttgtttacttaaggtttcgagagcctaaaaagtgactcaggagagaccagggccagagatattacaatcccagggaactttgacttctcatctgactttactgtcctgaaagtttaatcagttctaggtgcttttgataatttgacagaagatagcgatagtaacttagggaggtggtgatgatgacgaagtgaagggacttttaatttttaaaaaggcattatttttataatgcttcctcactgaacctctagaaatttgatagctagcctatagattgtttcaggtgaacttcatagtttgtctatagtaataaatgtttcatcatatgaaggtagataatcatctgttgaatagcagatgtgagactttgaacacactaatgtttcatgcaaaacctaatcacttaaattcctcatttccttttcccttgttttcccaactgaagcgtctaagaaaggctgtttgaaataaggccttggtttaagctacaggtattgtgtttttccttccatttttctctgtccctcacctgctcaagtgtgctttgctgaactcagcccctcattttcatttttgcctgagtttatgtccacaaccagatgcagacacttactctcttttctccactcttacgcaataattctgctccagtgggtttcactccgataacatagctgcccaagtggaaacgtttgatgctgcatctacagtgcctgacagtggagcggactagtattttttctttttgggtattaaaaattaatatcataaaaataaccctccacttgaaataatggaagagaatctaaattaataacttgtactacgtgataattaaaatttggaattctaat

SEQ ID NO: 43424 - DNA, 1008 bp, Bovine  19866881529847
  misc_feature (1)..(1): n is a, c, g, or t
ntgtgtgtataaatgcttaagagctttttatttcatgttatcctggtaataaagatcatgtaaaagtaacaaatgtatgaaatttgaagattgtaaatacatgtttacttttgaaaaatcaaagtttaaaccttctggttagaattttgttgtgtatttttaaatgccttttatcttttatggtttacatacttttttaaagccaactaggcgtttcctttttatcaaagtatctaattacatttataattcacttctgggaatgttcaagttttgtacatattttataattattaaacctggtgttttctttccataatatacctttttgacatcattagtgctgttaatattaagctgtggaaaactacgctcggaagttgtatttgttgttgttttaaattattttgggtgctgtgctggttggtagtatcctaaatcctttggctaacagaaggctgacttgtctggaaatggaatccagtatcgtaaagcaccaaattatttcaaatggtgccctttaattctcagcatttttttttaattcaatattttcctggtaaagtaaaattagctgataatactggatatatagctaaccaaattgactgtgattatcccctcagtttagaactctcattaaaatatattgtttttaatatattagtctgaatcattttccaaagataaacttttaaataaggtttccattataacactgacttagttcttcaagttggaaaaattcttaattttccgtgtattgcgcatgctgactacagaaggtaatagtttgtttttcatgccttttggagtcatgccaaatagtgaggactctcttgagcaatgtaattgattttttgtgtgtgttaaagtttaaactctattctaggaagtcagcatagtttacgaaggcacgtttgccagtgttgtgatgaaacaaagctattcagctgaatgcagaaaatcaagtagcatgagtttgcattataaaattgtgccataaaa

SEQ ID NO: 43425 - DNA, 1994 bp, Bovine  19866881562259
  misc_feature (1)..(1): n is a, c, g, or t
nctgaaaataatgaagtttttttttaacatacaaaaatattttctcagcaagtagatctttattattgataaagattcattaaaaaaaattaagcacgttaatgctttcagatttccattgtgtttcataaactgttgttgataatcatacactgctgttgaataaaacagcaaaatataagcaatgtcagaaaatatttaaaaagagaaaccttcacaacgatgggagtaggtcaaagaaacacaagaggcagctgaaagggttcctagtggtcctcgctaaagcaactcaatcaacaaaactacgcagtgctggattgtaagctgaagttcagaacagacatccctgcatctacactgatataaatgattaaataaatggaagtgacaaatttcctgtgcagacaaattccaagtaacttgtgtaggtatactgcctttaaagagctggagcataattccctgatttcttaagtgtgatctatgcagagtgacttccttccaaagagcacaacacagagaggggacataagaagtaaagagtaactttacatggacaaacacgaccccagacaggtgatcaagggaaaaaaataaagacaagccacaaactactgttgagttaaaaaaaaaaaaagcaggaaggatacaagtaaagcttatgattctttatgaaagatcacttctaggtacacttctgcagggaggggacattttaacaactaatattttggttgaaaaaatttaaggcaatctatttttctgtcttccattctgtattatttgaattttttttacagaaagagtaaactcttttctgtttataaatagaaaaattaatgtagctattttcttttaaacaggaagggatatatgtacagattatttttttataaatcttaactacattagtacactgttccatttcaaaaatactttaagactggatttcaattattattcaatgaaattacagtttggtaattactagcaaaatctgtatcaatactagtataaaggataatgtagctccacagactagaataaaattctatgtaatatctaattataaggtttgaatttaccatgtactcttcactttcttctctatagtcatccagttctttatccagacgagagagttctttattgacctcatcaagttctgcttgtaggctcttatattcctgtaggccagtgtcaaaacttctcttgtagagttgtctttgttgctctgaagtgataggtggatattccctaaaaattcagagagaaaacgatttttttatatatccttagcagacttaagttccacaaagataataaagctggtggcatgtggagaatgacattctcttggttttctttttgttgctattgcttatggatagaggaaggtgggatacaaagaagttcttttaagaatgattatgcttcttacactgatgctcatctgttgtttttttttttaaaactctgcttattggtttttagaaataagtgttgaaaatcatttatgaaatttcagggtggccttaggaactcatttgttctgaatacacaacatcacaggagaatggacacttacatttaaagtcttaaaactggaattatgaacacaaaggatattttcatcccttcagtggcagagcagctcattgacaggtgcctgttttctgctaccatctgtagttttcagatggttttgagcatttttttggtgggaaaatgggagggcaggtcttgtttttctttaacagaaatcgttttgattgtaaaagcagacatgaaaaggtacatgtatgaaaatgcatgctcactgtaaaaataatctgacaatgtgttaaactatgaaaaaagtcctgaaattcttatcacttgtatctctcaatatgccagctattccttacatatgatggtgatgctgttaaccatccataatccactgaggaaatactcttgagttgttccacagggttagggttaggggttag

SEQ ID NO: 43426 - DNA, 3150 bp, Bovine  19866880357532
  misc_feature (1)..(1): n is a, c, g, or t
naaatgtggctcactgcacgtgaatgtttttattctgcctcaaaagttacaggaaacttgaaaagaagtatattcaccatccttgggtgggtccagattacacggttggggcttcggcttgttttctttataggaaggcagcaagaagtcccccagctcccccacagctgtgcctgtctaaagctttcacaatcactgggcttctcagcccacttaggagaaaccaagggaagtgcttttagcagccggctcccaaacccaggccacggggcccagtgtggcttgtcaaccctgaagcgggaggcagggacttggggttttggttacaccctccacggtctgccttttactgtcacagctgctgttcttgttgagggtgacgtctgagcaggctcctgacactggggacagagagacttctaccatctaggaacgacagggtttctctgagggaacattttctctaggacccttgatggcgtccccaaaagtcagctcttacacaggaaatttccactgacccgagacattctatatgagtgccatcattctagaaaccaaacagtttcctctaaaaaaatgttatcaggcagaggtcaatgtactttaggagtagttaagatattaggttggatctgggtctatgtcttatcaggtctgcaaacttgtataagttaccttcagttctttgtgcctcagactcttttttccctcttagcaactttcaaatatgcaataaaatattattaattataatccccatgctgtgtattacgcccccagggcttatttcagttataaaactgaaaactgaatacttcttgaccccatgaccgattttacccaccccttacctctggcaaccaccagtctgttctatctttgtgtttatttgactttttgtttgttctcctttttttatgttccatatataagtgagatcatatgctatctgtctgatttatttcactaagtataatgccctcaaggtccatttgtgttgtttcaaatggcaagattacattcttttttatgactgagtatatatatgtgtgtgtgtgtgtgtgtgtgtgtgtgtgtgtgtgtgtgtgtttatctatagacagatagataaatcacatcttctctacccatccattcatcagtagacatataagttgtttctatatctaggctatagtcaataatgctgcagtgaatgtgggggtgcatatatatatatatatattttttcaaattagtattttcatgttctttgaatcagtacacagaaatggaattgctagatcatttagtagttctgtttttaattttttttaggaacctccgtactctttttttgttagtggttacaccaatttgaattcccatcaatggtacacaagagtttcaatttcttcacattcttgacatttgttatttcctgtccttttgctgctagccattctaacaggtgtggttttgatttttcagtttgctgatggtaagtgatgttcatgtacctgttgaccatctgtatgtctcctttagaaactgtcaattcaggtcctctactcatttttttcattgtattgttttgggttttgatattgagttgtatgagttctttgcatattttgaatattaacccctgaacaggtatataatttgtaaacatattctcccactcagtaggctgcctttccgttttgttaatgattccctttgctctgcagaagctttttattttcctgtagtctgacttatttttgcttttattgcctttgcttggtgagtcagacacaaacgtcatcaccaaaccaatgtcaaggagcttattgcctatatttttttctgttttgtggttccagatcttacattcaggtctttaaccattttgagttaatttttgtgtatggtataagatagtagtctaatttcattctttggcatgtggctgtcagtttttccagcaccacttactaaattcatttattacttctttgtattaacagtgggataataatagcagcttcccataggcttgttatgagaatcaaatgagacagtgcagggaagcgctgcacgcagtcctggtgagtggcgagtgcttgataaagaggagcaccggttttccttattgtctcattcatactctgttatcctttcccttccattcaggcagagtcaccatttcatgagcacactggttagcaaatgacagcactgggcaggatgacatttggccacccaggagggagagaccagatggccgaggatgcatttacagacacacaccaggaagaaccggactagtaacagtccctcgtcaactgagggaggaacagcttgaaaatgcactaagtcaggaacaagaggacaagcttactacctgtcactagatgttgcattaactgggggggcataactgggaattagatccaaactggactcacgctcaattcccatggcttcttcaaactaatttagaagtaagagaacaacccctccctttctgacaagtcagttcaagttcaggttcacaaccccaaagttctcctagaaacatgtcaatgactaaaaccttcccatcccttcctgaccagttccctatattcctttctccagagaatcttcctaacccagggatggaacacaggtctcctgcattgcgggtagattctttactggctgagccaccagggaagcccttactacttttcccatctcctcctgacctggtcactacttttttttttttcttgattcagaattccactgtgacctgggctgtagaaactgggagagatcatcccttccaacctaacaacaacaaaagctgaatacattacaaagtcataacttttcttgtattcttcaagttactgaggtcacaggacaaagaagtagcctgaaatccaaggaaagagaggcatctccaaggaaatgttggggaagagtgttggttcacttttagacactggatgaatgaagacactggatatcacacatgcaggtgtaaagaattcagctggggtcttaaaaaattgctaaaggttaagggcaaccatggagaaggcaatggcaatccactccactattgttgcctggaaaatcccatggacggaggaggctggtgggctgcaatccatggggttgcaaagagtcgga

SEQ ID NO: 43427 - DNA, 1519 bp, Bovine  19866880407803
  misc_feature (1)..(1): n is a, c, g, or t
nactttttctctttttaaatatttatatatttatttatttggctgcatcaggtctcaggtgcatcatgagggattttcgttgcagcgcttgggttcagtacttgcattgctcatgcttgggtgcccctcagcacgcggaatcttagttctctgaccagggatcaaacccacgtccactgcattgcaaggatcactggaccaccaggaaagtccccaaatacagactctttaattcaaaatattaatatctactgcaaaggagataaaaaaaataccactcctgtagtcacctgtaaagagagttttttagtattttgattttgattattagatatagactgatgagtcagtgccagccattgctgactacaagccgcagcctaggcgcagacccacgtccactgtagacgcacccacacagaaaacctcattgccagggacaaagccccagactctgctgcctgatctaagagtctcactctgtttcctgatgtatgtactttgcaaagtagccccaagaaatacatttaaaaaagagagactctctggaaaacaacaacaacaacaacaacaacgaaagaaaagcttcatacattagcgagcacacaatggttctgagaagtcctgcagttaaaatcaaaaatctgtttggcgtgtaacccaggccttcccacgttcattcaccataggaccatttctccaaaatatctataaatatactgaaaaaagaatattccagggaaggtatctttggaatgctccggtttaactcattcagatcctactcaggtagctgtttgtttggttgtgctgattgtcatcagaggaactttgtaaaggtagagcattttcctaagtccattgtgatcaattacatcatgtgctgaactgacaaccaaaattctgttttgccctttaacagagaaagcaacccagatgagaggcaacagtgtctctttaccctccaaaaagccacagaatgactgcctggggcctgtgaaggactcaccccacaagctgacacatggttcactgtgctacctttgtttcgtgttgattttcctagtgtgtgtctctgctttggcaatctcagataaatttctaattttccaagattgcctgcagtgaagttctatcccctgagatggatttttttttattagtctcttaagcaagttatacaattcaaatcacctctctctgtccacccatctgcttgtttttgcttttcttcctctctgctggacgtggggtagaaatcctccaggcctcctctcgccccccctgtccactgccctaaactctcccccaccgctctgtctatcctctctgtcaggagccggggccccttctgttcggatggctcggggcccacctgtaccagccccatctgtcagcaaagcagccccagcatctcctgaacctggtggaggaaattctcctctgaagaattgacgtcactaggtgctctcctgagagttgtgtccgaaaatggagctacattgaagaagaataaagg

SEQ ID NO: 43428 - DNA, 983 bp, Bovine  19866880592227
  misc_feature (1)..(1): n is a, c, g, or t
natttttaaaatctgtgtgttagagagtagccataacacatacttcatgactgatccccgatgtttaataagagggaaatagatacatccatatgtttctttcaagccatgtaggtcttcttgttcacaattaaaacctgatgcaaaaggaaaacaggttcttttcacaaatataaacctgcctgattatatcctaacatttgatttctgaaaacaaggaaatacagtgatattcaatttctttcaattgctaattaaactttatttcagatttcataagtacaaataaagaagattttgagaaatattcattttgattaagtcagaagattttgtacatggtttgtcattttttctctttttttcttaaagtgtgggttcttagcatttggaagaaaacaaagattgccaaagggtgggaagatgtgtctcttgttttcatagagatttcaaagcttgagtcatccatgtcattttcagacccaactgtccaaagctgactcaaaagggtggggtaaagtgggggttaagttgagttttaaaatcaatccagcaccctgtgacattaccacagaagttccttcattcattgtcacctcatatgtctgttctggtgccttcccagggctctccgataaaagtaagttaggctctgttcatttcccacaaatgtcctcttctcttagagatcatggggtttccctggtagctcagctggtaaagcagtacaggagaccctggttcaattcctgggtcaggaagatcccctagagaagggataggctatgcactccagtattcttgggcttcccttattgcgcagattgttaaacaatctgtgtgcaatgaggaaaacctgggttcaatccctgggttgggaagatcccctggaggagggtatggacagaagagggcctagagaatcctagggacagaagagcctggcgggctacaatccatggggttgtaaagagctggacaca

SEQ ID NO: 43429 - DNA, 1503 bp, Bovine  19866880656885
  misc_feature (1)..(1): n is a, c, g, or t
nctgtccccagaggtgtttaccttatttttaaggccggaaaagaggctcagagagtttaaatgacttgtccagggtcacacagccagaatactgatggagggggatttgaaattctcccgacagccattttttctattctgcacatcccctagatgcttaaaaattccctcaagaaagtctacatttttcttggatcatttttattctttgccccctcccacctagaccataaattttaggattaaactctcagttaacgttaccaagtaccccttgaaatgttatgtgaattgtcccagtggattgcagacaaagggaggttgaggctggacttactccagccttcttttacccactaaatatctcattaccattgaccagccggatgtcagcatgtcacacattattctgagagcagagcaagagcccctcaggtcaggagataatcaagaaacagtgttatgagagttgacatcttatgaataattattttaaaaatctgttcctttctgtcccttcaactccagacgggcgagttggttctaccgagttgctcagtcaaaccgtgatgagaacatcacttaaaaaggtgctagttgtccttattcatgtatttttgaaactaagtttttaagaggtgagtttactcaaagttttcattgtgagagtgtgcagtcaaaaggccaataactctgggtgtaagacaagcagcctccggactccctggcatctctggaagatgcggcccctggattcctcctgcatcacagagtctgtgggtaccacgtttctgtttcccagatggccgatgataggaagatactatagaagtgaacagaatacagttttaaggtcaccatcatatattgggtacatgcgtgctaagtcacttcagttgtatccgactctttgtgactccatggactgtagcccaccagactcctctgtccatggaattctccaggcaagaatactgcagtgggctgccatgccctcctccaggggatctaacctgtgtctcatctctcgcatctcctgcattggcaggcaggttctttaccactagcaccacctcggaaagcccaattttgtgggatacctagctacattttgagaaggaagagtttgagagtgaggctggacaacaacttccacaaatagtgtctgagctgcagatgtgggctcatgccgagcgagtggtcccaggggaggaggtgggggcatgtcctactgtccttgggggctgctgagggtctccccaaaccagggacccagcatcgccagtcagcatcctcctctagcctccgtttccccttctgtcctgtgtgcggtcgcttgatccacatgatatggaagtgagggagcagaagacaaggaaaccctctccctgaagagccaggtgagccctggccgccgttggtggtgagcggtgggggcagcagaagggctgcagcctggccttgaggtctgtaagccagtacgtgtcctctgcatcattgcag

SEQ ID NO: 43430 - DNA, 1246 bp, Bovine  19866880848309
  misc_feature (1)..(1): n is a, c, g, or t
ncagagatttctaactgtgatgtgcttaatacgaaagaacaactaagttgagcagttttgaattaaactaattgtaattgtttttatcttctcaaagattgtatccccattctcagccttgaatcatgcctaagatttaaatgaactcactctcttggtgactgacttgcattttcataatttttgaagagaagtgttaatgatgagtgaatctgacctgctagaaatcctcacaggaaacaggagatggaggcagtgctcagatgtctattttaggactcacagggagagactttttccttttgtaaagaagcaaatcccagagggtctgacaatgacttaaaaggtgcaaaaatagcttactttgagattaaatgtacagcggctgttgtctgagatgaaattcctctgaatttcagctaatacaaatagctactgagcaccgaaacccgctcttgggtttctgaatcatgttataggtataacaaggtgatggagactgagtgggccctgtgagtgtctgaaacattaataagcttattttggtttttttttttttaatatattatttagacgctcagttgtgtacaactctttgtgaccacacggactgcaaaaagccagacatttagaagttttgtgttttattagctaagggctccaatttatttttgaagccagcagacctcttgtttggggtaatccacaccgatgggcttttaactgtacacgtgagaaaaagatttctgaaatctagacatttgagaagggtagatccaaggacctacactgttctgagaaataatgtgaaacctgacttttatagtggtaagagtacatgtctatagtttaaatttttaaataattaacgaaatttatttttagagcagttttaggttcatagaaaattgagaggaggtataaagttcccttgtacccactcactcccccagtacacagtttcccctattattaacatctctctttagtatgaacatttgttacaaatgatgagcaaacgttggtagattattaattgaagtccacagtttaccttaggttcactcttcccgttttacatggtaagggttttgacaaatgtatgatgacatgtttctatggtcttagtgtcaaagatagaagtttcactgccctaaatattccgagacctcttcatctctcagtctttcccttcaacctttcaggaaccactgatctttttaccatctccatattttgccttttc

SEQ ID NO: 43431 - DNA, 1380 bp, Bovine  19866880961397
  misc_feature (1)..(1): n is a, c, g, or t
naacataatcaagaaatagaacattttcccagcaacccccagaagtttccttgtgcccacttgcacatcctgcaagttttgagaactgatttcttttacttgaagtgctccgtttagagagagagagaaactctttggaaacaggccatctcattcccaaatgaaatatctccaggcagaaattaatttttgtaattgtctgtcttcttttctgctacaatccatgtcagaaagcatggacttgaagctgtcaatattgaaactgctttcactatgggagctgaaggccgcatccactgggctcttgacaccaagcctaaatttctcatgtttcatggccacgcccaccacaagccctgactttttgcatgtgtatatttgactttcattttgatatagaaacacttaagtagctataatgcctgtttccctgtggaagtgttgtatatctgtccaaaagatgggaaatttcagttgttgagtgatcaggaaatgtcacttttaatccaaatataaaaataaatcctatagacatgaccaactaaactagtgtgtaattatggaattttataactttaaatggtcatctatgtacaagaaaactaaaagccaaaattaagtgacaatggctggtacaaggtcctgctatttaaggaatagttgggatactgctggggatatatccagaaggaaaactgtaattcagaaagatacatgcatcccaaatgttcactgcagctctgcttacaatggaagcaacctaggtatccatcaacagatggctggataaagaagatgtggcacatgtactactcagcgataaaaaagagtgaaataatgccatttgcagcgacacggatggacccagagatgatcacactaagtgaagttagacagacaaaatagcgtatgatatcaatcatatgtggaatctaattttgaaaatgatataaatgcacttatttacgaaacagaaacatttcaaaaacaaacttacggttatgaagagggaaatattaggggaagggaaaaattaggagcttgggattaacatacacacacctactatttataaaataaataacaaagaccttctgtatagctcggggaattctactcaatataaagacctatgtgggtaaagaatctaaaaaagaatgaatatatgcatatgtattaatacaactgaattacttcgttgtatgccccaaactaacacaacataaatcaactgtacttcagtaaaataacaggaaaaaagagaaattggggtaaaaacttttccaatggggtaacctgcctcttcttctcgcaccccagcccgccagccccatctcatgttcttttcattcgtattatgctgccattccacacggcatt

SEQ ID NO: 43432 - DNA, 1016 bp, Bovine  19866881017257
  misc_feature (1)..(1): n is a, c, g, or t
nacttagtgttcacgcaccacgtcactgagaaagtagaatggaaattccaacctcccaaatcctctgtccacgaagccataacgcaacacacaaatccactcatccaaatgaacccttgcatgagtcaggccagcgtaacaagcagcttaacactttcgaaagcttcaaaatatggcacttaatcacatctctaggaagagtgtggtacagctaaatacagctaaatggcgactcatgcacaaacctcaaaaacagcaatgttgcttctgactgtaaacctcactcaaaacttttttcccaagtggtttcaatattcagttggaagagtgacagttgaacttaatggttttcttttctcacttttcttcagaaaccaatccatctcagtgctacagtgctttgagacctttttagacccatgacccttttggataaacttgaaaatctcatgacaccatccccactccacctctaactcccatcttgagctagtacagggaacaaattctatttcctgcatatcctgtcagacaagaaaaaaaattatggcctttatttttcaagttacatgaaaaaagatattttactttccatatataaatatattttttaaaaaattttcaaatcacataacatcctctcctaacaccccaccctgctactccatcaactaagggcttccatatgttgataatgcatggcctattctatgcaatattgaagctcagtgtaagactctaaatgggtctaattatgaaaatagttagcatatttgtccttcataaaagaatttctagttaaaaaggaaattaaataatagacccgaaattcagagactaagctatccaggtgctaagggcacaaaaggattgtttagcctcaggctttccatgcaagacctcataagaggtccaatttttgaccctgaggcctagggatctgggttgtaagcaagcaactgagatcaatctaataaccactgaattggggacccagttactcagtcttatcccag

SEQ ID NO: 43433 - DNA, 1291 bp, Bovine  19866881067936
  misc_feature (1)..(1): n is a, c, g, or t
natgcccggcccgggaaagttcggctcaaatcccctgcgggcactggttcattctggggaaagtgaggggtggttgctgcgagaggggcgtccgagggacacttttagccttaccagtagagtttttgtttctgtttttttaaacgagagcaacttaatattccctggcactcgtacttgtaaaaaaaaaaatagatttttaaatagaaacatcctggaagaaaatgaatgagcatctgaatgggttgagaaattgagtgagggatgcagaagcgcgggcattgggggaaataataaattggggcaaattacttcgggaaagaggtttccccgcgagttgccaactcaagaatgttgtacgtagtgagggccactggacccacaggtattctgtttgtagacttcccagtggcgtactcgaacgtgggtctgtgccccggcgtcgcgatttacatctcctggttctattcccttgcacagacgcatgtttccttttttgagcttcaacataaacggactcaatcccaccgcccactacaacgtgttcgtagaagtggtgctggcggaccccaaccactggcgcttccaggggggcaaatgggtgacctgcggaaaagcggacaataacatgcagggtgaggagagaggaggcctgggcagggtggcgcgccgggagccccgctcagaccacgcacaaccaaatctcgcatcgcttcctccgcatccggggcctggaggtgttagcaggagtttcttcgtgttgaatgtttgattgagggagataatcgctaagtcagacctcttgctggctagcgtatagcatgttaaccacgaccctagctagcctgccccgccacatccctacctctgaggacgtcattgccataaactctccgggaggcaaggctcctgacattttaatcttaacttgagaagagatctccccaaggttgagtttatcataaaaatccaagcaccttccatcatcagatcttgactttctagcttcagacatcggcaaattgaccttcaagaggcactgcccgttggctccatttttgctttgtccaaggaaggccggaagcacagggcccctgggaggggaatcagtagagactacttggtctccactggtcttcttaagcctctaaggagagacaggcattgtaagtctagctcttaaatcttgcccatgagtagtaaattctctctccccctacctccatttgcaaacagccatatatgcttggagttttggggttttggttcattttctcttaggcaacaaaat

SEQ ID NO: 43434 - DNA, 2414 bp, Bovine  19866881198112
  misc_feature (1)..(1): n is a, c, g, or t
natacttcttataaaatggaggtttgaggatttatagagacttcattttgctttgagtttctataacccccaaaacctcaaaatgaaaccaagccaaaacctctacattttaaaaccagagtttccttgaatcttgactcaggtttactaaaagaatatatgacaacttcacaaaagttggtaggaggtaaggtttctgtggagggcagtgtgaaacaaatagcaggtttaggagaaaccattataaaaataaaattttactttctcagaatgttttcagagactttctatttatatgacatgttgtaaagagcaaattcaataagcagcaagtgtggtgtcaaggcggctgtaatcattctaatagaatatttatgtgtttcttctcttctctaagtctcttacctacatgatcttctatcggcaaactttgctttgagacagctgagatgaggagaagacaaccctccttttttaaactccgtgctccgcgggacctgaagtgcatctatccagagcaagttcttctgccttttctctgtttcccgctttgaaataccttttctttctttatctccactctttaatgtcccatgtcgtgtatcctaaagaataaacaggcaaaaatgtcttatgaagaaagacataatccaaagcttaatgagtgaggagtcatcttgccaaatgataaagtgtattataaagctatgccaggtagcatagcaggttacgggtccaaaaatgggtacaaataagaggtgttacagaagctgatgctagtttgtgaaaaattattatgatataatttaccttgtcacataaagggtgagtacaccatagagcaaactgtgagagcaaattagaatctcactatatattctatatcaaaagaaactgaacagaattgaaaagttttcttaatataacaaaataacaaattacaattagtgccatgatctccgagagagagaggggaaaaaaaagactctagaagcaaaaatagaaagcaaaaccagtggaggaaatcacaaaaggaatggattgatcaaattaactagtttaagttttgtttttagtgctagagacagcaaaatcagtaaaaactgactgcttgctccgggtctcacgccgcagtgataaagtgggctctgaaccttcccaagtgcgtgtccacagaggagcgcagctgctgttcacagatgtacgggctgcgtcctgtgcatgggcgcgtgtccacagaggagggcggctgctgttcacagatgtacgggctgtgtcctgtgcctgggcgcgaccattcatagtgtaggctttcactattttgagatatttttttatagttttactataatgttttaggttgcaaagacaggctatttgtgtatttgttatgttcgttccctgaccaaccaagtgacataccttctcactgacagaggagacaggtatcattttgctttgactcctgaagaaggaaggggttccacgaacagaagacttgtttagtgctaaacaacgctcctaacactggaaggtccttcagacgttcatgcttccccagtggctcagcggtagagtccgcctgcaacgcagtagccctaggagacacaggttcgatctctgggttaggatatcccctggaaaatggcaacccactccagtatttttgcctggatagtcccatggacagaggatggacagaggagcctagtgggctacagtccatggggtggcaaagagatgggcatgactgaagcgacttagcacacatgccagccgcactgcatcagaaaatatcttcagatgaaaaagtgaaattccctatagtaaaagttagctaaatctgatgtctcattttgcagttcacagtactgtaatttattttatgaaaatgatattgcagtatttcaatttaagtctaacaacactttaaactgacataaatgactgtataataaggacctaatatttattttccatgaccacataatcactgaattatatcacagctattatttatttggttgttgtgaacattttatcatgcagttttgatcgttgttaaagtttaacggtttatttaaataaatataattttaaaataatacacatttgatggtaaactaattaaatgatcatattatttctgcctggtattagaaagctaagaaaataacatatcacagtcagaaaaaatagaaaatgggaatctactacgcagtaaaatgaaagaaaattacttggattgttcaatgccgggtcagtctcaaaaggatccagtacagacacttaacactatctcagagggggagatagtgaacccactctttattttcacgttagtaagaatggatgaattccttttaaaaaatgagaaaaaaaaaaacatggggaacccattaaatgaaatgtac

SEQ ID NO: 43435 - DNA, 1620 bp, Bovine  19866881358522
  misc_feature (1)..(1): n is a, c, g, or t
nccttgccatggtccaagttcagagtcttatcatctccacccctggatactcctggatctccacccccaccccactgctggaaatactagccgtgtctcccatctgaatgtatcattccaggtgcaacaggaataagtctctgctcctccatccttctaggtgaaatggctgtctgccttccattcccaatagcagacttcagtctctgagggaggcatttgccttcttatagtcagtcacttatggacctatctatccagaaagactctgagccacttgaagataatgactgtttgcgcttcctgtgcttagcatatattagatactcaacaaatatttattaaataagaaaactgtccactctgaggtactttcaaatattttagcatatgcagagttcaataaatctacatttatgctgaataaatggaaggacacaaacactacactaaatgaaagaagagaagggtgagagaaattatacatgaaccttgcatacttaccaaagataaaaccttattcatccaccacgtggccaattctcttagctgttttgaaaaaatgtatttggaatcttgaacgcaaagaatcccctcaagaattagtcacatgcatctcataaaacatgtagcagctaaggccaatcactcttatttcagctattaatcaccaatgttcatattcacttcaggcttgaaactgttgtttctcaaaatgcaagccttatatcagtatcatttcagaacaagtgcaacatttgtaacctaagtaattagcatctgctctgttctttcaaaaatgtatctcgctctttccagctagtcctctctgcctcttcctctctttctctgcctctctctttctctggtttaattaatgctaattcatactgccctacaagaatttgcgagctgtactgagaaataatgcagtgttagttttgtaatttagtgcacagagcacatttgtgcaaaagctctgtaaactgggcccgtggtcaaaggagcaattagcactttgttagtatgcaatgatgtactaatctgtgcagtccccaaaagcggttgtctgttccattttgccctcatgtgcaaattctttgcagtgtatatagcactgctccaaaaataacacactgcatgcctgctgctgtaaattgggttcatgatgatgaagacatatcaattagaaaatatttgttggggacaaatacacgtgagaacaatttccagcaaaaacgggaagtgggtgcaagagacttgaagggtagcttgcattcttcttcctccctcgaatttcactaccagagctgtcttcatccgcagagaaagactagaggaaggacatttggtgggaaaataagatctcacacgaaaatagttaacctgaaatcacactgatagcaacttcattaacactgtagactgatttgcatttaaacagacaccatcagttcctttgtttaagcagcacaggagaaccatataacaatttgtgcgttctgcggacttctcaccagcttagtgaagaacatgacaagggtcaggttcatgatacaagtaaaatcacgtgtcacgtgatttgcaggtacacagactgcttgagtctccacatctgta

SEQ ID NO: 43436 - DNA, 1341 bp, Bovine  19866881410265
  misc_feature (1)..(1): n is a, c, g, or t
nttggggtgtgttattattccaattgttggaagcaagtcttgcaggaggtagggttttgaattcctgatggtgtgtgaatgtttatccccaaggtttctctctgggatgaattgatttacgggccagaaatgaggctgaattcctacatcaggttaaaggcccaagggtgtttggtttagaagcctgcccccagccctcatttgcatgcggataaagctttcttccctctcccaagcttggcagtggccagtggctaatgcaagctgttggcggaacaaaacagaaatcaatctagcttccacctgaatggaagtagggcctaaagaaaggtccctcatcctcattaaaccttattcatttttcaaaaattttgtccatttttcgctgcattgggtcttcattgctgcatgcagcctttctcttgttgcagagcacgggctccagggtgcgtggccttcagctgtggtggtgctcaggcttagttatcccgcatcacacgggatcgtcccacaccagggactgaaactgtccccagcatgggcagccggttcttaaccactggacctccagagaagtgctcctcattttttaaaaaatataggcaactatctctagtcccatttcacagacttcttccagctcaggcactgaaagaacctcagcttttctttgtctttccctctgcctcattcaggcatctcttccccagattttctcagtgtgttattttgccggggcggctgtaacaaaataccacagagcaggtggcttaaataatagaaatttattttcatacaattctagaggccaagagtccaggattaatgtgtcagcagcattggtttcttccaagggcctctctccttctttgtcttcactaagtcttctgtgtctgtgttccaatctctccttaaaaagaccctggtcacactggattagggctcagccatatgacctcatttggctttaattacctgcctaagacctccaaatacaggctcattctgaggtccttgaggttaggatgtcaacatatacatttcaggaaggacacagttttggggggaacataatatataaggtctttcaggtgctgcttggaccccagaatgacatttctggtcctgaatgatgggatcagtcatcttttcctttgtcttggaaaatgttctgggtagaaataaagtacgatctcaagacaggctagtccacacacctcctagtgagttagcttgtcggtggcggaaattggtggtttctttggtctgacactagggtggggtatgagtctgccaactcagggctttggaagatacttgactaaactaaaaagaatcaaa

SEQ ID NO: 43437 - DNA, 1674 bp, Bovine  19866881528707
  misc_feature (1)..(1): n is a, c, g, or t
ntggagcctaagttttatgagtggatgtttttaacaataactagcatgccagtatggtaagagacctgagagtggggcccataagactcaagtttggagaccagtggtgcaatgaaacagcactagactggggttcagggtgtgagatggaattgcagtcactctagaaggattttaacctctctgatctcaatttgtcctcataaatgtgttgatgataaggcctcatttcaaagtggttgagaagattccacaagattaaaatattttacttattttaataagaataaaattatggcagagagcaatttctcagtctcatatctaaatcaagttaacatttccttttcctgcccacagtggtctggaggttgggcgattttaggccctggggttgtcagtccttgatggccttggaggtttccggctggtgtgggggggagagtaagctttctgaaggtaggaacagccaagccttgctagctcttgcccaaacccctccattcatcccccaggaagagatttagaccacatttctcgcatttctcatttctgttacccatgaccaagcgactggcctctgactgtagaacagagcccagtgacgtgtgttccttaaatgcttggctcctggaacactgctcacagggtccttggctcctttttctccaactgctggtctgatgaagtgtacaacggaggccctgaaaccctgagtatgatggagcaataaggaggaagagcctgtgagctgatttctacaccgaaaatgtacacaagtgagaagctgatcttgattgtgttcattcagtgagacactggccttgtttgttacagcatctctcccaccctgactaatacagaagacactgctcgcggctttcctgtcgaactgccagaaatgtaaaacatgtgcttctcgggtgtccagaaagtacttactgaattaatgatcaaggagtaaaccaataattgatacggaaaaataaaaggtatgagttgaggcgtggaggtaggaaaaagtattttgctttctctatcagatggctcagttttggcccatggtagaggaaatgattttaatttccttgctccctgggttttaaaattttctgttctcttgtgggcctattaagagttgggaaagcttgagaaggtgacatccaaggctgtttattagcagccgttttgttttttctctactagagtccaatgcctctcttttaaaatattttactgctgtaggagtggcacctggtatagaaaaatcaaaaccaaaccaaaccaaacaagataataatcatattttaaaagacgatttctggggcttatttgaatcaggaaggaatgtctccagcagtcaaagcatcaacaacagaatgagatttgaaaagtgctgtgccggctaaccccacttgtttactgcttctcacctccttaataatccgcaaactcaatacttctcacagaaaacccagcagtttcaccccacttttccaccaagatttcatagccaagagctgtaatgaggtctctgactagtgtaactcacatcctgtttaccaaacatgttatggtatctttactgaaagagtcttgtcaacagtgtgtgtctcctctgggcacagtttacagggtgattccataaacttgcatcatttttttttttttttc

SEQ ID NO: 43438 - DNA, 2907 bp, Bovine  19866880462979
  misc_feature (1)..(1): n is a, c, g, or t
ncatttaaactggaatcagatagaagcaggtatttcgctcaattatgtcttttagtgggaaattgtattccaagacctcaatctggttattatgagtggtcattgtttttaagaaatatgaatacaagtccccatgaattcttactgagagatcttttcctactttaatctctgtataaatgctaaatgaattattttgtactttgtactacacagacacaagcagagacatcacttcaccaacaaagatctgtatagtcaaagctatggtctttccaatagtcatgtacggatgtgagacttggaccatgaagaaggctgagtgccaaagaactgatgctttcagattgttgtgttggagaagactctcaagagtcccttggactacagggagctcacactagtcaatcctaagggaaaccaaccctgaatattcattggaaggacttatgctaaagctgaagctccaatcttttggccacctgatgtgaagagccactcattggaaaagaccctgatgctggaaaagattgaaggcaggagaagaagggggtaacagaggatgagatggcttgacggcatcaccaactcagtggacgtgaatttgagcaaactccaggagatggtgaaggacagggaagcctggtgtgctgcagttcatgggatcatagtcagacacaacttagcgactgaacaacaacaaaacaaaggaagtggggcctccacctagacaggggaagaggtaggaagggtctggaatcttaactgcctcgccaatccagagaggggcagctttcgagcaagagaaaggactggagagcatggagcagcattgctaaatttgttttgcagccgctgcaaacagctatgtacaatttttctccagcagtattgcttcactccagagaaaagcagctgatgtactttgaaaagattttcaataacaagggctttctaaataactttcagcttaaccaggaaatcattcaaccagcactgccccccctccctcaagtattccagttagtcaaagtttcactgagacatgtcagcagtgaaaaatgcagaaggcatctaagtaggaactgactgaaaaggcgtaagaaatcacagagcaacaatggccagtctctttaaaggctagccgtttcaaacctgccatctccaacgcataagggtaccataggttcaaaaggggaaaaagaaaagaaagaaatccacagctcagagtagaaagactgtccatttggagtatttcaagacacatgtgtttattttgtggacctggcattcttcaataataacttcaaaattaaccactagctctgcacagtctgcatgaacagccagagggattcagatggccaaaaggttactaagtaggtgtgacacaggatttatctaaaaacgttcctgtaaaaatgtgtactgtgcaagccggagcccagttaaggtgtgctggtgagctgttggcagagggcatggagaaacccgatcctgcactttgtaaattataaactgtttacacttgtcatctctgtctgggacactttaacaattggcttatgtgtgacagagcgtgcagagccagcggcatcagagtaaccgcatccaggggcattctgagtgacgtctgctgcagcttgggggaagatcacaaggcgccgtgatgtgacaggggtgacgacctttactgccaggctgtgggtgccttcaggaaagtaacgctgtaaatgtttccaggggcaaagcagggcctttccacaggctgcctgggccaggcatgcaggttcctcagaccattctgaggaacccgagtgtctcccacactagcctccaggtcccacaattctccaagctggaaaggtcagctggaaaaggcaggatttataatatcaaactatagtcatttgaggacttctctggtggtccagtggttaaaaatctgccttgcaatgcaaaggacatgagttctatccctggttggggaactaagatccctcctgtgggcagttaagcccatgcaccgcaggtggagagtccgtgagctgcaacgaaagctcccacataacacaaaaatccgacacagcctaattaattatttttttgaggaaaggagacacagaggtggactggccagcgggatctcaacagcctggggaccagggacctagagacacctcctggtgcccaggaggaaaaaagtcatcgagtcatgtctatttgacccacaaaattgtaggaagaattgttttttaaaaaatttgtcccctagttttctccagtctgctgctgctgctgctgagtcgcgtcagtcgtgtccgaccctgtgcgaccccatagatggcagcccattaggctcctctgtccctgggattctccaggcaagaacactggactgggttgccatttccttctccaatgcttgaaagtgaaaagtgaaagggaagtccctcagtcgtgctcgactcttagcgaccccatggactgcagcctaccaggctcctccgtccatgggattttccaggcaagagtactggagtgggttgccattgccttctccgttctccactctagaccctcccatttctgacccccagtctccagtacagtgctctgcacctaaactaataggcaccttccattaaatgtttaacgaatttaagattccggaaatgactctgatcagagggcagtatatgtggtagttacgaggaagctttggagtcagcttgcccagggttcaaatccagtgtgtgaccctgggaagtctcctggcctgtaaaatggggataataatagcatgtgtctggacatgttgtgaggattaaatgagtcattacacacaaagagtgctgagcctggtgcatggtaaacacaatacaatgttattattttgcaaaacaa

SEQ ID NO: 43439 - DNA, 1298 bp, Bovine  19866880473344
  misc_feature (1)..(1): n is a, c, g, or t
ntgtgcttttggctcatgtttgtgatgctgattgaagtctttcgtgagtccagcctgttgcagggcgtgggggaagagtgaaggaagaaaaatggaggtgagtccttcgtcgtgaaccttcaccgaaccgcacggcccaattgtcgacagtcccttcgcccccactgcgtcccagggagggactcagagtcccgggcgccgccgcggccgtcttggtcgggtgggtactcagccatggagaaccttgccgagctgagcgggcgggcgcctcgccttttcctgctggttcgacacctgccccctccccaccccggggattatgtacacgcgtcgttgggcttcatggatgtggaaagaggggcaaaggagggtttggggggcacgtccggctttagcgagggcgtgcgcttcagccctgcccgggtcagtgagttgtaggcgctgttgaggctgggctgcctcgacacagtcacggcctggcctgagggctgcggcgagctgtgcgcctggatggagtccaccctctgtggggcagggggcgggttgtctccccggccaaagctctggttcctggagaggtgggaggaattggaggagttagtattgtttcttttgagggtggcggcctgatggcttctggtgagcgagttcgtggggtagctcctcttatagtccagcccgtaggacgaggaggggcgcatctccagccgcttgctcaggccgttctgcgacagggaggctccgggagggcccagggaggcctcccgctgggggactttggggggcaggctgtctaggttctccaccaggttcaccccatggttgggactcttgctgctgagatgttccttgatggtcttatactccagggtggccgcctggtcctccagagccatctgtgccacctcgctcattttgggctggtccacgtactcgtgctggtagccctgccgcgtggtcggcagcacgaccacgctggggatgtggctgggggaggcccgcaggggcaggtcagtggggatcactggggagcccatggggggcatgtccttggtgcaggcgttgatgaggttctgattccgttcccactcgcggctgccacggctgggcttgcgtttctgctgcagcgttggcgtggactccggggtgggcagggcggccaggtccaggtggtgctgatcggccttgatgagcatcttggcggtgttgctgggagtggcgagcttcccgttgtgcatgagtggcgtgaggatggcctctggcttggggtcttggactgggtgtccccgaagaggcca

SEQ ID NO: 43440 - DNA, 1767 bp, Bovine  19866880504757
  misc_feature (1)..(1): n is a, c, g, or t
natctttgtttctaagagatatttggtgtttctataatatttattccccacctgcagttgcaatcctttgtcacaggacagtcatttccacagcaaccaactgtgatgtcacgattgaggggatgaggacagtacacaaagagaaagagaatgctttcttctccaggctaagttttctgagttttaaaaccattgcttcaccaatcaaaatattgtaacagaaaaaccccatgacaaagctgcatttcctcagggtctcgggtgtcacacacaaagcatttcaacagaagtgtaagggttgtgtgttgtgggtttgggaaagggtagagatttttatttcattttattctcattctgtactactgatatctgccagtaaaatacattaaacatattccagaaagagttgatttagttgatgaaaaatgtgtctcctgagaccagagaaggtacattttctgtcttactatcatttccataataggaacaatgtttacatttcctcagcctatgttagagcctctaatgtattcatgttctttcactctccagaggcaggaattgaggtatttgagattttattttttcagctactgcatcaagcacttaagatctgacaattgtgatgtgtattctcacttggctttaaaaaataaaagcttcagtgtttgcatttgattagagtctctcagcttggtggctgattaagcaggaacagggaaagccactttcttcagaaacacagcatcttggttaatgtagtgtaagattattgacaggcagagtcacataatttttattaaattgaagagattagctctgctgaagaatctcaccgtgacagcaaactctagctgtaataatgagacctgacacttctcaaacccactacaggaccccaaatggtctctactttgaaatattctttcagctcaagtagaggaagagcttcattcaaatattcagcttatttacctaaaattgagtttttttacatgggttctttgttttgggagaagtgatgcaaaatcagcataaacatttgtaatctatgggctttagctactctctttcattataaatgatacccactggtctttctccctgttgcttgaaatgctaacctagctgttctccagacagaggccatggggcccaccaggaagtaagtcatcagcaaactccctggaagcctggagcattgtgccatttgttcatttaacatgcataaaagtattgcctatttccccagacacagaatacctcactggcacttttatgatggggaagattgaaaaaaagatgaaaagggaaaaaggattagattttggaaaggaaaaaaccgccatattccacggactgaaccaacttagagcccatacttggaaagaggggaatgcacctttccaaaacacaaagaagacaataagggaagtcagtttacatcctggggggtggggcggagaggattaatgagttaatgtttggcaagagggagcctcaaagacaagttctgcagaggtgccattgtcacttattactgttattaattaacagggtgaatgccaaacaaaattaagcctcggggtctgctctcatttcttcacaccatatgcgatgtcttttgcaggagtgattcgggagagctatctcaaaggccacgaccagctcgttcctgtcaccctcctggccatcgcggtcattctggcttttgtcatgggggccgtgttctcgggcgtcatcgtctactgcgtctgcgatcaccgg

SEQ ID NO: 43441 - DNA, 3115 bp, Bovine  19866880531065
  misc_feature (1)..(1): n is a, c, g, or t
natcagtcctcggtgtgcattggaaggactgatgctaaagctgaaactccagtactttggccacctcatgcgaagagttgactcattggaaaagaccctgatgctgggagggattgggggcaggaggagaaggggacgacagaggatgagatggctggatggcatcaccgactcaatggacatgagtttgagtgaactccgggagttggcgatggacagggaggcctggagtgctgcagtccatggcgtcgcaaagagtcggacacgactgaacgactgaactgaactgaaccactatgcatcccttgctatgctgatgttgttgtttagtcgctgagtcgtgtctgactcttcaactccatggactgtagccccccaggctccctctgtcccagagatttctcaggcaaaaataccttagtgggttgccatctccttctccaggagatcttctcaactcaggaactgaagctattggcgggtgagttctttaccactaagccacaaaggaagcccctttgctcagtatagcaagtactttatacacacatatctcatttgccctttataatagcctgcaggcagttgttttatctccactgtataaacgtggaggctgaggctcagtgcgtttcagtggttgctgaagaacacagagctgagaaggggcagagttgggatttaaatccaggtctgggccctgaatgcattgttcagcatgcttctcttcagaaccattctgcttatttattaatgttgtgaaagaacatttcaatgaaacaaaatcctttcaagtgtgtagaatatattcacttttcaaaataaaggtgacttcttgctattttcaattctttcattctacgtattgatcttcttgaattcatctcatccttccttgaagtaacgtgattgcatggtctatctcaggctttctcctctgtctccagtcacagtaacagctcccactttcccgtatctgcaggggtctagttggttttctgccacatagttcatcagataggggcagcttaaaatattctatattaccaaagaggcccacaaatgttgtgttcaatggcccttgcaagggggacagtagtcttaaaccactgacccttggatagtaaatagtagtatctgatgatatttaaaataaaagttggattttgcattttttctgtggaagcttcaaaaaactgcctcacttaagacaactcatgcagtttgtggagacatgacagtgttattactgatgtcatcggtgccggtctttgccatcctgcttaactctacccaggatcagtcagccagcctggcatctttctgtcccagcaaggctgctcccctccctctgttcctaccaacccccctgccaacagctgctatgaaaaactgattctcttccaattccttccaggatttaacatgaaggttacaaggtgaggggcagctggttcagctgggccataatgaaagtctaggagaagcaagatgaaaataaagaaaatttttgaaaaattttgaagaaaagaaggagaaaatacctcaggggagaggccctggtaaaaagcagtttgctccactggccggcagtacagcttgagaggaattttgccacaagtattcgctaattattgaatttaattaaagtaaccttggtgaccaaaaccacaacttactgttaaatgtttgtgtgtaaagtactggaaaggagatcaagtattttacaataatatactttgtaaagaggaaattataaatatagggaaagggtagttgctgccatctctaccagggtgaggttcctgtcctaactctgttaagtgttttccttctttcattagaattgcaaatttcacttgatcttctttagatgcaagtatacactcatttatccattcagaaatacttactgtttatttcttatatatactatagcctgggctaaggaagttaacacaatatatacacaaataatcacaagaaggtgattaagtgccatcagaaaatgtgacctgttctttttgaccccgtggagtgtagcctaccaggctcctccatccatgggattctccaggcaagactactggagtgggttgccatttccttctccaggggatcttcccgacccagggattgaacccgggtctcccgcattgcaggcagacactttaacctctgagccaccagggaagccctttcactttcacttttctctaaccaaagaatgtacaaacgtctaaggccctctgtggagcagagtcctcacgggctgccagacagctgccatgagaggccttactgcataatagctaagggcacatactcagaaccaagcatcaacctagttcctccattagtcagcttgtcatctgggatggtttcctgccttattgaagatacagtttcctcacgcataaaaaggagacaagatgctgtttacttcagagggtggtagcaaagcttaactgaagtcacccaggtgaagaaatgggcacagcacctcgtccagggcaagtgctgaagaaatattcatactagtactattgtgcttgatgtatccatcaggatgatcaggcttaatcaacaaagtatggctttggctaatataggcagataaaaaggaacatggtaacttaagggaatagcttagagacttaagaggtaaagaattagatcatggaagggacggaaagcagggatctgcataacagcaggaagagtctttgtaggggactactgtctctgtttttcactctgaatatcgctgggctcagacttacattccagggagaaagtaggtgattggcttacatgttggttccatgattagcccacccaactcttggaaagataaagatgcagagaaaactccttagaagctgtggtattttttggtcaaggggaagagaaaagaggatgttcacagtgagaagcctaaggccaagcagcagcatcactactggtaggagggtgaaatctgctgacgtggtcagagagacagaagattgtggtgatgcgcataaggagggccagactttccaggggtttctggaaggccagcaaaaggggttcagagttggtgtgttaggaacttaggagacactgaagggat

SEQ ID NO: 43442 - DNA, 3176 bp, Bovine  19866880540888
  misc_feature (1)..(1): n is a, c, g, or t
nttacagctttctctcctaccaccaaaacgacctacctggtccattctctttgttttttctgttacaacaaatagtatgttcctactctcatcacagtccaaccattccatttgtgctctggttctcttctcactttcttaaggaactcatacccttctctgtccaggagcatcaatttttcccccaatagatgtggcactggcatacaaaccttctctaatatcttctgccactgaatccacattcctctacactgactattctattttgctttcactttcttacctcattttctttcctcaatttattccaatcaggattcttttccctctcaattgttactgagattacaattgtcaaggttatcagcgaagtccatctaaccaaatccaacagtcatgtagatgtctgctcttcttttctgacctctgaatagtattcaatatcgccctccatcttgaaacacctccttctcctgccccacacggtgatcaccagtgacccctatggtgctaaattcattttttttttaactgctatgtagtgactgtaagttcaggctattgtggcagatgaacctaagttcaaatcttgcctacatcactttttaaaatccaatctgaaagtgaaagagtcagttgctcagtcatgtccgactctttgtgaccctatggactgtagcctgccatgctcctctgtccatggaattcttcagggaaggatattggagtgggtagccattcccttcaccaggggatcttcccaactcagggactgaacctgggtctccaatctagggaaagatatttaaccactgagactaggttctcaatctacaaactaggaaaaaatattagtacctaattcccagctgtgagggttaaattagtaactttcattctctcttttacctattacagcatgtaaagtaattcaccctccaagaactgctctctcccttcagttgctggccgctcctttcccaatcactgtgaaaagctcctccagctctatttgccttttaaatttgggaattcataaggttctatactccttccctaagcaactaagctcttccatctcataactgaaattataatcaaaacctcaatgatttccaaggttcaatttctgatgtatcacccgccccctacctcaccaactgccatgcaaaaatctctacctgcatctctcagctatctcatactcaacaagcccaaaagataaggctctcttttttcatgtgttcttcctccacctcaaattcccctttctgttgcagtctccaactccttgctgtcagtttccacagtttcagtatttcctctttgtaacagtcactaaacttacacttacaggcttagaatatgcactcccttttagaccgtaagccccacgatggaaagtaaaatctgtctatatcaaaaataccttgcctagtatcccacatgcgtgtgtacgtgttcaggtgctcagtcgtgtccagctctttgcgacactatgggctccaggacaccaggctcctctgtccatgggatttcccaggcaagaatactggagcaggttaccatttcctcctccagggatctttcccaacccaggaattgaacccatgtctcctgctttctcctgtattggcaggcagattctttaccactaggcccatcccatgaataataaatgtgtttaacagtgtttcttgaattgaatttgagatattttagaagtttgcttatttaacttactgaacttaccagcattttatttgtttagatgtctaattcattgttaacacttttatttcaaaatacttaagccactcatttacattagattatttctaacccataaaaatattttaaagaaaatttaaaggtactcaaacatactatatttgaggaattctacaattatcaattgccactggatttcaaaaaataaagaggttcagaagttaggaaaggcaagtgagggtaatactatttgtttccctactttggaatttcacaaaatttttgaaaagaatttcagtaaaaagatgatttttttaaaattatgaaatgcatgaatggggtattctttttttaaaaggatttactcctacaagacatttttatctaactatcaccatactctttgtactaatactttgttttcactcaaagatatatagtgtctaaaacaatatttttgctagtttagaaagtcttattatggataaatatggactttccatgaggcagcctaaaatacagataaagggttacacatacacactcttcacacacatacaaaggggttcattttgtgatatcaaggagttgtacacatataatgtgaatacttcaatatacttgaatacttaagatcttttagaaagtcacattatcaggaaacttaaaaataagccaaaaaaaaaaacactaaattgaggaaagacatctctgtattgctctcatttagaaaacatgacaccttaaaggatactatcactgagaaattcatcacaatgaaaaaggatagaaaacaaaattaggaatcagaaaactagagctacaaagtcttagaaatatttaaataagtaaatatgatttcaaagaatcaagctttttttttttttccaaagtacatgttcaattgtctaccaaacaggggctgttttattttctctaagctgctagaatatttcataagattgcttccacatgttatttaataatatagaacacatataacaaaagcttgtttaatgtgtatactattggaataaagaaattataaatgagagggctctataatattataaaaatacctgggctttcactggtctcctaaaattatccaaagtataataattaactagttatcaaagaacttctttttgagatagtaatgttatacctttctctagaaaattttaaatctctcaaaggcaacctaaaatgctcctaaaatgattatgaaaagcctattatctaattatagtcagatcttttttttttttttttatttagacccttcacccagcaattatacttctgaagaataaccataaattccaaagatgctttattcattcattcattcattcattcatttgaataggaaaagatctgttacagagttaaggaaaaaagcagaatagaaaatcaaagactgcaaaagaaagtatcta

SEQ ID NO: 43443 - DNA, 2683 bp, Bovine  19866880554617
  misc_feature (1)..(1): n is a, c, g, or t
naaaggtgagagccaaagaattgattcttttgaactgtggtgttgaagaagactcttgagagtcccttggactgtaaggagttcgagccagtcaatcataaaggaaatcagtcctgaatgttcattggagggactgatgctgaagctgaagctccaatacttggacacctgattcgaagaactgactcatttgaaaagaccctgatgctgggaaagattgaaggcaaaaggagaagggggtggcagaggatgagatggttagatggcatcagagactcaacggatttgagtttgagccacttctggtaggtaatggaggatagagaatcctggcatgctgcagttcatggggtctcaaagagtcagacacaactcagcaactgaacaacagacaacagcaagtataaagatattctatgttgcctttctggaaaaagtgaaatatgtgcataagctgtttgtatagttatgtgtagaatgtaacacatgttacattcatgtgtgtgaaagagcaccaatgtatttactcgtgacagactctgggcaggaggtttgggggtcatttctttgcaatgcatccctttatatagcctatgaattttaaatttccatgtcaggatagaaattagccaggcaaaaaggaaaatatgaagccaaggacaaatatgtagctctagtcatttgtgaacagctgagttgaccttctggatgaggagaaccatgccgagttcacattcgcgttcaaggaattgccaacctcataataagcagagctgaagtcctagagatccacttgggttctctctaactccaaagcgaccaactagacagagaaggcaatcacagatgatagataactttacatttcgagcagtgtttggcttcatttgaaaagatattcagcttaaacaatttcctttccacagaaatgttgtacgttttagaccttccatggaatttggcagacaagaaaaatgttgacttttccacattgcccattatgcaaaattcggaaatatgcagaacacaagaagcacatgtgacaagcacagtgaccttaaaatgtttgcaggcagatgtatcagaatccgtttcacattgctgatgtccttggccagcaggctggtgtacagctggctaaatgccgcccttataacggccagtcaagggatgggcattagcgtttgatttaaagggaagccagggaacatgatggtgggaagtgagatgtattactaggagtcaggtggcaaatgggaaggcctcaaaaacactctgatggtgctgccgcacgagtgctcggagtgggttagcaatacagagacggggtcctgtgtctggatgtgaaagcagagaatggggtgagatccattctcagagctacaggccagcagtgccccagacagaaaaggtgggtcacgggaccccgagtcatgcccaccttgcagcagcaagaactacaaatggcatgaaatccagaggctgagttccaaaactcctagccccacattggaagggcttccctggcagctcatgtggtaaagaatctgcctgcaatgcaggaaacctggatttgggagctcattctaccacttgggtactctttgtatcaatcagtggctgctcttactgctttttctggaagaaaagtgtccagttccagagtggcaaagtggtaccaagtcaggacacattggcttatatccatttccttgtgttccctgctgttttcagtcagtcctgctctgtcatccttacctggggcgctctccacatttgcttttctgctcacttcatgctctaagctcttgtctaaccacaggttccctgacttctgagtgggtgtgtgtgatcatcctgctgaggttccattctttctttcccagtcgctgagagccatcctcttcctgctccatctctatagctcagatgatgaagtgccaggactggagccagtgccccagagccccgtggccacggtggtttgtgagtacacatgatacaactgaccaaagcagaatgagtcctagaactggcaggagagcttctggaatgtgctttttcccgctgaacttaagctgggagagtgtgagttaaagcagtcctgtgccactctgttgggcctgagactgaggagtaaaggcctggacaggtctttactctttccaaaattttcatctacattagctaatttgttcttcctacaaccctctacgatagtcaggacaatttatgttaatttccatttgtatatgggagaactgaggctcataagtgttaaatgacttggctctgggtcatagctagtaagaagtagagcccgttctggaactcaggactctggatttcatgctgtttatagttcctgctgctgcagggtaggggtgactcggggtcctgtgacctgccttttctgtctggggtactgctggcctgtagctctgagaatgaatctctcaccctatatctgaggactgatgctaggggtccttcagactcaaccaggagaatgtctggggcctcccaagtcgaaaaggagccttttgctgaatgaatgggaagtacccagtcctcatctcaaaggactgccagggtagagcttggtgaactgtcagagataagccacatctgggtgaggatggtattcaggggcaaagccaaggaaagggaggcagagcggatg

SEQ ID NO: 43444 - DNA, 1012 bp, Bovine  19866880556466
  misc_feature (1)..(1): n is a, c, g, or t
nagttccagctagcttcagctgcatggcaaagctatctaaagcctgttctttcttctcaaaaggatagtagtgagtttctggagttgttaaagcaccaaacagacttttgtgttgacataactaagaagatggaaggagaaatgacacgggtgttaactttccaccatatgattgggtattgaaggccatgatgtctctgagtcatttaaatcatctcttgtaagatgtgacctgtcctccttggaggcgatgatgtacttgaggaataaagaattggatataaagaggattgttgataaactctatgatttatgcagttccattcaggattgttagaaagtgtggacagtatactcagcatcctttatagaccttctgaatcttactggaatattatttcccagactaaaaattgcttacaaaacagcttgtacattgattaaaatatattcagcatttgctgtacattttagtttaaattattcatttgatctctaatttaaattctgtttctacatcttttcctggtctgaattgagcacatcttcttgactaaatataataatgtgataataacttgtttcaaagatttcccaaaatatatatgcatactacagctctggcacttccaatccaatgggaacatttttctacatatcgactatttcaccagcttgctgagagctcatgagaactctagaaaataaactctgaaggagatttccttctaatctggtttattcctgtgtccttggggcagtggtccatgtgtccactggacatttatgctccacagctctcttggcagagctgtccatggctactcccctcacctatcttgcagtcttcttggaaataaggttttagaggactgttactttgggtcagaaacgaggcacaagagtggctattacttctcactattgcttaacctagaaaagaaagctctcatttcttttgctgtgggaagggggggtggggtggtgaggggagacaagccaaatctaaaaa

SEQ ID NO: 43445 - DNA, 3600 bp, Bovine  19866880568392
  misc_feature (1)..(1): n is a, c, g, or t
nttcttgagtggggaattccatggacagaggagcctggcaggctatatagtctatggggtcacaaagagttggacacgaatgagtgactttcactttcataataatagaaagaacaatcttagattctccttcaaagtgaataaatttagcctgtaaggatctgaccagtggaaatcagcatgtcaaacgtcaatacactctaatgagcaagggtatggagaggagaaaagaggctagaagtagagccttggaaacacttgggaggggagaggaaaaaaagacctgcaaaaagcagcagaaagagcagctctgagcatcagagagatggcaggaggcaggaacagagaggaagaaagaaacccttacttggtgtgaagaaatgaggtctgtgtcaaaagatcatattaaatctaaacatttaaacacttaaatcaatttagctttatcatgccattctgaaagcattacctaactactctaaataaaatattggaatataactttcaattcagatttgcatacacataaattaattttccatgttactatttactcaacatagcaaaagattatcagctataacagatacaatgtcagctatgagtatcatatgcaatatcagctacattatgggtaatataacatagcatattacttattattaaagttgtagattactgattgcaagtgctttaaaattcagtctaggtagaaattaatgaaaataacctaaaatctaacagtagggaaaatattttatatatatatatatacacacacacacattcatatagacacatcttataaagttatatgataaaatactaggaaaccgttaaaaatcttattttcaaggatgatctaatgacctgtggaaaagctcttgatatagtatgaagcagaaagggcattacacatttctgtgtaattttctcttctaggaatatttacaataataaaagcctgacaaaagaaaacaaatcaaaaagacaacattgagcatctctgatattacagataatttattatctctatatttttctgtattttacacactttcaacaatgaaaattaactactattataattagaagaaaaattataaattaacagacatacttaccattgggagtttaggattgaagtggttaattatcccaaattcaaaataagatgcaaaaccttcattgagccagatattattccaccaattcatggtaaccaagtttccaaaccacttttggagttggggataaaaagaacaatcttaacttcaatttaagtaatatttattgtaattacatgttaaataaatgtaaggtcaaagacaaaattaaatgtaatttgctatcagtgataaaacttgaaaacaggactccaaaatcatgttgttgttttattaataacatgaagtcattcatttttttctgtaaaatttcacatccaatgactggaagcaatttttgctttaaaactgtgatgctgagaaataaagtaagctagaatagcatttcttaaattgtccactttactccaaagttaagtcaaagtagaaggcctgaatgttcacttaacacctactgaatgacagcatctcatactctaaacagactacatcagaattttgctgtaagcagttgattatgttttaaggacatgatttgatctgcaccatgcaagaatcactcaagtattcgtttctgcaaagtggtccagttataattattttctgtttgagcttaacagaaggaaagtgtcaaatgatgatgaatagaatcaggaaagataaacacaataatttccaaaaccaacaaatccacaccctggtttttaaccaaattcttataatagctgtgatgtactaatagttagcaccctattttccaaaacaatgtgtcacttaggctataataaaaaatgacactgtgagtgatgatcaagacttgtgaaaatatgtgttgactgtgtaacagggtataatttaatcacaggaaatcactcctctccaaaacttcttaggggtccatataacaagaagataatttcacagtttaggtgactgtcacctcagtgatactagtatattgactataaccctttaacttgtaacttcttgcaaaaaaaaaaaaaagtttgtgacaatctactgatgaaatgggatatcttctagtgactcctttgaatgtctctattttaagatggaatgaaaagcagatgaccacaggtctgcttggtttacttttcctgaagagaactttgtggcacacaattactctttgaatatacgacctgctactgttctgagatttcttatcaccatgatctatcaccaaaagttcaaatccacccaggatctgattacatagatccttccttgttttcactcactggaccacttttcaagttattttttaaaatttggtgtatggtatagtttgaggagtttttgctgcttttggtacagaagctggagaatattcttgtgtgaaataagaaagaacattttaccacatgcctgatgtccgatttcgtgggagacaatataggagatcatgatctttttttctgttagtttatcatttggttgcagcaacaataatgactcgtcaaatatcaagagtccccagttttccattgcacggttgtcaaaagtaggcaaagcaattatatctaagtggatttaaatggagggaaaatgaatcatctctttctaaagatttgagagttccagatacaacatctcaaaatgaaatcataaaattaccgaaataaaatgcaaatgaatatctatgacttaaggggcaggagaaaggcattaaagacatagagaagacagagtcagaaaacaaattgctttgactgtatgaaaattaaatagttttgattaaggacctatatccaaaatatacaaagaacacttgaaactcaaaaataagagaacaactttacagaattagcaaaagatctaaagagatagttcactaaagagacacttcactaaagagacacacaaatggcaaatgaacagatgaagatatgctcaacaccatatgtcattgctgctgctaagtcgcttcagtcgtgtccgactctgtgcgaccccagagatggcagcccaccaggctcccccgtccctgggattctccgggcaagaacactggagtgggttgccatttccttctccaatgcatgaaagtgaaaagtgaaagtgaagttgctcagtcgtgtccgactcccagcgaccccatggactgcagcccaccaggctcctccgtccatgggattttccaggcaagagtactggagtggggtgccattgccttctccatgtcattaggaaattgcaaattaaaacaacgagataccatgacacaccagttcaaaacaaaacatcgatgttggagaagatgtggaacaataaaaacactcatccgttgctggtgagaatgcaaaatggtacagccacttcagaagacaattcggcagtttcttataaagctgaacataggttggctatacagtctagcaattgagctcctaaggatttacccaaatgagttcacaactgaagtcagcaacatgcacgtgaatgtttatag

SEQ ID NO: 43446 - DNA, 1463 bp, Bovine  19866880569555
  misc_feature (1)..(1): n is a, c, g, or t
ntgcccacctattctatgggcatggacataattaatgttatttatcataggatcagggcaggattgaaaactaactccatgtattttgaagcaaaatgagtttaatacagggaccgaggggtttataaaaccactgaaaagagtgagagatgtctagagcaacccagaaacctagcatggggcctgctaactcaaaggcacaactagagccacagcccagagtctaatctgaagcccctagtgcagcaggaagcaggaaaatggacatgaggagcagcactcagagatgagacacgagatcaagaaggggccacgacccacactgcttcttgacaaccagttaagaggggatcggaagtcaatgcaggaaacccacggtctggctggtcattaagacagtggggatccaaaggaagcccagctctcttcttccaaatttcctgggagaacttcttaagtggaacttaacttttaggcagacttttagctgcaagggaggctgagaaatatagtttcaaagtagacaaccatgtgccaagccaaaactctgattataaaagaaggaacacaactgtggaattcagtacacaatgggaggatgagacatgtgagagcggagaagaatatcactgaagacccagggcaaagaaagaggaatcagcaagaacaactgggtaactgctacagagtagggtaagaaggactctataaagcaagctagaaaccagatatctgacattgcctagaagctaaaatagagaccacttctgactttccacatttccccgctttagaacaatgaaaacttatgatcctttcttaaatgttcctcttcccctgaaatccccaaatcccgtttaaagtctcattaacatgtcactcttagataaaacctcattgactgagtcagaagaaaaacagagatcccctcctcaaaaacctgctccacacggagccagttccaacaaagccgtatatgttatctacttaggttcaattaatgcacaaaggagggattaatagttacctgtcactaggttttatgaatttctcttttaaatgcacatttattgttattgttagtagtagaagtaatagtagtagtattcaagctgtactccttaaatcaagaaggcatttactaattgagcagcaggagagaaagcagacaacaggtgataattacacatttatcagaaaacattttatatctcaaagtgcagcctctgatggctgcagccaatttctctgctcatgcccagggtgcagggaagggttctagttctttactgtaaaaacagggtggcagaaactaacaaaatagacagtattgttttgttttgtttttgcactcatgtccctagacagaagcatgcatttctcacatttgctttctcaaggcctttattgtctgagcttcctgttagaaaaatcaagctagtgatagcagacccatgctatcc

SEQ ID NO: 43447 - DNA, 2296 bp, Bovine  19866880600457
  misc_feature (1)..(1): n is a, c, g, or t
ncagtccatggaattctccaggccagaatactggagtgggtagcctttcccttctccagcagattttcccaacccaggaatcgaaccagggtctcctgcattgcaggcagattctttatcaactgagctatcagggaaaccctgaggagtataatttatcactttttttttttttttatcatttttatttcctgtctccagtttctatctctttacattttatttctctggtcagtgttggcagaggtgacaagaaaattaacctctctaacccccaatgagaggttaagcaaaatgggtcacagggggttccagctggagccctgctgggtcagctccccatccttatcctctccttctgaatgtcacaagggtttcacggtagtctgggctcctccgggaaatacacataatcaccaagatccttctgcttcttatctctctccaggctttagcctgaatcatgttctagtacctgagatactagatgtgggatggcacaaaacaatgtatcctatcgttaaggctaacctctcagactccaagggaaacttttatttcttgatatagtcctcaaatagaggcttataaagtatcctcttactaggcccttatattaagggagtatagcatgtgatacccacccccccctaattttcagagacatttaagagatgatttatcagatctattttcttatttgcttataatgacttttaattgtatttttagttgattcatcaagagcttgaaaagtgcttatttggtcttcccatcagttagttctgagagcctttaaattcatggtttacaatactgtatctataagataatgctttagttattgtacatgtttttctagaagaactgccaacagagaatgccaggcctgccccattattgccttcattttcaagacagcattcatgtaagaacagagttttaaattgttttggatagtgacaaaaacccgtttggttatgaaccatggatcatagaatggaactgtgcagagcagtagtgtcttaaggtgaactgaagctgtataagcaaagagaatagaattgcctttgtatatcttctgttgacttggtaaaatctgtgagcaagcctgtttgttccctggcctcagttttcccatggaaaggggagttttttggaaatatatcttaaaccctttatttggctgaagaagctgtattaatgaaaaatgtattatttaagcatagcagtagcttttgggtagtgtgtgtgtgtgcgtgtgtgtgtgtgtgtgtgtgtgaatgtgttcagacgtgtctgactctttgtgaccccatggactgtagcccaccaggctcctctgtccatgggattctccaagcaagaatactggaatgggttgccatttcctagtccaggggatcttctcaacccagggattgaacccacgtctcctgtacctcctgctttggcaggcagattctttgccactgcaccatctgtatataccattatgtctctagattaaattgaacaaaatgtaaaacagatagtaggaggccggctttatgattcttgaccatcaaaaaaacctaaagatgtattagcagcccacagcaaccctccagaacccatttttcaaagcagtctgtgttagaatgacacacacagtttctgccctgcgtggcaggagcttgaaacttttctccacacacaccccaaaggagttttctgctccaatgtgacaataagtgtgatatttactgaaaataccccaggagccttgagaaccattgttgagctgacctggacatggcagctcagtaggcaccatagggagtgtgccaatcctccttggaagcaagaactaaggttcataaatcaaatctcaagtatggaaaagaaagttgtcaaggcggtgaaggcttcataactggctctcactgttctgtagtgcccagctgtgctgatgcccacagagctttgggaccaattcaagaccagtcagccaccagctagacagttaagtccagggctgccagatatccctgcctgcaggtgtgaatgtaagtgatagggtagatggtcttacacaataactatgatagccatggggccagtgtcttccaggacaaaaggtatgtatgtccagggataaagtttagcctttttggagatggcattgatctatagcccctcaaagtgcttttcatttctcccaaagaatagtgtatgtattgcaaggttctgggtggaatataattaatagcattgaattgtgttccctccttgtttgcagaatactttacattca

SEQ ID NO: 43448 - DNA, 1200 bp, Bovine  19866880636711
  misc_feature (1)..(1): n is a, c, g, or t
natttagttttatctttaccggaatgcatttgagttaaacatatacataagttgtgcatgatcttattttgggttatacagcacaggacagcttgaaagaatagaagaggaaaagaaaaaaaaacatcacccagcctattggttacattggtcacatgttccctggtttaccttccaagtttagccaggtgttccagccagcaggaggtctgccttttgcccaagtctcccaccaggaaagagaagacaatcttgccaatgtagagtgaaaattcagcattggaccagaaaaatgagacttctgttcactgaggaattgattcataaaagaaaggaggagggaactgaaacaaaaacccagaggaaatctgaactgcagatctgggggacaagctaagcttttgtgctatgtgttagattagcgaggatgataattacctgaaattaggaaaacgaaaagcaagacaggaatgtgatagcctgaaaaaccagagtccccagagtcctacttgtcctgtcatgactgcctgatcttgcacaatttttcccagggtgagtataacacagaattccgcatgcttagggacatgtttgatggattaaactaaaatctaacctgggatatccattacattgcaagatgcatgcttaatatacatggagttgggaggaaagtgtttatgatgggaggcagagatgagtcaagcctactttttaaaattcataagattaatgctcatgttactcaaggtccaaagagttcatgatttcactttctgatcatgctttagttcccatccccactagaaagatgtcagttgtttcaatcctgtctccagagaactaaaatatccctgaagtcatttccaggggtgtaaaatgatagcaagcaagccctgaattagcattcctcaaccctttcagggctcagtgtcccctggaaaagaagcacaaagaaaacaatgttatagccaatcctggtgatgctctatcaataccactattttgtcttccaaaacacggggcctaaatgctgaatatgacagagacaggtatattaaagctggatcagctggctagggtatgaagacagctgaaatattcacatctctaaggttgccaatccaggtgataaagggttaagacctaaagtcaaggaaaatagatcaggtggtctggaccagtcaacacatttcagaa

SEQ ID NO: 43449 - DNA, 2561 bp, Bovine  19866880638356
  misc_feature (1)..(1): n is a, c, g, or t
ntgaaatcatttcactacacacctgaaactaaaacagcattgtaaatcagctattcttcaatttaaaagattttaatgggaaataaattgacttttaaatgtaacgtttatggtagaatattttaactttatgtaaaagttagaaagatggtacagagagatcccatatattccataccccatcttctctattattaataccttaaattggtagggtgcatgtgttaaaattattgaactaatattggtatattattattaatactgactcagatttcctcgattttcaccttatatcttttttgtacccagaatcccattcaagatagcactttacatttagtcatcaagccttttcttgactgtgacaattttttagactttccttgttttgatgaccctgaaagttttgaagatattggtcaggtattttgtaaaaggcccataaatttgaatttatctgacgttttcttataattagacagaggggagttagcttcacctgcctgaaggtagagaatctacataatttatgtagaattcctcgacctaagagatttgtctttctttctccatttattactttgttcagtcattttttactatcagtctagactcagagatatttattctatattttgagttatagttcaatatgccattatttatttcgttactcaaatgattccaacactggccacggggagctctttcagttgactcctagttataaccccatcattctggcttgctgttgttgtttttaacactttcttattttcttatctggtgctttaagatgctacaggcttatcttgtatattccctagaatcagccactgatgaactgatttttaaatgttttctctccctccatttatgttttagaaataatgggcagaacagcaaatctgtaggctagacccaagctagatcagttttgctggcagatactatttccagactcttgagtcttaggtgtccatcttcaccttccctcctctctactcagttctaagtctgaatctattctcattctcttcattcatactaaaggagaaatgactgaccatgattcttctattttaaaaaacaggttagtacatattaagataaatcaatcacttaaagtgcatggtagaaggttcagaagaaatacagtgatcctgtacacaccctcttccaaaaaggtacagtctacttgtacacgatcgtctacataaagtaagagttgatgtgtgataaagccaaaatgtagtaaatgccacaagtgggcaacgggcatgtgtgaaatcgagatagcacaagaaaagagcaagcagtggagactctggggactcaagagggactggctggtggcccctgtggggagtgagagaaccctggcatcatcttaatggtctgaggacaagtcgaccctgtgtgattcttgccctccagggaagagggctcagtgttgacggatctgattctcaatagaaactcaaacacttcagttagcaccactataatttattggttctgtacataatgctattatggtttccaaattttgagattcagttatcttttaggctccatctgctggggaggatatggctgacctacttgcaatagaatgggaaagtttctggaagtcttgactatacctagggtcttgttaggaggccctgggtcagactgtggcagcagctgctgcttgcgagtggaaggtccactcgcaatattttgtcagtatcaccatcaaggaaagctgatgtcgcaggacttaaacagcaacttggccagcagatgttgtgctgccttgatttgcttcctgcagttttttcagatttactgaaaacattctcagccgtcatagcctgactggggtgctatgtgactcagggctgcagtaaaataattgttattactaactgagccaggcacttagggaatagttgactttgtacatttagtgagtagggtcttggagcatagagccagacgctcccctgcagatccagtgcctgggagtcagcacccccagcccccgagacttgcattctggggctctttgccatccatcccttttgaggctgagcgagacctgtaaagtcttttctcccaacaaagaaagccgggctgagaggctcagctgctgggtgatggtgcaccctctagcccctcttacccatgcccccaaagcccactgagcagccagtctgcaggggatcccctggaaaccacctgccccgctgcttcaggattaatggaatcaagtgaggcagcaaaaataccatgacagaaccttatgcttccaatcctctcggtgtcatttagctaaagaaaccgtcaacaaaaacgaaggagaagaaaacagctggtggtataatcctgctttattcttcagaagaaagcagaggggagaaggagtcctgattttcacatcttagaggactcgattggtggaaacatcaagggaactggctgtgtttgtgtgtgtgtgtctgtgtgtgtgagtggttgtaactgcaatttgattgtgaaatgttagagctggcttttagctgcagccctgc

SEQ ID NO: 43450 - DNA, 1210 bp, Bovine  19866880643403
  misc_feature (1)..(1): n is a, c, g, or t
nctctccttggaacgtggcctcggaccgggtgaatcctggctttcattacagctagaaatctttatcctttgaggctgaatttgatttttgacacagcttaaaaacactagaaatgaacacagcagattattagatcaaggtgtgactgtcaaagtagttttccgagatggttcataaataaactctgaaggcagttgcaaaatcagagttttgagtatgttgcagaaagaagagcagagttcccccccaaaaaaacaagactcctttggactattccagtgtgtttatttaaaaatcaaattagatactattaagatcagttcttttggggtatagagtttatgcagcccaaaggtgacctgctgctgctgctaagtcccttcagtcgtgtccgactctgtgtgacccatagacggcagcccaccaggcttccctgtccctgggattctccaggcaagaacactggagtgggttgccatttccttctcccatgcatgaaagtaaaaagtgaaagttaagtcgctcagtcatgtccgactcttagcgaccccatggactgcagcctaccaggctcctccgtctatggattttccaggcaagagtactggactggggtgccattgccttctccaaaagtgacctagtggacttgaaagaagagtgaacctgtagaggagcatgacagcaatactcctgaagactggatgtggggccaggtgtgaacaaaatacccacatagtctcagcaaaacacaccaccgtgttctgtgtcctttcagaggcccacttatagccaccaaccgctgtgaacactttgctatacaaagttatttctaaacaaagaaatagataaaggtctaggaaggcaagagttggggtgaaagagaaagggagagaggaaaatgcttctggatgttggttaacatttaaacttttcagatgtttcaaaaatgctcagggcattagcagcaaagagtgatataggtaatccacaaacttgtttaccccctgaataaaacctgaattgactgcccaaaccatggcttctccttggagattcacaaaggactcatttctataaacttcggagataaattttcaagctgttttatctacttctttttatagctggcactcagtttttcaaactgtgttagttgctttagtgaaatttaagatgcatgcggaataaagactcatatcattgaat

SEQ ID NO: 43451 - DNA, 848 bp, Bovine  19866880657799
  misc_feature (1)..(1): n is a, c, g, or t
ntacttactgttggttagatttcctgccggtgatgttaaagcatacaagacactgggctggcccttcaagtgaaaataagactgacaaacaggaagaaaaatgatactgcaagaagagaatcagagtcctcatgggtggggcaagagtaacccttcaagtgtccagagaaagaagagccagcttcggaagcagctgctgttgtggaaattgttctacgcaatttctaagagttgttcaagccagctttttaaaatgagtttaaggtgtacatttcagttttacactttattctaagtggtatccagataacaataacaacaaatacttagatagcacttaccgtctgccaggatgtactttacatgctcttcaaatgttcattgattgaatcttctcataaccctgtgatgagataaatactatcttcagccacattttaaaggtgaggaaaccaaagaagagttaagacccttgtccaaccaaggtcacagagattggccatggtggaactagcactcacagtgcggagctgggctccagaatccatgttcatgagcaatacatttaaggcaatatcacacatggacatggaatacatcccaaacactacttaaatcaaaggtgattgtacaatcaacgggtcctaaaaatccaagaactctgtactttgatatgttacattgaattggtataggaatttggcttgatttagcaaatatttatttagctgtggcggattaagagatgagtaagatgcagtcactctccttaaggaggtcaatatgtagtgggagacacagataagcaaacagcttttcacagcgcactgtgctaagtgctgtagtag

SEQ ID NO: 43452 - DNA, 2606 bp, Bovine  19866880720234
  misc_feature (1)..(1): n is a, c, g, or t
ncttgaaagtgaaaagtgaaagtgaagtccctcagtcgtgctcgactcttagcgaccccatggactgcagcctaccaggctcctccgtccatgggattttccaggcaagagtactggagtgggttgccattgccttctccgttctccactctagaccctcccatttctgacccccagtctccagtacagtgctctgcacctaaactaataggcacttattaaatgtttaacaaacttaagattcaggaaatgactatgatcagagggcagtatatgtagtagttaagaggaagctttggagtcagcttgcccagggttcaaatccagtgtgtgaccctgggaagtctcctggcctgtaaaatggggataataatagcatgtgtctggagatgttgtgaggattaaatgagtcattacacacaaagagtgctgagcctggtgcatggtaaacacaataaaatgttattattttgcaaaacaaaattcttcttgggcagagggaacccttctgaaatataccacctataataaaggtaaacatgtatttttggtcactgattaagaaagattgtacaacttctgcgttttcattatcctgttcctaaaggtaaaattctctgattaacttgagatttttactcttcagaagaccaaagggtcttaaataaagttatatacaattttatcttttaaaaaagtcaatatgagcctttttaaaaaataagttaagcttctaaaataatttttcctcttaaaaaaaaaaaaaacttagcagattctctttggaaacagattcacatctagattgccaaatttcactcttaatacggtatggaacagctgagttgtaattttttaacctcccagaacacacacatttgtgatgggaacatgggaaaggacatttatcttttcagctgcatgaaaatgaaacccacaatacttgagtgaactaaacgaaaagtatattttaaaaattaagaccatgtgtaacagggagtgtctatataactacaacattgaaattcgtacagttaggctattataatgtcctttaccagttgctggaagcagtcatgccttttatattagaatgaaagcaatgaaaattttcattctaaggtattcaggatttacatttagctgaaatggatgtgcagccatattgaatcagaagcaccttgtaattaggaaaacaaaagcactgaaagaaaaggggggaatgcggattttaaatgctcacttaatccctagttttaggccatacaacagctctctcgtggatgtctctccagataccaaaataacaggttgaaatataaagttgtccatgaatcactattcacactaactaggttctttgttcacactcgccagattatttttcagttttgttgatgttttgttttaatggctgcagttaataaccacccttagagactgtctatgtgcccacctagtacgtggcagagctcggattattatgatgaaggcagttttacaatcagaatccattagttaatttaacacagagcaaaaactcatttgtctccttcagtgcaattcatactgagagtgacacagggtcaggccttatctggtggagggggacagcgaaattaaagtccatgggtcccagcccttcacagcggtgggatgggtgattatcaggatggatataattgtacagccgcagcagtcccccacaatacactggctatccgcccagcacaaaggtttagatccttaatttgttgccagccagaacatctatgaaggagctatgtattttcgtgcaccatcagtcacaactatgctgctgtttgcattttggaagcttggcagctgtcaagctcctgcctagtttttggccagaaagatagtacgcagggctgtggaaaggcttttagtggcagaagtgcacctctgcccgggtcctatctcaggctcattagctgagtggatatttgagccttgtttcaaaggtgtacttcgatacacagtcatctgtttcattaagttaatttacctgagcaggctttcttgataatcagctcaatgataatacagcctctgcggtatccgctcaattctaaagacaaacgatgagatgaggtgagaggactgatgtgcagggtacctggggtctgcatacatgcacttgcctttcatgggacatttccagaaattcacatcgtgtccctaagcaagcaagaaccgtggcaggaagtttaccacggcttggtattcgcttttggtttcaaaggatgaagctggaaaatgagaacgagagcatgtgctatgttaatcgcttaagaatagtatccaattgttaagaaaggaaatgaagaaaggaaagggaagcagtaaaaaaaaaagggggggggggctatgcttttgttgattaggtgtttaacctccaggtgatcctggagagagtaaattgctttaagctaaattcacttaaatgatatggcctaaaggaaatgatatctataacttatgtcctgtaagaagctgttaattaaaaatccacatttccctccccctccctttgttggttctataagttgttcatttttaataagcttttgctttgtggtatt

SEQ ID NO: 43453 - DNA, 819 bp, Bovine  19866880723768
  misc_feature (1)..(1): n is a, c, g, or t
ngaaagtcgaagatagaacctattgcataattcccaggcacatttcaataactgttgatctatcagggaaattaatgtaaaatagggatatctttttatctttgtaaagtctttgaagtagcctgccaaagattgtcttttttgaacaaagttatttcacagtagtgaatgattccatcaatcatttaagatttgggtgtaataaagtcaaacttagcaacttacatgtctttgaaagttaatttggcaaacaaactgctaactgacgctttttggaacacactgaatattagatacctgtgtgtctgttcttcatgccaaaaaaaaagcataacaagccccaagtgttgcatcacaactgataatttcacagacacagctgggtcttaatcatttgttcaatcgaaaagtgcacattaattaatttgccttaccttgaaaatcaaagagggagagaggttgagagaaaagcctaagccattccatatctccatttctgatgtgtaggttaaaattaaactttaaataattacttgttcacagggcagtccattacccagagatgcaaatgtgtatttacagacaggtgaaaagcactgctctagccattcattcagttgccagttcttcctattctggagaatctaaacccaaagagaagctctgagatgccctgatttggcttgtcagggcttctgttcagtgtaacattaaggaggagaaatcaatcacaggagtaagtaaaacataaagcagaccccaatcagaaagtattcaggtaagaggaagtggcaacctttaccaagggctcaagagcaa

SEQ ID NO: 43454 - DNA, 827 bp, Bovine  19866880727855
  misc_feature (1)..(1): n is a, c, g, or t
nttggactccctgcaatttagaagttgatttcaaagaaaaattgcttcaggcctcaactccttctgttgttgccaactctggcccatttttacagctgactgaccaccagctagaaaggcaggtctccggtagtcccggcaggccttgatggctccttgctgtccccgagcacaagtcacgagcgtaattacagctaatggagacaggttggggcaggccatgccccacacagcccccaccacctgcttccccaaggactgagctatagcttgctcaagcagctgctttgttgtgaatccccggtcaacagctgacatgattcatgagaccttcacactcctgcactgcaatcccctcacgcctctggaaccttctctgctagccctcacacacagtcccggtcgctggcttcatgttctcccaccctcgcccaacgcgacctctaaggttaattgcgctgcctccaggcctccacccagcaggaaagtcaacagtctgatttccctgggagggactggccagtggggggcaagaaatctgccccactccccacacataatcctagcagacatctttctcttcagcagcttaaagtctgagtgtctgatttaaaatagatctcactcccaatgccagtctgaaattaggggaaaggggttatcaggtggctctgtggtaataaagaacacattaatctcagctgagcttccagagagaattgttgttgttgttgttcagaaagggtagttatttaaatagagttgtctggagggtgaagatttaatacattgtcccctcaacaaaccctttaagaacctattaacag

SEQ ID NO: 43455 - DNA, 1592 bp, Bovine  19866880730702
  misc_feature (1)..(1): n is a, c, g, or t
ncctgccatttaaacactttgattcttgaactgtccccttgatacaggaataaccttcaatctccagcattcagcaaactggattttctgtactgacatccgctccccaccttttctctgagcagaggttccctacttggacttaaagagtgtccaaatctatttatcctctcagctcctgaaacaggcagctttgttttcacccttcatcacagacaatgttctccatgatgtatttattttaaaacatcactcttgagggagctgccagcaagcaagtggttctacttaacaaagaggtgtcacgagctcatctatacctcctaaaactgtggtcgagaagcatttgaatctttctactaccttcagcctgcaatcaccaggccataaagcagaatgagcctttgcgtgcctacacgtttgcaagtgcctgtgtactccttttagagatttttttttattattactgaagccattagggactttcagccactctgtccacctaagcacagatgtatcaacctatatccaactgtgatcattagggtgcagtttccatttatgccagcctctctctctttccaaccttctgtctgttcccctttctttgacatgctaggaaggacatccactttggcatcacatagccctggctcaacccaggtggtgctaatggtaaagaattcacctgccaatgcagaagatgcaagagacacaggtttgatccctgggtggggaagatcccctggaggaggaaatggcactccacttcagtattcttgcctgaaaagtcccacagacagaggagcctggcaggctatagtccatggggtaacaaagagtcagacatgactgagcgactatgcatgagccctgtcttggtttcctggctttccccttttactgatgggctgtaaatattgactggacacgttacttatccctttgagcctcagtttccttgtctgcacaatggagagcacatggcctgtctctctggattgctgtgatatttaattaaaataacaaacatgtgtgtcacacatagaaggtgctcaataaactttcacttccaccccacccttcaccagtgtccacaccaatgttttcctttgcatttgtgagagtgctatgattcacatttttaaaatcacacaatgtgagctgtgccgtgtgagacagactctccctccagagaagaagcttaggggccggaaggaggaggggagggatggagggaaggaaaaggaggagagaactgcttctcctactgaagacacagagctccagccattaatctgggaattcaaagaatcccaagaaaacctgttaaaaggcaatttttagtatctcaactgaagaatgagcagatgtttgtggagggctaccattttctatgtgcgttatctcacaatcttgagaagcgattttagccactgttgtgatgagaaatccaaagctcagagatcttcagcatctctccagaggtcccaacccatgaatggagcaaagccattcaagtcctgtgttcctgccctctgctcccactgcctccctaggattattaaccatcatttcatttcaagcaaaag

SEQ ID NO: 43456 - DNA, 1823 bp, Bovine  19866880740598
  misc_feature (1)..(1): n is a, c, g, or t
ntcctattttgaaaaagtaacaaagaaagtaccaagaaaaggattctgttcccatttgttgctaaaagctaacgtgcatttacaaagaaaggttgtaaaaagaaaaatctttaaagggaaaaaaattgctgagtgctggagagtggagaaaagtgaggctggcttaacaccatttaaaatcatggaagaatactcatggaaaaagttacacttgtggattttatgggacctgggctttgttggctgcaccaccctcactcctcatttgagagaatagtttcccctaagtactttttcaacgttcacataaattggcagaagagactctttcctaactgtctctgaactttggcttgtctagtctgtgttaaatatagttaattcttgggtgtggaccgtgtcgtaacagaaaggtacagtacacagcaagtgcacagccaagttcgtgctgctggtatgtggcactttgagtgtcatcgttgccaaggggacatgctcagagcccagctgccaacctctaagcgttcccagataggaaccctaaaattccagaaagaagtagagttggaggccagagaaagggtgcggtatggagtaatggaaacggaggtatgcacgctccagtcagtgggtggcaggtcagcccctgggcctctggatccctgggtttgagtcccagctctgcctactcatcacctgtgccatcgtggtcctgttaagcatcctcttcatgcttgaatatatccatttgcaagataaggataatcgtgttctttcacagaactgtgagaattaaactcaatagtttatgtaaagtgctcactcagtgcagtccttggcatataacaaacatttgataaatattcacttttattaacctaagtaaagcacttggtattaagcacacagattctgttatttaaaggtacaagtgattttggtaagtatgacttctgattttttttaacgtagacgaccttgataacctgcactttgttgttgctgctgttgctgttcagtcgctcagtcctgtccgactctttccaatctcatggactgcagcacgttacgcttccctgtccttcactatctcccggagcttgctcaaattcatgtccactgagttggtgatgctgtgtgacatctcatcctccaccacccccttctccttttaccttcaatcctcgggaaaagctgtatactgacttgctacatcatgactcagccactgttcaccatggctctgtaattcccaaactccagaacaagacccaaaatttgaggttttctaaaaagtgttattttacattgtaatcattttgccctgggttcagctcccaattctccagaattctccaccattccaaatctatttagctctgaatataagcttgagaaatattttttttaatgagcctagggctaagtgacagcaggacagacagactctctcaaatgaggctccagccagcatctgggctctccagcagagccagtctgctctctcaggagggggaaatctaatccccagaaagcagagagaggtagagagttcaaaaagaaagtgaagtacctgctaatctgccttagccatttgcatctctgacttctcccatttgctgtcacctcctgcaaacccctgcattactgagggcacgcgtgagtgcctgattctatatctttgaacaaacaaactcatgactcaagagtaaaatttgaaatttgtcaagaaacagtgagtgctgtttgccagtggatggaactccccgtgtcagactctgcccgcgcccttagctcccgaccacaccagtcagctgagtcta

SEQ ID NO: 43457 - DNA, 1470 bp, Bovine  19866880743821
  misc_feature (1)..(1): n is a, c, g, or t
ncattctttgccattgcctttctttgggattggaatacacttaccaaatacacacaagtgccaggaactaggaagcactgagcctgggaagtaacgtgaagctgtgtcttaattctgggcatggttaagaaggcatggttaattaaggctttcaatgactgtgaagctggggaaagcccagccaggagaaggatattgaatctcattgtcttcctgccctttgaccgtctgccgaagaccattagtaaaatagcttgattccctcctccaaaaaaagaatgtatggttaagtcatgttctagaaagagcaattattaaaagtaagctatttgatctgtgcatttcaatgtctattctacctgacaggctgtgaagcaagtatatttaatcttaaaaggtgaaaaacataaaatgttcaataatatggaacccaaatacataaagggaatctgacaaaagacacaagctcagcatccaagcatatgtagtaatatgttgcatatgttgtttcttaaagatacggcgatgtatttcacaaaacaaaatggaaaatgtacactcataccgaaaaacatgacttactctaatctgtgtctccgaagacaagattcttggtgggcaaaatggggaaactgaggtagataagtatctcatgcaaaactacattcacagagaaaaccaaaaccaaggataagtgaccttatcttccacgaagctggtgtgtggtaagactaaatgcaggaaaaataaccacttttctaggcaacgtgaaggcctttagggacctagccagactaaacctgagccattcaccagatcgatgacctaaagaaaagggtggtttcacatttcctcctcacctttcgctcacagcttgccaattgttgattaaaaagtcctttgcaacatatcggccaacttcagatgctgcaacagcttcgatgacatttgtttcattaaaagtgaaaggagacacagtgatggcataatccatgtatctgcaaaagcacatttggcagaaaataaatatgtaaaaattattcaatagaaagaatataagtggagttaaaaatcccatatggttctaagttagtggtgcataaatatgtttcatattaattcttacattagctcatgtctgtttttctccctttagtttattaattgcattcctccaccaagaaccttttcaagttaagttacaataatcacctgttcagtatccgtggatctttactgcagctcattgcataagcaagttgaatcctttctttcttcctctgtgttattattgtagatttttaacaaaaaatcccattctttatcatttcccaaggcaatgccataacataaaataacatttttaattggattaggtattctgtaagatacaacatacaatgaagttatctaggttgtcacatatttagaagtctgctgctgctgctaagtcgcttccgtcgtgtccga

SEQ ID NO: 43458 - DNA, 1449 bp, Bovine  19866880768170
  misc_feature (1)..(1): n is a, c, g, or t
ntgtgggcataaaacagtgctttccacacttgcctgtacactggagtcacctggaaagctttaaacattaaggatgcctgtgtcttacacccagagattgtgactgagttgacctgggggtgtgacctggacttcggaaattttggtagatccccaggtgactcaagtgagcagacaagtttgggaactgctgatataaacacaaatggcttccaaattacaatctgaatccctttcattgcaatgccttcagcttcagccagggataattaatcatgattcagagaacttgtatttgtgccagccacatggagtggcttttcaaatatccaagtgtatttcgtgcccacccaccctcatgccaaaccactagcaaaatataatttaatccattcaaaattacagggagccctgcagaaacttcttttctagcacggggcttgcaaaatatttctaatgtaaacacagacaataggtacgttctcttctatgacaagagttgaaataaagcagatctaattaacccacccagatgctacggagtagaggccatgtgaacactggattagaagcctatctcgcagccttatcaggacggcttttcttttcgacagtgccctggtaacctgagaaatataaattttgattactgattgctgcattgttagtaagtgactatatatcatcaggagctggtcaccagtgtcagcccagacttaattatctcagctgaagagaaagtaaccccctgaaaagaactgttttccaattaaagcagcatagaatatgtgatttgtctctctggcgataaccaattcatctccccttttcatgttatttgtattgtcttctttccctcattacaagctcacagttgtgcatcttgggctccctaacaagaaacacataaatatcaagagggcagctgtcagaactttgaacagaaatcatggccaccaccaaaaacacaacagttattacagagtttccactagcaaatgctacagctaaggttaaagacagctttcagtgtatctacttattttcacaggtttctaacctcaatagaatgtgtgtatgactacttgtactcatataaagacacacacatacacacacatacacacacacacacatacttaatttttagaagctattctttaggggtcagatgttctatgctttgtcttggctattgttgcaatgataacatttttatactagtataagaaaaaaatattttgggtaacattctagacagtactctctctttaactcctcattgtcctaatcttagtttttactgctgttactttgtgatttatttctattgaatgtctgcccccttgtctttcaaggcagttctttatcccaggagaatgtataagtttgtctctgtgactgactcaaccttgcccaggccataaacaaaggcttaaaaagtctggg

SEQ ID NO: 43459 - DNA, 934 bp, Bovine  19866880788392
  misc_feature (1)..(1): n is a, c, g, or t
ncatgtgcgaagaccaattcagacaattaggacgagtccctctgtgggcaacataacaggtggtcactagtttttcgtcgctgttgttctcgtttgcttgtttttgtctggtggtttgtttttcctttggatggacaagatgaggaagaaggcaggacatacactctggagcctgatttcccagatggaacccttcgcctggcaactttaccaccttgaagctcgcctggctctggcagataaggatttgaatgctagtagctgagctgggaagtgatcccagcagtaagagagtaggagagtgaagcaaggaaacagaggccaggagccagaatagagtgagttaatacacagtttcatgggtgccacaaggactcagtccttttggagcctgtcagactccaacaagcttcacagcctccccactccagaggcgtcgaggctggggtattcagccacggttcctgagtgagagctgcttccaggggccttaactctgaagatggagctgggccatgggagtctgcagggcagtgcctgctgacgatatgtgggcagagccccggcagcatctgctccaagctcctctcttcagctgtcttccgtttcaggcataggagcagctggtggccaggagccaaagcaagcaccaggaaaacccgattccagtaagagccagcagccccaagaaaggaaatggtactaggaacatgtggtgatgttttgctaggagcgctattgtgggctctgaaaaggctcctgtgagaggatttgcaatgcttctcaaaccatccagcaaggagcttccagctcagccgtgcgatggtgttcagtgggtaacaggcatgacagggccaaggcctcctgggacctcgagctaattaaatgcaatcccatctctccttcctccactgctaaacacatcagcccgaat

SEQ ID NO: 43460 - DNA, 1803 bp, Bovine  19866880798925
  misc_feature (1)..(1): n is a, c, g, or t
ncccgaaatcggtcgtgccctccccccgcccattccctggccttcagagaaactttccagaagtgcctggtcgagtgaccccgtgcagggaaaaaaaaaaaaaaaaagaagaagaagaggaggagacgctgggcggagggtggcggcggcgagggagcgggaaagacagcggaatcctgtttcctttcccgatacccacaagtctaagactgctccctggctccccctgtaccgttccggtcgtggaaggagggaacggactacgggatcctgctatgcaccgtgtaatacggtggggagccgagaaaaaaagcagagcatctgggagacgggggagaaacacttcccatcccagcggggtcatgcagagtgggtgggcgctgtcggtctgggttggcagcggagcgccccactgccagcgaggcagcgctctacacgcagcaagtagtccggacaatcgagaaccccgggcccctgcagaggtctcgtctggttagcaagtactgagccatttctagccaggtcttcccacccttccccctcccgggacacctcctttccgaagagggaccacgtagtatttggaagagggagcagcgggcgccagcccccggcacggggttctgtgcccgagagggacgcagacgctacagatgctgtcttcgccgcccaggagggagctgcggcggggaataggacccagggcggggaagccgcgccacaccaggaggaggccactcattcgagcaaacaaagcccggaacctctggtgcccagcggccgcgggagccgggatgtcaccaagtggcagggtgcgcgggtgccagggccattacaagtttcccgcactccactgagcccagcccagaccccgcgccgacaacaaaagactctctttgccccccacccccaatctctccgtgtctgtggaacccctcctcccacctcgaacccaaacctagtgtcgagcgaaaacagcgctcttggaccgaacctcctctagccctcgagggtagaaccccttcccctgccttcgcaccaggaccgggcgcttccgagaatctcaccctttcttggcctctctgctgcccgctggcccgaaagtgaggacgaccccccagggatactgcacacacctcccagggccaggcagctatccgcgcggttggggtcccgagcggcgcctggcgtgtgcgcgacgcgagtggggaagctcataacgcggagcccggaggtctctggggcgcagggcggagaggagcggcggacagggctcgcgactgctcccccagggccgggcaacgctcggaagacagacacaagacaaaataaaacgcaagcaccacaaagccgacacggtgtgcggaccgcggccccgggacccgcaggagggagcggaaccgcccgggaggtggggcgcaccagggcgccccagccgtaccttttcggtgcatcgacgggcaggcggccggggctcggagcggactggtacagcgtgtatcccatttagtaatccattatcgaggggatctctccgggccgcgagctgcgctttccttcgcaagcctttgtcattcctacatgggtgcttgtctctgtgggggtacagtcgcagcgactactttctgggatgcaaacgcgccgtattcatttccaatgacaggcggagaaggggagatgaaaaaagaaagaaaaaaccaacaagaaaggaggaaatgttcaagaaactcttctccaaatccaaatttcacttggattccactccggcgagtcccttcgctggtgtttgcgccgattaacaag

SEQ ID NO: 43461 - DNA, 1800 bp, Bovine  19866880810541
  misc_feature (1)..(1): n is a, c, g, or t
ntacacattatattgtatccacaggtcctccttaatacacccaagtatcatcaagtatgtaaaaaataaacaggtcaggcaataaagcaaaaaataagcagtaaaaaccacatgatagccacttttgtttcctttaaaacaatgttcttaaacaactgcttgcttttggcacacagaactagagaatgtatattagaacatcggtactcagaacaatgatcttcctcggctgttatttgtctatgaagcaataagccatataatttacaagaagaaagcaactgaatccttcagaaaacacaacctggcagttaatcttcaaagtaaaataaggaggtggcagaagtgtgatagagaaaccagtcttcaagaacatcatgtaagggaatccagctgtgcttgtatggtctctagctgtttacagagacaaaaaaaaaagagagagagagttggtgaaaggagagaaactcatatgaagtgttgtttagaaatatgcaaatgaaggaaaagaatgcaactggtagctctgcattttaaatctactcacagagcaataaatacaccacttggaaaatttttctttttatgtgaagctattagaaccccagcttgtgaagtttccaaatttgtaaagaaggatttctaaatactattgcttaaaatgcaccctagtgttttattttaaatgatcactacataaaatttgtatggggtgttggaggggagggtggtagggggaacagtgcattttcctgggttacaaaaatcagcatttaaaaagaaacatgaaatatcctcaaagataaatctttatagacctggtttgttccttttcccttgggccaagaaattaaaatatttaacattatctaagggccagtgtggctagatactacacagtttattactcaatgctttacattaaaacaacaatcctattgttttaattaaaaccatatccattttcttcctgatttagtctgtcagatcttcctcatctcagcaatgcttcctactgtgaaacacgaggtattcacaagggaagtttaaggaactcaagctccatagctccacaatagggcatttaaaaataagaattcatgaaatagaggaaacattgtgaaaaacccccatataggaaattattgaaaaaaatacataccttgttatagaaatcaaacaattccttgtgactgaattccacaagaactttctgcaggctctgtaaagaaaagaaaggaaggaagggagaaagaaaaaaaaaatttagttttatacagtttacactgcatttcttttctctccagctagcctcagaatatgtcatattattctctgagtggtttaaaaaaggaaaaaaaaaaaaaaaaacaccttacctggtctactcaaccccactgttccaaggactcaaaatacacatttaataacactccactgtaacaaaaggtttcaactctacaggagtatctgttctttaagttgatttccacaaaggttaacaaaatacaggccaacaagggaacactttcattatctatttttttcaagacagagataatacatgagattatatttcatctttctcagcagtccatttgaaatctggtaaataccattacacaaagacactggcggcagcatatctgattgaactcatccagccattaaatccgcacaccagcacagctgctgcctccaagcatcaaccaacagttatgatcttaacctgctgagatggttacctttttaaatgcacagactcagcaaaagttaacaattaacacaacagcttcaaag

SEQ ID NO: 43462 - DNA, 989 bp, Bovine  19866880811176
  misc_feature (1)..(1): n is a, c, g, or t
ntgttggcccctgctgggcgatgttgcgtgaggatacaagttttatgcccatgagaaaaacagctctagccttcaagtaaagcatctgatctttttctcctcctcttctcagccattaacagagacataaaagctcccatgtcaggggaaagggaagtggcacagaccgaacttcaacacattttggagaaggatgatggcattcagtggagtacggtaataaatatcgactgtgtttaataggtgtcctattttagatctgaaaccactgtcacaaaggagcaggaaaacagctgtgaattcagaagtccttttaggaaaaaattttttttttttttaagaaaaataaaggttggttgtaaacctatgatactttggaggagagaaggaaagtctggtctttcaggtgatgaagtctttgttatgatcattttcttcctttctaccaaggctctccccaccccatcaatgcttgaggcggtgtatttaatgcacgtttcttggctgtttaagatacagtctcgtgactcgttagggctccgcagttacaggcatgatcttggcaatctatgcagaaaagactgtggcaggctcccttgatctcagaaagctgccaccatcccaaccatgtttacccacatcacaccctagctccctgccatctctgtgcttctcgattttttgtaatattgctgccctcaaacatctgctccagagataggaacagatacctgctttgttttgctgttgaggaaactgaggccctgagaagtgagatcattttggcaaatgtcgtgcagctgagaactggcaatgctgagcagccattgaggactccggacgccagccccgagctctgtccctgtgttacatggctttcggaaaggaagccaaggctcattcatttctccttggctttctgcctgatgttcattacttccatcactcgctctccctcttacaggttcccgctttcgccaggagccagg

SEQ ID NO: 43463 - DNA, 997 bp, Bovine  19866880821988
  misc_feature (1)..(1): n is a, c, g, or t
ncgctttgtatcaaagtgagtctctctacagttaattggaactttgaaaattctctgaactctgtgattaatttttgatgagagcagaaaactcaaaaaacggtagataatgtccatacactctaccttcacctacaagatgcgacgtggagaaacacaaggagtcgctgataacctcctgtgacatgttctttatttaatgcactcagctacttaattagtatgccaatatcaatctttaaaagagctgtgtgcaaagtcagcagggggtctgagtcctgatgttatttttcccacagctgaataaatgattttccctaccaccaccacactcgtaggcttgtcctcattagtatgtatgaaatgagtggaatacgcatggggagatttatactatagcatacccaacttaattaataagaaagggagccaactttgagaggaggaagtacaggttcacaggttcctgtactttggtgtgattaataatataaatccatcataagaagactcgaaatgtgccttgtgcattttctctatttattaaccaaacttcagtaacttacagatgttcaggtgctatgattctcaggtagagtttgcaatttagtcataatatatccttagcatccctagcccacatccaactcactcattcagggaatagtaagtgagtggccaccttggccactgtgctgtgtaccggggacagagaaatgaacaggaagaaccagatttttaggtaactttcaggtaagtagaagagtgcatgcatgctcagctgcatctgactctctgtgaccccatggactgcagccagccaggctcctctgtccatggagacaaggatataaaaaaatgtgatccagggaggggggctgtctgaagggagatgtatgtataaattgctaaaaaaaaaaaaaaaaaaagcctcagacaatggcactagggaaaatggagcatagagggaaggcagcggagaaagtttcacaaagga

SEQ ID NO: 43464 - DNA, 1720 bp, Bovine  19866880839381
  misc_feature (1)..(1): n is a, c, g, or t
naaattgtggaagtgatggcagaaatcctcatttgacttagaatcagtgaacacagtgctgagttacccagcgaggttattatgatgacgaagattgtctttaaagggctggaaagcattttggatgcaggaagttttaataaaataataagtcatttcagtaataagtacctgctggaaaccaagggaggagtcttgtttcttagagtcaaagctctggaacctaataacagccataatcctaaagatcatggagattagcatcagtcttcttatcgtccagtgctttgacctcacttttgtttgctcacatggctcttggggctattagacaaatattgggccctcatgactccatgggtacaagtacgtcaaagtccaagttaacaacttcctcaagacactccgctttacatcctgaaagatatatattaccaataaataccatcacatccctacaatgtagttagctggcgagctaaaattgttcctcccttttctaagacccccatttttgcaccccacattccactgtgtcctcatatcctttaggccagtagctctgaaacatcatcgagtgccactgtcacagcggagactcctctccagtcagtctggccaggggtgagggtggcatagggagggctgagcacctgcagttctgataagcttgcaggtgatgctaattctgctggtctcttggccacgcttccagaagcaaggctataggtcacctgtcaactggatcacagggcttggaagtagatgatgactgatagttcttgcctgcagcccggaagactatccagactgcctgggaagcccccatctaattacaaagatccttatcctattacacagatccttatcctaacctcttccagtgaccaccacagcacaaggggagaattaaagagctttcaaaactcacatcccgagtggacccattttccctgattccatctccctgtgtgttagccatgcccacctctttttattgctcattatcgctagtctgaacaaacacaagcttcaacttgataagcaatcagctgacttttccataaatatagattctcatgaaaaacaaaaagaaaagggaacagaatggagaggtgttatgtgttcaatttattttcagttccaaacctacttttttccttaggtttgttgcctgatttccattaagtcattctgtttgctgcctctgcatcagtttttcctgctactctataaagacattgaaaaggattttggaaaaaaaagaaactattagctttaaaaaaaaatctatcctttttattctactggcattaaagaaatggacatgtgtaccaaatatcctagtgaggtcgagccctgatatggctgaaaaacctcacattcaattttctggaaatatttgctttgatccttttccttttggtcatcccaattggacccgcagttaaggaatccaaggtgctaaaccctctaaaggtgctccatttatgtttgtttattttttcaatattcaaacatgaagttaagacttaggaattaattcctcaaacaccagccaatctaagttttaaaagcatttattttttctcattattaaactgtttgactggtattctgttaagtcatatgctgattaagaaaaggcctttgttttatctcttgatgaagcctctgtaacagaagcttttattcataacagtagtaccaagaagcaagc

SEQ ID NO: 43465 - DNA, 759 bp, Bovine  19866880885849
  misc_feature (1)..(1): n is a, c, g, or t
ntgcattttcaccttgctctcagcacatcatggccccacggttgaatgggtttctaccctgaactggacacccacaagtttgaactgtttttcaggatgaagtgtcacaactttattaaagttctgctgaagaaaaatgatgatactttgttcgtctgtggaactaatgccttcaacccttcctgcagaaactataaggtaaatgttgttctgtctgttggaaccacacagcctggaggtatttcataatttactgcgattgtgcctgcagtcacctaagagggttaattcaacaccacctgggttcctcttgcttgttccgcttaatgtagtgctccacatgactgatcctgagcaggcttctaagcttcctgtttgttcaggattgactgacgtggctttaaagagccgacccggcaaagtacgtttctgttaagaccctattctctattgttcagaatgtcagccctgtgtaccccacagaccatgtggatttcctctctctccctttctcctcttccctcccaccccaccatctcctctctgagcacaaaagcacacttatactgtgaacgatttctattttaaaagggatctcaaaagcatgccattggaaactgtagacattcctctaggtaagattttcaagaacacaggaatttaattccattcagaactcagctgacttgaccatggtctgacttatcttggccttcatgcaaaggggaaaaagattaacccttgcagcattataatcaa

SEQ ID NO: 43466 - DNA, 1411 bp, Bovine  19866880888765
  misc_feature (1)..(1): n is a, c, g, or t
ngatcttttcagaatgcaaatctgattatactgccacagacttacagcccttgaatgactttcctctgctcctcaggtaaagaccagaaaccttaacgtgacctcctaagccggcatgatctggctgtctccccagcctcagttcacaccatgctccccacactctgcaccccaatcacacagatattcttttagtttatgtaactagacctcaccaggcttttggcacttgctgtcccttctaactgaaatgttcttctcagcatcttgtttattctctacctaaacaattaccgcgttctcaggtacctcagcatatgcagtagagcagggaagatggcatgatttgtccaaaggcacagggccactaaatggaagctcctggcctcgaattcacatccccagactccaagtttgaggatgtttccagtgcctcttgcatctgggttaagtgtaaaaacttaagctctagttctctgaaatctctgtgaagttccccacagaggcggaggctcatcttccaagttgaagaatatattgggaataagacagaacttgatctgaaacagccctgacctctcctaggctcagcccttctctctcccagcatcaggcaggatgccagctctcatggagcagtgattctgtaccaagttcagcagggagttttggattaagattctcttgttgacagcaatttttcttgtgaagatgcacaaagccagccttatgaattcctttcacacctgggagaattgaaatatatttccgtttgcaaacgtatataccttggtacatatctcataaaaaacagaaatgtgatttctttgaaaataattcacagttactcttccatttcaatcatttagtgagttctaaatgtgcttttctttccagagtccatgaaaaggtgtttattttccctcgtcttttaactagctgggtgccagcattttctttccatcccttgatctgacgtaagttcaatgttttgcttctgtctgctattccagctggtaacctcaggttgttggataaaagaagctttctctcaactcaggcaatgcaccaagtcccaccccaaacacagatgcacatacacacacacaaacactgtggagtacaatagtttgacgtacaggatgctctgaagaaagaaggcagttcacttccacccacaggcctctgcagggcagttcggggcagtgaaattggctgctatccgtgcaaatcagcatcctggcaaaggaaggtctgggtcaagaggaaggaatatcctatcctgaggaaaaaagattaggtttgttctgtatgattgcttggggatagcttccaaatttacaatgcacttcagctcttaaattagcctgctatcagtctaagatgcaaaactgtatttagaagaaagaca

SEQ ID NO: 43467 - DNA, 2310 bp, Bovine  19866880919320
  misc_feature (1)..(1): n is a, c, g, or t
ntaataatgaaaataatttccctttaaaaacatatcttgaaagtcgatgtggggcatttccaatatatccataaaacaaacaagacagtttaattgtttgtttctccaagggaagaagctaaaccaggaattaatttggttcagcctgtgaaacaattcgtttgctctgcctcattctgccaattaaagaacttttcccagacacaattagcatgtaaaccaggggcagaaaaggaagaaggggcctcggcgatccggcccggatggagactgccggcggagaaccccggggacgtcttgggccagacatgagggaccgcgccggggacgcacagacgagctcgggattgaacgtcgaaatcaagggcgttaaatagtcacggcagaggattgagcggtcacggctagccgggacccttcccccgggtccggaccggattcgaaagggatgtccgcgagccagtcgccacccgggccgcagaagtgcgcagacaagaccacggccccctagccccagcccctcctgagctggcgcctcgtgcggctggggctgcgcgcgcacctacggccgcagcaccccaccccccaccaccgcggatctctggcggcttttgcctgcgaaaggtggggatagcggcccctgctggcatctttggcgaacagcagggagacggaccttttcccctcaaaccattttcctcaccttttctaaatggtttgtggacaatatttatactgttgtcacgagtgcatttattttattcttcatgagccttcattagcatgcttgtgcgtattttagttgcctgtacgaaaggcaaaaaaaatgggggaaggcggtcttattagtggccctagccccaattaggcagcagcagccccaattagggaacaggtacagtttctaatgcatttatttaagggaactcggccgaagggggactgagaccctgatcgtcccagtgctttcctcggccgaccccataactagtaaatattgatccgagaactgcttggccgccagcgcgaaccaagtgagaagccccctgggtgcgggggccaacgtgctcctttgcggtcttttcggccagcaggcagggagcgcgcaacggccgggccagggggacgtcgtgtggcctgcccagtgggcacaagccttgtaactgtgggacttttgggctactgaactttcaagcggaggaagactgtgtctgccactctcctcctgatgataacacaaaagcgccttggaagaagttgcgatttagttattccatgaagctgttggatactcattggaattgtgtgttatttctgaagtttacagaattatttctaagaacagtgtacagacgttctaagtttaaaagcagatcgtcgccaccagcatttcttgcactatagttaatttgcttacttaacatgctttattaccgtgtgttgtttgtacgttaactaatagctgagttcatatcgtcgaagtgtatttttaagtgtaccggtttctatccaactcatctgggtgcgcagagcgtccgtcacttctggaatttacctcttgatatagtaatcagaaaggctcgccgttcacttaccctcatcctttaaaacttttccatttaaaaaaatcgatgaacaaatcctttcttgtaacttgctcctgcactacgtctatttttatttatttttttgatttggcagggctcggcaatgctgtccgagatctcccccccaccccccccccgcccagcaagagcaaatgcgggggtgaggggaggcacgggctgggcttctgcgggtgtcgcccccgccgggacctccaccgaacgcgccgcgggcgggcaatagtggtggaaggaagcggcgctgaccagtcggtccaaggctccacctgcggccactgcgggtagtttctccctctctccgcctcgctcgctccggttcacacacagagaccgcagccctcctttgggtcggagaagacgccagccaaagtaggcggggttgcaggagagtccgctttgcgcaatccagtccgggacttggctccgccctggagcggcggcctctctagtgacagaggagtagtgagcggcacggggtgaggctgcagccaactccgctccccgcgcacttacccaggcgctccggccgcagcagcagcgcttctccgcggagccgaccgcccgcgatgccagcttaggagcggcggtagcgtccagcaccgccacacccgcggcgtagcgctcccggttgtgaagcggagctagagcgcgcacccctgccccagcccccaccccgcccccccac

SEQ ID NO: 43468 - DNA, 1619 bp, Bovine  19866880929968
  misc_feature (1)..(1): n is a, c, g, or t
ntgcctccctcccttccctcccttcccatatccccaagaggcagctgtgtggttgccagtagagaaatagctcagttgctcttgcagcacattttaaggcagaggagaaaagccttcactctggaatagaaatctctcagagacaacttggctccagggcaccccaagagagtgggggacactgggaggtcccaacaggaggcttccaggcttcccctggagatgtgaacacccaggaacactcactctgggaggagggcgatgaactttaagtgtgtgtggagcgcggaaggcagtgcagggatttgtgcagattttcctagactttctactgctgcaaatggcagatgcctaattaaagcatttgcaattagtttggcttgttctgtgattcctttctgcaaacaaatatgatgggagaatatattagctcttggcaatctagttctaaaaaaaactttttctcccatcattactcttttgtcctgctcagaagagagctgaagcactgtgtacacaaccttaagtatctgacttacctccttgtccaaaacagtatttttccttccatttcctaaaggaatgcaactacccatttgcctttaaaagcaggaagatttattctgaatttaatacaagttcttaatttgggtgtcttatttgtattcaatgatgataacagtcttcctaattcttgccatccttctgattcaacacacttggctggcgatgttatccacctcctcgaaatgcaaatgctatatttttttaatgatgggaaaagcagtcactagactttgaaagaacttgaggggtgtatgtttgtgtgtgtgtgtctgtgtgtgtaaataaagagttgcacttaccgccactttattataaccacttacttaaaggcacagattttttttttctttttcactgcaggggaaaaaatgtgcccaggtcgccttcaaggggagacacgtgacccatttgggactgtttctttcctttactcattcaacatttacttgagtttctatactggttcttatgaaattttaacttatttaaacttagatggttttatccaatgagtatactctgcaagtagcccctgagataacgatcttaggtgtctgttgaacattaaatgcattatgagactgtggcccatctctaaagggtaataactgcaaaacagaacacttagggaagattgccatcaaacagtgtaaataagaaaaatgaactagaatgcctaacacaaaaaaggtttaaatctgatggttattcatttctgctttcagactggcttgcaaagcacctcatttaagaaggtcctaaaaccaaaataataatagacagtagtggttactcaagagtcaaataaaagttaccatataaacaagcatgggtaagccaaattcaaatagtgcaattttttttaacagatagtttaggttaataggtggagacacacagtgttgccactatatttaaggttaggttaataattaactctgatgcctggagtagtttaatcaaagcttactataaaaactgctccatgcagactaaaagggtattaaagaaccatacaaaatacttgcaatcttgacctctgtagtcatttg

SEQ ID NO: 43469 - DNA, 692 bp, Bovine  19866880939767
  misc_feature (1)..(1): n is a, c, g, or t
ntttaggagtggtagaagtttgtccagagctgaataatttcctctcctttatttaaaacagaaagcaagaacagatgaactcctcctggtgtcatgacaaaagaaatccagttcagtcatggcccttctctcgggttgcccatccttaggcacaggcacacaatctcagggtcaccagcagattagactagaatggctctctggaagaagttatgatctatcttgtcagaggccttctggggacactttaccccttgtattaatgacacaatattctggaaatgcttctttggaaatcatctgaatatattacaaaaccctgtggtttagcaatcccaactcaactgactgaaaactcttctggttttgataattatatcagggtacagacaatagtacaaaatcttgaagcattttgttttttcccttggaacttgcagggagccatacgtttacattagagacctgtctcctgcacatttttattgggaaaaccatagctattataaatactctttcatagacagtaaaactgtttaagatttttttttccttgattttgtaatgcctcttagaaatggctgaatgcttcatacttaattcttacaaaaacaattttcccttgaacagatccttggttttctgttcgatgtgttggtgtaattttttccattaacagattgaggcatttt

SEQ ID NO: 43470 - DNA, 1514 bp, Bovine  19866880957640
  misc_feature (1)..(1): n is a, c, g, or t
ntcccttgtgtgtgcttgagctaatgaaaaccaaggggaaaaacacacaccccaccccctccccctacaaacaacagccacaaaaggatagtgaaataaaaacaactaaaaaccttttgccccagtcaacgtttttgcagcatccattgtggttggccttgtacttggagttactcattaatcacagcagggaccagcctgcctgcatctatttccatggtatttctttgtgtgcactgcacgtgtgtgcctagcacatggcttggagacttcccccaggtgcctgcccaaccttacacagcatgttctcctggcagtggacacagcagaaatgaggactgggacattagtcctttttctgctggctaatgaggacatcatcatgttgaaatgatctgagaatacaagggaagcagggagctctggaggaagaaagaggatttgccacccacaacactgggatccatgcttggcagaatggccaaagggtggttggggttggcaccactagatggaagtgtgaatcgggctgtggtaccacccggctcccctataaccatcactactgcatcctccttccctcagctggatgctaatcttccagaggactgcagtgggggtgggaggagggaggatcaaataaatatctgcatttatttcaaaagagggaaaagattatcataatgacagtttacaagtgtacacaactcagggtgtaaggcacaaatttacatgtggaaaacaggctattcacagatgtaaccccacgaaaaacctgtgtgatcaaaccattaatttatgcaaggtagcagccagcatattaattagttcacaccagtggtagattttgtttgctgtctcacatgcaaggtaaaatgagatggtgtttcacaagctggtgccttcacagaaagtaggaacccctgacaaagctatgttggcagcaatgggacatgaagtgccattctcaaagttcctctcctggttgctttaagttaggatctggaaggacttttaaacaaattattcttttgcatgttataggccagggacctgaccagaaaattaagctggtagatttaaataaatattcccctcttaagtgttttttctttagctagagatcagacagtccaaacacaaagctcagaattccagctccgacttatttactcagtgaatttattgtaaaaataaagaaactcaattattccagttaatggatttcacgttaaatagttttaactatcaagggggctttctgaagagctgttcagaggatggtatgtggaagagtcctttccttaaggaaaaaaaaaaatgtgaacaataaataaagagttacttgcgttaacggtcacgttatttcattaaaagagaggagcagaaatctatgacatagttgcccagcatggcattcatctgttataacagaaagctgtaactggtgggcatttcacagtatctgcgcatagtaaacttctgccattgttaaagtctagttagaattatca

SEQ ID NO: 43471 - DNA, 1463 bp, Bovine  19866880961552
  misc_feature (1)..(1): n is a, c, g, or t
ncaggtgggttctttaccactagcgccacctgagaagccctaattgcagcatgcagtatcatttttttagttgtgacatgtgggatctggttccctgactaggaattgaacccaggccccctgcattgggagcacagattcttaaccactgtcccaccagggcagtcccccagcttggctatttcttacttacctcttcctctattcttacttctcctcattcttctacgaaaggaagggtaagcagaatctttacccttcaacataggagacatttcttcttctgtgttccgaattaatcctgcgttctcttaagcttcttatatttctcttgtgctcttggggttcggataggaagaagaagctataacagccgggcctttcatcctttttttccactgaggcagcccgcgtcaccgcccctgaagtggcagggtatgtctccagaagggaggtcagggaatttggcttcagctctttcttttcttgctttgtggatagtaccttataacctggctggcatcaggactttgcagacgcaggaaggaagagatgtgttctttaatgatggaaaaatattagagcacaatgccctcaaaatagaacgtgtgcacctcgcctttattttggggacttttattgttgtaaccatctctcctgggaaatgctgtgggaggcttttcccctttggtgaagcagaataattgtgtaacctgaggtgtccccgagagagctgaagggatgatgtcaacacacaggttttagaaacatgactgcatattttttaatgtcaatcactgctcaagtaacatcccttgtctccaaagtccaatttctgtaaaatgaagataatcatatatgtggctgcccaccccaccaggctgctatgaggatctaatgatataatggataagattatgtctgcagactataaaatgcccccagtgtaaattgtcattttcatcagcaatcagaagacctgctacttttgggttggtgccattccacatttcatcgtttatgaagcaagcattagccttatttttgaaatttgtgcttctgcgctgacacagatcaggcctgcaaaatgttcagtgtccatatctaagaaagaagtttgttgagatcacccactttctcatcaccctgtaacgtggtcagggcaggtgtcatgatgaacaggataaaagagagcgtttggttctcagacagagttttcatcatctttctcatcctaggagacccctgggaatcctgccagagtttcttttcgtgttggttgcctggcactggtgttgtgtccaatgtcaccttcatctgtttttttgtttttttttttttaaactgaaaatcatcaatgagaaaaatgccttcaatttcatggtgtcctactttcgccttcattaacatccccttatttgaaccattattgcagctctgtcagtgggaccaataatgtggga

SEQ ID NO: 43472 - DNA, 779 bp, Bovine  19866881014881
  misc_feature (1)..(1): n is a, c, g, or t
ntgttttcctttaggattaacaggtttgatctccttgctgtttaagggactctcaaaagagacttctccagcatctctctgactcccttccaaactagctgtgaactattctccaatgtgtttgctaaatggtatttctaagttcagaatctctgaaagtcaactgcctgcttaaaccttgaaatgactcccagacgctactgtatataaccttcaaggccctatctgagctgacctcagtcaatttctcagcttcatccctatcacactccatcctcaggctacaaaaagacacaaagttaaatattcacttttctaaatgacccatgatctcacttgtcatgtggctttttcacagataactccctctgcctggagctctcacttacgtcacaactcagtttcaatgtctttttctctgtgaagcattccttgatcccaaagtctgtttggttaaacccctgggacagggaaagctggcatgctgcagttcaggggtcgcaaaaagtcagatatgacttagaaactaaataacaacaactcacaccccagatccccagaccgtctccctttagaacatcaggattctgtttgctctttgcttgtttgtttctcttgttagatcgaacctcctggagcacaggaaccctatctggttaaaaagaacaaaaaagagcaaaagaaatagtacatgaatgattcagcaggaagtacagctgatgtgctgtagggtttctaaggaggagaacacggaaggaatcgtggagaaatgacattta

SEQ ID NO: 43473 - DNA, 1330 bp, Bovine  19866881030807
  misc_feature (1)..(1): n is a, c, g, or t
ntcttgcctggagaatccctggacagaggagcctgatggacttaagtctatggggtcacaaaagagtcagataggacttagcgactaaaaaacaggatcagttcagttcagtcgctcagtcctgtcctactctttgcgaccccatggactgcagcacgccaggcttccgtgtctaccatcaactcccagaacttgctcaaactcatgtccattgagtcagcgatgccatccaatcctctcattctctgttgtcccctcccctcctgccaggaggagaaacaacagggtacactatcattttatggtagcccgtgttctgagttcttatccagtgacacagaaacagacttttgacatgtatattatccatcatcacttggcatccggcttgtatgtaatattggaacaaatgttcttataactgaatgcttgacctgattcagtgaaggagttggacgatccactataaatactcttaaggataacatttgtaaagaaacagatgctgtgtactgggtttgagctttggaaattacgttatttttgagaagagggaaggtctctctgtccataaatctggtctaatatccaacatgaatcaggaaatctttgttgaacacctactgtgtgctgctgggggaatagagcagcaaataaagtagacaaattttctacttcctggaacttcctctctgcatcggcttcttcaggacaggtgtattcttcgtcatattttctcagtcgcatttctcagggacacacatttctactcattccaactgccattcatccgtttgcaagatcccgatactacctaacatgaactgtgtctgactgtgtctaagtgagaagttcacttacaccaatggactgaccatctatttgttctttcagctgcagcagttttgcagtaacatgttggaggagcaccagagactcacagttcaggccaaattacagacaataaagaacgagaatctgaaaaataaagagcgaagtgccaggatagcggcgtggctgcggaagaacacataatttactggtgactttcagcctttcgcttgcgtattataatgtgctcacagttttgtcctccaatgttctctgagtctggaaaaccacacgttttgtttgcatttcagtcacctttgctgctcagagtcctgtccctcccatgttgtcacatttggctcagcgactgttggggatttggccaaccatgctgtatttctggggaagattttgcttcatgtcaggctacgaaccacataatttactttaaatgccttggaaaaacaaatttaccttgcagaatttcgctcattctgtt

SEQ ID NO: 43474 - DNA, 981 bp, Bovine  19866881038133
  misc_feature (1)..(1): n is a, c, g, or t
nagaagggaatcatcttgaagttcttggccaggacaggaaacagtggtttcctaaatgacagccttttcctggaggagatgagcgtttacaatcctgaaaagtgcgtggaatgtttggttcttttcctagtacttatttgtcacgttattatcttttccattcagagaaagcatggtagacttagattttatgcattttaggtgacttttagcattatttgtaaaaatcctttcatacattaaaagcattatttcctccttgctgctaatgtgtgcgtttatacaggtaaacacatatattgtgtatttatgtgtatgtatgtgggtgcacacataaggatccattgcttcttcagttagatcagatgaagagacctaatctcataggctgggggcgggctgggggcggggaggtggcaggtggtggcaggaagaaaagaactaacccaagagagactatgaatgccttagactatcctgccttaaaaatgtaggtgcagctatgacggagtagaagacaagaggatcatgggcatgcagctggacaaagccagcagcttcctgtatgttgcattctccacttgtgtgatcaaggttccccttggccggtgtgagcggcatggcaagtgtaaaaagtacgtatttgcctcattgatcatcggatgttcacggtgcttagggaagagtcctaggtaagctcacagtcattctcttcctgcagaacctgtattgcttccagagacccctactgtgggtgggtaaaggaagcaggtgcgtgtgcccatctgtcgcccagcagcaggtaaggagcccgaggcatgggagagtttaaagtggcctaaacgtaggcttgattgtgctcacacacagcactgccgctcggccttctgtgcacatacctcatcattgtgcctgccggccgttctccttcctttccccatttcatagaataccccaacatcatacgggcagacttccaat

SEQ ID NO: 43475 - DNA, 1990 bp, Bovine  19866881080010
  misc_feature (1)..(1): n is a, c, g, or t
natagcactatagaaataattatgttttgggaatgtataaaaagtctctccagattttggtaacttgaaactgaattcattgactatctggtttattcttcttctaagtcacttcagtcgtgtccgactctgtgcgaccccatagatggcagcccaccaggctccctcgtccctgggattctccaagcaagaacactggagtgggttgccatttccttctccagtgcatgaaagtaaaaagtgaaagtgaagtcgctcagttgtgtccaacccctagcgaccccatggactgaagcctaccaggctcctccgtccatcggattttccaagcaagagtactggagtggggtgccattgccttctccgggttattacaaacaggataaaatattggaacattaattgccgggtgggtctaactttacctacctttgccttcttacgagaggaagactaaagcataagttttccaatcaggaaatgtaaaattacttggttcttggtttttgccagagagtaagatttctaagggttaagattataattggtcataattctaattagtgtaaccaagtttctttattgattacattgtaatcagaagcttcagttcagttcagatcagtccctcagtcgtatccgactctttgcgaccccatgaaccgcagcacgccaggcctccctgtccatcaccaactcccggagttcactagattccatatatacgcattaatatacaatatttttttctgacttacttctttctgtataataagctctaggttcatccgcctcatcagaactgagtcaaatgcattcctcgccatacatctttatgcacttgtttatgtcctcagagaaaattcctacaaagagaattaccatttcaaggatatatacatttaaaattttaaattttgttacatactgccaaactgcattccataaaggtttaccaattcacagtcccagtttataaaatggccttatgcattggcatcctttttagcactgagttttatcaatattttccttctttgatgctcagagcattattatttgcatttcttttcaaatcgtgctattgaactcttactgtctactgagctatctggattcccttttgctgacttcttctattcagccttggctttgtcctgctttttctcttcatcagtttgtcctatggaaaattcaactttttggttaggtctcctttcagaatggaaagcaatatttcaggatgcagggttattcagagtctctcctaaactgcattttctgattaggatgccgctacctgagtgactaagatgctaatttcagagctctttatgctgtggaatctgctcacttcacttcctttctcttctttctggtcaatgagcctgagtgattggcagtatctcagcagttttttcccaagcccatatactcttctatttacagtgtgcaaagctttagagagtgtacatttaaagctgttacaacattaaaggtgactggtgcagtccatctgttgggttgcaccctgctggcctgcaagccctgtgcctgccaagcctcaagacccaagaaagagcctggagtcagcaacagagacatcaatggtttaacggatgaggggagctcacatgtctgaaacaacgccctagaacaacaccccaccgtgtgcagcaaatggtaggcaggatatggcagtggtcttgctacaggggcagagggaagttaccaaccatagggggatgtcaggttggctcatctgttaccagggaaaccagcagaggagtatgcacttcaccacccctttaacaaactatcagatagagtggagatggctgtgatcaaagattagaaacagtcactagctagggccagtgcgtagacatttcctgattaggctcagtgatttagagggaaggtcagccatgtgagtaggtgtaagtgaagcagggactggtcagcagaggatgtacagagagcaagagaa

SEQ ID NO: 43476 - DNA, 2256 bp, Bovine  19866881087137
  misc_feature (1)..(1): n is a, c, g, or t
nttaggaatgatgaaagaaaaatgacatccaaaagaacttaactgactggccagtgctccatagctacgacagactgagccaccagcgagcaaaactgtccatgttctttacacaatgtgtgtgtgttagccactcagtcatgtccgactctttgcgaccccatagactgtaacccgtcaggctcctctgctcatggatttctccaggcaaaaatactggagtgggtagccatttctttctccaggagatcttcctcacccagggatggaacgtcggtctcccacattgcaggcagattctttactgtttgagccaccagggaagcccactttacatttaatgttaacctgcaaatagaccaagctattacatacccatggacattaactttgaaataagtttaaaaattattaatttgggtgttaagaatgtacagtgtgttttgatatagaggtatccttgtaaatgacagactggaagatcagtttgcaattaatgaaaccaaaatttcatataaatgcttaatcgctgctgcattaattgttggtgattttgcttttctttactttcttggattaggtgtttgggtttgttgtgggagaaggaaagcaaaaaactgcaatttataactccaggtattagccagggactatctgattgcaagaaacaaaaaacatttaaattagtttcaggcaagtaggaggaacaagaggaatgaggctcagatgggaagcgagcagaaacagacattcttaccctccaacactgagggggtcactgctagcctttgctctgctctgtgaggttgcttctttcttctctctctcagggtaattttctctgcctctccatactcaggggaaaaaatgccctactttatatcatgtcccagttcaaatacatccttaaaaaaagcaacctctgaataggttagtaaatactctccggaatatctggttcactggaagcttgtatttattttctgctccagcagcagaaagggactctccaaattctcagagcatcaatgtgtgtcttagtctgctcaggctgttataatgaaaagctacagactgcctgccttaaacaacaaacatttatgtctcacagtcttgaaagctgggaagtccaagattaaggtgttgatagatttgaaagatggtagacatctgccttctgtgacatccatgtcttcctatggacgagagagagatctggcatctttatcttcccgtaaagacactaaatcccatcttggagatccaccctcatgacctcatataaatctcataactttcccaaagtctcacctccaaataccctcacataaggggtcaggacatcaacctgtggatttgaggatgagacaaatattcagtccatgacaacttgtgccaccatcaccttggctcttaggcacacacacccccaccaccatcaccagtgtccccacatttcctagccctctttctgatctttatcctgctgctagcactatttctagaagtgaaatagatcttcattaaccaatattaaccaatagatcttcattaaccaatattaaccaaaaaaagcttcaggaagagttgttggccaaagacctttggagaagagtagtctgggtcctgcaagttctaacagcatctgcacatctcctggaggggtccctgatggatgaatctccaaaagcagcattctttgggcagacttggggatacccattttggattctatttcaggtacaatcatcagacacagtgccatggaaaaacttctttcttctaaacatcagttaaaaagcctacaggatctgagtaaatgacccctaaattctatagttctgtgacatggacactataccagtttggccattcctccatttattatcatttaaagtcaacataaatatacttgatgcttaagctacattttctcccatattccaagttactttacctatttctgaacttatgctgtacacttatttttagttcttcaaaaaccacgatcagtcacaaagttgtgttgcttgtatgagtagttcgcctctggttctagcactccaggggattcatttattcattcattctttcaaccactgcttagtgagcacttctgccaggcataaggaaaagtgccagacataccaggccctcacaacaagctgaacctcaagaaaactgatcaccacaaaacagcagcaaagaaatactagcagcttctatgaaggctaacaatatgtcaggctaaaatat

SEQ ID NO: 43477 - DNA, 1010 bp, Bovine  19866881088344
  misc_feature (1)..(1): n is a, c, g, or t
ntcatgaaagctatgaataattttagtgaattggggccctgaaagtagcaaaggatctggtccatgatgtttaggaatgaaaactcggaaactaccacaggatgagtggctcgaagaataagaaaacaaagcaaacccataaactgaccatatactgtgttgtaagacatttcatgatctggtagaggagttgaaatgtctataaaaaataatgagaatttaaaagttaattgaaaaagaaacataagattcggaaatactcaagagggttagtgaaataggatttcacaaatagatttccattgctattaaattatcagtaacatcttccttaccattcagtgccacgaaggaatctgaaagacaaaagggaggagtgagttacttaacgtttaacactctgctcaatgtgacttttgtaaccagtgggaatgagctgatacagagctgcgctaacacacaaggcctagactaagaaagtgctttttactttctgctggttacggaagatgcttcatatttggttcagtttcatatccctgtgtctctttaccaagtgggcttcctcaaagtcatgcctttgttgccaagaggcagagaaaaagcaagcgtgagtgcagagaagggtaactgcgattatacataagccgtgctccatcaggagggacttgtacatgggtaagatgagtcacttctggaccacacttacgaagcaattgttctttatcgtctctctcatttcatcctcccaactgtcctgtgaggaactgtccgatatcacaatgttctgacctcagcaggggtttaagttaggaaatgaacaaaaataaaaaaaatcacacatagagacaacatcctgtttgtgtgtgtgcacgcatgtatatatgtgctgtgtatctgggtcatgtcactgggtcactcagcctgctcctcagcctctgatactggctctttatggtttcctcatttcccctgcaacttctgtgcgagagtcaccgtgcaccagatgt

SEQ ID NO: 43478 - DNA, 740 bp, Bovine  19866881103744
  misc_feature (1)..(1): n is a, c, g, or t
nctgcatgctctcggtgtgagatgaaagggcagaaagccaggaagaaggcaaggtctggaggaggtaagccaccagtaagccaccaggagggatctgaagccgggagccctctgagcaccagctagtcacacggcaccatgcagagaaggagcagacaggcctctgcgtgtttaggaacgtgtaggacacaatgatgggaagccagcagggctgactccaaaacagcaaaaacaacaaaatgccaaccggtccttggaggcccatctaggtatcttttgatctcaacctagagcacccataataggaaatcaaacacattgtaagggaagatacctcacctgtttttggaagagggtaactgatattaaataaatcctccagaaaagagaagatgggacctgtgatgttcaaagcaaaatctgcatttccatctgcgatggcatctttccgggcccagatgcgtatctagacagaaacaattaagcagtgattaggaaaagcaatatgtacagtgattttggaaagtggcagcctgcttgcttggatttcctgatgctctggagccaaaggttatcttttcagaagaagttgcatgataaaatgtttacatgtgtccatgcaatgagaaaagccctggaggctattcattaagttgggaacagagattctccagaaagtgtgttatttcaatcttttgcaataatgtgtaaaacttttataattcaaaaataatcctggt

SEQ ID NO: 43479 - DNA, 817 bp, Bovine  19866881152469
  misc_feature (1)..(1): n is a, c, g, or t
ncagcacttatggggcttgagcttttgaccctggactcatttgttctgcattctaaccgctggccccagaaccttcttgccttttaggagtttgctcggagtagtttttaaaattcaagtttccatcaggaggaataagcatgcacattaactaactcacatttctgcccggtcccagtgcagtgatgactattgttgaagatcctgtgcttgaagtcagatgacctgagttccgggctcattaccacggacaagccccttaactcttttgaaggtcaatattttaaataaaaactgtaaagagtaaaaatgcatgctttctatctagtagaagtatagggagaataatacaaaatcatgagtgtgattgtatttggtaaaatataaaatgcactgtggtttgacaagtttgatgctaactcccttctcatctccagagaccccaggcctagcagagaccctgcttcattgtcgtttatagaacaaaagaaagattataccttgtggatatcattttaatgttaaccacatgatgaaattaaataaggtcctcagacttactgaaaataatctaggtagtgtatggatggcaaatttatgaatcagatgccaaccgtttcaactagtgattgttttcaatgtgaccattaaattaggcaaggtcataggagtatcactctgccaggcgttattttttttttaagtaagggcatttttttgctcaggtaagttttaaatagttcacatcagtgaaagcattgggacctccctggtggttccgtggttaagattccttgctgccagtgtggggggtggg

SEQ ID NO: 43480 - DNA, 1375 bp, Bovine  19866881162651
  misc_feature (1)..(1): n is a, c, g, or t
nctatgggtaaaggggtcttggtgctagagactatatgccgatctgaagaaaatggcaggggtggccgttattcaactgtaccttcctgccacttggctaagaagggcctgaattgacttacccacatgttcaaaagacaaaagaaatccaagttttcataagcaatctgcctttttaaaagagaattagttttcctttttctttttctgaacatactcagatgaccaaacaggcaggctagtaataacctctagcatacaggaacaagcctgggctgggcacaaggagatgggagtcaagtggcaaccacactgctcatatctggggcccatgggagcctctcagcttctgggcctctctttctcatctccacaatctgagggtcagacgtgtttctgaagtaggtgcaaaggccacctgagctctgcttgcacctgtgtttttgttcatgcttgctgatgccatactatttagcaggtaacctgagaaagaattccagagtcttctcctagaacttaacccacaaaggcaagactcctctggcaaaacaaaaccaaaactgaggtcattctctgtagagttcatgacttagcagataattctaggggacaggggaatatgttttcctggtgaatacctcagaaatcccttttccaaggagaaagatgcttatttctctagcattccaggaggatatgggaatctctttattgtcatggttctgagtcaagcagacatgactgattcttctgactctcctagctacagaatcttggtcaagtgacttaatctctctcaacatcagcttccccatctgaaactaaaagacttaaccttagagagtatttgagtattatttgcaccaggcataaaaattgctcaaaaaattaagtgctttgtaaatattagttgctgttattactgtcagttgttgtttctaatttagtcctattatttcatttagatggatactttggagcctgtgggtgatgaatttagcggaatggccagatgcccttacgatgccaaacatgccaatatcgcactgtttgcaggtaaatgacctgatttcctgatttctcctcattgcatttgttttcatgggctcagcctgtggctctggaggatttgcagagtcacagttgtactttgattttctggtgactactgtaactaagaaagccttttccatttgaaatcatatggaaattgtacttttgtttttttattgctattcagtcactcagttgtctccaactctttgcaaacccgtggactgcaacatgccaggcttccctgtcctttactatctccctgggagtttgctcaaactcgtgtccattgagtcaggggatgccatccaaccatctcatc

SEQ ID NO: 43481 - DNA, 1124 bp, Bovine  19866881164834
  misc_feature (1)..(1): n is a, c, g, or t
nacaatacttgctcatgctcacacaccggtgactgatacaggtcaccgtatgatgtttgatgactggatcattagtcatcaacctccctcatcatatttgctaatgttagaatttctatttgacatacgtaatgaaacttttccctgtttcatcaataatacaccgagcggaaagttttcttctgtggccttccgatacccttcatttgcattagctggttttgcttagcacaacttttcaccaatagtacaacttacttaagatttcaaccagtagcataatagttgagaatataaagctatacactcctgtgtgtacacgtatgtgctttgcaagtaaattaagatccctaactactatttcccattaagatatatgtagctcaccaatctcaaagctactattctcaaattgcacacagatctctcagtgaatcgttaactattaggatcttattttatgaatctggaaacctatccattaatatgaatcatttaattcaattgtcactgttcagaaagtacttacagagctaaatagtcctcctgcaaggctgtcacattttcacggatcatagttgagtaagtattccatattgagataagtctctttaacagatacttctataaacaataaagagaatagtagttagttctgttcacaacactcaatttgcactgcctttcccttgtctgaaaagacattaacagagaggtgacaggtatttcttcagaaataaacttcatttgttactaaatatttgatgattttttttaacattttaggttcactttcttcataagaaagcgatatgtaaacaacacaatgtgtgtaagcacagtgcctggcacatagtaggagcttaatcagtatcacccactcttattacttactatcaccccagaatttctagttgtctttaaaatagagggaaaaaagggggaaaatataagacaaactttctaccttgaaactctcaaactttcatgcttagtgtgtgtgtgtatatatatacacacatacacacacacacacatatatatgtgtgtggggtatatatatatatatatatatgaaaacaaggaacactgatttatgccttggacaaatgtaaaccctggat

SEQ ID NO: 43482 - DNA, 789 bp, Bovine  19866881166879
  misc_feature (1)..(1): n is a, c, g, or t
ngggcttaatttgatgagtagagtgatatatatggtagacatggaaacgatcccagtttccagaagctcaagttgtgagaatactcaagctccccttaatccaaggacatcctgagagcagccacttgaatttatgcttggctatcagctgggcccagagcagctcattttaaactacaattagtagcaaattatagtcagactgactttcaaaagagctggttacattctgctaggaaacaatttaaaggatcaggttggtagtgcctctaaatcaggcaggctcatctggctcccgagactggggcctcccaaccctgcaaagatggattcttgtttagcagaaattcaggtttgggctttggtattctcatcagtgttcactgacaatagctggatctgcctggagagggtgcagagaactcagtggcaaacatgcagaatggtaaggatgtgtgttccttctgcaaatggggagaactgccagagactgtggtacccagcttcttcaatcttgtggtgtgacctctctgtaagccttgttaggaagtcaagaagcccccagaggtcacaccgaggagggaaactcctctgtcaactgttctctcattcagtacacactaaagaaaggccagacagcacagggtaaaatcatgccactgggctccctacaaagtcacaccattcccagtgtgatgactggaatgctatcagctgattagtcccttcagagctggaatgcggggtgtgcagagtggggtaccgttttcaagggtcaagtaacttcct

SEQ ID NO: 43483 - DNA, 846 bp, Bovine  19866881172896
  misc_feature (1)..(1): n is a, c, g, or t
ntgtcttatctattcattgtggggatctggggaatgtcttttggattctcacgtcacttaccaccttcattgcttcctcgctaagtcaaatttgcatcaccctttgcctggcctgtcacattagcttctagctgttagttctttagaattctattctgtcttctgcagcacaaattgaaacaaaattttaaggcatcaatttcatgatgttaccctgattgtttaaataccttcccaccaaatgtaaattctttatcctcatagtcaagcctctccacacttttgattacctattagcccccatctctcagtacatacaaaagaaattccttgccttggttaagttggtctgctgtgaaccccctctttgtcctaactgccttcctctatctttctacttattccaatcctgtccttccttcattcttttttcaagttcctcctccagaaagcctcccctgtccctcccatcacatacctatatttttcttctttgctactttattgtattcattgaccttgaatctatcaaattgaaatggagagcctgtcaacattgcttgggttccaccttatcaacgagatgggacctttgccctatagcttctcaatttcatataccttcttgaaatcaggcactgaatcatgtaacaaacatggaaagtgtgcagatcatttagcaaggaaaggcttttttgaatctttggttgtttttttaaaaaccaaacagaaacgattatatcgaaattgaaacagcacttgatttaaccaagtaccttgctgaagaagatgaaatcatagtgtggcatgcagttttgatgaacctagtaaccagggatcttgttt

SEQ ID NO: 43484 - DNA, 932 bp, Bovine  19866881178207
  misc_feature (1)..(1): n is a, c, g, or t
natggccgagacccagactctttgctgagtgactgagttagtagagttgtgtcctctctttcccaggactcccaaggctccacgtcagcttcttcctgtgcccctaccagccatttatacttcaaagaatctcttcttgaaaggaactctaagacccttttaaaatctgtgttctttgtccttagagctgaaattatccttttgggtatgctttcagaactcatacttttttttttaactagttaataactcgatctgtgtgtaaattatttacagatgaatgcacttccagccaaattgccttatttaaatgtatcattactggacacttcaatagcttctccatttgaacaccgaattttacttcatttcaaatatatttgcataagcagcttatatcattccttactcatccattttatggtattaaagtaataattttacccgtcttcaaaacaatatgcattagattattactccctcgagaatttatatgtgaactgggggtatttttttctctttatgtgacctttttttaatgattattacaaaattgaaatcgtattctttttcatgctatctaggactttttgcctgtttttaaagcaggcaagtcttttaaatgcctggcttgcaagtgttagctagcaaagctgccttgttgattggcattgctgttcagtgacactctctgtctttccctgtaagtatttccaggaggaacccattacatgactctcatgctgctgggagtttccctatcttcctttgtcgtgtctgcctccactgtctgtttggcttccatagcagatgttattcagattggattcttcccagccacagtgctggtgggaattttagcctcttttctctctctttctctctggcagtaaagaccctgaccctttagaaatgttaacctcactgattat

SEQ ID NO: 43485 - DNA, 764 bp, Bovine  19866881199245
  misc_feature (1)..(1): n is a, c, g, or t
nctagatgggagcggctggtcccctgaatgctaagaataatgctggcaagtgaacaaagatgtgactaaaaattcgccttagggtagggggcagactgacgtggtaatggtgggagtagagaaggggctgaattggagatggcactttccctggtggtatataaaaacggagtaaggctataaaatgactgtagcccttgttcatgaggaacctaatgatcccactaaatgaaaaggttaccgctgagatagtcatcctcatgagacataaatgtttaataaaaagggcccttcctttagaatatcctaacaatgttttccccatataatttgtgtacttcattatgaagtattaatgggattttttactcaattaaatactgtatgcaaatgccatcaaaatgtaattagcggtaaattaaaagtggccatgaaatggaaattggtgtgagaatcacctatcccctatggattaataagagccaccatttgttgagtgttgactatgtaccaggcagtatgccaaggacttaggagtcatcatttttatggcatttagtcctcccatcatgcacataaaggtagatactaggtttccccaatttaggaaagaaattgatgcacagagaaatctaagtaacctatcccaaaagatttggccagtgatagagtagatccagtccaggttcctctgacttaaagtcaggcactgaaccaccacactgctggattccctgcagccctgtcatggtgttaggcaggca

SEQ ID NO: 43486 - DNA, 1778 bp, Bovine  19866881201704
  misc_feature (1)..(1): n is a, c, g, or t
ntgcccttggtgttgaagggtaggggggaaactcacccagggaaaatacgatcagacactgactaatttccaaatgtgacacttgtcaaatatttcacgatttatcttcatgaacttttaaagggtagaaactgagaggcaaaaaaccagcaggaaattcagctaaaactcacacctttttaggctgtggagctccccaaacagtggggtgtcttgcatccaaatatgttgtaataccaagtaactgcgctaatgagaatttcttccttaaatttgcatttccttgttatagcaaccaattttctttcaactttggttttgcatagtgttctactaagcatcatttttaaccacctacatatgatggcacagaaatgtacacctgtgaataaaatgggcttaatttcacttattgacttggtgatgtcagtggggtgtaacacaggctaggcccccccaatacagatattaggtagattgtttcatagcagtgggcatttcttgggccccttctggcaactgtatttatgggggctccccaataaattcatacttgtgataggtagtgatctacaattgactgtcaatttacaatttaaattaccatctaagtttaagaggatcatagaagaaggctagagcaatccatttgtttcatttattgtttaattgggaaaactgcaaaaattttaaagtatatacattgcttcttcttaactttgcttttagctcccaaatagtctttcttgtctgaagatgcttaactatccgagtctcttggaccccatttgctctttcactgggaaagactcttttagtgcatgacatttgagttcaggtttttggttgtttaacaaatcaagcagggtctgacctttgagaaaaatagtctcagacagctttctttggctcattttgttatgtaaatagtgtctttaaaaacctttctgcatttcttgggctttgagatagctaccttgaaacaggtggcttccctcctctgcttgtgcaaaatcagaaaccccatgtccaaagttagaaacagatcagagattaacttgaaagcaaagtcaagaagataagacgtgaaaagttatttttggaagatgctttccaaacttaaagctttctgattatatcataagaaaagggcaaagcagcatctgtggaaatgattaaatcagctttgtacagatggtcattgtgaagacttgaacacaccagacctgtcagtcaggctgagggtagtgtaacactagagatcttgctcccacttactgctgggtgaccattaagcaagtgacaatgtctctgggcctcagttttttccatctgtaatgtggggtaaacacccttaattttaatgccttactgcgtagttataagaatcagttgaaataatgattaagaaagagcttaagtacagcagtttgctggacacatctaaagatcagaggaagccaccaaagagagatggggggttagtagctcacggagggcttaagagtgacagtcacagctttgccattagattctatttgctatgggtctcccagaggaggggcagacgtgttcttcccagctccaatccttgggctttgcaaatgttgccaaaaggttgatatgttgaggcaacatcagggaacatgtacctctgtttcaggattgcctgtaggccctgaatttggaaataagtgaaacaacaacagtgggaaatgttgagcaaaacacagtgattatattaatagttgggcttcccaggtggcactagtggtaaa

SEQ ID NO: 43487 - DNA, 1057 bp, Bovine  19866881271263
  misc_feature (1)..(1): n is a, c, g, or t
nggcagcccaccggctcccccgtcctgggagtttccggcaagagtactggagtaggttgccatttccttctccgaaacctgaattgagagccgactaaaatatcaatgcctctcaaaaggacaccaatgtttctataaatcaaattatcaatccctgctttatctcttttacaattaagattttcctttaatttggttttgattgactgagcacacatttaaacaattttctgaaatggtgttaggggcagattcaccagaagatgacacaagttacaatcaggctctatctcatcaagtgagcagcagcattaaacaccacacacctcaagaatgttttggacttccctgtgtttctcgaaagggttgacacaaggaaccagctgtatataactcacacccttccttggcctgactgcccagcgcagctggtggctgccaccaaaggcctggctctgaatgctgcctcagccacatcgcaactaccagacactggccatgttttcactggtctctttgcttcatctgttgaatggggataataacactactcagatattagaattatcataaagacaaaatgggctagtacccacaaagctcttagaaaagtctccagcaagaccagtgttctacaacagaggaagatttcagacctgctgctttcatgatgccccactcaattttctcctttttaaactgtgtgttgtcagattcacttctcttttccatgatcaggacttccttgtttactttcaaaaatagtctttgtcccaaatgtattgtcgaggcaagctgggaaatgtctttgctgccagcctgaggaggaaagcacccttgatccccacacgcagctagatcccaggggatgtgtgatccagccccggacccttccatagtcaccccagctccaggtcccagcacccctgctccctcatgacactgtgagtatcttgccatgtttactgtccaaggacattttcatgagaggcactttgctaggagatttcaggtatccatcccagatttaaaaaaactaaggctcaggatctctggg

SEQ ID NO: 43488 - DNA, 1872 bp, Bovine  19866881290591
  misc_feature (1)..(1): n is a, c, g, or t
nacaggcctgtgaatatggtggcaaatcgcaatacagctggccatccggtggccttgctgtgagccattgccagaccagccttcggaagtggcagctatttacaagaagaaggtggaatattcagccagagcaagaacaaggggcagcacagtttcttacaaaggggtcgggaggcagggcgctttaccttgctcggaattattcaagactcaatagctttgcatagcaacggaaggcttattgacaggagttacaggctccggacagccacacacaaagtcattaaccccctgcgggaaagtgtgaaattatcctgtattgagggctggcttcacttgtgtggccctattgaggccattgccccctccccctcccacccagccagttgagaaccagtctcccccttctttctgaataattagtgaattttgggtcccatatcaccaaaacaattgagatcccagcctttttttccttcctcagggggccatcattcccctccccacagaattgtgtgtttagctaatgcctctgcaccctgcaggaaatcctcccaccttgactttaggaggaaatgcttgctcctcctcttctctccactcgcccctccctgccccccatcatccttcctgcaaggaactcttgcatttggaagggttgatttttatttagtacaaagaaatgaggggagaatttctcaggtgaattgtttatcaccatatgggccattctaacggtggcactttcaacaagtcacttagcctctgagccaatttctatggattcaataggaaaaaaaaaaaaaaattcctaggggaaggtatcaagggaacaaccaaaagactctcccagctggtgagctgggtaaacattcagtgtaacagaaaaagcagagacttagcaatcatacgaatatgggaacctggatgtaggtagtgctagctcgcatgctttttttaacagaacagtctcaagcaattaactcatttgtctttttgagccctagtctccttgtgaaatggagtggggaatgcctacttagtagaagaaagtggaagcaatctaaggactacaaagagggaagcagtcagataaactgtgggacatctgcagtagaaagtactacataaactctaaaaatagagacatatatattgatgcggaaagatgtctataaataataagggataaaagcaagatggagggcattgtgtatgttagtgttccttttctgtaaataagtataaagcagttttacctgaggacatgtgcatcctagtatgtacataacaaaaagggagtgataagaatcataagaaacagttaaaagttagtttgaaggagaggggtgaaaagttaggtgtcaggaggaaggtttatactacttgtatttttttcctctgttaagttttccggccagggccatgtattactattatttttaaaacaccatcagagtttatttgcatagtaagattatgaatcttccttcctttccatgtttttctggattaaaaaatgaaaacttctaaaactgatgtgaaacttaagttacacatattaagagcctgaatcacagacagagcttggtttatgttagagcaaataaaacaagaggaaagatctgaaagttctctttatcaacctttttaataaatggatactatttttaaaataataatgattactgtgtattcagttcagttcagtcgctcagtcgtgttcgactctgcgaccccatgaattgcagcatgccaggcctccctgtccatcaccaactcccggagttcactcagactcacgtccttcgagtcagtgatgccatccagccatctcatcctctgtcgtccccttctccttctgcccccagt

SEQ ID NO: 43489 - DNA, 1758 bp, Bovine  19866881306508
  misc_feature (1)..(1): n is a, c, g, or t
ngcatctgacactaaaatatacaaagacagggttttttcagagtcaacaatactattcaggatgtggtttcagatgctgcctgtaacattctccacagagactgaaaggatccatttctttctttttaaacatagattgtgtgactttatttatgtctaaggtcactatagaattacctgtagaattacataaccaggagtgaaaatctcaactaaggggtcaagggggtaatggaaatcattgaactgggccagtacaggtgttgggggtcaggtggggtgggtggtgtttgtggctgagagcataatgcttgaaggaaactgtcatttaggtcagtatgtcggatattctgatttttctaaagaaaggtaggaaccttctaatttttcaatattggggaactatttcaaaattctgaaagatcctggggtggccacacagaacatgtctggggatggcatgtcgctctaaacctgctgagaagaaaaaaatatatacatttacattaaaagggggaaaaaagcattctcaattatccacatttttcagaatgtcatttcgtgattgtgaaatagtcacacataatggcctcacgatggctcagggcaaaagaaccaagactctgagtcactggtttgggagaaattttgcaaaagggctcctatgcatgagggaggagggtgcagtgagtgataagacacaggttccttctgcaaaataccatcacgagtgtatccaccatgagaaagatagaacacagaggcccctttctctaaaatttatcttcaaggccatttgattttatggagtggaataaaactgacttgcaaaaaaaagagaaaagaataaaaatcccttctttgctctttggcagggtgaagtagagaagtaaagtctccccgctgaactactatgaggtcagaagccttgctgctatatttcacactgctacactgtgctggggctgctttcccagaagattctgagccaatcagtatttcgcatggcaactgtaagtatccacctctctctcactctgtccatgggcacttgtgcctgtttcaaccggcaaaagacacacattaaacatttcatagaagaggagacttgttagtcacttaaacttgtgtggatggcatgcatgtgtgcgtgctaagttgcttcagtcgtgtccaactctttgcgaccccatggactgtagccctccaggctcctctgtccatgagattctccaggcaacagtactggagtgggttgccatgccctcctccaaggggatcttcccccacccagggagtgccacctgggacggtggataattcaagtctagtcaaactggtgggatgactgttctatgactccaataaacgaggttgcggggacatacttgtgtgaggatttgaaacagccctcagtacctccaatgaagtctgagttactacaaggaggctttgatcacacctagaaaccagctgcgggagaacatcacggtcttctgggtgttgccaggactgcacattttcatggggtaacgaatacagaggcattgttacaacagaaaagaagaagactgggacaaaaattaacttttgtttagactcagaagtatatcattgcaagacttaaagtgcttctgaattcccagtggacctggtttaactgttcataactttcttttgatctctgcttcaatatcaagggtagaaagcaccatgataaaaggtcagttactcctcaaaagaggacaattctacctg

SEQ ID NO: 43490 - DNA, 938 bp, Bovine  19866881361237
  misc_feature (1)..(1): n is a, c, g, or t
naattcttaaaattctattttctctctcctacttctcttttatatttcatatcccccctaccttgtatttctcttccaaaattcctcccaacaccttgcctcttctttcccccaaatctgcgtctctaaagcctaaagaatacctctaaaaatgacagagactgcattgaagagcaaggaaaaggagagaactgagcggaggaaactgaaaaaccagattccttttttagaggaaatggaaatgctgggaaatggggaaaaaactatatgcaaataatttttgtcctaccagaagcacaagtgcagtgtttaaatgtgtatccaagcattttctggtcctttctttctgatatgctggtgggctggaatgacagctgtggaggtgcgttctcagaacagtgaagtgatcaggtgagatttcctgccttggggaagagctctcactctagtggtcactgttacagggaaccgatgctaaggaaacagaaaaaatattagcaatctaggaaaggggtctcccaaattcctgaggtcattgtgttctcaaccatgctctctggaacactagatcatatttagatatttagagcggggaagggaggagaaagagaaagaaaccataaacagttaaataattttccttattgcaggatcactcagaaacttgaatattaattacatgtctctaggaggaagagaccatgaaatatagcttaatgtttctttaattttttgatcacagaactcttctctttctagaacccctactttttacaacataatttggaaaaagggggtatatttgtatttttgttttcatttttatagatgttttgtagtgccacacattttatttagtaacaatatacagagtgtacaataggacacaaggtatttctttacatttaagatattgtaaaacactaaatatgtttaaa

SEQ ID NO: 43491 - DNA, 1007 bp, Bovine  19866881380645
  misc_feature (1)..(1): n is a, c, g, or t
ncctgctacgtagactccagtttagaatgctgtaaacagtttgttttctgtttagtgctcactctacagaaaacgttcttaaagtaactcagagctcacatttttagaataatgcaaggctttataggctggttttccacctgggtttctgaggcctaagaacaaatgcattcatacaccaaaatacgtgaatgaagtcaagtggctcttgggtaaaaaggagagacagtcgctggactgttgtgagtgtcttttacggagtgcaatttttttcataaagcattccatgttcaggaaaggaaccttttcattcaccagctccatcagtattctcttagtttcctcattcaagggcagtaagagtctcgggggcaggagtcgggggagcactggaatcgctgcaatattaatgaaaagattgaatatgctcctgaaaaaaaaaagactcaggaataagaaaaaggaaaaaagaatggatccacagatagcttgtctttaaaactctcatataacatgaaaccataatagattctttatttcccagtccctcaaatgcttattttccagtggtgtgttttcattgtgttttgatgccagatgctgttctcttctataaatgcttcaaatcaaaccatggacaaaggcttggtcttaaacacgtgtgagggcagaaggggtaagagagggataaataacatcaattttagaaattcatcggctaaggttttcaaattggcttggattctttgatttaaagtttctgcagatggcaattataggttagctggaaaccactcgaaagtgctgagtcatactaaatgaaatcctcaggtctgaaggctgaatgtggaaacatctatactaacaacactctcaaagcaccagtcatcgcacaggctgctccgcgggagctggtccttcagtctttggggcctgtggattgctgatttattctgctctctgtacatcctctttccgcttacaaaatttaagagaaaaattttgtc

SEQ ID NO: 43492 - DNA, 836 bp, Bovine  19866881394760
  misc_feature (1)..(1): n is a, c, g, or t
ntcctcttttatatatgcgagcatgctcagtcactcactagagtccgtccaactctagcaagtcgtaacccaccaggctcctctgtccatgggactgtccaggcaagagtactggagtgggttgccattgcctactccataccttcatcttttaatgatgttttcattaggtttagaattctaggttgacagctctctccctcactttaaagatatcatttgaacgtgtttttgagaagtctgctgtcatattttatatctccctgtgtaatatgtatttttactcaggatgcttttcaccttctttcatttcttctctattggaattccttctctaattatttttccttctgtaattccttaatttatctctaatgtccttcttttctttatgttaaattcaagcttctgacctataccatgctccttctcttcgaagaacttattttaacatttcttgcaaggcagatccaccagcagcaaactccgtcaatttttgcttgtctgagaaatgctttatttcttctttttgaagatattttcacaggacacaattctgggttggtgttttatttctctctacattttaaatatttcactccattttcttcttgctcacatggtttctgaggaaaaattggctacagttcttatcttagcacctttataagtaaaatgtgtttttcgcccccctctgctttctttcaagattttttctcttttaaattctgcagtttgaaaatgatttgcctaggtatagtcttttcatttacttttttgaatgtgtggatttagggggaggtttgtttagttttgcatttatcctgcttggtgct

SEQ ID NO: 43493 - DNA, 1318 bp, Bovine  19866881410258
  misc_feature (1)..(1): n is a, c, g, or t
ntcaccttctatttcacttgtcttaaaatgaacattttcatttatttgaggaaaaaagggtcactccctcttctcgctattaaggatactcaattatagtaaaaaatatatgtatgtaaaaaatagctctggttgacatgtgaaatatacatttctttaaatgctgtaacaataaaaactattccatagcaactctttaacctctgataacatgttgaagttttctgaaattaatactaaggaagaaatcaccatgcagtataaaactaatccaaaactctattttgtaagagctgagatttaaacatagccacaaacatactatacatacacaaacacaattcaggtcaccttcatattccaggcattggctggacaacagtactccctctgccatatgtatgcaggttaaaacacaaaaccagaaatattcacaaacacctaaaacattaaaattgtaattttattatgactaccaccaattttttcccattgcagaattcaaaagaatatgttataacatgttcttacaagaacgccaccttgtaagcaaatctggtttctcaaataaaaaaagtgaagtgtaaatctgacatcaaaacttgcacaaataaagatctgtcattttgttaatccttgtctacttttaattaaattattttttaattttcaatccagagagcaaagaccctgccaacaataaagtacaagacgtaggaaacaaaatacatcatttcaatgggatactctttctcaccttcgaatcttcattgctcactccgagctgtaacacagcttgaggagattttagttttgcttcagcagagtgagccatctgaaggttaagctgccatccaaccgtctcgagctacaaaagacaagtgtagattggaatcagatggtacagaaggaagaaaacactcaacttaaagcaagtctccagtcagcaggaatgaacatggatagcctggactttgcggaaagtcagttcctgggctccttcaacctgcacactctgcacattctccctttgggctcgttagattggcctcatgccatgcctgtcaaattcaagcctaaaactggtctttaaatacattctgttctaaaaataaaagttctgagactaggcaatgaaatacactaaaggagtcaatggtttttaaacagtaaactactattttaaaacagtgtattttaaagccaatggtgtttaaaaatagttatagcatatatatgtgataactactctaaatgacctcccattatctttcaaaactctttgcaataagtagaacaaggtaaaactttttttttt

SEQ ID NO: 43494 - DNA, 826 bp, Bovine  19866881413851
  misc_feature (1)..(1): n is a, c, g, or t
ntgtatgttggaagggaagaagagagagattcttagaaaccatactttacactgaattacagtaagttttcagtttagcagcttaaaagtaaatactaccaaaatattctcttataatttgcactgattctaatcctctcagaattattttaataatgtgtactttcaaaataactacactataaagcatacatatgaaagaattttacctgtttcctgtttttaaaaaaaaaaaatgacaatttcttaagcacgacaactttgttcttcatgatactctgcatcatacactaaccaatgataactttcaatattccttttaataaaagttctcccttcctttaaccaatctggtatttaaaacacattccatactcgtagttcctttaacctaatattctaacctgtctagaatttccgaattctcatttcagaagagaaaaaagaacagaatgagagatcataaaaacatggagaaaaagcaaagcctcccagcatcagttcatggagggcacagtggtgtggtagctcactgtccctttagagatggggcacacatcacgtggagagggcatgtttccatctaggttgatcataaccgtaccttccattacatgtctactgtttacaaggtataaggaataggggccaaatccataaaaatgccacaggagagacaggcaatacagacaaagaggttcacttaaatctgcatacaaaaagaaaataacttgtatatttgtgtgctgcagctctcttcccaggcgcctgttaatgaaaatcgttctctagctgtacaagtcatgcatgtgtatgagtgccaagt

SEQ ID NO: 43495 - DNA, 1115 bp, Bovine  19866881578364
  misc_feature (1)..(1): n is a, c, g, or t
ntgattagttacatgttatatctttgttagttacatgttatatattataacttagccttgattataagcaagctttaactatttaattcagtttaatctttgcatttgtagagaaaaaaattcttcactgcagtaaataagcagtaaggcatacccttatattttgaagattaacttaaccttgagaatcatacttttgattttgacttcccaacttctgataggattaaggttgattgttttatcttcctgtgaaatagtataaaataaatgtgtacttatggatgttgcagtttagagtagaagaatttcactttataagaaactaatttgtcttcatatttaggcataaaaatgccagtatgtagaggacatttataatttattaacttaaaaaatatttttattatttccctttttactgttttttttattcctacttacagaatgagatacaggtagtgaacttatatttaagattgatcatttgttttgaatcaggtacagactaataatgactctatctaacgtagatattttgggttcaatctctaggtgatggatattcatgtgtaataaaactcactgcttgatttagcattgattgtcattgttgttgataatcctggcaggagcagcattgattgaacaaatgtgaagattgaatttgccttttcctagcaaggtagtcacagaagcaggatgaagtataaaagctgacagcaccacagcattaaatctattcaactgtacttcagaaaaaagaaatggcagtgattaagggtaccattcaattcaacaagcatttattgagcagttctatagcccaacacagtgttagctgctaatagatacaaaaggaaaagacagtataatttgccctaaagaagtttatcatgtaatttgggagacaagtcattcatatatgaaacagctggagaacaaaatatgacaatatataatcacgtgtggatttgtttgtgcaacagaaatacaagcacagttatttgtccagcacgtgaaaagaaatacctgtgtgatgtgaaattctgtgtggtgacataaagttaaaatagccttctctctttgcttctaatatcctaaaaactcattca

SEQ ID NO: 43496 - DNA, 866 bp, Bovine  19866881812893
  misc_feature (1)..(1): n is a, c, g, or t
ntaagtggtagaactgggatttgagcttagatctgtctcgtcccaaggaccgtgctccaggcacccccttctggcagtgtcctactctgtgaggttaagaggctcttcaggtctcactctagtatctgtgatgttggtggagggaaaaggaaccctacctgcagcgggggctcccagggagtggcagggccatgtaactgggactccgggtcttggcttttggcagaagctcctccaaacctgcttgatgctccaagcaggcagtcagggagcctttgcccccctcagggaggcagctgctatttccagctctgtgatgtgagcaggccccccagagaaagaattattgcaaacctggccttttcccctctctgttccagtgactgcaactcctggctgcagctggaggtctagattgcaagatacggaaagagttgggcccattttctgatcacttcttggcagtgagtgctcatgtttttacagcagccacaggctgcttcctggagtctccttcctggagactctaaggtggaaacaagcaaactcacctcttcccactttcctggcccctggcaggcagctgtctggatttgctgtggtcacagcctcccttcactgggcagtggccctcattagaagaggttgatttcaaggcactcctggaaatgtgctgcaggtgggctctagggcacttggcttgtctgctgcctcttcagctctgtttgctttgtctaattgtgttttctctgccggtttgtctcttccccactttgtctgaggtgcatctggtacccatttggctggggagggagcagaagcagggttgttaattgactgcttggcacagggctgcaaaaagtaaa

SEQ ID NO: 43497 - DNA, 827 bp, Bovine  19866881826625
  misc_feature (1)..(1): n is a, c, g, or t
nagctgctggagacaaagagctgcatttgcatgcatcaagaagcaggagtataggtcctgaacccttggggtggagtcctcggaaagctacttctaaggtttttctgtggcaggagtcaatctgcatagtaggcataatgtgaaaacatcttctgttggaagactaaattatttccaaattctttttaaagtattcagctgtacaatgtcatagagcgtaaactcagtttcagaaggcttcagaccttgtctcaagcccttcccttcccagaggcgtatactgttaggccaatgatttgacctctctgaacctcagttatctcatctttaaattgggcataataatacccgccctgcctaacctaggctgtaatgatattaaacgaggcaatgtttgtaaacatacttagaaaaatataaggactgtataatgaggtctttattaatagtaataacactgttaaatactgttgatgctgatcaccatcggtaagcctgacttctaaatctgagcagcaagattcttcctgggcagaccagtcctgggtgtgcacctcactgttgcaaagtcagtctgtcctctccctgcaagataccattccaggaaggtatgtcgagctcttgaaacataggcagtgagaaacgatgaaacactgcagatgcactgtgattacttttattagaataagccctccagtgaagactgggttccgttgacaataagcaagaatagacattgcctatgttgaaaacctttgcaagttgtgctggagaatttgcatctcaataacaacgtgataatgtcaagctattcacaacatttcaaa

SEQ ID NO: 43498 - DNA, 685 bp, Bovine  19866880356237
  misc_feature (1)..(1): n is a, c, g, or t
nctcttgcctggaaaatcccgtggacggaggagcctggtaggctgcagtccatggggtcgagaagagtcggacacgactgagcaacttcactttcacttttcactttcatgcattggagaaggaaatggcaacccactccagtgttcttgcctggagaatcccagggacggcggagcctggtgggctgccgtgtatggggttgcacagagtcagacacgactgaagcgacttagcagcagcaacgaggacatttaagtgacaccgcttattcttaaaacacatacacaaagtttgtccagtgtttaagtatgtgtgaagaagaaacttgtgtttcaaaagagtccccatgtagaatttcaaaacactctattacattacgataaagtagaaatttagatatttttgtcatatagtctagatgagagaagaatatatacctggagaaataagctaatttaaatcattaaaaaaatgtcttttacatggaactatataaaatgctctgtgtatgtaaatattctgttaccttctttgagttgtcagatgcaccatcatagcctatggaaatgtggacagggaatcaactctgtgtagtcaatgagggacaggtgggaaatgatgttttcgaaaaagagggcacttatagtaacaagttatcactgtcaactttcacctctaccaaat

SEQ ID NO: 43499 - DNA, 1639 bp, Bovine  19866880442124
  misc_feature (1)..(1): n is a, c, g, or t
ncattggagacaagtgtcagagtctcaagaatttccattaaaatcaaacaactaagacagcaaaacacccaccgaaaaagaacgactttgaaatgcacttgttagacagctccatgttagtgaagggaaaaagaatcaggtgtatgatctaaataaaacatcatttgaagattaagaagtatctttgactactaaagccttcgtgcacttttagcaatgtctgcagagttttcactcaaccctgaagctgggaacttcaggaaacatggcactgaataaccatttccttgtcagcaatcttttcaaaaacctgccagttccctaacaacactgcagggttttggtttcggttttgagcaggagaaagaagagatgaaaccagctactaccaccctcttgggctggactagctaagccatccctttgcttctgttttgagaagggctggaacaatttcgcttttgagaaaatccccgtggatgggtctggtgattaaactgagcatgggttcaagggcatcacgagataatcccatggtcttcatgactcaacccgtggagctttctctctcaggtcacaagactgcgggcagctggaccgctgagccgagcaggtcccaagtgtatggcctggggagcctggacgtgccagggacagaatgtagaactgggagatgacaagcagcccaaccactctgctcccaaggtccacgcagggttggattcctgggagcctgggggtctgaggccgttttatgtgaaatgtacaacgtggataactggatgaagggactcattctttcttccctttctaaataccagccgtgagaacagggtcaggttcatcttaccacctggcacagaggctctgtaaatgtctgtcaaataactgaataaaaaaccagaatcgaataaacagagcaccctgcactgaagatctgtacgtgggggtggaaaaacagggatgttggaagtcactcctgggacagggctaggtgaccctgttaacagcagccacagccaggacagatcaacatgaaaacatgaatggctaagaatcagaggccaacttggaaaacaacagaaaagaaagaacaacaacaaacgctgccaggttgcattaaattaccagaaactaaaagtgagttgatttcctttagggatggtacggggaggaaggagggaggagggttcaggatggggaacacatgtatacctatggcggattcattttgatatttggcaaaactaatacaatttgtaaagtttaaaaataaaataaaattaaaaattaaaaaaaaataaaacaacaaaaagaggtctgtttgtaggagaaactcagtgagacagtaaaacagaatcatctctaagctgttcagggttcataacttgtctcttttctagaaccttcagaaaatggcttaatcaagaaagagaaacagaaggtgctcatgttgttattctctttacaagatttacctggagaatctgccgtggaggcattgtaactggagggctgggacacgcttttaaactttggggtgatccttcgaggatggggtgtcacaaagagctgtctgggtgtctgtccaaactctaagatctgggtgagcatggcgaccttctcgtcaggatcctcg

SEQ ID NO: 43500 - DNA, 813 bp, Bovine  19866880473188
  misc_feature (1)..(1): n is a, c, g, or t
natgactgaggggactaaatgggccaccacttgggttgctgtggagagtggacagtagaaagacaagagtggaggaaaagaccaaggttgaatgactcttgctgtggaggtggtagagactcttggctgcagaagtggagaaaattatattcaaataaattttgacaagtgataacttcttacctcaacattaaaatttagaataagagattccactgctaagcttttattctcagtatagacttgctaacagtataatgagtgcttctgtgtttttccatctgtagttattatgtattttcttgacttcatcatgagtcatagtgatacagtcccaaaagagaagcaatgtaataggaaccacatttattacttacaaaagaaaacgtcccaaaatgcttggaagaacatttcacactctataccaatttcagcactcaatttaagttgaaaaagtttgcttttaccaagtctgtatgtttttggaaacattttcttttttccagttgggttgtttagttttcatcttaattctcaggtagaatttcatatgctaaaactaatatcacagtcatgacagtgtttttcacatctaaaaatttttttggttttatcattatcaacaaagatttatttcatgttcatttggcatctgtataaataaaaagaattaacagaaattattttagatgcatcaaaactatgattttaaagcagattcacagtgaatactagctgtgctgaaaataatactaaaatcttttaaatgtcagtcattaatggagtacttttggttttgacaacatgtgtgtg

SEQ ID NO: 43501 - DNA, 4500 bp, Bovine  19866880486171
  misc_feature (1)..(1): n is a, c, g, or t
ncctgccaatgcaagagacacaggttccagtccctggcccaggaggatcccacgggcttcagagcagctgaaccggtgggccacaactactgaacctgtgctctggggcttgggagccacaaccactgaggctcgcacgcctaagagcccttgcttcccaacaagagaagccatcacagtgagaagccctcacatcgcaactggagggtggcccccactcaccacaactagagaaaagcccacagtgggaaaacccagcccagtcaaaaaaaaaaaaaatcataattaggaacaaaaggataaactcccccaaagaaagcaggttggattgttcatacagtggggttactacaggaggaatctcctgctgactatcacagtgctgctcgtcattcagttcctgcaggagaaaaaggcaaagctgagagagttaaggtataatatctaacagtacaatagtattataaagagaatcagtaagattgtgttaaagctatgtaaattaggctggaagaggatgaatatgaaaattacatgaaataagaagttttacttgaaaaacagaaaaaacaaaaccaagtggcccttagaaatgtctgtgtttgtgtgatgtgtatgggtgagtatacctgggtaagtttcaaggaagagcaatctgcccctaaatttgtttagttcttctataattcagattttgttttatttcagatcaatggtggagagaaacgacctgcctctgacatggggaaaaaaccaaaaacccccaaaaagaagaagaagaaggaccctaatgagccacagaagccagtgtctgcctatgcgttattcttccgtgatactcaggctgccatcaaggggcaaaatccaaatgctacctttggtgaagtttctaaaattgtggcttccatgtgggatggtttgggtgaagagcaaaaacaggtaagaaaagatacaaaatggatgattcaacacgatttgagaaagtgtgtgcatcctaaagaaatggcttctgaggtcgtttggtgtgtgctggtgtgtgtgtgtgtgtgtgtgtagtagctccagtcatgtcctactctttatgaccctgcggactgtagcctgccaggctcctctgtccatgaaattctccagacaagaatactggagtcagttgccattccgtcccagggatcaaacctatgtctcttatgcctccagcactggcaggaaagttctttaccactagcaccacgtgggaagcctggtcattgggtgaattcctcggatactagagctaaggctgagaatgtgccccaccagaaccagacttcaggggactctgacatggttttacattcctttattgctgttataaatagcatcttagttcctttgtttcaaagtttatatggtgtagttacttttggaagggcttctacatatccaagccagaattacctcattcgttaacgctgccaatgtgatcctaaagacagaaaaaaaaaaaacactaaaagcattttgaaaactgtccacacctctcttcagcacttagtatttactcttttgtcatcaaaactctctttgctctttgctaaatgaaccttgaatttaaggatctctacccttagccattccctaaagactgctggagtatgttattcaatccctcttgtaccatattgctaggctgtattaaatgggcccagatacctgattattttctcctcttgtggattgccatggtgtgactgaggaccacactggtggggagcaggggcatgagacactttgtatctcagccacagtgtaagtcatccagaaggtcttaaggaggatgggaatcatggaaaagagtcttatccatctctttgcgattctgtggacggtagcccgccaggctcttctgtccatggagttctccaggcaagaatactggtgtggttagccatttccttctccagaggattcccaacccagggatcaaacccgggtctcctacattgcaggcaagttctcaggctgtctgagccaccagggaaacccatgtgtagacagaacccacttcaacaaagaagcagtattgatcgcagatttctagatttccaggactagattgccattgtcaccatctagaatttcattatcatgaaggaaaaattagacaagcattatcattaaagtgcagtcactggatgtggatgaagtggatgcagctttagctactacagaatactgaactgcattcatgatgggttagtctcatattggattcttaacagagacttttacctctcctcctcaggtccagggaagtatgtaagaaagagaacatctcaaacctgtgtacatctctaagaacctatatatcgtagtatctgtcagcatctacaatgtatattgtgttttatattctaacaacagttttacatgatttatttcatttgttcagcacagtattcatagatgctgttttctgaatttcacaggttatgaaatggggccagatagttaaattcagtcacttatccattcaacaaagatttattgagtgtttactgtgtgccccaggcacttttctagacactgtgggggcgagctgagaatagacagagtcccatttgttgattgatttgtctaggactacacaccgtgactagaacttatcattcaacctacagttcttttctaaccaatttataaaaacaattatagctgtaatggtaaaaccagctgctaacaaaacattagctgaacctacttctccagttctctccaacccccctttactgtaagtcaaagctgtcctgtacagtctgaaatctacacattatgtccttttcaagattgccagtcccggcaaagggcttcacagaaaagcacagccctgccgtgtggagctctgctacaagagtcgtctctgaggatggaaaccgtagcacggaaatgctctctgtgtgtgagattaaaatacccaactcacaaatagattggttgacactatattttgtgattccactgaaaacctaatgtagttttttgagacttcagagccggtttctatcctaacttggatcagtttgctctcacactcccaaagccaaagtgtggctccccactgacgttggagacacacggtggaattctacgccgggtcttattcacggattgagaaactgagtgcacctccaccaggaaccccaggcccacccctgtcctgctctaccctggcctgggcaccagcacgtacctccctccctgctcagacagcccctgtgtgtagtcgtggataggggccaggcttcagtgctataaactcttgctttgtgagatagaatttgccagaggagacatccagaatgtgattgccttccctagtgactgtgatggcaacttgtaatcagaggacattagtgatcccttctgtgacctggcagcgagctgggggtgctgctcaaaggctcacatgcgctcctttggttttatgtcaagaaatttcagttgccagtgctaccaccgatctgactcctcttacctgtttttctaaccctggatatcttttcctaattacttcccacatttactagaggagcttaaatgggggaggtctacacagctctttcctagcccacgatcaaatcctttacattatcaattcaaggtcagtgcctgtacccatgtttctagtggaaaagaataatgttcttatgatgaaaactgggtagttcctcaaggcaacaagtataaagcttcagaatttccccactaattctaatacagtcttttatttttattatagcaagaggggaacactgagataatattccacatttttggtctgaccaggtaaggtctttacagacccaaagaatatgagagtcactattctccagtgtcgtgctaaaaagagaaatgactcccattctcccattctgcctttcaaactcagctctgagcctttctaatggaagtaggatcacaattatgacataatacttaaggctttttaattgtatattgtgataacaaaacactttcctctttctcttttgtttccaatttaatatgtaacttgtaatgagtctgtctttgggttctctcttaatagaaatagttggggggttgaagaatgtgttttataaataaaaaatgagattatataatagctgaccctatttgggggcttcccaggtggccctaattgtagagaaaccacctgccagtgcaggagacctaagagatgtgatgtcgatccctgggttgggaagctcccccggaggaaataatgggaacccacttcagtattcttgcctagagagccctgtggacagaggagcctggctgaccatagtccatggggtcacaaagagttggacacaactgaagcaacttagcatagcacagaccctatttaactcactgagtattataaagcaatttccataatcaaagtgcagttgtttaagaaaattattctaagattacttagggagatatattaatagaaatactttttct

SEQ ID NO: 43502 - DNA, 1357 bp, Bovine  19866880489492
  misc_feature (1)..(1): n is a, c, g, or t
ncgtgtccgactcttatcgaccccatggactgcagcccaccaggctcctccgtccatgggattctccaggcaagagtactggagtggggtgccattgccctctcccgtatacttatgtggatatctgtaatttccaaatgcacgtattcaacaatctttacccaaacttttccagctggatttttttgtgtgtctattaatagttcagtggtgccaccatccacttaggtactcaagccaaagccttgggagtcctgtcctcttctaccctttcattcacacacctgacatctaacatattaccaaaaatacatctctaccactaaaatatgtcccatattccacttgagtctagagcttcaccaagagctattggcttaatggaataacttccttacctttttttcccctagttttcattcttgttttgacacaatctgaggcctattaagaagccagaatgatcctctagaaacttccatcaggttgtgttgctcttctgtttttcactgaatttagaaaaaaaaaaaaaaaatcctatctctttatcactgcctttaattcttctatgagctcatctctgccactctctgtgagtgagacttaatgctattcctggatttgaccaagtccattctgaatttgaagcatttatacttgcattttcttctgaaatcttctcatagctaacttctacctgtcaatcagaacagaatcaaatcagagttttctttgttagaagattaactttctgcctattgaatctaaagtggcttcctagtcactatctataataccaccatcttttattattttcccagtacttattgtaatataagcatatctattttgttattggtttagccatttactcattcgaactccataagaaggagcatcttgtatgtgattgatcagtgccttaaccccagcaccatgaagagtgtctggcacacaagagtggctcaagaaacagttcttatataaataaatgaatgggtatccagtacacttatgtgaaagagacttaattacagtagtggcattgaattaaaaagtgtcagttggtagcaacaggtcccaaggaatacagaagaaatacagtggaaaaagagtgttttcagagtaagctgaggttaatcaagcaggatttaaggaagaaatagttttaagagttggattttaaagatttgggctataggaactgtttattctcaacaaagtgcagcttttgaaagttcccacttccaaattcaatactattattagtagtagtacaatggtagacagtggagaagcaggtgggtttaattctatctgtaataaacctcaactattaaccatttgatgaaacagg

SEQ ID NO: 43503 - DNA, 1174 bp, Bovine  19866880502166
  misc_feature (1)..(1): n is a, c, g, or t
ntccaaggaaatagccttagttcaaatcattctctgatcattctgctgaatttttttaaaagataaaatctcaacaatattattccttcaaaagaagctccctgcaagtaaatagaaaatgatttgtttttaaatctcttagtttttcagtgggtaaaaaccatgtatgaaatctgctgcaaaaacagacaaccatgagattaattaagttgctttttttggtcatttccagcaaagcttgcttatgcagcttttgaattcaccagataagctaaaaataactcttagcgtataatgctttttgtttaccagatatagctatctacttcagagattctgtccttgaatttttaatagctctgcaaggattaaaagtcaacacttcaccacaccagtgtgttaaaagaaccttcctgaagtctgattattatttgccagttaatagacttttcaattttaaaatattttctctgccttatacttttcctcctctgtgttttccagtggcaagttgttttgaatctccttccctatattagtccaacaactgttaaaaagctttggttgaaatttttagctgagaaagaagtacaaataaaagaagaagcagatggtccctttgtgactgaatgaagaaaaagggttttgagaacaatatgtgaataggtgtagtctaataaaacactcagccacctgctgcctgaatccttcggaaaagattctgttgcatattctggggattaactattaatgtgtccttgggttagacagaaaacataaactctgaggggtttagggccttttctcttgttttggttgagttggcttttctaaattttacattgtttctcaatttcgatgtatctgctcaagagtacaagtcaagtaacacatggctaaaggaaggaaaggtaagaaagatggagtgtgggcacttcttttccatctttgctttaagttttcatggttcttgggattagcttgcccttgcaggggcacaagcaggaaggtagtagtgtttgcaaacagtggctaaatatttagatgcttttcttcttaacaaggcacttttgatcctcatttgtggacttgctttgcttttcagggatttaatcttcaacccgactatcagaccataatcaatcctacatctacagctgcacaagtggtcacc

SEQ ID NO: 43504 - DNA, 751 bp, Bovine  19866880513778
  misc_feature (1)..(1): n is a, c, g, or t
ntctcatataaagggaatgatcttgttacattattatttttctttctctgtaggttccagtcaatgaaagataagtagcgaagaccaacatcaccgtcacacttatgttttatttccttttctctagctggtgccttttggaaacgacttactatgtctctgaaccaggttctccactgtcgtaggattcgttagcatttaaaaccttctgttggaatcccaaacacaatcccgttccccttccagattcagccccatcttcgaaagtattcaaatggagacgctgatatgtcaagtttgtttagtggctttggtaggaacaactcataagggaggttttgtgtttctggaggatttttatcacttcttttagcttccttttgatttctcttctttgagagattctttacagaaatcaaagtacatatagttcctccctttccagggcttctgaaaataaagacctgcccatctgcagtggcttcttagccccgcctagactccacaaagaggaagcatgtgacacacacagacacagcagccccattagtcctgttccctctggctggcaagaaaacattcaattgtaatctcactaatagctgtttttccttaaatattgtaattttctgagcccctaataagtcatcaataattttgcccattttccccagtttgtgtttatatttggagctgttcataattgtgggctattatgacaacgggatttctgaacaatggtggtgcatga

SEQ ID NO: 43505 - DNA, 1954 bp, Bovine  19866880615723
  misc_feature (1)..(1): n is a, c, g, or t
ngctgaacttgttgatacatgtcttttaagaagttatctgatgtctgtttgaaacttgcctgaataaggtacaattaattccagtcctaaaggaaaaagatgtttttaacttcataaatgccattaaacaactgaaaatacccagggatgttctacctatggtgtactataacttacattctagaatgtctccagtcgttaaatcttaatttgtggtgttttaaaggaatttaattggtatcactttacatccagtgataacaattgtactgcaatttaactaaactacatggtttactttcacataattacacattaaggttatttaatccatgcacttatgtaccaaaaccacagatcccacaacttaaccagtaatgggtagtatgtggatcaagaattttaacaacaaaaggttacttagtagtttctgttctttacattagaagtcatgagatggttatttgccaggagcctattacagtgtaaattgatgccatataaaagtatcatggtaactgcataaatgtcaaaatgtcacagaacttagaaaaacttcactgccagactaattactaattactttttaaatctggaaaagagttaggtaattcttcaacactgacttccatgacacgactttattttgatttcttgaaatctagtaagtctgacttaaccatagtaagttatatgttagaggcaatttgcagtttggggggttatgtaacaattgcttatgactcagtattttccctcattctccacaaagctgcctggttacagtcagcattcaatgcttgttgaatgaattaacaaatgaatcactaaacgaatgcattcaagagtaagtgaaggagaagatgactttttcaaaggcatgaagtttatgaatatacccatgctatggcatgggcatgaataaatacactgtattcccaagaatgcactggctagatgaccacatggtatggaatgctgactgctcagcatgttgggaagtgaaagtactatatcctgtgaaagatgtaaaggcttaagcagcctgagaatgctggggtggggtggtctggtgtgcctctttggctatttattcatctgtccctctgaagtggcttgcacttaccaccccatggtaacacagaagtcccagaggattcctaagggcggtttggggcttctggctctcaggagttgttggactaaccccagtgcagctaaggaccaggcggaagcctcagttccacatcaggatcccaaggggttggccatagagggcatgagagcgtgctctgagcatagaaactggacaccaatgatgataccaggggctgagtagtcagagaagcttcagtgaacgtcattccttgcacttcctaccaattcaggatgcttttctgactcaggcttattttcttccttcaagtctcagtgaggccaggtattaaaaaactttcatcctccaattttcttgacaccaaaaatcacttgatcctaagaccctgcatatccctataagacctagggctatgtatttttttttcagcctgagttagaggccaccaaggatcaatccatggtctctaagaatctagagggctgagttccagggtacagtgctggagaagagcaggtatggaccctcaatgtggcatcatcttcctgatcagccttgatagtgccgttcactcctccctgtgtagagatcagagccatgcagctgcctcctccccaagaaatgacagaaatcagtggagaccatctccacaaatgaagagaaagtactgagttaaataaaggtatgaaattcaagccaatatgtttaattttaccttggatcttcaccaagttaatgaatggtgaactggaatcaaagactcatgccaagtgatttgctctaaaccatagccagttagcatgatccaaattatttcaaatactcaaaattcgatca

SEQ ID NO: 43506 - DNA, 2453 bp, Bovine  19866880623116
  misc_feature (1)..(1): n is a, c, g, or t
ncctacccgcccccacctcccccccagccccaggcatgatgtgtattccattactgtgttgtaatcattagtttataagctatttttcttctgctttagattatatctcaatcatctttatacttctaacctttggtatagaaatgagtacaaatggcctagtaccgacagggcaagtttttttttttttttttaatgtgacctgcttctgttaggtgttatttgggaatagtgtcatatattttatggggaatacagtttttaaaaaaagatttatccactcccttagcagtggtttatctctccctcagagaaaaccagaatgagttttttaataaaatgattgaacaggtacactgaatcttcaatttaattatttcaattcctgcaaaaaaaaggtctttcaaaaagcctgctgcttggtaaaatgtgataaagttccaacacattcttaaaagttggaaattaatttataaatttccattcaaagtttaatctgctattttcacacaagaaaactcataaggttgcttcctattgagttactatctttgcatctagagtttaagccagtatttaatctctttctagaagcttccagaggtgcttggtgcattataggtgaatgttgcccatttttattgcttttggagttaagcaagaattccacacctgtcattccagaccctggcttgcttacttacttctagtttatttctctcaatttttgtatttctcccagggcaggtcacctttttttttaatgtgccctgactctggcttctgcgtgtatgttcctaagcactgtcctgccctccacatcctcccagaagcttcatcaccctcttgcttttgttcttaacagccactgccccgctgaaactactactgattcttctgtctcgatctaggcttgtcctactctcattcctggagcaactattggtgattctttcatgggatgtctctctcacccactgtgttaccattctatgtattttatcccatctcccttctcaataagtttttggggcagtattaccgtgccctgttcatctctgagacgcctgcaatgccgagcacaatttcttgaccataacaaggactcagtagctatttgtttaactgaattgaattcaaatatgttcaaacagctctctcctcactatgtttgacaaaataattataacaagtccataatcacattcaatggtaaagccaggatttgaacatgagtagctcactgtactttaacccctacaactttgttatccctacaatagacagaatatgtattcaaaattgttggcctggctatataatttatctctaatcattaaagggtaaacattttcctgatactactgaacatattttctctgacagtgtgacaaaaaatgattttattttttctgtgacaccagtttcacagaatgggaacgtaaagcaatttaagagcattcctttcataagtttattatgatatccctctgagttctttcaggatctatagatacaatgcacagatgtatagatactatcaagtttactatataatattggattatgcatgcatgctcagtcatgtccaactctttgaatccccatggactgactataaaccaacagtctcctctgcccatgggattttccaggcaagagtactggaatgggttgccatgccctcctccagggaatcttcctgaccaatgaattgaacctacatctcctgcattgcaggtggattctttaccactgagccatcagagaagtgcccataataacggattgtctgtccccagttggaagactgtttacttctgtgcacttcagtggctcaaaggtagcacaggagtatttggagccaaggatgtgggctttataataaacttggcttagcattcaggggtttattctgggttttggggcttcaatatgctggaagaaatatggaatctacaaaacatctttttaatctcagtgatggaacttgaaaatttaaaaaacaagtctaaaaaaataacaccaacttaatctctccctacataaaggaaccacttgttctagtagaaagcactgttgaatttatttttagaataggaagggaaaataaaactgagggaagcaatgaagcaacaatgaattacccttctgctctggtgatatatttgaactgatttttcctttgtggctgggctttttctgggggacagaaacagcagaaattattttacaatgcccttcaatagctgagtcaaaattctcctgaattgttgaaattcttccttatttgcagttgagtttactttacttttaccagtaggtgtttcagatcaatgtgcatttcgccaccatcttctggatggaaaactgcctttccgttcagcagccttctcttaaaatatcttaagtttaagattttctactttataactgtgttgtttcctttctaa

SEQ ID NO: 43507 - DNA, 3156 bp, Bovine  19866880743917
  misc_feature (1)..(1): n is a, c, g, or t
naattcacatcaggaagatttaccaacttggcccagtagctacaaagcagtgtggtaagtgctgtaatggaggttggtggagaggagaaggatgtcctagctccccagagattgggaaagcctttgctgttacactaagttgtgtccaactcttttgcaaccccttggactatagcatgccaggctcccctgtccatgggatttcccaggcaagaatactggaatgggttgccatttccttctccaggggatcttccccacccagggatcaaacctgagtctcctgcattacaggctgcttctgtaccgctgaaccacctgggaagccccagcaaagctttgctgggaaaaaaaatccttaaagaagactcaaagcatgaatacaagtctgtcacgtgggccagggagaatatgtccaaataaattagcttttagagcaaatatcaacacaagggggagcagggtgattactcaagaaagcataatacttttataaatatggaacatttaactggataatttaatatgaattgagtttgaaggcagcatgggaataaggaaggaggcggtttcagcttttattatcagtgtgctttaccagaatggctcttctgggtgatgactactacctgttctaagtatacagcttaaagggatattgcagattgctcatcttctccatttataaaacaaagtcaagaactggtgcttttgttttatacttgctccccagttacagaagttgaaacaaccataaaattcctcaaacctttgccccttactattgaagtcaagtccccctctataactttttgtttcctcaaaaattacacaatctctgacaattatttctaagaaataaaggatgtttgtgtgtgtctgtgtgtgatagagacagagaggagttaagattagagaataaaaggaaatcagacctattatcaagctttaagactgctgcagtaagttagtttttatcccccttataatatagattaacttctctaaatgatttaatttaatgcctttatcaggataattaagccatatgaatccttcacagtaaagggggaaagacttaaggatttatttcatatttttattcttgcctgttttttagtaaaaataaacttgcaaaacttctttagaaaacgtgtttttagctttacaatgcacatttttagctgatattacttacaaggagttctctagtgaaatcctatatattcattcctcaataaaagtactaattaatagaggattaagaatgtcagaatcttgatcaaacactgtcaagactgtgtctctgatggggctgagacaggatttgcctgctaactaaacctgtatagaatataccacaggtcaagtgctaactgcttatttttctatttttcatctgacaaaaaaaatggcagatttattttattccaaaagactggacactggccagactgttctagctaatgataatgtttcttgaagacggacacagatttttactgctttagacctaaacttaactataaaagagtacttcaagtactgagcttctgaaaatcatcattgttaatcatataaatgggaatgtctatgaacacatttaagtaaagaaaaatatcctgaattcctttagctgtgatgatatatatctacataaggtatgtcacacattcctggaggaccaatgttgtactaaacgtactatagagagaataaaaaaggctttggaaatgacacaggtttaaagttcttttactaactctgctgagataattcaagtacatggaaggggaggtgggtgaaagcgagagtagaaaggagacaggtattagtgcctgttgtaattactgtgttccccatggtctgaaatgctaaaaatgaatgtttcctctattacaaggatataaacctttctcactgaaagccattagcatatataatgcacatgtctgaaaatcatggtttctctgtcactcttttaagacctttagggacttgggttattgtagagacttaaattaccgccaaagcgtaatttgtagttctctagttttccagggtatttttaaaaatcagtttaagcaattttactcatatttaatggctcagtcttttccaacaaattaaagtgtttgtacagtcttgactctggaaaaatttgctatacaatttgcaaaagagaagaaacattaatatacttcatcaactgcctgcatttctatcaatgagatgatttaaaattgcaattctagtaatttattaatgtaatatttctttaaaaataaataaacaacttctcagaagtcaaaacacatataaactcttgatctgcttacaccattctaggcatataaagtcacaagaaaatgaatgacattaatttgtaccttttgtacaaatacatttcctcttgtattctggggatagaaattgtactacacttaacacacactctgttttttctgttttcagttctttcatcccaaaggaagaataaaacaagaaatgttacttcccttattcagttttatttcggtctatgtcaatttagcatattttaaatagtctgtataatttttaaaaataaaaggaccattctaatgttaatttggatcaactttccaaacatatgattctaggtttccaaaaggggccctcttgaggggacttttaaaactgaacaacaacaacaaaaaagcaccctgaggctgcccaattcacatttaacctacttacatgaaaaaggaactgctttggttaagaataaacttccaccagctcaggttcaagctaaatacaccagcatattagtgaggaaatgagacagcaatagtaactcctttcatactagcgagaaaatactgtatttattttaaagcagctggcagaaattctcattttaattaaattacatttactgaaataacattttcataattaaaaaaataacccatttctcccaaagagctagcaaaatataatcagaataacttaaagtgggcaaaggagtaatgagattgttagaataaaagtgactaatttggattacaattgtgcatcagttcagtggttttcagtgatgcagaagccattactatcttttgttgccatgtaaagttaatacaaagtagatagcaagttttgttattaatg

SEQ ID NO: 43508 - DNA, 4695 bp, Bovine  19866880800008
  misc_feature (1)..(1): n is a, c, g, or t
ngcacactaatccagaaataaatgtgtcgtttctatggctacattgtaatgggcatagcctcagagagtgccttaggccacataaaagacttaatgtacagcttgaatagaaagcacattatttattatgaagctatcaagttgagaaatttagcaatctcatttaaaaaatttgctcatttgacctgggccaatttgcctgactgataatattgaatatttagtatcacaatgtttttgcaatcttaaggataaagtgttttgaactaatttgatttgaaacagttggctgaatggaatgattttatgtccctaaaatgtttattgatgcttcttttttagttttagtgactaaaagtttaaggggaataaggtctaggcaggcctctgatgagggaagtcaattaagcaaaaacagtaccagagatagaaacaaacccatttggcctgattctgtcatctgacatgaataggtggggagagataagagcagggatggagttgggagtggaaaaatgtgttccccacagctccccacatcccagaaggcaaacggattttattctctgtgagctttggtgggaatggtttgattcaacctgaaaatttgtaacaggagattcagaggagggaaaatttgtagagaaaatcctctctccatcttgttctcctaaacctcacacccttagtctcgcttctgtaataatacgagaagtgctaggatcatttgataaaattggagagaccctctcccaacacagagcctgctgcctttctttagtgtatttccatctgcactgaaaacaaaatggaaaatgacaatttcaaattggttattttggtgttatataattaaaaaaaaagaaaaccaaacgtttgactggatttaattttttctgaaagtgagtgtagacaaacatttcagttaagtgtaccttttgatggctggtggaatatataattggaatctaattattgttgattcattgattcattcactgatgtatgcacataaaaattgagggattgttttccttaaaggttgctagtagaatatctctcagatcaaaatttgtcttggtttttgctatcatgtagtatctggaggagcctgacatttttcagggagatatgtagggcctacctctgactatccttttttcatatgtcattgcttacttttttgtttccttattatttggcatgatttatcatttaaacagatgtgaaatctggagttattactacagtattcattggcatatacagttacatttatacttggcattgcatttggaaaactatatttcagtttgggatttgggtagaaaatgttttaaatttatggatattttactgtcttctaaaaatctgttgaaagacaaaattgttttctagtatctctttatgctttcttaaaaaggtattaataacagtgtagactgtaatgttgacaaaagctgacatttctagaatttcacacgtcaatagaacagtgcaaggagcagtgggaagacaagagaaaggcagcagagcatggtagtggcttaaactgagccctccagtctactgaagtcttaaaccttatgtttaggaaaagtcagaataaccctcatgacacatttagtcagcctcaatactaagaagcaaaagatactaagagtaggtggtttaaaattgaaaagaattgttacctaagaattagcttgaaatacagtgtctgcatgaattggtatatttttattttattagagaatgttatctgtccttccagtaagaaatgtctaatacagacttgtgtggctattttccagtacagaattagcacaatcatcctcaattttctgagaagtgaataagggctctttgttcttaaagcagcaggtatctctatcttttactttgtttctatagcatttcgtttatattttgataataaaaacatagtattttaatactctcaacattcaagtacaaatacctaaaaggcctaatttaaaataaatatatacttttataaacttactaaatggaatgctcttattttagtaagagcattctgtgggctagtcatattaaaagttatttaagcctgagagtaaaaaaaaagttcctaccataacatttctttataggcagagctttaaaaggattatatgtattgtatgcctaaaacattgaatatgtaacattgttttcataaaaactttcatatagcaacaagtgtcttccgtatcaacagtatttttcaattgacattttaaaatgtgagtttttttcccttcctattctgctactgaggcttattggtgaatttagaaaggctaaatgtaaatattctagcgtcagaacatgtgaaaggaaatttctatggcgttttgccctcttagttcctgaaagagtgagttatcgtttctctctcgcatggtcattaataatgacagatgtccatggtgcggagttcacgtacattattgtcagtaacagggctggcaagagaatatttattacaagaggaggagggacagagacataatgtggaaacagaagacaagagcagagttcagctgttttttttctattgaataaaatataatcattccctaagctttcttaatagcgtttatttgtaagcactgttattacaagtatatttcatctgcgtaaatgttccttgtagtgttggattaaaaactgaaatgattaggcactcatttttattttatttttccagtaaacctgtctaataaccaaatatattggaatgactcttaaaatgtcatttgagttgttgatcataggacagtttgattggtaagctctctttccccgccatgatatacagaattaagaggatttaatgtagagacagcagcatttaaatacttatttaaaaatttgcttaaataaatataataataataattgtaggttccaagaggaagagtttacagaatacatttatacagcctctccttgcttctctgcctgcttttctgttctttcattctctgccctacccctcgttctaattttagcctattaaggcaactatacttggaattcctttcctgacttagtctgttgattgtccatcgaggtacaaaggaaagcctgtactggagtcaggttttctctgcttacccaccctccctcaccccagatacagcaacagaagcccagaaatagcctcttaagtgcaaatctctaactgactgtgagttcttttaagaaaataatgaagggggtgggttaaggagaaatgaaattggataaatgtgaggttcttttcctccctaacttccgactaaagaaagggaaggcataagggacatagcttctttctctcattaatttatagagaaagcatacaaactcacaagtatggagatatagtaatgaagatacattaaaagaaaacttaaaagcctttttctcacttagctgacaaaagtcatatgacttctcaagattattcttgaggtggttgtaacaaagatacagtttgaggtatggcacatagtaggtgtcccacaaattttagctttcttttcccttgaggacaagatcctatattgttcatcgttctatccccttaacagtgactgttgcgcacacacctaggaggcattaaatgaatatgtttaacagttgtgtaaagggtagatatgtacaggacatagaggcattaattaaataaaattcatatccataaatatattttaagatagttttagttgtgcgatcatactctttgaggcaaccccctactgttggttgttagtagatttcacagtgctgtttgactcaagaaaacctcccagcttatgtcctcaaggtctcgtggatgaagtctgcccaaagtgacccactgacaaatgatactttcaattccctgattctctgtaaaagattttcttttttttttttaattttatttttaaactttacaatattgtattagttttgccaaatatcgaaatgaatccagacttttacagcattagtggttttcctttaattaaaaaaaaatatatatatatatgtaccttttccaaattaaaatcaagctgaacaaatataaattgttacaaaataaaattgaatatccaaaaattactagttatgggcttatcaaatggtattaacaagcgtaaggcaagatgagaactcaactgaaatgatgttgctatctcaaaaagctattctcatatagtcacaatgaatcaaatcactgctggggttgactggaaacattcagagtagagaaacaaattaaaataaatctctttgattattatggctcaaggtaaaacagttttattttttctctcctttataaatattcagtgatttgatttaaattatgggaaaatggaaataaacacatacacacttttttggtaaaggtatagaattacagtagccatggaaagcctgcatgcagtatttgccttttcaaataacttccagtgtcagttatctggctttttaaaataggatggaattacctgttattcctttgcctcaattttatcctctccttcactgttgctttgaacatgatgccaaaggatgcttcattctgcctgacaagccacagttattagagctttcccaagtaacataatcaataccttcagaggtgttgcattctacttttcttagaaatcatgtaaaaaatttttccaagtg

SEQ ID NO: 43509 - DNA, 1646 bp, Bovine  19866880800681
  misc_feature (1)..(1): n is a, c, g, or t
ntggtaagtacagaatgaatatttataaaagcctagagaaagtgtttgtggtggcatgagctgagaccaagggagagagggaaagaaggagaatgaatgacccaggaggaggaaaacccaccattgctgtgagggtatattacttctatattttagccccttttactttacttttgcatttgaattttaacacaaaaacctttgcttctgttaaataaggatcatgtgggtactttggtacctttttctggggttggaggacataatggaaatccccaaagtgctgtattgggggtaacttctagatgtgttttgtttaggaaaaataatagtcctcaaggtgaaattttgaattcgtaaaatatacattaaaataaattaataaaatttaagaagtttaaaatactaaccctaaactagaaaagagttaagaaagatgaggaagagcgatgcaaatttgctctgccattgctttcctggccttcctgactggggcagaggactggagtctgctttttgccaactctgccttctttctccaggtgatgtccaagaggacctaattctagacctctgggttgcttgttggctagatcccttgttttatgtaggaaagtgtcagatggtgcaatggtcaaaagtaaagttacaagctctactcagggactcactgtcctctcatcaggtagatggatcactcggccactaactatgaaactggtgaagaatcttagaggccaggtgggagttctgctggtagtgggaaactatggagtaggggaagagaggggaatttttttaccagataaacatttttttttggttatttaaaaattgtggtagaggaaattacagaagacagagaccatcaaagagaggaaatgccaggtaattactaaacttttactgcacattatcttttagagatatgaggatgtatctctgttcacaggagggtaaaatggttcatggtactgttttcgtttttttttttttttttttcctttatcaaatgccttttctcaaagcaatcagtacgaggtgctttagttgcatttattgttgatgatccacactgatagttcagaagccgaagcatcaccattcataataccttgatccagtcatttaataacatattttgatcatacacatactcaaatgcagatttgctttgcaattttgaaaaaaatttttgttttcatcttctattttgcattgttttacaatctgtcatatttacggtacaatcgcttggtaatctcctgtaatccttgctgactcagttcttagtaaatcaaaaaagatggagctttatggtagactttaagtggggagtgacaaaagtgaaggacgtttagtgtgaaaaattccattgtgtttttcaattaagtttttcccccaagagtagaattgttcaccagctagtcttgatagactagcagtggggtaatttctcatccttaatatagacagtgaaggagactaaacagcacaaagcaatttgccatcatggaggatcggtcagcaccgtgcatcagaaagaaatgtcctccatgtacccattcagagctctgtgacattggtgaattatagtcagtctctctgagtcctggtttcctcatttgtagcatggataatggtat

SEQ ID NO: 43510 - DNA, 1438 bp, Bovine  19866880876041
  misc_feature (1)..(1): n is a, c, g, or t
nacttcacttttatttttctgttttccatttctaattgtcattacagagaaaggggttttctagattactaatttaaattcaccctagattttataaaataaatgtgattttttaaaatacaagtaaaactccataataacaatggtttttaaaaatattctactaatttttttcctctactcattcattgttattagatctctatcctaagctgtatccggagctctctcagtacatgggcctgagtttaaatgaagaagaaatacgtgcaaatatggccttggtccctggagcaccaagtcagggggtatgtataatgtaattcattctgaattatataaaatcatactttacggagagatataagctatcatctttgtggcagactcacaaatgtatagccttagcattgatctcctctcaggactgtcttctggtattgctttttacagtctgcttcctctgcgctgttaccactttcctaattgagtaggagttaaaggttcaggtgcctttaactggcacattctcctttgtcttctgcatttagttatggacctagtgattctgccactgccgcgtttcttatactcatgttcttcattgtagcctgctgtggccccgtccctgtgtttctacctctaacctagattgttacagttgtctctttttccagtaactcctccaggaacttggtatatcaatgaatactgagctactgctaactttatcattctgagattcaggtctgttatcatttttttgctcataatctttttaagtttaaagcttcttatagtttgaccccaaattcttggcttaaatatagtgtgtcacagtcttgtgttaagattattgctataagactataataccttatagtacttgtcgtaggtaaatgcataacttcatgaagacagcctttatgtctctgttgttgccatgacccccatgcttaatacagtacctggctttcaatttattcaccaaatatttattgaaacttgcttacgtcagtcagggtccaatcggaacaatagaaatcacactagattttttaacagagataacaagaatcagagaggttgaagaactgaaaaaagcaaaagtggaacctagaaagctgcttctagaactggggcgcacaggatgggggtcgtagttctcagagcgacagtgatggtggaggagtcccgtgagctgggcctcaggggaggggccctgtgacgggcgctggtgcctctgggggctgcacggaggctcttctgggagtgtctggaatctggagactggtcacctgctgccagcagcatgaagggctggccccaggtagtactggcaggagcaggaagcagacaggaaggggcaggccctggcacctcctcctcttgaggggtcctgaccagaaagccaggacagaagagggctcaccacata

SEQ ID NO: 43511 - DNA, 1055 bp, Bovine  19866880920115
  misc_feature (1)..(1): n is a, c, g, or t
natgcaagagacacaggttcgatccctgggttgagaaagtcccctggaataggaaatagcaagccactccagtattcctgcctggaaaattccatagacagagggacctggccccagtccatggggctgcagagtcagacaccgctaagcgtgcatgcgcacacacacacacacacacacacacacacacacacaattctgtcatttactagccacatgattttaaatatttcacttaaatgctctgaccctcagtttcctttactatgtaagggatcgccaactccctctgcccccaagaattgttaaacatttcaaatatatgtacaaacgccctgaaaacaataagggagagtaccaattaaaggataatcgctcattatcaaattactttaaaagtataaatggaatggtaatgtctcttccacactcttattatcacctggtgagatggactaaacgtggttttaaaaatgactttaattagtttaattttctaacacccattagcactcctaacattaggagtatgagagcttttgttcaagccctaataggcaagtcattactaagccatcttaacttccttgtacttttgtctattcactttttactaacttcataccaaagctgaaagtcacaacacacacacagagtgcattcctctggtataaaagtgagtgcctctcacctttcatggaatgtgtaatagtcaaactgtgacaatgaaacccagattgccctaaagtatcttagaaatagttctctaaattctctctcacacacacacaaattacaaatctttatttaagaaattaaaacgccactagaaatccaaaacaaagataatctggctcccgctttgcagataatggtcataatatcatttgaggtaattacggagaaaataaaaaagattgggaaaggcacagaagatcacaggaggaggagtgtcctgtcgacccttgtgggtttgttgacacctccgggggccacggcagggcaaacacagctaagagccagggcgaaagtgtgtaactggtatctttgcaaca

SEQ ID NO: 43512 - DNA, 802 bp, Bovine  19866880933235
  misc_feature (1)..(1): n is a, c, g, or t
ncgtacatgtatggcggagtccctttgctgttccctgaaactatcacattgttaagtggctatatcccaatacaaaataataataaaaaagaggacatttggacgcagacatgtacacgtgaagacacaggtagaaggcggcatcagaagtgcacgacactttggtcttgaccttctagcctccagaactgtgaggaaacctatttctgacggttgagctgtctgtctgcggcgctttgtctgtctgtcggcctggagcaaagaagtcccctgggaggtgtgtcaccttctttgctgtttctttgtggttgactgttttctttccacagatgcccccattcctggcagatttcctgatacaagcctccagttgtagggttgtatcagagctttctacacccagagctttctacacctggtcttctcccgtaaataaaagtcattgtcaagttaatcttcaaagcctttccttcctaccacatggtgatgcaaagcagaagattaagccattcaagctaatctttgcaatcatcaatatgggccctccaagttgaggtaaagcctttaattcaaagacattaagaatgttaagacataattaaagctcttaaaggatgtcaggtaccaggagttaatcagaagagagtttctgagttaaggaaactttcagcatcttttgaatcattctccaaaactcatccaaaaggatgattccactgaaagaaatattttggcagatggaggggttgagaagctctgtgtaaatttactcatttacaatctcatgacttgtttgacttca

SEQ ID NO: 43513 - DNA, 1356 bp, Bovine  19866880933387
  misc_feature (1)..(1): n is a, c, g, or t
ncagagagctcaatagggtacggagggagataccgagtttgggccttcagtctagttcaacaaaccataccttgaaggtcaacttctagcaaggctgggtgtttctagaacataggaggcaaagaaataaagcactcttaagagcagcaagaggaatctggccagaggatttgaacttctcttggctctagtgcactggcagccttccaattggtttgtagtaaggaagaggtagaggaattttaaataatgaggatggctcactagggacgtaagagccagtttgctcttagtagttttctggagtataaaaggaagagaattgcaaaagtgcagtatcttcttttttaaaaaagttattttccattatggttgactataggatattgaatataattccctgaagcattgtatcttcttactcccctttccccatgtcaccaaaatcaaaatcaaattgaataagtacacatacaggtttcctaagagaataagaaagaaggtgaaggtatctttgatgctcaactgaagataaggtgagcccccaaagacctcctgtttcaggtatagggagaaaacaatttaactggaaggaaaaaatgaaggaatctttttactgttttaaagaattattttatgaaaaagatattactgggttagtaaaaatacagtgtggaaaaagaaagaaagaactagcaataaatgtatttcctttgaacaaattaacactaatattgattcttaaatgtccttacagtagtctactgtcaaattagataacatggatttatattattattcaaggaagaattccctatcgggaggcccatatttcaatgcagaaagtattacattatttgtcaaggaaaacacattactctttgtaaaacagaaaagttgaccttggcaaacagttagtgaaattgttctctacttgatttcacttacatgcagtgtgtgggagagaacatatttagtgttgcttggtggcattgtttcaaaagaactctcagtattgtagccagaaatgagtagggaacatctagaaaatagttcttattgcagtgctgggaagtgattgaattcttgtttccatgctttatgttaggtaataacaaagaatttggtggtaattaagtactggcttaatgtatgtttatctttttcccaagatcaaccatagtcactttttccataatcaaagacaaataataagctttcattctttgttaaaattctaaaatcgtgtaaccatttcccctgttactaggatgttattactttatcattcagctttgtttcaagtggcactgccacttcttgtacatagtgtttaattttggtaaggcaaaattt

SEQ ID NO: 43514 - DNA, 915 bp, Bovine  19866880946565
  misc_feature (1)..(1): n is a, c, g, or t
ntgatctggctgaagacaaaagtgctaaaaatattattgaacagcagtgtgatcttattgaacaacaaggtgtttcttaaggtttgggcatgtaactcttcttagaccaagagtggagattgtctctacttccttctaggtcacgtgctatctttcctaactgggaaagatataaggcaggaggagaaggggacgacagaggatgagatggttgaatggcatcatcgattcaatggacatgagtttgagcaagttctgggagatggtgaaggacaggaaagcctggcatgctgcaatccatgaggtcgcaaagaatcagacatgactgagcgactgaacaacaggtcagtgcaggcatgtattaagaacagagggctgagtgcttgtagatactcaaaatgattaccttctactgcctaaaagtgctagaaattggacaaagtaactggccttcctcaaagcatgatacagacccttttatgctcatgaattctgtcagttccagtcctttgacccatgaagacaatgacttcttggagcttcacatcagagtccaaagcttaataaactaccaaatgacattcttattatggtttaagtgctttccttatgctccctaattcaatcatggttaacaagggaaaaattatttccttggttggaagttttaattaataattatactgaaacaaagcttagactttgatgcattttcacaaagaaaagtcttgaagttgatagaattctccttttcatgtttttattatcactagaagcaaactgtcttgaaaaatatctcaacaatagggctttgtgttgaagtgatactgataagatatgactggaaagaaagaaagagttggctgtgccttatacacatattgacaatctggaaccctgtaactaaattaaaga

SEQ ID NO: 43515 - DNA, 1156 bp, Bovine  19866880954201
  misc_feature (1)..(1): n is a, c, g, or t
naattttatgtaattgtaacatgaaaatatcattataagtggttttttaaaattctacaataaaaatgattatagcaagtattaaaacctaggtactgtgtgtttaaattactgaatagagctaaaaggaaggtaatataaattagcaacaattgctggtaaatggaaccttatacatattgatatggatattatcacatttttgcatttctatataataactttttacaacctggaaaagtaaaatctatcacaataaagtatagctagttttctagaattcactttctaaacagccgtcaattaccagtttctatcatctttttttttccaaatgagcataaagcaatgaggaaagacctgttaataatcaatttggtttcgggaatgacagagacttgctcactgacaactttcttggaactgaaacagtgtctttcatttttctcccaggtcccgcagtgaagctcgaagaccaatatcttgtcacctactagccccctggcccaaggtgaatctaccactgtcctgggtagatttaaagctgtacatttagccatttgggtgcattttccttctcagatctttttattattactagtaaagcagcaccctcagggtctgtacttaccagacctttctaggcacagccttgggctgccctcctgcctcggtttgccaagtgtgcacacagttattgtctaaagcactccctgccatatgctcttgcttatgggagacgttttgcatggattccagattaatgttcgaataagcccagcattgcatttcaactttcattttgtcagaaaacaaatgttctctcaacattcacgtattagattcattgtgtccatgccgctttcttttagtaaaagaaaagatttgacatgtaactcctaagcctctggtctttgcacacatatgtgggaacatacattgtgagattactgacaaggagcaaaagacatagtttcagaaaaattgggatgctgttttcctaactccctaagtcctatcactggcttttaaagtaagcctgtgccctgatggatttatgtcctcttttggaaaagtagctgctgttctattatgatggacgttttccctgagagaaggaagaaaggtggggaaggaaaaaagttgtaattaggta

SEQ ID NO: 43516 - DNA, 1481 bp, Bovine  19866880962271
  misc_feature (1)..(1): n is a, c, g, or t
naaatttcctcttagaatagtaaaacaatctaaaatagagaattaatatttaaaaagacaatgatttacaatctcctggctgtccattagaataacttaaaacaaaagacttctgaataaatgtgtttcgtgtttttagtgacaagtctttggcaattggttttgtattcaatgagagaaaaaggagtgaaagcgcccccaactcacatctggcaagttcaggaagtatcaaaggaaaggactcaactctaggttagccacaattgaaaatcacaaatcgtctctaagcttcagtttttgttctctaaaatacaggggtgtgaccagatgactccttaggttttcctgttttgggactgcagttcagcaaatggatgttgtgtgagttacaaaacaataaatgaatagctttaggtcagaaaaatcgaacttaaaagtgatgcttaaaacagacagacctggctctccagttcttgtagagtatttttttctttgtgtacttaacccaaaatatttgataaaacttccaagtatgcctcattttttgtcaggtgatactattcattcataaactaagtaaagagataaatatttttaaacataaacatttccacaaaatatgtaagtgcctccaaataggagaaagagatggttggatggcatcaccaactcaatggatatgtgtttgagcaagctctgggagatggtgaaggacagggaagcctgatgtgctgcagtctatggggtcacaaagagtcagatatgactgagcgactgaacaacaacaacctcaagtgaaaatatatttatttaataatatatgataggaactacatacaaatattgttttatcagcctgaatttatgagcctgaataaagtagtttaatcaggccagtcttgggtactggtgggcagcacagaatgtgctatgatttgaggaggtctgtatcagctccctgcactcaaagaaccttgggtaaaatgcaccctttcacaatcactagtttggattaacatttttcacttttaaaacaagggagaaaagggcaacagtaaatatatggagccagccataatcattcacatctctgtttgaattactttaatttgactgctttccttttagagtttatgatcagtttcactgagcacattgggggaggggcagaagagagacagatgcccagctatgtgtaactagcgggtagtgtgaaagggtctagatgttcaaggagcaggaaagaaagacgtttcaaaggctggaataaaaactcctgttttagaattttcattccacatctgttcatgtagtgccctctacatgcctggtactgtgctgagtggaaggggatagttacagtcttgcctagctcattctatttttctcctagaaatgcaaataaacatgaacaatatactttcagatattcagaggctattctgaattccaagtagtaaagtctctttggtatactgtat

SEQ ID NO: 43517 - DNA, 810 bp, Bovine  19866880984103
  misc_feature (1)..(1): n is a, c, g, or t
ntgggaagccctatcctggtctggagatagtcaacacctaacctatttcctttgaaaggaaaataaaaagacgattctttaatgatggtttaatgtcacttttcttagaattatagtcagtcattcaagaccaagcaatattcttgctttctttctctctctctctctctatatatatacacacatacacacatatctcaaaaaaccacgtgtacttttgttaaacattgttttccaactttgcatatgaaatctaggattaattttattcatattagaaaaagaataacatatgataaaagagaggttagttcaactaattgtattaactagaaagttaatcatctgttcagtgtttagggctcaatttgtgaaaatgaatgaccaaaatgatctaataaaactctccagtgttttaaagccacatgtgcattatagcatcttatgttaattattaatcaaatacttataatatgcataaataatggaagctatatttaactctcttacacacagttcatgagtaggcatgagtacagagattatcagtatacaggcatcatccccattttggggtactctttccttcctctagcagaaagaaaacaagaaaagatttctaactacaccacaatgttaaagccttgtccagtgttcccaaatgtcagagatgaggaactgttttcttttatcctgccaatctatccttacagttatgagttccctggaaatggcttttgtgacttgtgtcatgtaatttaacattgtcagtatttggtaattaaaagggaagaaaggtttggggtttgg

SEQ ID NO: 43518 - DNA, 1043 bp, Bovine  19866881051584
  misc_feature (1)..(1): n is a, c, g, or t
ngtaacagaattaagatttgcaactatctctaggtgtgaaaatatagatcagttagagagatggatttttaagtaaagaatgagaacatcttacatcctgatttgattaagttgattgtacaagtaacaagtggatgatgtcgctcagcaaaagtttaagcaggaaagatatgggggtttcaatcgatcccaagctcaacataaaagaacaaatattgaaaactgaggtcccagtaaagcaagtatagtgtcgtttgagaaatggaaacattcccacattactccatactttccagatctcatttggtgcattgtatttcattttactcaccacattttaagaaaaacattgtccatctggatgtcttgtttattatgtaatttggcagtagttataggtcaaactccagtaagggtagggaagagggtaacaacgtgttgttgctgttgttatttagtcactaagtcgtgtccaatccttctgcgaccccatggactataacacaccaggctcctctgggatttgtccagacaagaatactagaatgggttaccatttcctcctccaggagatcttcctgacccagggattgaacccaagtctcttgcattggaaaacccaggataagaagaaccagctgtcaatccttgtggcttctcccagtttctaaaataagttatatcaaccagtgcctcttcctaaagtgatcacatccttttctttttttgaaaatctctgtttgggtctctatttttcatacctgttttagtatcatgagaagaaaccatgctattgccaaaactcattgctcctttcaaaggagtctgacttgttttccatgcagaggaaagtctttcaacctcttgagtcagagtatcacctctcctgtcatgcttcattgctttagccccatgtcaataggttctgttatcaatcactgttgtaaataaaagtttatattgatgctgtgggcatttatttatgatatttgttatagaaagatttcatgggaggtgctaatcaggcggtaagaagggccacc

SEQ ID NO: 43519 - DNA, 1250 bp, Bovine  19866881064695
  misc_feature (1)..(1): n is a, c, g, or t
ntttctcttttctcttcttaaggccgtatttttaaagagccatcagttacttgtagccttcagtcatcatgctaatggcttctataaatactctaacagatcattcttctctaaattgtccaacaaagagaggacaagaaatgtgtcaccagaggctgcaaaggaggccatgagcctacttcccatctctggtgagtatggttagaaaggcactgaagactctacccactagaatatcccatgtgcaacaatgcacaagaaatcccaggtgaaatgtgattaaacatatgtggccacaatggttctcctgaatattttttagcctttcacatcacagtgtttaagtgatgggttacactgcatttttcttgtcttcctcaagaactctattgggatagaaggtatctgctttatcattcctttggataaagccaggtcgtagaaagagacaatcaattagcgctttcatcatcaatcaaatctcgatacctacactctcttctattctgaataaaactaggagttccagtcaccatctaaaatcttgagtttaccagaaacaggtagcacgacttttgaagtctaatttatgccaatcatctcaacaataggcaataaagtcatggtgaatgcaaactaacactgttttattttatttttggagtataaatgctttacaatgttgtgttagtttcctctgtacaacaaaatgaatcagttatacgtacacatatatcccctccctcttgagcatccccccttcactccctcatcccatccctctagatcaagcttccccactagctagctatcttacacatcagttcagttcaattcagtcgctcagtcgtgttcaactctttgcgactccataaaccacagcatgccaggcccccctgtccatcacaaactcccagagtccacccaaaccatgtccattgagtcagtgatgccatccaaccatctcatcctctgtcgtccccttctcctcctgccctcaaactttcccagcatcagggtcttttctaatgggtcagctctttgcatcaggtggccaaagtattagagtttcagcttcaaaatcagtccttccgatgaacacccaggactgatctcctttaggatggattggttgtatctccttgcagtccaagggactctcagaagtcttctccaacaccacagatcaaaagcatcaattctttggtgctcagctttctttatagtctaactctcacattcatacagac

SEQ ID NO: 43520 - DNA, 1066 bp, Bovine  19866881165459
  misc_feature (1)..(1): n is a, c, g, or t
nactggaaaaacctagtcttgacagatggacctttgttggtaaagtaatgtctctgctttttaatatgctgtcagaaggcaatggcaccccactccagttctcttgcctggaaaatcccatggatggaggagcctggtaggcttcagtccatggggtcgctgagagtcggacatgactgagcgacttcactttcaattttcactttcatgcactggagaaagaaatggcaacccactccagtgttcttgcctggagaatcccagggacgggggaacctggtgggctgccagacgtctatggggttgcacagagtcggacacgactgaagcgacttagcagcagcagcagcatggacttttaggagacgtcattcttaacttcattcttactttatccttaatatcaatatagattagtaattaaatagccattataatagccaattataatagccattataaataaccattatagccattataataaccagttatagccattataataaccaattactaatgtaatttttcaaaaattaaatatagctagcacatcttgaagagatggtggaaaaccttcagccctcaggctagatttcctgtcatatgtggtataaccctagtgaatagcacttcacaactctggtttcctctcttgactgtttgtgtcttcacaaagctgacttatatcttaataggtggcccgacagataacagatcagtccactgtcactcaccatgagtcatggatgcatttttagagcaatcttcacaatcttaactcaaaggaatgattaatgaactgggaatatcagaaactttaaaaatatttttttctagttctaacaagcatacactgagctcttactctgtgcccagaaatatagatgccaagaaaacaacttctcacaggagaagttattatctagcttactgtctagatcaggaattcttaaccttgacattttgggttgaataaattctatgttgggggaggggggatactgttctttgcattgtagaatgttagcagcaaccctgacccctacccactagatgccagtag

SEQ ID NO: 43521 - DNA, 2874 bp, Bovine  19866881232105
  misc_feature (1)..(1): n is a, c, g, or t
nactcacgtccatcaagtcagtgatgccatccagctatctcatcctctgtcgtccccttctcctcctgcccccaatccctcccagcatcagagtcttttccaatgagtctactcttcatatgaggtagccaaagtactggagtttcagctttagcatcattccttccaaagaaatcccagggctgatctcctacagagtgtactgctttagtcatgtacaaatcaagattaccttgtagaaatacatacacacttaagaaatttaaaagtattgcccacaaagaaagtataagcagaatgctttagcagttcagaataaggaggttcttgaagctttgtagatgagctgacttttgaactttaaaatttattcagtgtttggatatgtgaatatgataatggcatcatggaattgtgacaagaacacaaacatgtaaaataagcgtatttttactctaatctttgttggtagagagagctgagaccatttaagctctaccatcctcagtaaacttgtgtaaacagacgtttctgcctcaaaggggaattataaggcccaacaggtgaaaaagttctgtgcaaactgcaaatcactgagcaaagtattttttaactgtttttcaaattttcaaacagcaactcctcagaaagtgaatgctgaaagagcagcatagacaaggcacatgttcaagggagagagagagaggcaaagaaaagcagttagttgggtttagttgaataattaggtgtttgatggacacataaggaataaagtttatttggagtcttgaatagcatgccaaagagtttggattccattttggaggcagatatcactgagaagtgtttgagtctgactcatggagattaattttacagcactctttgggtggatgtgaagatgttctttttattaaacgttaagtagctgttgcaagtgaagaggtagtgaaagcctgaaatacgtgaatggtgtggggtgagagaaggtcagatgggaggggtattttggagccgactgagtggaacccaccagagtttgatagagaaggaattaaccaaaaattactagaacatttggagtagaggtgatgaagaggatgaaggtgtcatcaagagaaactagacacagagtacaaaatagttttgaaaaagaaaactttgttcagttttccagcaggggtgatgtccaagtagtgatgtctagcagagttagacccagaattggggccagaattatacattttgatttagaaattccccactaacaaaatcgtgatgcatcttagctggatggaagaaatgtgactcagaatgttagggaatcttttaggggtggaaagttgtaaaaagaatagaagtcaatggcagagccaagaggagtcagaatagcagttgagactaagcatgacttaagtgaattattcacaatacgtggaaaatactggagagtaacaggaaataatatttttcaagttgatgtttcatatttcacattaagatctgtagtcagtcactatctttctagaaggaaaccagtaatcaaaacatttgcttacattcatgagctgactaattatttttagttttcagtaatcaagcttcctctagtttaatttgccccatgttatatattaggcagtgatgaacactgaactgactcctatgaaagcaggctggaatgaaaaaactcctcctaattcagaaatgtcaccaggggtgttaagatctatttctaagtgcatctgagggctaaagagatgaatgtgctctctaatttgtgcttgccaccctccacacaggagaagtggtctttgattcagtgttaaagctgctgtctgcctggcctaacaccattggttacatgatattttgaactaatgataagtctattgaaaaagtggtatcctgttgagtgcttcatggtccctacccaaactgattccttactccctttcaccatgcccacttccttctactaaaattacaaaggtgaaaatacagctttagtactcagagatctactcaccacactaattagcatgggagaataataattttaagaaaatattacaaaatagtgaaagagataggtgctatgaggtggaatttgtaggcataaatctggaaactctgtgtgtaggtaatttagagatcactttccgccatgtcatgtgaaaaccacaatgttgctgaaagagtgagaagtgagctccagataagttgcacactgttcaagcttgtaacttgggatttctgtgaatatcaattagttacatacttttgggaaaataatttaaagtatgaatctgttagtaagcatttttaatttacaggactctacaaaacagatatgtttgaatatgcatgtaacagctttgtttggtgtagggttgagagagggagctgccctatgtatagaacagtaccctttatgggctcccattagtcggtggccacaatgaaacaccagtcccgcatgctaaaagtctaaaaaaaagcacattatgacctcaagaccttagagtacgggcctgaaaagagactcagtggcacaacttcagggataaccgtgaatgctagtattgatcagattatagaagttatatgaacagttacacaggaacaaacactattttagtaaactgagtggaggcaacatgaatggactcaataaaaaccatggatttgggtagacagtttggacaggtgtgtttgattatctttaattaactataactatccctttaggatacataaaatattggatcagctgcttaatacagtagaaagtatcaaagactggaattgagagatgtaggttttcactccaactctgtatttgggtaaatcgttttttaagatctccaggtt

SEQ ID NO: 43522 - DNA, 1537 bp, Bovine  19866881232813
  misc_feature (1)..(1): n is a, c, g, or t
naaatactgaaactcgggccttcatttgttctgatgccattcaagtgtgcaattttaacaccctttagttactaatacaactaatgttttaaggattttttttattagttatacacaaaatgttactcattttttaaaacaataatctgagctgaacaacctgggtattatttccttttccttttcaaagagaacccaagaaaaataacatgcaaacgtgtttaaatctgtatcagagtgggcccacagagtccttctccagctcttcctcagcctggcactcttacactgtaggtgtgggccaggggagaaaagaatgttatattagcatcaagccatggatgtaataggcaggtcaggaggggagaacacatgttatctgctttggtttcctaattgattttaactgagcctttgctttccattaattggaaaaaggttttgaaggaattcattgaaaatctcttcatcatcataatcctcctccattactttaattgacattttttagtttctataattaaagaacaatattaatcctcaacaaaaacctgtggaatttaaggcaacagttccagttttcaaaaaagtgaaatctatcctctaagttcaatggatcaggtttccccaatggggagataactattaagagccattcaagactgaaatgccaatgaaatgccggactttcagtcaagaaaaaaacaaagttcactgggcttgaaataaacaaaatgagaaatgcacacacaagttagaaagcaccttgagacatttgagtcctaagaatttagcaaatgaagttcccaaaagatcaaggatttttcatattatttgtgtaaagcccaagtcatcagtcctaaatatacccgagcatctatttgatgaaattcaagatatatgtgctgagtatctactatgtgtcaaggtctgtgctagatatgagggctacgctggtaaatgaagtagatttctatccctgcttttttgaatttataatctattagggtgtatcaggcaagattagttctgctatgtacaacagaaaattcaagaggactgaaaaagattgacctttacttcccttccacattacatactcccatggtaggtagaccgtccgtggtctggtgtcttcatgatagtcagacactcaggcttctttccgtgagtccaaaaacattagggtgctgcctcttggtccaagacattttcctgagctctaatcaccacacccacattatttccagcagaaaaagaacaaaggaaagtgaacccttccttcaaggagatttcttggaaggaccacccaacactttcatttatatttcagtagccaaaacatggtcacatgaccataaagctgcaaataaaggaggcagtgtcctctgtgagccagctttttggctcgacaagctaaataccagaggcttgtccctctggaccaaagtaaatgaggatcagagggtacagcttgagatttctgccacaaatggaaacagacagtattcatattttcttttcattttgggactaa

SEQ ID NO: 43523 - DNA, 1153 bp, Bovine  19866881271649
  misc_feature (1)..(1): n is a, c, g, or t
nggagaacttcttccatggcagaaaacactcctgttcttaaagctgccggccaaaaggaccaaccgcacaagcagagtattgggatttctgctctttcaatgaaccgctctgaaaaggggccagatctagataaagcctctaatcttaacaaggtttagtgtagaaatctgagtctactgtctggccaagtgagtctacaggcatcgtggaagagaagcctgcttccagcaccacccctgcagctgcccagtgacagcatctcagcacgcacctctgcgccgccggagaggaccactttctaccacttctctgggcaagactcagacctactgattgtgtttataattaaggaataacgagaaatacgactcaggggtacagataagcaggtacacaggaaacatccattttccttaaccttagtagatttcactgctcacttgcatgagtgcagaaggtataaatctctaaggaccctttactaaaatcgggaggggtggggtttcttctcgcatcgctgacagcaagtgaccccgaagtcacagaaaacaagttaggggacgtcaaatgtcaaggtcacacggggagcctgttaaataccagatgctggatgagcaggggcggtcattctgactctcaccaaaatgtgagaacacagtaaggtcaagttcagagaatgaaaagttcacagaagacgaaaactgcagtgcaaaggagctctccctggcccgcagtccgcttaccgggtacccgttgagaggctggaaatagagggtggtgtcagtgacgcaggcgtggccagggttcgtcaccagaggtgtcaccatttctgctttgcattccatgtgcagcttttcagaaacactttggaacctgaggatacgttttccagcaaaagcaagaaaaatcagaaatcaatctactttctaggcttaactttatctgagggagctccagggtgactctgcagaacaggtatctaaacacaacacttaatataagaaaagcggtgacgtaagctagtcgcctaaataaaactgcctttcttttaatgggtacaatgagtacttgattttgaaaaaatagatgaggttatgtatcacagaagagaagacagacaagtgaaaaaacttgtcaaacaggcacaagaag

SEQ ID NO: 43524 - DNA, 808 bp, Bovine  19866881295416
  misc_feature (1)..(1): n is a, c, g, or t
nataaaagtgtaggtaaaatgattgaaacctgacacagatattagagtttccagcaaaaataaattaaatataaagagaatatagtaagaccatctttaatgttctcaagacatcaagacagtcattttaaaagctataaatactagatataaggaaagctgaaaaaaatttttattaaaaggcatgatataatcctttaaaatatcctctgtaatatacatctatgcccaaagagccccatatctgatcagaaagtcatgcattttcactaaaacgtgaatgtgtaccttttgtataaccgtgggaggtttatataaaaataaaacagtttccttaggaaaacaaaaaaagaagaacttttgccaaatactctgggaaaaaacaagcaaaaaaaaaagactttttcctctgaaaataataaagttcagttcctggcaatgtgaacactcacagacttattcaaatgaaaacaaattattgtgcttctagaaactagtttcttttttttttcacttgcagagtctgaaacagcatctggaaaccatcaccaaaacgttaagattcacaagcaagcactgctgggcagaagggaacctgctgcaccgtcgtactgccactaaacacgtctgcccacagggcaccggtgagtgatggtgcccgcagccttgtaacagcaccagggggcctccaagcatatgttcacgaatgcttgaatttatatctaaactcagtatcatataatggtggtaaaatgcccaagcctgcccgggattggtccaacaggggacattgacacagctctccaca

SEQ ID NO: 43525 - DNA, 719 bp, Bovine  19866881335030
  misc_feature (1)..(1): n is a, c, g, or t
nttatcctgttaatttgatgaacgtggacagccataccagctatttcaaaccacccaaacagaatttttttgtctcaatgatctactctgttaaccagataactgccaagactccaacttcattctgttctgtataaaattacaatttcttagcatctctgatatcagctacttaagggaaatgtatggataaatgtattggatggaaacgtatggatatttttgcattgaagctgtatttctcacttcatactgataaagtagcatggaacacagaaagaacacagacagttatggctttttttaaatgctgcatctcaaatgctgctgctgctgctgctaagtcactttagtcgtgtccgactctgtgtgatcccagagacggcagcccaccaggcttccccgtccctgggattctccaggcaagaacactggatagtcagtattaaaagtatatttaaaaagcaatatgatatcatggctacaatcaatggctttggaaccagcatgcttgaattcacatgctggttctgcctttgactatatatgtgaccaatggctcagtttttctatctgtaatatgggacatgagagcgcctaccttatggatcactgtgaagatcaaatgagtcagttcaaataaagtgcttaaaatagagcctcagatcatggtaggcactgaataaatgtaactattatccttatcgtaatctcatcat

SEQ ID NO: 43526 - DNA, 1924 bp, Bovine  19866881355037
  misc_feature (1)..(1): n is a, c, g, or t
natgcatgaatttattaaatagaaaaggcacctcggaaccagtggattacaaatggattttccattcaatatgtgatgagtcaactgacaaaaattaaattgtatccatacctcctaactcacaccaggaaaagttctaacagactgtttatgaaaagaggaaatatgaatggctcttaattatatgaaaaaatatacttagatttttttcatttgacagactgaccaaaatctgacagaatgaagcagacactaacatttagacaatgataaagtaacttgttacaaaacctataaagggcaatttggcatatctattaaaattacaaatgcatatgctacatttttttaaatccagaaattccacttcacttgctctcatacaaaacacttgtacaagactccctagtgaaacactgtttgcaataggaaaaactaaaactggaacaccttgcaacaggagactggttaattgagttacgaagaattttacacaatggaacactatacaaccatgaggatgaatgaagcagctctgtacttatgtgaaagatttccaagtgaaaaagaggaagggagtagtatgtcatcttttgtaaaaagaagaaatggggagggaataaggatctataaaccctggaaaaagatggaagaaacaacgtcagtggttatttattttgatgatgggggaaatgggaagatagaagattaagggagcatccttcgtgttaaattatgtgaattttattaatcattcaaatagctatatttagaagaaaatgttaatagcaatacaaagtgacaattagggacttccccagtggtccggtggttaacactctgcacttccaatgcagggggcacgagtttgatccctggtcagggaattaaaatcccacatgccacacagcatggccaaaaaataataatgattaaaaaatgacaattatactataaaaaatctatcagtaatagatgaatctcctgtagatattttggagtaagattttacatcttaagagggggcttatctagtggaaatcatggtttaagaagtgaacttctgtgtccaaaaaaaatgtcacagcaaaggtttcaatcttcaaatgccttacatttactttaattaatattactaaatgtgtatttcaaaatcagttaaaggtacattattagtttccaagagttcaaaattcaaactaagactgaagtaatctcttaacagcattgtaaaaacaaggattccaattttaaaagcttagaggtgctatatgttatgagatatgactcacactttcccagatggctatgtattacaggcatacctcaatttaatgaattttgctttattgcatttcacagataattcattttttacaaattgaaggtttgtcagatgatgattagcaattttagaaataaagtacttttaacttaaggtatgtatactgtatgtttagacatcatactattgcatacttactaagtatagtataaacataacttttatatgcattgggaaaccaaaaaattcatgtgacttgctttattatggtatttgctttattgcaatggtctggaactgaacctatggtgtctcccaagcatgcctgtactcaccaaagatgggtgtgaaaatagaaaaatatttttaaatcattatgttggtagaaaatccgggaagtgaggtataattgtcttaaacattttataaaacattttacgtccagaactttgacaatcatcttttggggggctccaattaaacataagatatatttgataatacttcaattcacttgataaatatgagagttattatgtacaagataaggttgacactctacactgtggagaattcaaggaagaggctaatgtagctctgatgttcagagagcttacagtatagaggagggccctatgg

SEQ ID NO: 43527 - DNA, 704 bp, Bovine  19866881418955
  misc_feature (1)..(1): n is a, c, g, or t
ntaaagatattcagagtaaatgaggaatttgagaaaaagtcacatttcatgatatagaaggataggaaaatatattactcacagaaactagaaatttttcctgtaacttatttacagttggaaaattgtccaaaaacctaattagacaagcaaatgttcttggaagagatctcagactagctcattacattaactccataaatttgttctttgagtaggcaactaatcatacagagagtttcttactttttctctttccttaatttcaacttttgccattgactagaattgtatttttactgagcattggagtaattgacccagaaaaattcatttagcttataaaccatcacttcaaataagatgtagatttgaagataatttagttaacattctactatgattcctcatcaatataaaaatatggatttcatctccaacctctttagtttataagaatagaatttatgatagtcttgttatataaggaaggaaaagacattaatcctaaaaactgtactccttaagattgaaattggttttataaacattttttttcttttcagtctctctcaaggccatggaatgatggaaatgctaatggtggaagacgaatccagtaactgtggtcaaagtcatgatgaatagacagcatacattctaactacatgcaggtaaatgcaccatatactacttataaatga

SEQ ID NO: 43528 - DNA, 1994 bp, Bovine  19866881638735
  misc_feature (1)..(1): n is a, c, g, or t
nttattaatcattcttaatactgaatacaaatggtacaatatttaatctgagtttttaaaaacgttttgtgagctcaagcctggagcttaaagaagtttggaagctgacagccagaagtgtggtagttgaaggcacagcacagatgagatggattgcctggggaacccatatttcaaaaactctactattaaattactgcatccaattatcctgggtaagcccccattaaaaattgaataaggacagcaaagaaaggaataatacagtaaatgttcaacaattagatatatgtcaaactctgtacacctctaataggaattacatctccttgaaagacactaatttggtaaaaaaggcatcaggcttcagcgtctagcacacccagctctgagctctagcactacactctactaagatgtgatctgggcagggcacttaacttccagtctatttttccattgcaaaaaatgtgtagattatcattcttacctcgctggattgttggggattaaatgacataaatattggaaggatttttttatggtggtggtggtttagtcgctaagtcatatacgactcttgagaccccgtggactgtagccagacaggctcctctgtacatgatatttcccaggcaagaatactggggtgggttgccatttccttctccaggggatattcccaactcagggatggaacccaggtctctcacactgcaggcagattctttactgtctgagtcaccaggggaatcccagagaaatgaagatgattcacaaaagttacagttttgctttttaaattttttgccaacacaagagtctgaatggagacactgtgccctttcacagttcctcgcccttctgctccataggacttaccccctagagtgcctccctggcttcctgggccagggaaacacagagacaggttctcctggatccttatccagccccttcctttcctcccactcctctttcgagtgctcccacggaagatcgctgcctctgacatcccaacagcctctgttctagagctgctatgacttaatctctgcaagattagctttgttattatcaccctggcttatctggtgtgctcacagcatgtgccagcttgctgaaagggacgtctattaggagatgcttgttctaacagtaggaggagagagcgataaggcaactgctttaccactgtctgaacagcctagcagttttgagtttgactgataggtttgtaaacaagaaaatcccgtggctggattcccaggcttccaaggcaatgacacatatcacgctgtgctgtccttttcactaacttagttaaactcattgatatgaatgaatgaatggttcaaggcttgcggaagactcactaggtgccaggttctacattagatgcaagagatacagacgtgagttataccacgtgtgcattctaggcacttgcgttctgattggaaaacaaacctaaagaggcagaaacacttatttaaaatgactgagtagtttttttgtgccaggctcaatggcaaacactctgggagaaagtgtgtcttgttgagccctcaggaatactcagtgttccattaagggtgatgggggctttgataggggaattcttagggttcactcaattcacttcaatgcttattctaggatattagtgctctgtgtgtgtgatataaaatatatattatggaatatctacatatcaatggatcaatagacagccattttcctgaaacagcttttcggagtatttctatttttggattctgagttgtgtctatttctctctgaattaaccatgctggttgctggttcagtcagtaagtcacgtccccaaggactgcagcacaccaggcttccctgtccttcactgtctcctagagtttgctcaaaccaacgtccattcagtcagtgataccatccacctccttcatcctctgtcattcccttctctttttgcctctcaatctttcccagcatca

SEQ ID NO: 43529 - DNA, 1553 bp, Bovine  19866881689139
  misc_feature (1)..(1): n is a, c, g, or t
nctatcagaaggcagtgtgagccataatttgtactctgtgcacactgactcctaggacaagtgaaatgcaggaatcctcctctgagtgcttggatagaaccttcagggtgaaagagataaagacacagtctacaagggtatcagtgataacagggattccagtcttctggtgttggacaccccacaggtttttgctttggcatcatttgcaacacctttatctcctcctaaacattttttttggtggcacaatatctgtgttttaaatttaaatggattaaaattaattttgtcttcagcattttgtaatatctgttgagcttttttagacatccttttctggagactgagtcttaatacaaatagactttctcctctcaataaatggtacatgattctcatctttggctccagttttctaatcttggctcagaaatgcctcaagtaggcaaatccagaagccagaattaccttagtgctctcagtcttaggaagccaaaatgttcttgggaacgcatatattcctaccactgtctacccgcacacactcaaaacagccctcagactcttccttctccaaagcaaaataaaaattccatcattctgaaaaggcactcttgtatttctgtggaaagtaaaaaatttccttaaggaaatttcaatactaaaattctaaaaatccactgctgctgctgctgctgctaagttgcttcagtcgtgtctgactctgtgcgaccccatagacggcagcccatcaggttcccccatccctgggattctccaggcaagaacactggagtgggttgccatttccttctccaatgaatgggataacaaaaacatgcgtgggcttgttcacatagttccagcacttagaaatctggggagtatatgccaggcacgcatagatgaagacccttatagtagactcaccagccaggtaaaaggaacgctctagaagtttgtttgtctttggtatgattaatgatggggcccagctcctgtcacacttgaccaacaatgggtcctcatccatcttgatgacaaaaagtgctggcgttcaggttatgtattcttttcagaagggacaggtcactcaggaaatatcttgtcactgcccttaaacagattgtacaggggaaatatccaaaattaatggaacctttggtagctagacagctaaatatagtatcctccatgagcaaagaccaaaggtagtcagggattctgccagcattctggcatacccaatacagtacaagtttggtgccttctttttaaacagttccatcacatgcgagtccagtgagcacttggagaatgacagaaatccagtgctcattttttagtctcacgttgatccatgcatgtgccattgtggtatacagagaactttctacataaaatgaaaatttctaggctgtagtaagaaagatcagaacacagtagttacttggttaaaaaaagcagttaagcctgtcaataccctgtcattgaggatgagaccaacactgccgtagtgtttgcatccaggcttgcaatcctgtgcagtt

SEQ ID NO: 43530 - DNA, 1537 bp, Bovine  19866880159543
  misc_feature (1)..(1): n is a, c, g, or t
ntgttactggttggggcataggcttggattactgtgatgttgaatggtttgccttggaaagccatgcctgtggggccacccaagacaggcgggtcatgggggagaggtctgacagaatgtggtccattgaagaaggggatggaaaaccacttcagtatcttgctttgagaaccccatgaacagtatgaaaaggcaaaatgataggattcagaaagaggaactccccaggtcggtaagtgcccaatatgctactggagatcagtggagaaataactccagaaagaatgaagggatggagccaaagcaaaaacaatacccagttgtggatatgactggtgataggagcaaattctgatgctgtaaagagcaatatggcataggaacctggaatgttaggtccatgtatcaaggcaaattggaagtggtcaaacaggagatggcaagagtgatcatcgacattctaggaatcagcgaactaaaatggactggaatgggtgaatttaactcagatgaccattatatctactactgtgggcaggaatcccttagaagaaatggaatagccatcatggtcaacaaaagagtccgaaatgcagtacttggatgcagtctgaaaaatgacggaatcatctgtttgtttccaaggcaaaccatgaccaacctaaacagcatattaaagagcagagacattactttgccaacaaaggtccacctagtcaaaggtatggtttttccagtagtcatgtatggatgtgagagttggagtgtcaagaaagctgagcaccgaagaattgatgcttttgaactgtggtgttggagaagactcttgagagtcccttggactgcaaggagatccaactagtgcatcctaaaggaaattagtcctgggtgttcactggaaggactgatgttgaagttgaaactctagtactttggccacctgatgcaaagaactgcctcattggaaaataccctgatgctgggaaaaattgatggcgggaggagaaggggaccacagaggatgagatggttgaatagcatcactaagtcaatggacatgagtttgagtaggctccaggagttggtgatggacaagggaagcctggcgtgctgcagtctatggcattgcaaagagttggagacaacagagcatttgaactgaacttgaactgaaaggtcaaagctgtatttctgaaaaactgggttaagagaatcacatctttcaagtcggcatctaatagccatagtttataagggctttcctggttggctctgtggtaaagaacccaccagccagtacagaaggcatgggttcaatccctggtttaatttctctagcttcagaagaattttggagttctctcataagatgatttaaatcccaacttgaatgaaactttctctttatcgtcttcaagaattaacttaatcatctagaaatttatatacacaaattcagtggcaaaaaatatggttaaataatagaccataaaatctaagcagcattcattaatatcatcagggcctaccatgtcca

SEQ ID NO: 43531 - DNA, 1877 bp, Bovine  19866880350243
  misc_feature (1)..(1): n is a, c, g, or t
ntgttgaactgatatccgatggaaggtaattttaagagttttctcctaacgccatttataagaatgtgaataaacttttttttcacttagtgcagtgtgctttaaaagaactaaaaagcataaaattaacaaactctatatttaccaacagcattttatagcaaggaaaatgcttgaggatgggaaaatctatggtgctactaaagacagataaccatatttgtgttttgtgttgtttctaggttttaattttttgttttgtttttttaatttcataagaattttatttagagctactgaacttctaaaaacaagtaaaattataatttcaatgaatgagaagcattattataaaacagaatgacagtttatattttgtttgtagcaaagaaaatgaaaaggatggcagacagagccagcatcttgaggtgagtagccaccaagtaaaagtaagattgtgactgtgacaggactgtccctgggaagatttattggcttatcaataaggggtgatgagattacgtgacaggactacggttgttgagaaaggcaaacattgagacataaaaattacttgagaaatcgtaagaactctattctttgggtttttttttttaattcttttatttgacttgttaagataaactttaataccagggagatttctccttagatttttttccataaaataagacaaaagccaaagctactggtttgattttccatgaattcaagcatttttttaagtgattgagacagataatagtgaatcatagtggatttgtcacagagataatttcattaattttcaaattaacgtaaaatcatttcaaggtattaaattcatttcctgagttttgtatcttgttttaagtaaacgacagagaaaataacgtctaactcccttctatcatctgtatcttaaagtttcggtgactttcctagcttccttgttgtcctctggtgacattgccttcctgacccaagtatttgatttcctttgtcccaatgctggcttccattcagtgtgctgagcttcatttttcattcatacttgtgtatataactcactacttccaaatgcttccaactgcaccttcagtcttatgatcagctttctttttggcaagaattaaagctttcttcaacctgttcttggattctgactcttgatatgttaattatgcatagaaccgccccctctaaccactgattcctaatcattttggggcagtaacctcactcactgatgggttgttcagtaatatatatatattgagtcctactgtgtgcaggtaatgtgccgggagctgggatttaataacagctgcagttcctacctccataaagttttccaatctagaaagttaagaattcaaaagctatggacccccttcttagaaaaacgcacacttatgttgaatttggtataaaattgctggaaatgaatggccacctgacacgaccaccccccaattctctagattcctcatatttcctgtttgtcatctgtcatgggcacttctttcattaacccagccagacaacaggaggggaggcttctccttgacttcatagcttctgagccactgctttcatcttttctttccaactcctttatgcttccttccttgggacccaagcaaaaagcagaccttctttctcatctctagtcacagtttttcagagcacagtgtccccatgatactgttttagtttccttctgtttcatcctttttctgctcccttcctcttctcacaacgagcacctactcatcgtgccattgaacattattttaaagaaaatggctttgccagcctcctggggaggtattctcagttctccccttttctgcctcttatctttaggagataaa

SEQ ID NO: 43532 - DNA, 1350 bp, Bovine  19866880357310
  misc_feature (1)..(1): n is a, c, g, or t
ngaatccgagaaatttaaatatatatatgtatatatatataaacatccaataatatgtacattttttacctctaaagtttgagttagaagaggcttctctaaaacggctctcgttaagccagagcatagttgctcttattactggaatgtgattttcctgataaagagcaatccatctttgacaaagaatctttgttcacactggtaatcttcaacagagtatcaaaatctttagtgtaagatctagtgcaatagtattaaatttccctgaagctctgaaagatgaattcctagggaaagtaccaccctcaaccttcaaatcacattaaaccactgtccatgaaatacctttataattatatgcaaataactattccagaagaaataaaaatcttcaggtgggaggctaagatacattcagaaagaacataaaataaaccataatataaatttaaagatatttcagttagcagaatgttagatgattgattttttttccaaaacagaaagaaccaagatacaatcaacataggctttgagaattacagaaaatatatagttgtgttttacaatagaaagctttgcaaaaagcaggtgtgaaatgtgagaaagtttagctgattttcatggttaagacaagttgtaacttcaactctctcgcctcctccactttttaaaaaatgtttgatctatatgtttaacaactctctaaggacctgaatttctacagatgtaactgacaaagggtgactttcaaaactgttccgtatttctctctaaagctttgtaataatcccagttttcatgttgtcttccacacatctgagactactgtagtcatagtctgctttcgccaaagcagcatgcgagtacacagtgttcctttgctaaagtaattaggttgcccctataccttttggaaaccggaatatgtgaagaacgtgttacaactggcaacctgcagcaattttttaaagaatgagactaacaagggtaggaaagatctagaagtacataacaaaagtaccgattttccctgggtgctaaacactttatagattctgacttccattctttgcctaagggtttggagagggaagattaagaaatagatcagccagtcccccacttcactgagatggggaaaggagaaaatgaaatggacaggtcaaagtaatggctgaaatttagaaagcttccattgtaagacaaggatgctactggactttcaaatgccctgtagttaacagtgctggtcttatgagaaaacagaggctcaatgacctctgaaggcttttaactgttttatgtgccaaatgcttctccaggtgggtaaaagaggagctcatt

SEQ ID NO: 43533 - DNA, 762 bp, Bovine  19866880518679
  misc_feature (1)..(1): n is a, c, g, or t
ncctgggtcaggaagatcccctggagaagggataggctaccaactccagtattcttgggcttcccttgtggctcagctggtaaagaatctacctgcgatgtgggagacctgggttcgatccctgagttgggaagatcccctggagaagggaaaggctacccactccagtattctgacctggagaattccatggactgtatagtcatgtggtgtatatagtcagtggagtatatagagctcttatcctaagtgtgacatgtgcttataataaactgagttggtttattccactttgaaaatttctacttagagtcaatggtgaaatgaaatgaaacatttttcttttcccaggagaagaaatttcgagcttgtatgaggttggctggcattgtggaccaagaacggtctgcattatcttcactgcccacctttaatctgatagtcagaaggagtcacttgattgaggatgtttttagtcagctaaatcaatttgaaaatgaagatctgaggagggagttaatggtaaagtataattcttaatatttttgctgctgagaaaaggaaaacgtaaaagaacgtaacaatgggccttacagagagggaattacatcccttttacgctggagttgtctgtattgcgggtcccctaattttcctcagttacttgtgaattccaggtgagaagctgccattgttctctggctaaggggcagcaggggaaatggttgccctctccagtactagccctagatattcagttcc

SEQ ID NO: 43534 - DNA, 722 bp, Bovine  19866880684110
  misc_feature (1)..(1): n is a, c, g, or t
nacaaattgattgaaagttatttcttgtttctagcaaatgagattgctttctaccctcacaagtgttttaataattaattattaagttaaatttttatgaactttagaaatgtaactcaaaatatatgaacaagccttgagcatattttaaaataattgatacagttattagaaggtataaatttttaattatagttgcctttgtgaaaaaaacaaggcccagtacaacctcatttttcccttgaaggtgaaatcctcatttaaagatactaattctaataacattggccaaatgtacggactgagacatttaaagtaattatgaatttgtaagtgatgtaataatttcattttgagaagattttttttacttaatcttctaaggcttttgaacttccctggtggctcagatggtaaagcgtctgcctacaatacaggagacccaggtccaatccctgggtcgggaagatcctctggagaaggaaatggcaacccactccagtactcttgcctggaaaatcccatgggtggaggaacctggtaggctacagtccatggggtcacagtcggacatgactgagtgactttactttctttttttcccaatgcgttggatgacttggaagaaatattctcaatctttaaaaagtgaaaacaaatcatttctccttctgagaactttccaggtcattataacccagtttttgcctttaactggggga

SEQ ID NO: 43535 - DNA, 1279 bp, Bovine  19866880815111
  misc_feature (1)..(1): n is a, c, g, or t
naaaaaactgagtgcagttgaattgctgccttgccctaagcatcattccacatttgctgctgttctgccctattaccttggctcattcagagtcgctaaccttgctgaagacttctaaagagcttaaattgcttcttgtgaaaggatcagaaataaaatatacttttattgtcaaaaaatgccaaatatttccttagtgtgtttaattatctaaatgtgtgggttgagtttctgtcatgatctgcaaaatatagcatacagtcttgacagaatgaatcagaagagattacgtgtgaacatgtgcactgcagcctgagtgttcccaactggggcaggggtgtattcagtgagagctgtgcacgaagcattcccagttgacccagggaatagattctagaagagcaattaaaattttactgtaacagattcctagtatgaatcagatgagcttagttttctggctaggagaaatgaaataaattggacttgatacaactaggattttaattctctacaaatctttgtgttactgaatggaacctctgcctttggggctgcaagttgtgttgtgaaataggggttccttccatgtctgttttggtggctgatgtatgatgagacaggaattggtttgcctagggcttgctccttggaagaaaagctgtgacaaaacctgctgctgctgctaagtcatttcagttgtttccgactctgtgtgaccccatagacggtagtccaccaggctcccccgtccctgggattctccaggcaagaacactggagtgggttgccatttccttctccaatgtatgaaagtgaaatgtgaaagtgaagtctctcagtcgtgtccaactcttagcaaccccgtggactgcagcccaccaggctcctccatccatgggatttcccaggcaagagtactggagtggggtgccattgccttctccggtgacaaaacctagacagtgtattaaaaagcagagacatcactgccaacaaaggtccatgtagtcaaagctatggttttcccagtaatcgtgtatgggtgtgagagttggaccataaagaaggctgacacaatcctcctttccaagtttaaagatgagtttgttgtctcttgacttgactttgcttacttacttcatcagtaaagtttccagtttcatcaggattggcaggtagttgaagacttgagagtctcctgcatagcaaagagatcaatccagtcaatcctaaaggaatgtaatcctgaatattcatctgagggactgatgcctga

SEQ ID NO: 43536 - DNA, 1667 bp, Bovine  19866880893761
  misc_feature (1)..(1): n is a, c, g, or t
ntcttgctatttttgttgctactgaggatgtttgaggacaacttttccacaaacttaactacttctccacaagcccaaactaccttcccaatgttctttcttaatgggaaacttttgtttcagtccagggattctgttggctgtacattcagtgagttcacatacatcttctcctctggttttttctttctgcctgaagcttccctgtcaccctaacctggcacctctctgcccgccttgaggctcagtgtcttcattatctcttcacatcatacttcctagctgagctcgactaaactccttgtatcttgctgttatcttttcacatacgtaatttccccccaactagatcgtgaactcaccaaagacaaagaccaaatgtcatgatttttcttcaccccacatggtcccatgtagttctctttgcacaagggggacctgataaatatttttgaatgaaatgattaatttcttccttttcattttaagttttgttctttctgtgaactaccttaactgaagcttatttctttttagtttttcttacaggaaatgatagactacatgtaaaaggcatacagaaaccaggaatccggtttcgctgtcctgagacttgcagtgaaagcgatttcccaaaatcactgacatgtcataatattctggaactccctgaatattctacaatgaaaaaagtgaaggaagcacttcgaagagccatcaacagcaacaaaggatttatctcagccacagtcacagggtgatagtgacctctgagaggctcacatctcgggtcctctcaccctacgatccttctgttctttagtacaggagtacagtttcttctttaggtctgattagtacaaaggttgatgcattttagatagaattagttgacaaatgctgggataaacaatgacatgatgagtcaaggataatattgttaataaaccagcatttcctggtccttaaatttgctatgagaatgattgctttttactgaattatttcctgaataataattagcattttaaaatgtactgaatattaaaagctaaaagatactctaaaaatattgtacatctaataagtgaaagtgaagtcactcagtcgtgtctgactctttgtgaccccatgggctgtagcctaccagtctcctccatccatggaattttccaggcaacagtactggagtgggttgccatttccttctccagaggatcttcctgacccagggatcgaaccctggtctcccaaattgcaggcagacgctttaccatctgagccccagggaaactctaataaacaatttacaaatatgaagtttgaaaaaataaagctgtaattgaattcaccatgttttgaggcatgtatgtgtgtgtgggtgtatatatatatatatatatatatatatatatatatatatatttgtttgttttgttttttttcctattctgggatgtctccagagttttgattatagccaaacaatctttttgaaaaatctaaatattgtgttcagtgctgtgttctaagaatcgttctaaatgaaaataacattattttggctaaaggctgagcccaaccaggaactcctgtctaattacagttggaaaaaaatgaagaacatgaaatatgtttcagcattatagctatagaatgaattaaag

SEQ ID NO: 43537 - DNA, 1066 bp, Bovine  19866880951456
  misc_feature (1)..(1): n is a, c, g, or t
ntactctacttcaacagggtattataattttctagtattttagccattatcttgttgcagagatcttgttctttcacaccttcaagcccaggtggcacactagaaataaagggaaaaaattgagagcaatgactttgtaatagcacaatgccagcacagctgactcatgcttatacttttacatttcctgaatgattgatcagccttctcaaaaggacacatgggattttcaataagctctgtggtgacacataggtattgtttggacaactggcaagttcccaagatctgaattaatagcttgtgctgaataataaaagtacatgctgttcaggaagaaggtataggttaacatgggtgcaatcaataatgctttgcctatattagaaattgttactcataaagtattaacatttatttttttaaaaaagcaaaagctagaaagaataagtgttacgacaaaaagaatgagtgttttatcatgttagaaacactcagttacacaaataatagcaatatgatctttatttaaggatttcttagataattcacaaaaggcacaaaacttgaaaggataagatacttctgggaaaaatactggtagttgttgattatgcacatggaagatgtattattactatttgctcttctttggggtatgttaaatttttccataattaaaaaaaagtatacaaatctgaatgcagaagacactatatacatacatatacatatatatatatatagagagagaggaaagacaagctatagattgaaagaaatatctctttagtaacatgggtaatgggtataggatttagtaattacacctaaagaattcttactaatcaataagaaaatgaataattatttttttaaaagatagagaaaagacaaactgacaaactcatatagaagaaaacacatggacagtcaagaatcttaagatactcaacctcactgagtaaccagtgaaatacatcaaaaagcaacaaagatgtatcaattaatatccatctgtattaatttcctacagctgctgcaacaaagctatgaccaactgggt

SEQ ID NO: 43538 - DNA, 1323 bp, Bovine  19866880962702
  misc_feature (1)..(1): n is a, c, g, or t
ntatgggttattgggaggattaaaattgataatatatgcaaagcacttaaaatatacttttgccaaacatttttcactttattacatagtcttcagacccgtaatttttatttgacgcatatcttattgaattgacatacaaatgttacttatctggtctcttacttttgaacatttaaattgcttctaattctccatgattatagacaaccatgtggtgagcaaatcagtacttctggtccttttcatatgtacgatgctgtctccagagcaggatagcagaggtaggattattagataaaatgcctgaattatggcttttgattcaaactgttaaactgtgccctagaaaaaatatttttgagatagaggcattttctaggccaacagaaatgagctagtggtgaggaagcaatgaaaagtgcatgagtgagtgagtgagtgtgtatatgtttgcacatgtacaagacgtagagagatagatgcagaaaacataaatttcaaggatatttaatcttagattttagaaaaatgtttattatttgagcaggtaagaaaatgggtggagatctagagaaattctgaagcaggaaagagggaagtcactgaaacacaaacttgctgttttagctgttcaaagacaaaaacagcaaaaaagctttccatctgagagaggctcaagagcacagatgtgagctgatggtgcaagaagagagcagaaggttctgaccacagcaatcgttagaggtactcaatgccactcactaccactaatttctgagttcagaactatctgcagtctctcggtctctgctgctcatgatagttcaaaagggaaaagaacaaggcaaattactacagacagttcccactctagaggttcttaatctgcaagttgccctttttagatctttttggctgtgttatgggctggtgagatcactgtaaaattatcactcaaactcttcagttcctctcctcttgttttctctggaaaatgctttgctcccatatctccatcaaaactgctcttactgagtgatctccagcttgctaattccaatggctaaactctcactgttctactcagttaactatttgaccttctttccagctagagatacccggttcacctggcttccaaaacatcaaacacacctcattttctcctttttttgctgttgtttccttcttaagtctcatctactggttccctgttatctccccatcctctgcatgttcataggcctcagggctcacggtccctgaggtcacttcccttgtctgttcaaactcacacccttgattacttcatctagtata

SEQ ID NO: 43539 - DNA, 855 bp, Bovine  19866880962940
  misc_feature (1)..(1): n is a, c, g, or t
naaattttatagaatatgcacttacccaagaccatcttgattttcattgagctcagaaagtctggaactggatttctgacgtttaggtttacccctttctccaatataaccagaagtattttcatataatttttccacttcacaagcattcaacatacattcatcaagattgctgaagccagaaggaatattttctttgttgagacgtccccttgaattgaaaaaaaattagcttcattttactttaaaaggtaaaaaggatgttttaaagacactgcatcatgcagaaagaagagtgcttagaaattccatgtttcatcttttataaaaatctgagcagagtgctactcctgagaccacttggtgccaaatgtatcagattaaaagagaaattattcctaaaggcaaactggcgagggctgtgtttctaccaatgaaaagcttttgtatttgtaccgaaagtaatctgtattcaaaaccaggggaattgtgcaaacttgcaaagacatttttccattattcataggttttatatacatacatacatacacgtacatggatcttataaatcaatataatatattaagaaaaatccgaaaaggaaatacatctttttctccagaatgggacactgattttctccaattgagaaagacattttatcacagtataaatgcattaatacctaaatctgcctatattatatgatctgggtaaaaatgatataacaagaattacagaatacaaagaaagcatttcaactgaaatatggattcattacttcccagtaccagtttctgaatgaaagcttataactaaagttccttcgtgacttagttttagaagttttaatta

SEQ ID NO: 43540 - DNA, 953 bp, Bovine  19866881021526
  misc_feature (1)..(1): n is a, c, g, or t
ntaagatttaagtttatgttttcagactatatttgctatcagatatagaaaaatgaaagacccccaaacctcaagtgatattcagaccagctatcatgtataatgaacacatttttataagctggactttatatatttctagctgacataaaactgttttatgaacaaaaatattaataatttaaaaatagtttaatctacatgaaggcttgtataataatcctataatgtgattacctcatactgttaacgttaatgaaacaggatgatttttcctgaaataaaatagcacttgtttgggaatcaagtaataaaggtatttcactcaggaaatcactaactggcttaactgggtatgtattaatatacaatgatcagtttcattatgtaatactttttgacgcatctacatgttttaataagtcagaaatgtaataataaaataatgataatgagctattgaaaaaaatcagagtgtactgtgaggtgtatcctttagagtataattcagaaagcacttgtggacttaaaatattgcttctctaaaagtatttctcagcatgcatattcagttagaaaaaaatattgtgaattgtttggcgattttgacactttacagttcctaaaagtggtatctggcagtaatgtcctggtgccttcaaggacaggggccatcgaagatttctctcttcacctacagcattgctgttgcatgtaaaatttaactatcatccacttgcggatattactttttacacatggattgtcattgcttataaaacacatatggaaaaaattccattaaagtaaaaagttatatactacttaccatagaataaacaatgaaattaaaagattaccacaattaaatttaatctaagtaggtcttaaaatacagcagtttgcaaagcaatatggtaattcattgcctttggaactctcagttctagaca

SEQ ID NO: 43541 - DNA, 1227 bp, Bovine  19866881109561
  misc_feature (1)..(1): n is a, c, g, or t
ncctgtaaattcctcaaagttatgaaatcagcctaaggacaaccaatcaaaaaacaaacaagaaaagccgactaggctttaagatacagctaatcaaaggcttcctttctttctgcgccttctctatgtctttccctgagctcttaccactggagctctccaccagttccaaactggtgctgtgtgatgcagatcgatgttcactcttataaactcttacaatttttaacctgcctcactttatctttcagtcattcccaggtatattattggagatcaaacagggagggcaaggaacagttgacccagtgttcagcatttaacaaaggaaatgataaaactactaagatcaagtgtcaaaccaagtagcagagaacttggactctcctctgtggtaataagactgttaatagttaaaataaataggatgtgttttccttactgggctcacaataagaccttcaacgtgcagcccgggcctctaagtacataagtgaagttagaatgagttgatcactcctagatacaaagattctggaaaaaacaccattcttgccaatcagataacacaggagggcagggcagaggaaggaacaatgtaaattagagattacaatttgtagtagtccaatgggaaattcctttataaaacagaattctgtaacaatccatgggagttttctatgttggattttttggttcatagataacaaaattcacaaattaaaatgactgagtctaaatatttcatttaaaatattctcccagtgttttaaataaaggtaagtctctttaaataaaggtaattataaatattacctcttctttaaaaaacttgcagtcagacaagcaggagatgaaaatatcactctaatttcactgcaaaaataataaaataaggttaagtcacaacatactactagcatgttccttttattttactcagtatataactgggtgatgtggaatcattaataatgataataactgctctcttaagagttttccaaattcttgctatactttgtgcgtggtctgctagatctccataaaaatccttcatagctgatttgatcaagtcatctagatttaaataaaatccacccttttgaaaacagaaatttgtggagctgcagagaataaactgctgctgctgctgctaagtcgcttcagtcgtgtatgactctgtgcaaccccatagatggcagcccaccaggctcccctgtc

SEQ ID NO: 43542 - DNA, 4528 bp, Bovine  19866881197747
  misc_feature (1)..(1): n is a, c, g, or t
nattagacttttcgatgtctaacagagtacttccttttgaagaaatgagagaaactaaaacaacatcgattcactgactggaactgtgataaattgactactgtccagtactgacatgtgctggctaatgactctaatcttgttatctagtccacacagtgtcaccaactgtcagtaacaatcatttatttgagtccattttaaggaaatcccaattgctaacatcctgttattctaccagtgtcatttgtaacttctaaaaataaaatctttactctttgacttgtctttggtgttgctaaacattgttttgccaatctcaagagaagaatgcctgcaatcatgtttcaccttgagtgattatatacccttttgaaatctagagatacagctctacaatacagagcttttctgagcctgtgcacataaacacgccaccgaacgcacaaaaggagtctatgaagcacaactggtttcccccggtgtttgtcatttccagataaaacattaggtacttaaagaacagcactaaacctttgcagctgctcaagtacctgtctgtgtctcaagtaatatcacctagattttcgtgactcggtggggctgggctttcttggcgcttaggaaatgtgctacgagggagtaacaccgttaaatgaggagcatataatctgatatcaatctgtgtgaaaccaaacagtcatgaaaagatgtaattttcaattagttgttttaatttgtgatcgatttaaatgtaccagtatgaataaaatgcatttacgtgtgcatacatatgtgggtaatctatttacagttatgttatgtatacatttttatgtgtagaaaacaaaaattcacattgattagcctttttgaggcttttgaacaactgtttcttcttcctgttttccactgctttgagaatttagataattcatacaaggtatgtacacaatcacacccatagtatgtacatcctaatcacacaacacagagaagatgtgtgaggaatgtaaatcaacccagtggtcaaagaactgaccttacctgtgactaatggcatggggaattagccctggcatatttggtaacaggccaatctactgatgactgcattcagcctttgtgataattatgttatctactctgggagatgattaagagaagaaaacaacagccctttctgaccttcaaaaacgaaaggacaaattctgtcacttaacacacatgcacacttctgttggttttattcactttcggccatgtgcctacctgatgacagaacttggccttaaaatgggatgcagcgttttttttgttttttgttttttcctacacataaaaatagaaaaccaactgctcacagtctgtacatacttacaaaatgtactgatgtaccacaaccagctacagggtaatgcacaatatagtgtttacatgttagtacagcagagataaatacatttagaagtttagtaattcttagtatatttccttcttgggtttacaggccctgaagacctttctcaaatacctgggaaaggtatttccagatgcccttaaaaacaagacttagtctctccaaccctttagggaatggggactgtgagaataatactgtaatcttccaagttaccaacatcagaaatgatggaaaacattttacaaaataatttactcaaagatgtggttaaataaatgctacgaagtctaaatgggtaagccccttctgctcatttcatagtttgctctatacataacacaaaaacaatatgaaccataaaaaaaagtttaacttctcaaaagttttgcttaaaaataatttaatttttaaaggaacaaagagtaatgctagcagcaaggtcaaaaagcaagctatccttttcactccaaaataaacggatggcctcccatatcttaaaagatcgagaaagaagttagtgtttcttccccactcaattctctttaacacacttaaatcattagggtatttgtcatcacaactatcatcatgctggttgatcatgagtacctttttctaaagtgtaaaatgctgctgctgctaagtcgcttgagttggaaacacgtgatctttactccagccagttgatttcgagcttgaacccaaaagaatacttggtgaagaattagtatttagaaacgcccatctacaacatcatattcacgttttagctagtcctcatttgagaacccatttatttcatagctaaatctggtaatctccaggcagagttaactgaattgctttcttataggctagtatccagggagagtaattactatacatttaaccttccatttcaacggtgtttctggatgaagctgtcttgaattttaagctagcaagactcttggtgattcctttggtcttgactaatgttaaaacagagctgttaaccatcaggtctaatggtcactagtgttgtgcctctctatggagctcttacgtaagtttttccagcaagaaagcagaaattatgcctttgctacttttatcccatgggttatggtcagtcttcatggagcaaaccataaatatataatggtgtgcccataatagatgcacttggtgatataactgcctctttttggcacattattgcttgactttaatttcattatcaacagtctttattctcaggatgagtagctgagatatctgggtcttagaaaaacacaccaaacttgggaataacaccttgttgcaccattctggccctcacagtcatttcaccaaggcttgccgttattcaaatgtccttttgattatcaccttgatttacctaacagccaacagtaatttttcagggtttttttgttttgtttgtttctatctacacatatatgccaatgtactggatttgctttgagagaggttatttggttgtggcaagtgagtagtttagctggtgaatgttcacagttaaaagtagctgtaatgaactctggtagatgtcactgatttgtgagacagaatttttccacttcaatccatcttcatttatgtccttggtcattgcaaatcaagtttattttatttctgtagccaaggagaattcatttttttccaacagtagggtaaaggtcatggaaatatgtttcagtctttccaagattaatttttccccttttgcaaaaaaatgtctaaaactttgtagatatccttcagcccatgtgtctacacaatgacatttataaattactcagctggctgcagaatttcattaagaaggataaagttacaaagttggacaggagatctggcacgttacctgttatttgccaggtggcagcagctgacccacctttggagattcaacccaaagggccacacatggaaccaagaacattgctaacagaaaagaaaatgctcagatgggaatataaaacagcaagcactgaggcagaggagggcaagacttctggttcactgtgtagacagaacagggatagagacaagatggtcagtttatttatccaagatactgctgagttcactgcattattatcacaaagggaagttcataggctctgtttctcaaataccgcttagaacaaagctggagagagtaaacagcgtcatctccatggcagcattggagatgattagtaaatcagacacgtagaggcctacacaaggctacaagtgacatttgtgatattcagtaaacacacacacacatatatatatgcaaaccttatcctaatgtattgttttcctttatactgattcttaaaaaagtagacaagggctgtggtaaattatgcggtactagaaatggacaaattgttaaacacttgcacaatatgtaggaggaagaaaagacagtttctcacattttggaagcaaaacagtaacaaagaggatacaacagaggccaaacaatttacattaacagcctattcatataggtcctctgtaaacaaatcttaaagtcacatcatatcctagtcttcatgtggtatatacagatatttcccaaatgataggaaatcccagagttgagaggaagactatcagaataagctagaacaataaaaaccttaatactcttagatacaacccaaagcagttttccttttctgctttcttaagatgacaagctcttgttaagaacttggttccaaaattcaacctctagggtatatggtacacatgcatattcagtcccatttattccagttatgatatttaacctataacatggagaacactgatatccaaaataataaatattcgaccattctaaagattaaagatcatcagaaatcaaattatattcaatagagctgacttgtcaaggtaggaaaacacagtaatatttttttataaatatttcattttggatgcaaacaaaaaaggtttctggtccactttggcctaacaaaacgtttaacacgtgccatggatccaaaacacaaagcttaattaggatttcagtgtatgtaaagtagttggtctgtggcatcaagggtaatactccaaaaagacataattagaaaatca

SEQ ID NO: 43543 - DNA, 1227 bp, Bovine  19866881241810
  misc_feature (1)..(1): n is a, c, g, or t
naatgaacccccccctgttaaggtaattggtgctttctgaaccgaagaagcctgtgtgtggcatctaacaagtcaggtttaagaaaaagatgtcagcgacttaagacccaggtcacgtgactccgtcagttcaccagtcctagaagctgtggatcaaatttcaactccaggcagtcctcccagccatgtgggtttagccaaatcagaagcaaacccacacttccgaaaatgttaggagctgccctggactttccgtggggcctctggatctggagctgtgttttatatcagagcatatcgaccaaatggaattctagtgttttgctgctgttttgatcatttcatccagcctccgtcagatctgccaggcgagatgggggctggagctctcgccatctgtgtgagtacaggccgcctctgtctcggtggacgctgccagggcccaggagaggcctctgccctcctggtttggaggagatgtctgtgtgactttgtttttccttcttaggaggtgtggggagatttgttaagttaaattcctaactattcacatggacattcagcagtatttggggtggtattccatgttatcgtccagtttccttttccacatgaaggaagatgtgtgctgagtttactcagttaagtaaacttacatactgtatgtagatcactctccagtgttttatttatttttttcccagtgttttagactttcttgttctgagttaagtatgagttaaattgtagttattggacatatcttgtgcctagatttagagcaaactaaaagaattaaaataaccgtcaatgtctttgcttccaagaatgtatgtaacatttttctatttcacatttttgttttaatttagtaattctagaatttttgttttagcatggttgctaaaagtgatggtgaaagagctaagttgataaacgtgtgtaaatccttaaccacccgtacaaacttctggttataatacagtagcagtaataaaaaacacggatataaaatccatggagaaaggtgtgtatttctagggctgaaattcatgaattttcaaaaaaagcaattctcttggtgcttacgagtacccttttgcaataacccagtatatctacaattacataaattacagaatgctgtaattacatctttttaaataatacacagaaaatacatctatctcaaattggtactgttttccaaggggcattttatttgtc

SEQ ID NO: 43544 - DNA, 892 bp, Bovine  19866881272564
  misc_feature (1)..(1): n is a, c, g, or t
nctcttggaccctgctgtctcaggcagtcatatatggtatggtgatatctccctcctttctccatccttcaccccacttttggactgaaataaccctctgacccaagaaaactaatccgtaggtgataaagtaatcttcaccctctaaggccagattcaaaaaacttcatctggccaaatgaactctctttctcatgaccagacctaagaagcaaagaaagaaattttcagttcctggtggaagctttagttgaatatgatacaaaatcaggacttgggaggctataatgtaccacatataagctaaaattatggggaagcagaagttataaaaagcagaaacaggtattaaagcaagatagaaagaagtagataaatagaatagaactaacattaacagcagagtagtaaaggaaaaattcttgaatttctgcatataaagtttctagaatgagcttgaatccaaaaccaatttcctgcttcagtttttgaatttccatgaaatcctaatttcctttttattcgacatgaactaatttgaaagggtctttgttgcttgtagataaagaaataactaaaaatattcagcataaacttgttacatttgacagtaattgttttcttcaagtggcgagaactctaaagaacaaaaactctaaagagaactcttaatgggaaaagtgaatggaaattatttgggggagtagtgaaggaaaaaatgtatgttgcttaatgttgctgctgttatttgttaggggcttctctggtggagaaggcaatggcaacccactccagtactcttgcctggaaagtcccatgggcagagaagccctggtgggctacagtccatgggggtcgcaaagagttggacatgactgagcaacttcccttc

SEQ ID NO: 43545 - DNA, 1057 bp, Bovine  19866881344702
  misc_feature (1)..(1): n is a, c, g, or t
ntgctgtccaggtgcaagctccaaggtttttcccggagagagattccatggggactgtacctgaccctctgagatcagccaaaacatccctgattgcagcttctggagaagaagagggcctgggagaggtgcaggttgcctcgccccagcctcgaccagaagtcctgagtgagaacaccaatggcctttccagcactcctgcagagccagacctcagccccagaacagctgccaaggccctgatgcaggccagtgagcatgtgcccacgcaggcagccatgtcctctcctgacattgtcagtgaggtggggaaggcatctcccacactcaactctcctggcaatactcagctgtcagggggcagagagcccacagcaccagccctgtgttctgcagcaggcaaggatttaatacctgcagcatttacaatgccagccaatcagcacatccacccagttgtcccaggcaaccagccccatgccagcccccagtcagggcctgaagataccctggtgaaatcacagagaactgcagatggagggcaacctgagaagtcaagttgtccggtggtggtcatctgtggcaaagatcaaatgccctgtgattttccttctcaagaaacaatgcagggaatggtgcaaactgaagatacagcagccaggtcgttcagtcctacttccgctactgtaggtggacccgaagcagaaaggcagcaagctgtttgcacttcccagacaaggtcctgtggctctccaacaggagaagatggatgttcggggaacaaaccaccctctgccgccacctcagacacccaggccatgacttcggtgattcctcaaccatcccacctccctagcaacggatccatgtttcctccagatccagagaaggtgccgctggcagcacagcctcaagtgtcaaggtttaaagaagcaagtacgatgaccagccaagctgaaaatgagatcaagaaaaccccgcccagggctcagcaagatgccgaggtgcaggcagtggcgagtgtccagagcagatcggcgtccaccagccccagcat

SEQ ID NO: 43546 - DNA, 833 bp, Bovine  19866881349418
  misc_feature (1)..(1): n is a, c, g, or t
ntttccttggggcttcccaggtagctcagctggtaaagaatccgcctgcaatgcaggagcccccagttcaattcctaggtcgggaagatcccctggagaagggacaggctacccactccagtattcttggatttccctggtggctcagatggtaaagaatccacctgtaatacaggagtcctgggtttgattcctggtttgggaagatcccctgggggagggcatggcaacccactctagtattcttgcctggagaatcccatggacagaagccctggtgggctacagtccataggatcgcaaagaatcaaacatggctgagtgcctaagcacagcacagcacagccatcattgtcttgaaaattacatgggaatctctgtcactcaatctatagttttttctaatacttacagaggcttgaagaactgtattttgtcctatatgggaaaatatggttctaaataatggggatcttaaccatggaccacgactgagtaacctcactttcacttttcactttcatgcattggagaaggaaatggcaacccactccagtgttcttgcctggagaatcccagggacagggaagcctggtgggctgccatctatggggtcacacagagtcggacacgactgaagcgacttagcagcaacagcagcagccatggaccatagatcttaaccttaatccaaacaaaatgtcatttaggcataataacctattgtatcctgtctgctctggttaataatttctgtaataaatttcacagttgagggattaagccttagaaataattatgaaatgagtgaatacaaactacattagcttttt

SEQ ID NO: 43547 - DNA, 689 bp, Bovine  19866881764331
  misc_feature (1)..(1): n is a, c, g, or t
ncatgagagccttactgaaacacgtgaacttaaacatgcagtagaaaaagaaaaatactttgtgacctcacttctatgtggaatctaaaaatattgaattcacagaaacagtagagtatttcctgttttgttttgttttgtcatgttttatggaaaatgtcaaaggatgagatagttggatggcctcaccgattcaatggacattaacttgggcaaactccaggagatggtgagagacagggaagcctggtgtgctgcagtccatggggtcacaaagagatggacacaacttggtgactgaacaacaatggaaaatgtccatatcttattttattattattaatgtcatcatttgatgccaaagagatgaaggttattttacaaactgagaattttggcaagtacatgaaatttccattttattgtagttttatatcacattaattcaaatacattgtctataactactccaacatggctcccttggaattatttcagtcatccttaacatgtgacttttaccaaagactttgaatttaaaacaaacattgggcttctctggtggtccagtggtaaagaatctgcctgtcaatgcagggctcacagggtttgatccctggtctggggagattccacatgcagaggaatcggtgcttcacaaatactgaacccaagctctaaagtctgtg

SEQ ID NO: 43548 - DNA, 1004 bp, Bovine  19866881868685
  misc_feature (1)..(1): n is a, c, g, or t
ncagggaattgcagccctttgtgacttgctccaaagctgctctggcgggaagagcattgctgctgctgctgcagatgcaaacaaaagaatggggagaggcttggcagtcctgggccagcaagataccaatatgctgcagatcatggtgacaatcctgtggtagcaatgacctttgcctacttaacgacgtctgcgctgctagaacaagggctccaggatgtcatcagatctctttagtgacattaggaaaagcgttacagggaccctggtgtccctgcttacactcatctgactgcagccatcatttggatgttcacaaagacccttggagaacagtggggtgagagataagagactgttaatcctcaaaataaggataaagaaaaaatatcatctggtttcctattcaatccgatttgatttgctccctttacttggaacctttgcctagatcatttgcattctgaacccagcagatcctgccaatgcacagctttagggggaggtgattcagtcccaggaaaacacccacaggctaggaaaagcagttgctgcttctttctttaaaaaatcataccctcacactaatagctgcctcaaatgcactcttcaaagatatcagctgaaaaactggttcttcccttcgaactgcatctaaagtcaatcagaaggctcaagagacaggcagtctctgctgtgcgccaagacttttgtgtcccagacttttggttataatggtcattttaataaaggcacatgagacacaggctgcatcccttccccattcagcttttcttttgttccacagtttttcagaaaaacaaatgcatggcttgtgagctcattgaattccatggtaagcagggctggacaaaaacaaagatgtaaaaatgagctttgaaaagcatgaagaccacaaatatatccttcctttttgtcaaatatattgaaaagatgacttctaagttcacaacgattagaagcacacagtacagcaagcactc

SEQ ID NO: 43549 - DNA, 1298 bp, Bovine  19866881872119
  misc_feature (1)..(1): n is a, c, g, or t
ntgagaatccagataaagtgacataaaagtaatcaagcttactcaggacttttgaagattgattggtcattttacgaatagcctctgcaaatggaaccaccagagttatatagttcctggaatcaagcatgacaggacactctgggagcagaaggaagactgataaagcttcttggtgtgaagaatgacatggaagagccccaagcagattatccttgagacatgcggttatctgtggttgaaaaacaatcagggaaaggcccaggacatattagatacagtatcataagaaacaagatataagaagagaggtttcatatctactatgttcctaatggaataataatttagttttcctaaaacctactattcaaactccatcactcctcgatatcccaaatccccctaaagtagtatgtgagaaccatcttccctattttatgttggagtcaattaaagaaataaaagtgaaatcacatgcctggacctactgaacaaatcgtgaaggttgctcaattagaagggatccatacctaaatctatctcacctaaaatataccgtagcagaaaaaatgtcacatgttcacctcaccaatcctgtttcatcttccttcagggctcacaggaagatggcattgcccggccttcctgcagttaggtggagccatgtgaccaggttccaactaatggaatgtgagggaaggtgatatatgatacttccaggcttgacccctgaagcctctctgtgacctttcacaccctttttcctcatctgccaatcaacatgaaagatctaccggagaattttatggccctagggcctagaatgccacagagaatgagcctgagtcacccctgaatgagcttgggtggagttggggagggtaacagaatctgccatgcccaaatatgccactctgacatgacaattattttaagctgaaggcaagtgagaaaaagtagacacagaatgagctctctggcctccccaatcttcctgaaaacagaacataattcccctcatcaaggtgtcctcctgtccacaacttcccatatcaggaagggcataacagtctcactagcagagctgagctggcccgccacacagcaaaccttactacctagcccttatctaccattactttcttcatatatctgccttccaccatttgccatctaagaagctcaaagtccttttcctttgtcttttcacttctctacaaaattattgttcttcatttgctaagttgctatcatgaagtgaaagtgaaagtgaagtcacccagtcgtgtccgact

SEQ ID NO: 43550 - DNA, 998 bp, Bovine  19866881924765
  misc_feature (1)..(1): n is a, c, g, or t
ncaatataggcagtatccaaactaattatattcctaaacatttttctataaagcttactcagtaactaattttaaatgtaaatatgtcctatattataattttcctatttgctaaaaggaaatgttatagcacccccttcctacccaccagctccaaaacaaatgttttcaaaaaagtgttgcttattatcacatgaaaagtcagtgggttacataactgatactttttaatttttaaaattatgtttgctaaaatagctcttaaatatctcaataatgtgcatgtgcaacatggaatttacttgtactatttatcttatatctttaagcaaagataagtttctttttccccataaacattttggcatagatgacaagtccagatgaaaaagaatgtggggaactagggtttggtttagtctttgacatttaataggaagtacaaaataactttatagagactaaatgctacagtaggcgaaactttcaggaaaaatatgagaatatagtctattatatataaatttattttccttaacaatttaaatcatgattattcaataacatgaatggtaattattcatttctatttttatcaaagcttttaatggagaagagtttattgtaatactcttcttgaagttcatgctaagagaatgctttaaaatgagacattgtaataataaagaactcaagcatttcctcttttgttagacttgagctcagcctttcttatactaaaacattatcaactgtcagagcattccagtgacgttctggtatttaatcaggtcaatataagtaggggaatctgctggctcataagaaaatctaacagcaagctgaatgttgtctaacaagggaaaaaaccacctctagacaggcatctggcaattttctcctccaatggtgcaggatccctctaaataagatattgacgagaaagccattaaatgtattaaatcagaggtagcttcccaccacatacgaaacatcca

SEQ ID NO: 43551 - DNA, 1009 bp, Bovine  19866880344182
  misc_feature (1)..(1): n is a, c, g, or t
nttctgaaggagatcagccctgggatttctttggaaggaatgatgctaaagctgaaactccagtactttggccacctcatgtgaagagttgactcattggaaaagactctgatgctgggagggattgggggcaggaggagaaggggacgacagaggatgagatggctggatggcatcactgactcgatggacgtgagtctgagtgaattccgggagttggtgacggacagggagacctggcgtgctgcgattcatggggtcgcaaagagtcggacatgacggagcgactgatctgaactgaactgaactgaagctgtccaagtcaagttgattggtggctgctggaaatggttggtcctgctcccagttaacccctcctgcaaagcctatgaccagctcccatttacaaaaacctcttcattgagctcagcagccctggaaaatgaaactgtggctcagagaggtaagagacttatacagtcaccccagcagataagagcccaggaaaggagcaagaatccaggtcttctgaatgcctaaagcaattcccactctaccttattgcctctcaaaaacctttccattaatgaaacatactcttcgaaatgaaatatattcataatgaaatatacccttttctccaagttagttgtgaagagcaagcattaagactatatcatatactgagagtgcacttcttagaaaaataaatttaattgcagcctcttgattcaaatcaaacccactttgttttaaactttccattacggtaacatagagctgcagagaatgtgctttccatcctaatttgagactcagatggcagctcctttcgtacttctatctttaaaagcctacctcccccatcccccgtcttgttatcttctcttccacttgccaaacaaatctccaaaaaaaaaaaaaaaaccagaactgattaaatgcctaagggaaagaaagggaagagctcaaaattagtagaatctgttcccacatgttcaggttaatt

SEQ ID NO: 43552 - DNA, 1671 bp, Bovine  19866880447941
  misc_feature (1)..(1): n is a, c, g, or t
ntgtttggtaggaatgccatctccctaaaagctgcatgataaatacgcagtcattttagaaggactcaagtattaaaatccagctcctcaaaggccatcttaaagtctggcttcccaacagccactgactttcccacgatccagtgaaacctgtacatattccaacagttgctacctcttggctaaaggcagctagctaataagcctccatctaacaggcccttttctttcctggcaagtcaacacggagtgtccctaagaaacctcagactgtctttggccaaacacaagtagggaaagggggtggagaaaggaatggtcatttgcctttaaagcagagttcaggtgtttcaacctcaccttgactgaacctgcattggaagaactttccgtctcaccaggtctgagatctttggctctcggcaggctagaaagaaaaagttaaagctgcataatccttttccatactaactgttcacaccatgaattcagattcatacctgaccaccctctctggacaccaagtgcacattccccaggctctcagaagtgagacgtgtcagccaagcacgaacagctcgcttagcaaaagagcatcctgagagacttccctggcggtccagtggttaagaatccacctgccaatgaaggagagccaggtccggtccctcatccaggaagatctcacatgctgcagggcaactaaggctgtgagccacagatactgagcccatgctctacagtctgtactctataacaagcgaagccaccccaatgagaagcccacgagtgcaactgagacccagcatggcccaaaataaataaatgaattttttaaaaaacagagcatgctgagtttcatttattaataaaatggcatccccctttgaagaaaccaagtagaataagaacgtctgcagagctgctccacccaggtgatatgaaagtgtgaaaggattagtcgctcagttgtgtccgactctttgtgaccccatagactatagcccaccaggctcttctgcccatggacttctccagggaagaatactggagtgggttgctatgccctcctccaggggatcttcacaacccagggatcaaacccgagtctcctgcattgcagggcagattctttcctgtctgagccaccaaggaagcccagtgatatgaagcaatagtagttaatagaattatccatttacgtagatagtattagcaaactggatcaatatggaataaaagccaagggcaaggttctaaaatgtagcccaagataggaaatcacaaggttctcatttaaaattgaacagcagtgtcaaccaacaataagtcttgagtaactgattcctccaggtcctttctctgcaattaaggcttctaatgatcctttgagggcaactcaaagcctggtttaattttgttgaagtctctctttcttcacaagtgaaaaggaatccttcccatctcactttcccaatcaagcagccaacatttgtctaattagcaacctagggaactctagttgtattaatttgtaagagaagggttgacaaaaaaatctccaaggacataggtaacaccatttccatacctaatgaaatcaagactcatagtctgtgctgctggggatgaaggtcgctccggctaaagtcaaagtcttcctttcacagc

SEQ ID NO: 43553 - DNA, 951 bp, Bovine  19866880526365
  misc_feature (1)..(1): n is a, c, g, or t
ncttttactcaggaaagaaagctgactctggtaaagaatcgcctgccaatgcaggagacaggggttcagtccttgggtgggggagatcctctggagaaggaaatggcaacccagtccggtagtcttgcctggtgaattccatggacagaggagcctggcgggctacagtctatggggtcataaagagtcagacgcgacttagagaccaaaacaaaaccaacaacaacaaaaaaagccaaacagaaaagaagagcttcagggaatgtgcatggcgtctgggcagccaagctgctgactgagctggagagcaaggctatttcattgtctgtcaaacattcacgtttaaagggagcacagagggatggagtggagaaggaaaatatttcaagttgtgagcgagtgagtccactccctgctggaattctgaatctggcccccgtcaaggaaagcttagcagcatatttcctctaattacttttctaaaaagagcgtttgatgagatgtaaacacccactgggatggcacggcagacggttgttgctcatcgactcgggacacgtgtctgaggatgagaatccaaacatcagggccaagtgataacccaacacaaacagcatgtgaggggagaaacccaattccactgacttcaccaaacagcagtcgctctgccagcaggatccagcctaaaaggaacaactcattgaaaagatgtgactctggggaatgaagctttcacatgaataacttcacaagtgttgcttccaacagacattagctggtggggagcgagcatccaggcaaccggggaggataatttgaagcccagatatgcagtgggcaggagcaacagtggagagagggaatgtggaaagaaagcaagggggaaggagtggcaagaaaaattagatgttggtttataatgggatgtgttagcaaattccaaggagagag

SEQ ID NO: 43554 - DNA, 861 bp, Bovine  19866880529024
  misc_feature (1)..(1): n is a, c, g, or t
natgagagtatgaggaaataaatgactcagtgggtgattaatcgtcctggtgcagcacagggtccagtacccaagatcattatttctattgtatgacaagaaagaaagaaggaacagtgaagcattgtgcataaataacaggacatagatttcctctctgctcaggaaagttctgctgtcccttcttttcagactactcaaagagacccaaaccagagtctaaattctcatctctttcctgagccttcagaattgatcctggctaacccatctggtgcggagctagggacgtctgagagacggtttccattccattcactgccaagtacaaggggagcggggcatcgcaactttgccctttttggagcttgacattacgtgctgtctctgaggaggcagctctgggctgtgaggataagaggcagtggggaagaagataaatttggattgaatgaaaattatgagaaaggccagtgcaacactgcagaaagctcagggcgcacagagcatcagcttttggcattttgactaagttgactatttaacccagttgttctaaatcccatcgtatattagaaacatttcacttgggaaccctaaagaaaataccagtgcccaggtctcctccagaccaattaaatcagaagctctaagagagaggtctgggcatcagcaccttcctcaaacactagtcaaatggaaacaggattcctgagctgtgggggtaaccctctgggagcctcggggcattgatttcattaggaatccctcaacagcctaaagagaacatcagagaacaaaacacaggaagattgttctagctccaacattattgcttccgatgggggaaataaatcaccg

SEQ ID NO: 43555 - DNA, 1002 bp, Bovine  19866880662222
  misc_feature (1)..(1): n is a, c, g, or t
ntttagaactattcatgataactctgctctttaaaacttagtaatatatgggcccctttgaaagaagaaaatttccactttcctcccagggctttctacaattataatactttcaagcatattgttatagctttgatatatgtggaaagcaaaaaaccaagttatagtcaagtgagttaaattcagttcagtacaattcaattcaatacaagctaaaaccaaaaaagccaatgtgattcaatttaacaacactaatttaatgggaaggatgatgttgttttgctgaaacaaaattacctctcaaatgagaacatgatattgactactgcctcattagttctttcaagtttcatataattgtcctacagggtgccgtgcgatgacccagttttccaccatttctctctatttgaactgcaatggaaactccctctgtgcagcacactattaatttatttggccttaatttggggtgagcataacatttctgtgctaagtcaacgtatgtgtcactggaacaaacaaaccctttaggaccctatggcatgagtgactatgtcatgtctttagaatgatgcagaaaatggtaacactaaattttaatactatgatcaaaaggaaagcccccagtttaaaaatcctcatgcaactttttcaagactctcctaggggtttgtgtgagccatggatcctgggttaaaatgcgtatgtccaaagtcaataggtttaggccaatattgggtttaaagctagaatcaacaaaaaaaattctgggaaaaaagcaaaaggtgatcaaaagacatcatgacaataaaattcatccctaatcagaatcacggacttgagtaaggaatcttgtcatagtcatgacggagactactcagtgtccaagtgtgcgtctgttgtcttcttttctctttatttatttagaggctacttttattttatttattaatttttttttatttgactgcaccaggtcccagtggcagcacacagagt

SEQ ID NO: 43556 - DNA, 1581 bp, Bovine  19866880747242
  misc_feature (1)..(1): n is a, c, g, or t
nccaaatattctgccctcctaatatccatccaagttaaagacacatccaaggacaaagggagtggcttcaaaacctttggatctgtccatagcaaagcaatgttaaaaaccccacagatgcttataagtacttgctggagtctgtcaatcacttctccctttgccattttataagactccaccttttcttcgggtgatcttagaatgaactagacaagtgcatttcaaaccacagaacttaacctactagtgtgcaatgaaatcaatttattgggagaatcttcaggggtttttttggacagaaaagaagagaaacagagcagaatatatcatatgcagtaaggttaacagtgttccatttgtgtcagttaaatgtgtatgtgtgtgtgtgtgtgtgtaaactagaccacaatgtaaactatatttcccctactgtaagttatgttaaaaataattttttaacttgctggtctagagttctgaatatatgtaattgcacttacattgttcaaccaaaacaattcattaactatagctatgaatgcaaattcccatggcaacataattttcatatgaaaatatccatgaaccagatcaagctcctttgttaagactccatgacctattttcacaataagaaactatggtcacagtaagagaaacctgcgtatctgagatgagatgttctgagccagatgagaggtcataatatgggctgtgtaactgtatttctatgataaagctggagcacaggctccatacaagtttgggcccatagaatcctttggagaccaaatcttctggagccaaactgaaatacagtacaggaggaaaggcaggactttaaaggtcatttcagagattaagggttaaactcatcccttcgaggtgtttgccttagtccttctggcttagccttcaggttgcctctgcctagatcctctcttgctctaccatctccctggttttctgaccattctggcctgccaactcttaagtttgctttactctagcccttggcaacaatttgatcttctactgccaacataagccactcacggtccagtctggcattgagatctcaaaacatatattgtttaaattcctcttaactctaaacttatacatttagcaagactcctcctataatagtaacaaagacaacagctaacatttaaagagcacttacaatgtgtttggagaaggcaacgcactccagtactcttgcctggaaaatcccatggacggaggagcctggaaggctgcggtccatggggttgctgagggtcggacacgactgagcgtcttcacgtacacttttccctttcatgcattggagaaggaaatggcaacccactccggtgttcttgcctggagaatcccagggacgggggagcctggtgggctgctgtctctggggtcgcacagagtcggacatgactgaagcgacttggcagcaacaatgtgttaagcattgttaaagttgttaagcattgttaaagttttatcacaaactagattattttactctcacaaaacactatttcttaactttatacccattttagagatacaaaaaca

SEQ ID NO: 43557 - DNA, 1738 bp, Bovine  19866880813421
  misc_feature (1)..(1): n is a, c, g, or t
ntgagaaatatttaaagttgatcagctgaagagatctgaaaatacaataagcagacaaaaacaatctcctggacttttcctcctccatttgtgacaacgggcaaagggcacactggtcatttggcttctgatctcctggaggaggaaatggcaacctactgcagtattcctgccttgaaaatgtcatggacagaggattctggtgggctacagtccatggggtcacgaagacatgcatgcataaacgtacaaacttcagggaatttcaatatgatgctaaaagccagttacaaaaactaggatttaaagaaacatgaacagcggaaaagcaacatgaaggttttcctgcatgtatgctaaagcattttaatatttgtttagctaaagtgtttttatattgttcatgcaatttaattttaaaaatgatccagaaaaatgggtaatattttctttgtaagttaaaatgagttactctgacctcttcactttatcagtgaggaaaagagctaagtaggaaataagcaaagagaaactccaaagacatttttttagggaattctgagaagaaagggaggcctgcagaatttcaggcttagggaagacatgagcaagcctgctgctgagggcaaaataggccaggacaaccctccagttttttgggtaacaaaggttactttgctgtccacatttaagaacaaagccttactggttgtctaacctagggattggtaaatggtttttgtaaagaggcaggtacatttttcttggcattttaactttatctttttaattttttattaatttttgttggagtatagttgctttccaatgttgtcttagtttgtgggtcacgtggtctctgtggcaactactcaatagaaaatagccacagataatatataaacagatgtgcatgacagtgtttcaataaaactttatttacaaaacaacaagaaaaaaagaacagtcttattaaaccacaaatgagttttattctgccagtgcttcctaggaaataagtacaaactaagcatcaagaactcacagagcaccacctggaatcatccaaggcaccaaagagtcaagcacgtgcccataatcacatagcaaaattgaactcacaaagttccgggcatattatacattcattcatttatctgaactcttccactggataaagttattttttttttttataaaacactctatgaaaagtgaaagtgttagtcgttcagtcatgtcagactctttgtgacctcagagactatagcccactaggctcgtctctccatggaattctataggcaagaatactgggagtggtttgccattcccttctccaagagggtcttcttgacccagggatgcattgcaggcagattctttaccatctgagccaccagagaaacccataaaagaccctatactttaatagaaaagatttcttgtgaaagcatcaaaaaataaaattatacataaagaaaaagtattcagaaataacttaccattcaattgtcatcttttaattaacatatacattcacacatagacgctaaaagatgtgtacagtcttcttaacctctcaaaactggtaacctattatttttttggttttctttagaaactgctatttctttacttcagtcatgaacatcttctcttgaccttgagtagtcctggagaagtgattttaaattgctgcatcattattttgtgtggacaagtgcttctctttcct

SEQ ID NO: 43558 - DNA, 1391 bp, Bovine  19866880821674
  misc_feature (1)..(1): n is a, c, g, or t
naaatgggaggggggaattatactaattgctgaccgtaccctaccaagtttcacccacttaattaacaaacaaaccaaaaaacccaaaccagttagtaatatacttgtacatgtagagacattttacaacaatccctagtgcagtggttaccccaaaagaggaagaatgagaagggggaggggaaattttgacttttcaattcatacattctgagtttcttttgtttaaaaaattttctagaaagacatatgagttttgaatgacgtataacatcctccatttgcccaataaagcactttgcaaatatcttcaacccgggggaaaaaatctggccaaacacaagatctaacttgggtataacttatttcccttcctagagttgccacaaggccaaactctatgattttcctaggggaaaaaaatgttgtttattattccaactgttgccatagcagtcagtgtttccatgttatcgtctttttctccccagacattactccactaatacatgttccagacctgcaatctgaggcatttcagccagaaggaaacatacttgcagtgatgtaaaatcaactgagaaggccggctctgccttggagtctgagtcctagagttttcaatcactgcatcaggagaggacagtggaggtggtctctggatcagaaggattggatcctgcagaattttactcaatcccacaatgacccattttcttccccctacacctttggtcccagctaccagaactgagaatttgcctgccaatgcaggagacacaagagatgcggggtttgatccctgggttggggaagatcccctggaataggaaatggcaatccactccagtattcttgcctgggaaatcccacggacagagaagcctggtgagccccagtccatggggttgcaaagagtcagacatgcctgagcatgcacacattggatatttaatgatattaactatattatttatttagatagaataatagcattgtatttacttttaaaatattttagctttagcatcagtccttccaaagaacactccaatactttggccacctcatgtgaagagttgactcattggaaaagactctgatgctgggagggattgggggcaggaggagaatgggacaacagaggatgagatggctggatggcatcaccgactcgatggacgtgagtttgagtgaactccgggagttggtgttggacagggaggcctggcgtgcttcaattcatggggtcgcaaagagtcggacacaactgagcactgaactgaactctaagataaagaacatagtatgaatcacacacactgtttggaaattgtagcattgtttaatttttgttgattattaatgtatgtattggctattgataataa

SEQ ID NO: 43559 - DNA, 1752 bp, Bovine  19866880824641
  misc_feature (1)..(1): n is a, c, g, or t
ntagcagcagcagcaggctgtctaaagctggtatggaggaatcatgaacttactaaggaatctaggctgtctctacctctgttatggcatctgcagggtatagtccttgtcacagaccgagatgactactggaggtccagccaatacatctgaattccaggatggcaggcacaggaacgtgaagaagggaagagaaccctttaagagaaccttccagaagttgcacacattgctgtttatatttcagtggtcagagttcagccccatggcattatctagttgcaagagggggtgctaggaagcagtctttttttcaggccatggtgtgtccagctaaaactggagtgtcttactaaggagaaatgggagaatgaatatgaaggaccaagctgtcttgccttaattggctttgccctccatggatttgaatcctggctctgctacttgttacctgtgtcatgctggagaattcatcctctctttctgaatcttggtttcatcatttgtaacatggccacaataattatttctccttttagggctgtagtgaaaaccaaataatacacgtaaagatcttagcacagtgcctggaatataataatccctcagccattagtgactcttgctacacctacagagccatctatggttctattctgagttcaattccagaccagttagtctgacagaagttcggacaccaagtttctttgggtggaaactggtcagccccctctccttctgctccttctgcctgctctattctggtgggtagaaaggctggtgaaaaacctgtcttcagaggagaggctcctgtatattgcagtgtcctgctggtgccttatgcactagctaaccaaaacacagctggtatgtctaattttaggttcacaagtcttgctggttgtcctctttaaattctgttttacattctgaactgtgggaaatttttatagaagcagagaggaggcaggggcaatacacccttttctttctgcttagaaaatagcctccgttttctttccagtaagaaatggggacaagttggggaaagccattataggcacccccactgtcctcctgtccatcctttgggcctgcgtgaacctggtggggtataacttgtgaatgatagactctgacttcatgtgtatgaggaatggaagtcatatatatccttttatattttaaatttcactctgttgcctgtgcggagaagggactgtagggtaggtgaggggagcggtattgcttcttggacctcagacaagcagggagtagtagagatggtaaagagtaattgaacttggcctaggttttagagttaggtctgaaaagacttggtgataggttttcttagacccaaaaaatgattttgcatctgagcaactgtgtaaaggtggttacctaacaaaggagtggatttggagttggaaaatcaagtcatgtgaagaacttggaaaagaatttttggacatggtgtgatgatactaaaatcggtttaatttcattttgtcaggactttgctttatggttggattccttaggaggacttcttatacattctatctcccaatccttttccattatttctcccccaaaaaactttttgtgaaaatgatagaaagttggattgattttttttttttttcctttttgaaaacatggtaccaatgcaaggccactgggatagaaaagaaaaaacaacaacaacaacaaacaggcagccaatattcttttgcaacccagcat

SEQ ID NO: 43560 - DNA, 695 bp, Bovine  19866880924554
  misc_feature (1)..(1): n is a, c, g, or t
naaattaaatagatccacgaatgaaagataagtaaataaatatcaatatcattggaaaacagccatttaaattaaaaacaaaaacaaaacaaaaacacacactaaggaaatgaggtatccttttctgaaatttaaggatctacccctgcctttattcattcccctttcatattgctggcctattgtcttttctgccatcatctgatgccaaccagacagatttataacgagatgtggatccttttctattctactgacaaatctgcaacccatctgcctccaatcaatgatggagcacgtggagatggagcaatgagatatttttaaacactcctttaattaattcactccaaggacttggccgcttggtgaggtgaggggtgaggggcagacagagggaagagagagcaagctcatgatctggtaaataaagagatttgccgtaatctggatacctaaaacccttgctatgaaacattctgctggccccaacaagctgttaagggtatgggagagaagagagcaggcaaggcggtgtgtggcatttatttgctttttcaaactcccagaacaagttctgaaaatgcaaacaaaactaaaatttcatcttgagaatgactcttttgcctactattactagatttgaaatgaccagtgtctggtttgattaaaataagtatagcaagtgattgaaa

SEQ ID NO: 43561 - DNA, 1019 bp, Bovine  19866880962805
  misc_feature (1)..(1): n is a, c, g, or t
nagtctgttcctttttataagggaagtgagttcttcctcgggagcctccggatggtttgtacttatgtcctattagccagaactgagctggatggtgactaagattctgaatgggaattggatcaggcaactcatggtgtcggctgccaatacttactacaaattcatatagtgcggagagggcattattgggtcagccacaaggagctctggccagtcagctggtatcatggtagcctgtcagctggtatcatggtagcctgcagaaaggttgttctcctggtaacagttctcacgtaatggcatgggactagaaattccaaaagacaaggacattgtttgcgtgatctcacttagagcttcaggacctaatccaaggcctggtacttggtagctgcctgacaaacatttgtgaatgaatgaattgtccatcagtgaggatggatttcagtgggctggggcactcagggaatagggatcaggataattggattttctggcagcctgagggtgaagcagaaaagcttatgatttcaaattaattccagcaacactaagtgcattctacatccaaggctccaaggttaaaaaaaaaaaaaaaaaaaaagaatatcccatgtgctatgtatgtgtaacagtcaggatcttggcagaaaagatggcatgagcagggtagttcaggagatcataataagaggcctcttacaaaggtgtgggccggggtataggaagccagctgtggctggtcaactcccttggggctggtgatgccagagagctgttaccaccctgctgacagaggaaggggaggaagtggaagaagtggattccgaaagaagaagagagatatggctgtagctggagcagtcagcctggactgtctgggaggagctacagcctgccataggggaacagctccactgtctacggctgtagactggggccctggctcagggagctggggacacacacaccctgcctctctctccttccatctactgctcacctgttggtgtatc

SEQ ID NO: 43562 - DNA, 1547 bp, Bovine  19866880963270
  misc_feature (1)..(1): n is a, c, g, or t
naagggcatgttacgctgttagtcgctcagttgtgtccgactctttgtgacccctggactgtagcccgccatgctcctctgtccatgggattttccaggcaagaatactggagtgggttgccacttggttctggtgaaaaacattgtgaagttgccaatctaatctaacaccccttgttccaggtaagatacctggagtcagagaggggaaatgactttcccaagtccatgactcataaacagccctcctctctgggcttacagtatcctttccatttgactttaatgatcaaagcatgcttggaggtgggtgtcaattcttgccctgtggtttccatgccactttggcagctgacattctattccttcctggagcaattcctgtgcttttggatcagctggactcgcctctcctttcatactcctgccaagcttgcaccacccaggatcagtggttctgcaggatggggcaggtgtgtggagggataaataatctgtgcccaggcttggatgatccatggcaatagggtagctcagaaggtgcacagttccacagcttactgttccctggggctgatgagccatttgagaaatagaagcacagcctccctgtgaaaaagagggggttgcttgcgacaactcatacaagggcattctcagaaagaaggcaaccagctgacaactgtgggctttaggtaactcctgccagactcttgcactctggctggtcttcctgagccaaaatagaagcctgtagaaagtgttctgtgactgcagagatacagcgggattatgaaagaggatcctgtctgggactcaaaatgcctatggttttgacttagagaagaaaacgatctaccccatgaatgagcaaacatttatattacatttactctgtgccaggcactgttctgagaatattacaaatatttactcatttaatccaaataatcaacatctaggccttaagaggactctcctagctgcagtcctaggcagaaggtggagaagtgttgagaggtgttaaaataatttgtttttcttcaggatccgaagacaggagggcaagcactcttaatagagtttagaactatgtcattgacaaagtgcattaatcaacagtcaaatccagagagtaaaggtcaattgcctactttctcttggcagaaggaattgggaggaggattgttcttcttgcaaagattcatcactttttgatgctttccagaagtggtgatggattttcaatgagccatctactcttgaaaaaaagcaccttcatatatttgcagtgcggctgcctttggtgcagagggtctgcttgggtcctgaaaccacccactcaagctcatacagaaatctaacctgtgcccctggccaaggatccagtgctttgttcaggattgtatgctagaagagggttctcaatcatttaaaaattagcttatcattaatttcaaaaactggacctgtattcggaaacttctaaatttgactttgataatgaaaattagtagaaatttactgaactgtaagaaaggcaagag

SEQ ID NO: 43563 - DNA, 1156 bp, Bovine  19866880993715
  misc_feature (1)..(1): n is a, c, g, or t
ntctttaacaaatgtagaatacttttttctttagcacctggactgggcccactcgggtcagacctctcaatttgtctttgaaaaagtgcacagtctgcccctagacctccaactgggagcataactatacaaggcaatatatttttcagacacacattggcttcaaatcaatataggaacataacctgacttccatcaccagagctatgggaaatggtacctatttcaaaatgaaactctaagattagatgttcataacaatcagccttgattgaactaccattatgcaggctggcctcattttaatctcatcagaatgataaggcagctctcacctcccttttactgatgaagaaagtgagactgctgctttcctggtggctcatatgataaagaatctgcctgcaatgcaggagccacaggagatggagtttcaatccttggtccagaagatcccctggaggaggaaatggcaacccactccagtattcttggttggagaatcccatagacagaggagcctagtgggctacagttcatggggttgcaaagagtcagacacgactgagtgactgacacttttcactttctttcaaagtgagactcagaggagccgatggatttgtccaagttcacccagccggtaggtagtagagccttggttccccctgggacctggtgtctttttcatgccaccataccctactgccttccctcggaatttttccatgttttggtcctttccccacccaaaatggctcaactatatgtcaaaacggcacaactacatgtaactcttgagttagtcacttggattggggtcccggtttttgccagagttctttataaagctttgcagctcatggcatagcagaaatttttatttaaattgaagtttacaaataacacatatgaaaatcaagaactggtttccccaagagattcaagagtgcaatgaccatgaaggaaggaagcacgccctctttcagcaagttccataaagaatgacatagagcaagaagaatgtggccaaagaaagaaccacagactcacctacccgcttgcccagctcccggtggaaagggagtggagctgagccagccctggaggcacaacatcattgcttgttgtgtaggtgaacagccgggattcatta

SEQ ID NO: 43564 - DNA, 1185 bp, Bovine  19866881005020
  misc_feature (1)..(1): n is a, c, g, or t
ncttgtctctgtcacccacttatcctcttgccttcaatcttgcccagaatcagatagctagggtattggagcttcagcatcagtccttccaatgaatattaagggttgatttcctttagggttgactggtttgatctccttgcagtccgagggactctcaagagtcttctccaacaccacagttcaaaagcatcaattcttaggcatagtgaggattttctcagccctgttaggtacagaggagatgggggagagagaacgttttattttttaaagacatcactttgaaaagggaatgaaagtgggaatgaaaagagtaaaagtgggtggagagttgcccgatgatatctatgctagcccatgacacctattgactttaggggataaaagactatagaagaaacatgagaaaatttctcaaatggaacaagaaggggaaaaaaagtcactcataagcgcaccaagtagaaataaccccttttaagatttttgagccaaagttttcaagtttggtatgtgaatatgtgtgtcctacatcaggtacctactgttctagaaatctgcatctgtgattgatcaatacttatgacagctgacaggaacaggtccctggggccagtgggagtcgatgcctgtccacgcaggttcatgcaggggctgttccccctccctgaccacatccctcctgaccagcagacaggaagcaagtaagccctgtcttcctctcgctccaggaaagcagtccacttagccggccccagacagcctattcttcagaaacaaatcactccaacaacaacaaaaatcactccattaagaaattcagctcagtaatctcagcccttaaatgcttgctttttctccagcctgcctgaataggagaaaagcagaaaggagaattttaactggcacatattgattggcttggctcactgaaagaaggcacttttatcagcttttcaaattacaatttattcaatactgagaaagtaactcaatctgagaaagagctctgacacctttaggagttgctttctcaccacctgaattttgtcattatcactgttcactcatcatcctctgggagccactgggcaaagcacagttcttggcacccaggaagcaattgataaaggccattgaattaatgagactataacggcagggaaattcaaattccaggga

SEQ ID NO: 43565 - DNA, 880 bp, Bovine  19866881095638
  misc_feature (1)..(1): n is a, c, g, or t
nacgcagcttcgatccctgggaggaaaagatctggagaaggaaatggcaacccactctagtattcttgcctggagaatcccatggacagaagagtctggcaggctacagaccaggctcaaagagtcagacactgctgagcatgcacgcagcccataaataaagtgtttctaggccattaggaatgtggaacttctcagaaatagtgaaagtgagcagtgttctgctctctatttgaaaatgcctgctgctgcaaaggaaatcttcacattctagtaagcctagctagtctgtgccctgtgaggatgtggcaattcaaagtccagtgaatatagacgtccctgcaaatacctgatgtgtatatgtccacatacacgcactctcagtttaacaaccaagggaactgcagagcagtcccctcattatcttacataccacgcagaggttgctgccggctctgatcacaagcgccaccaggtaatggagctgtggtgcttgctcaagagatgcttataggaagggcagtgcctcagcaaagcttgtcagctcctaaagctgagccaaggtgacagccctgaaggaatttacactccagccctactccaggatgtctaatgatatgggaaatttggatacccagccatttcggtgacctgagagtctgaacactccagtcaggcctgagggcatggctgaagaattcataactggtgagagtggtagggcttaaggagctctttcctccacctagacaatattctcttgcccatacctgaaattggcacactcacataatagctgttcgacacatgcttttccataagaaaatcagttgcatgtttactatgtgcctagcacatctaaaatctcttgtttaaaaaa

SEQ ID NO: 43566 - DNA, 1354 bp, Bovine  19866881097981
  misc_feature (1)..(1): n is a, c, g, or t
nattatgtaaagtttaaaaataaaataaaatttaaaaaaataaataaaaaataaaaagcaagtccttttttcctccatctctgaatgttttcaggtgttaaactatacttgcattcactgcttgaatctcctgggctaacagctaaaataaagtaggaatgaaagagaatgacattttgtaaggtttgaagctatgaaatttacatctggtttctttgcaatttcaagagagtctttgccaccaacagttacatttggaaaatttttcaaaatactggttttggaatggttttcttaaaattatttgatttgaactctatttcatgtggttttcataacatgtaagtggttttctaagacagtgtaagcctgtttggtttcaaaccattttttgaaaccagatcactaaggcaaaatatttttgtaaaattttaatactatttaaaaattaaagaatttttaatccaaacaatttaaaactctttagaaatctatttatctgagtaccaagatttctggataagtttcacactgtttaacgtcaaaacatttagtcaaaatagtctggatccgagacagactttgaagctgtgtactttcaaaatggctcatctagataacatgcaacaatatatggaccgttttattgtctcaaaacattggtttcccatcgtataaatagccccagcagtaacttcacagtattgcaaaatcagctgcatatttttttaattaaaacatctgtgccatgcagaaatggattgaaatgttttctttatcaatagtatggaaacattttttgcaaaactttcagccctgccccctctttccttcccagagggttctgaccgtggattgcacaccactgaatggaaccagcactttgtggattcacctggttcttgctgttttactaatattgtcccttgtaattctcacaacagtgctctgaggtatgtatgcattattatgacactcaggatcaagaaacgtcttaaataatttgcctaaagtcttaaagttactgaaggcagaacaagtttcaggcctcatcagtttggctccatgtctcgagttcttaaccatggtgctttctgcctcacgcccagtgttcataactttaacttactgaaccagtttaccttccctgtatatttcccctctttctagtctctgttctggtagattacaaccaaagaatttccatgtccctgcaatcagttgccagatatattatgagtaatttataatccgtaacaaatgctgatattagtgactcagtttacagtgagacactacaatggatttggggtaatctataaagtaatactgctccaatgcatctctattcata

SEQ ID NO: 43567 - DNA, 2698 bp, Bovine  19866881100551
  misc_feature (1)..(1): n is a, c, g, or t
ngttactttttaaggtgaaagttttcttccaagtcctcaattttatattttatttccttgaatattttcagtctatttttaagtcgtgtcagacaactccattatctgaatcctttatgaatctatttctaacatctacatttctcttgaatttcagccacatggtctcaccttccattgaaccttcccttggaagcatcatcctgctcaaccctggtcatatttcatgagcataacttaaaaccaaatgaaagagaagtagacaagaaaagtaggcatgtgtcttgatttcagacatgtcatgttagaaaggaatatgcatttaagaattatagaaatgtggcagaattcctccaccttgggcagacgtgtttagatatcctgagtctgttgccctttaaatcttcctttaaacccttttcaatgacatgaagaacctggattgtcatgaggctttattacctggaagggcttgagaactctccaaggttcctgccagttaaaccccacatgaaatgtaatagaaatcggacccatctcacacgtaagagatcatgaagtggaagcctaatggaccgtgaaggtacttacttctaagcggagaaaaatccaatgattaggcttacaggaaaagtgatttcttgtattctcactgagggctgacatggctagaggctagttcattttctttctgttttccaggacaggccttaaatatcactcagtctttcttggctgtgatctctagcaagcaaagttcaaaatgaatgaggagctacacttgaattacacaagtcatagccctttgatagtctaactggtcaaagattgaagtctctgcgggtaccatacagctggtgggtggggactgtgaccaaggcaagaatgtgatcctgtctaagtagagagctccgccctgcaccagctgattcttgccgtgtgagaatatagacccagggtttccagagctaaattttgtcagaagctagtaacacagatttttatgagacactgtctgatttttatgttgacaacgaattccactctctgaaacttgcaggtatgacatatgttttggggatgattgaagtctgtgggctcttccagttgtttctgggctatgtattcagctttgactgagtctgtactataagacagtggcccatcaatgaagcaatatggaaggctctttctgcctcttcgttccacatcatccagggattcctagaagtataagcactgggatttttctgagtccacttgaagcttcaaaaagtacagtgccttctctatgccattttggtatttttaaacaactcactcagtgagatccctttttgacatttaaaatgggactttggcatcaaccaccagggagatcgcgcagaatgcatagtccaaagcacacagtgtcattgagatcatctgtcatgtgagctatgagcaatcttagagtacacaaaccaggagtttgaccagttttagcaactttgccaaattgcacataggaacaatgtattaatttttagttctgaaatattatagaagcgttatatgaatggatattcatttcttgcctggaggcaagcaagcaggttatttgaaaagtaactgggacacttaagggaagaaaagaatgtccgatgcgtaactgagttgtgtggagactgttttataatgtgctcagttgtgtctgactctgctacctcgccagacacctctgtccatgggatttttcaggcaagaatgctggagtgggtggccatttcctgctccaggggatcttcctggatgagagatcaaacgtgtgtctcctgtattggcaggcggattctttaccactgagccacctgggaaagcccctgttttatagggatgagcccatatcttagaaaaatgattaaaaagagactagagagcctgatggagtgattgttatctaaactcagtaattaaaggttgaattctaaggggacttactctgtatccttaggcaagtaatattcagtattgtaccataatccatttgagaaaaatatattgtctagctgatcgaatatttccaggatatatctactatcctgttcagtgctcaggatagctttgttgatgccaattttactctaagtagctgtgcagtatgaatgagagaatggagatctcctataatgagtattgttaaatgtttagatggaaagttctatttggagattaagggactttgttgtatctctgaatttatattgcctctagtgttttttaattacaacttttaacacacccagtgttctggcagatgaaatagaaaatctaaattcataaatgtactctcatttctaatctattctactttctgggtacaacacaaataggaaactgaatagtgtggtttaattgcccaagctttagggaacgaagatgatattacaatactgaataccaacaatccttgcatactgagcataaaatctaggcaaaatgtgtattttgtccaggcctgtccagatttcacaatttgggaagcaaatgaatgtgattacatgagagcctgatgtgctgtcaaatttatatgtatatatatggtgtgaaacagttctcaatttaagaataaattgttaaaacaagaagatatgtctaatgcaggatttttctgttatgcgttttctcttggtaattccttgagtaccattgttagcag

SEQ ID NO: 43568 - DNA, 2639 bp, Bovine  19866881100663
  misc_feature (1)..(1): n is a, c, g, or t
ntttcttttttttaaattttatttttattttgtgtattttttcttttttttgaccgtgctgggtctttgttgctgcgtgcgggctttctctagctgtgatgaacgggagctactctttattgtggtgcgcaggcttttcatttcggtggcttctcttgttgcagaactcaggctcttgagtgtgggctttggaagatatggcgcacaggcttagtcatcccaccacgtgtgaaatcttcccagaccagggatcgaatccatgtcctctgcactggcaggtggattcttaaccactggacccccatggaagtctctgattctcccttttaatgtggccttggtttttatctttatttcatccatatagtgtacaccgtaattctggccttattcctcactctctaggtgctcccattcacatcctgacttcccattttgctgcctgttgctcccagattcaccgcccacatggttctgcctgttcctgaaccttgcctttcccagcccgcccctgggcattttgccctccccttcctcttctgatgcacatctctacttctctgtccctaggcagtgtctacctatagccttctagggtcagcccacatcctcctctgtgactatgtcccaaactgtttcgtccgtccctttgtcactccgattgcactgatgtgtgtgcatctgttcctctggcacttaaccacatgcttcctctgtcccctctagcctttctcccatctactcaggaagtctttaaatgtctgtcttattatggtgaccccactacatacaaggcactctgctgagagctgagggacagccaagaggaatatcgggtttgcccatcaatagatgcttgagggaagacaccccagaaataaatatccattggcctgactcatggctggaagttctttcaccaacagcagaggaagccaaggcaggcatgcctctgcttttgactttcctcatctcttgtctgcagaagcagatgcctgaggaatgctttagtgttagcctgggttcacagtctaactcctagcgaggttgtgcccatcagtcccagaatccaccagctatgtgaattcagcatctcccactgggcatcatgtggatgctgttgggttgggcactttctctgaatgagagcagcctcagctcaacccaagtggagcccagaccatcacagggagtacagtccttggcagggtcagaatggaaagctggcttcagagggagaggccccttctgccacttctgcatgtcctaaagctcaccgcacccagcttctttgttgtcgtttttcttaggaataaatgagtgtgataattcatttaataaatatttgctgagcacaccattctctgatgtcctagttcctccctggcacaaagataaatatgactgtctctgctctaagtcaacatctaagaaagaaggcatatgcaaattactcagagaaagatggcaaatatgggtactcctcagtatcgtgtccttgacaaacattgctaatcaagcatagaactcaccttgaatctgaattcagttcagaatccttctcaatacattattctaggcagccgccgttattgaattgggtattgggcaagagtcaactggcttgtgagcattcttatctttgttgttcagtaactaagtgtccaactctttgtgaccccatggactgcagcacaccaggctttcctgtcctttactatctcccggagtttgctcaaactcatgtccgttgagtcagtgatgccatccaactgtctcatcctttgttggcccctcctgctctcagtctttcccagcatctttcccagggtttttttcaatgagacagctcttctcatcagatggccaaagtatggaagcttcagcatcagtccttccagtgaatattcaggacttccaatgaatattcagtgaatattaaaggactgatttcctttaagattgattggttggatctccttgctgtccaagggactctcaagagtcttctctagcaccacaattcgaaagaattctaatctttaaggcagtctaaaggccaccgagatagagggaggggactcattgtattgagttactgtgtctgtctgtttagtggaagtgctcaaaagtaacactgcttttggggaaaacccctaagatcactcctcatgacatcttcatgcttcccctgctctctcatgctcctttctgcctgtgttttaaaggattcttcttcctctctttccccacagaagtagttgtgagattcagctctcatcctttttaaggtctttgtttttgcctgttctcccacttggagagttaattgaagtggtcaattccccaatctttatcttcaggtacatgttttttttttccaaagtcttcttcctttggcatcggagcaccaggataacctaagcctgcattatcttccctactccctccccagccccaacttcttgcctccagagcctctgctgggagcgtctgggtccactcatgtggagtcagctatggggtgtcctgcccccatgcctctcttctctgctttgtcacatcctagccagcatctgcagagagggcaatggcaccccactccagtactcttgcctggaaaatcccaggacggagga

SEQ ID NO: 43569 - DNA, 2089 bp, Bovine  19866881155003
  misc_feature (1)..(1): n is a, c, g, or t
natttgcaagataggtagaaggagtcatgagtcaagccctggcatgaatctgtgcagtagctagtgggaacagggatcgctgaggtggtagagatgtgcttgaagaaaacttaaaggattccaggttttatgaaatgcattttcatcgatagcaactacatagcaagagacaatattagaactaacatatcactttcagaggattctcaactaatggatctgacctgaaaagcatggacaagagtgactgggctaagcagataaaaggctgatgtggagtaagacaacagcagactgaacagagccgagcactctcagatagtcagttctctaggctggttttgagctgtgctttgtccatggcagaggcacagttttggttcccactggctatgcccccaatctttcttctcattgacttggcaaggctggttcctgttctgtaaacctcagctctaacagctcttggactgttccagagtaacaggtaaaaggaaactggcaaacactctcccagttgagcccctcagctaatttctcaacagctgggaaaaaccacttcctggcttagctggttcccctataaactggattcctggggcctttcccagctcttctttgagcaacctgctatagaagcaaaaggagggagagattcaaatgatctttctagaaatcaaccttcatatttctgactgctttgttatatcatagtgatggctccttgggtctagtgacttgtatgctaaaagtaattgcagtctttggggaccgtccctgaatttctctctcccaacaggaaggaaagaccacctctccttccaaggcatggaggttctctcctcctgttcctctattgcagcagtggtgagatcagactttacaagatcagactacacactagagctcaggtgtgctgaaccagaagggaacttccttgattttagtaactgatctctttccactctgaagcccctgtaagagttgggagaaaaacacaaaaacagatgtgccagtgaaagagatctcagtcccttccagttcaaaatcatccctggtgggtaaatattctgatgttctatttcctttcaggtctgtttttctcttttcgagaagttgttctttgctctttcccaagaggacgtgtgagatggagggaagagaagccatatccatcctcaggggagaggggaggagccctttgtctgtgtgtggtcccctgagcctctggtctcacaaccttaagctccaaagccaagcctggtgtatctggggaatgttctcttagccctcaggatgcaagctcagccatctcccctctgctgtccccaaccctcctgggatgtcactggatctgctggtgctatgactgggtcgcatccaccatcaggcccccagacctggccagatccgtctgtggccactgttacaggagctcctcacttgtgtcttggtgagcttttgtgggcaggcttctcagttcttaattctcagctcccttcaccattcctctcactggccctggagaatgttccaggtttttatgtgctctggtggaagaggaaagagttgagagtttcaacctgaacatggtagatattgccccaaataatctatttcccctctctcagtgggtgaggattccagggagtggaatattgtatccatgagaacaggggtggggctccctctttctggcacactgcccaccctccctgtgaaggatgctggcctctgtgacatttctcagtagctgacggtagcaaagaggtcctgtggcaaacaccagcctccctcctgcctttgagggcatatgagggcttgaagctgccaacagctgtgaggtactgagggttatgccactgtgttgcctgaaatggaatctcattcacagttcagttcatggtccaagaaacaaaaataatatttaatgaggaaaatcttctttgtttaattatggtaaatgtcaaggtcaaatccgagcgctttgcttaaggtcaaatgctcagggctatcaaaaagcattttaagccagagcgggatgggttattaaagcccagactagttaaaatgaggcaccatcctctct

SEQ ID NO: 43570 - DNA, 838 bp, Bovine  19866881258409
  misc_feature (1)..(1): n is a, c, g, or t
ncatggaattttccaggcaagaatactggagtgggttgccatgccctcctcggaggatcttcccgacccagggattgaaccccccccatctcttacgtctccctgcgttggcagttgggttctttaccactagtgcctcgtggtgggctgccgtctatgtggttgcacagagtcagacatgactgaagtgacttagcaagcagcagcagctccacacttaatggctcctttgagtacactggacccgcctggataatctgggatactctccctgttttgaaatcagctgattagcgatcttctatctgcaactttaacttccctttaccatgaaatgtaacatatttacaagttccaggaattaggacacgaacatttttgtgcgcagtggggcagagagggcattattctgtctaccacagataatgatgtcagaaagagcagcatcacactcatcagcaacaatcaacactcagctctttgcctgcatctctcctaacagtttcaaagtaccctaaaaggagggataagaagaagccatatttttatgacatgttgatcatgtaggacagaaaggaaactttgtggaaaacaaaatacattttatctcctgcttcactttaatactcctgtgaaggtcaagttgacaagccatcgcgcttccctctcaatcatgttgccaataacaacactgaaatggtgcttggggccttcaggctggaccgtgtcaacaaaacaggcctccctgagtaagaggccatctgtctcagtctgtcagatgctacaggatttctggggcaagacaaaaagaggacggacttcccgtgtttctaccagt

SEQ ID NO: 43571 - DNA, 1103 bp, Bovine  19866881296612
  misc_feature (1)..(1): n is a, c, g, or t
ntcctgcttttatgagatgatcagacaataacgcctgtctggtgatatcattcctctaacctgcttctcatgggctgaacaagcaggtcacttgtccctggaaagctctcctcccccacatcccagctgccagcacccattttaagctcttcagcaagagccctgatatattatgacttccccaccaccctgcctccccccacagctctagagaacagaaaggaatgcactaaactgtgtcttaaaacattcagaagagaaacaggatgacgatggaatccctaagaagcagacagcctgcttgccggcagatgtgccttgtgaggggagataagggaacccttagccttctttcataaaaatccagtgggtcagcagaatccttcttcctagcaacagcagcactgcctaccaggcgagtgacagaggagaggcagagacccttccttcaggaaattcacccagaccactccccaccccgctttctttgagaatattctcaaagataattggggtgtatatggagccagcctctaagtgagtggtggaaaaaaaaaccgtccctaatggcttaaaaaaaaaaaaaactaccctcccccccaaataagcagttgggagactctcctctgacagctgcagggctgtcagagtgaaaatggactaccctggccccaaagccactgcctttcttttttcacactccctggtcccttcctgcacctcaacaagccttgtacacagacgctcaggctagtacacccaagttctgggaatatctctttcagtcaccctgggccacacctggaacgtaagaatgcacatatcaggggtggggtctaatggtttgattcatcttttggaagatgggctcagaaaaagcctctgcaggccctgagagcagggtcaggacatttcattagataattcttggattctggatacttgggagagtggtctagaatggggcagggggtggtggtggtggtgtagtcgctaagtcgtgtccgactcttgcgaccccatggactgtggcctgccaggctcctttgtccatgagattctccaggcgagaatacggacggggtgccatttacttctcctct

SEQ ID NO: 43572 - DNA, 802 bp, Bovine  19866880361521
  misc_feature (1)..(1): n is a, c, g, or t
ngcaggaatgtagggtagtgtttgccaagggctgggaggatatggatgataactgagggcaatagggttgctttgggggtaataaaaatgttctaaaatgaactgttatgacagatgcacaccaaattgtacactttactgagtgaaatgtattgtatgtgaattaaaatacaatacatctggtttaaaaaaaaagtcagtgcagagaattatacccaccatggagaggtaggtgggaagccacaaatctgcccaacaagtaaaaaaaactcatacttacagcgctaattctttgggggaacaaagtagcatatacacaaataactgtggcaacccatcacttaaaagttaaacagcccttctctaaatgtaaaacttcatattcatgccatctggtttgcttcccaaatgattatactaagatcagttaataattttacatacgttatacaaagagatgagaaaaagagggagggaggacagagagaggccagggggcaggcaaaaaaggacgactaacatttcataataaccactgtatgtttcccttttaaaatcatttgcttgcccatttagaaaactggggtctgggttactggaagaaacactcttaaccaccagaaggttgcccgcacctccaacaacaccgacacccacactgctcctcctggtgttcatgggagccacgtggaaccactcgttggacttgatgttgtatgcttccacggaggacagccctgtaatgaacaaagcacaatgtgcttcatctcctcctcaggttccttatatatacattagggaa

SEQ ID NO: 43573 - DNA, 792 bp, Bovine  19866880363983
  misc_feature (1)..(1): n is a, c, g, or t
ncctggtcttgaagacctaggtttcttaaaattgctgtcgttgttgttttagcttttccttctctagaaaccctgaactgtattaaattgtggttgccttctttaggcttcccctccagattcagataaacaaccagctttttaatctagtataagtatttacttaactagactaaagtccctgaaaactggactccaaaatatgatacaggcagacattcaaaaatgtctgtggtacaaaagaatgaattcaagtatcacatagagttctttttctaccttagtatttatggtcatcaccaaaaggtaagctctgatggaaggatgacattaaaccgcatgccccacatcatgcttggcatttactgcctatgatcattgtgagtttctgcctttacagggcaaatctattaggaactcagatcagtagaagaacaacggaaatacacagtgatatcagtaaaactctgaatacaattcaatacaaatttcataatcttaaattagatacctgcatttcttctgcacatgttcatatctgcaacctgtctccatgtgttggtggcaggatcatacacttcaacactttttcgtactaaagggccatcatgaccccctacagcatacaataagttgtttaacacaccaacacctataaaacacacaaaaccaacctatagtagtagagtaaaagggtcgggaaatttgtaacatttttagggtttattcaaatgacttgtaaataaaatttctgaaattattcatattaaaaatcaagattaaagcattcaa

SEQ ID NO: 43574 - DNA, 1396 bp, Bovine  19866880569746
  misc_feature (1)..(1): n is a, c, g, or t
nttcaaaaacatcaatttttcgacactcagctttcttcacagtccaactctcacatccatacatgaccactggaaaaacttatatggagactcttaaataagataagatcttagttagtggttgtttcaccaagacagctaaatcctccttggaagataaatcagagaaagggaacatagagactttaatttgactgattgcttataaaatcaaacagaaattcttttattttttgatgttgctttgaatttttatcatatattggattattattggatcaaatttagagggaagccatacaaagaacattgcatgcatgcatgccaggtcatttcagttgtgtctgactctttgcaaccatatgaactgtagttttccaggctcctctgtccatggggattctccagaaaagaatactgaagtgggttgccatgccctcctccagtagaccttcccaacccagggaccaaacccacgtctctcatgtctcctgcattggcaagtgggttctttaccacctgggaagcccacaaagaacattaattgttatataatattagtaatataattaattaaaattaatacattaacgatatattaataatacataatactatataatatattttatgtgtgcaatatatatattaatatgttagttatattgttaagggggttattacaaaattttgctatttaagaaaacatgaagggattcaaggttaggtcatctggaaagtatttatttgaatagatacatattagacaattatgactaaattcttaaaattagaaagataaaaaagatgcatcaaagataagagggagtagaaagtaattggagaagtcacttatgatatttactcttagatgggatcctaattgccaagtgtgatgagtttgggtgtacaattactctaacacccaacatcccaatctatgttcagtcttccaagtttttagcttgagttgctcagatgatccctgaaccctctaggatacttgagttaggcaagagaatcaaacttcaatccaatgctagtggaatttcctggctatgagttcaagagctggtgagaaatgttccagtaaaagaatcattagtacttgtgaaagaaccctgggccaaagaggcacaaagagtcccatacaggataaacccaaggagaaacacaccgagacacatactaatcaaactaacaaagactaaacacaaagaaagaattttaaaagcagcaagggagaagcaacaagtaatatacaaggaaaacaacgtatgtttaagagctgatctttcagtagaaactctgcaggccagaagggaatggcaggctataaagtactgaaagggaaaaatcaacagccaagattactgtactttgcaagtatctcatt

SEQ ID NO: 43575 - DNA, 2424 bp, Bovine  19866880635270
  misc_feature (1)..(1): n is a, c, g, or t
naatgctagaaaaggcaaagccagagtgacatagatcagtggctgacagggactaaggttggagagaggggatcaattgctaaggaagactttggattttgatgattcataaatatacatcaagattctaactattgacaagatgaggtctatgtaattaatgacctgtttaggtcaaaaattcccttcttgttgttcagtcccttactcatttttaaaaccttttgggaacattttctaaataggaatttctttgtacagaagtgaagaatgacttgaaaaggacctcaggaataatctagtcttagttcttagctttattgataagagcctgggtggaaaaaaaaaaaaaaacaaacatatatttttaaatccatctggtggcttagatggagaaggcactggtggcccactccagtactcttgcctggcaaatcccatggatggaggagcctggtgggctgcagtccatgacgtcgctaggagttggacacaactgagggacttcactttcattttccctttcatgcattggagaaggaaatggcaagccactccagtgtttttgtctggagaatcccagggaagggggagcctggtggtctgccgtctatggggtcacacagagtgggacatgactgaagtgacttagcagcagcagcttattgataagagaaagagaacattttaatgagtatgcagtttgcatacagtcccattaagactttttgatcatggctgatgtaaagaaactaaaatcaatgatgtggattcattttgatatatggcaaaaccaatacaatattgtaaagttaaaaaaaataaaataaaaataaacaggaacccccccaaaaaaataaataaaaataaaattaaatcaatgatgttaaatcccacaaagaaaacaaaatgttgggatggtcaaatctctgtaatcacagacaatcattcatgacaatgccaatagcccatctgcaaaagtgatatattagtcctggatcattgatctagaactttgcaaagataattctaattgtatttttatccaagagaacaaaaagtttctctcaactacttcttaaaggaaatttatacattctttcctataggaatcaggattgggataattgtatccaggattttcaacacatctcacatatgtattaaaaaaaaattattatggactaaaaaggcaaaacattttacatctgtaagacaacgtggttgaaaagtgtatgtgttaaataagatgttaaagtcatgaagagcatgcatttgttgaccataaacacaaaccatcaaatctcaaaatactaaatatgagcaaaaaaggaagtagttccggaacaactttacttaacatatggagctcatttcccccaataaattgtgtgaggcaaaattggaataatccaagaagcgatggactagagctcttttgtttatgggttattaggaaaagagggtagtaacgacagtctacacagaccatcagagcaggaaacagccaaccttttccaaacatgtgttcttatgtcattgacagttcccaaacagattctgcacaatgtcatttattgcattttacctgcattggtacagtgcctggtatacagcaaatccttaatgtatattcactcagtgacaccaaataaaatctgtatatcccagcatccttcaaaccatcatttatcttcaatctgctatgtcattgctcttcagttcagttcaggtcagtcactcagttgtgagtcaattcttcacatcaggtggctgaagtattggagcttcagcttcagcatcagttcttccaatttatttaaagttgcccattatttatatctgtcattttaatacaaaaacactacttagcaaagaatctcattataccgcatcttctccttcatcctacaattgtttgatgaaattttgttactttttcaaaagatctatgagaactacaggggcagccacttcctgaataagattatccttcctgggacagtgaaagttgctcagttgtgttcaattctttgcgaccccatggactacagtccatggaattctccaggccagaatactggagtgggtagtctttcgcttctccaagggatctccccaaaccagggattgaactcaggtcttctgcattcctggcggattctttaccagctgagccacaagggaagcccaagaatgctggagtggatagcctattccttctccaagggataggaattaaaccagggtctcctgcattgcaggtgggattctttaccaactgagatatcagggaatctgccggcaatgcaggagaccccggttcgattcctgggttgggaacatccactggagaagggaaaggctacccactccagtattattggtgggagaattccaggactgtaagtccatggacgcaga

SEQ ID NO: 43576 - DNA, 2017 bp, Bovine  19866880682866
  misc_feature (1)..(1): n is a, c, g, or t
ntgctaaactgtgtgactaaaaaactatctgctggtgtattctgaacccaagttagatgcagaaagatgatagactattacagggtttcctgaaataaccctaaacactctggaactattcagatcataggaaagcaaacggctcttctcaattctaaatccaatgtttaacttttaaatatacatgaaataattatgtactgagctatatttttaataaagttatgaataaattatgagtagagtcttcaggacatgtactataatattttattttgtttatagttttctcattaagtactttcatgattttcactcattgaaactattctaactttacctcccactccatctcacccattttccgttactctttgtatttcttcagagactaagacctatagaaaaaaaatttttttttgcaatgaagaaaaaaggttagtaaaataagggacaaaatcatataaggacaagtagacaactaaacaaattcacatgggcccccaaaagactagatatttctgatcttatataattcttaatattagtttgtattagtactttaccttttccttcccttagggattctttaatgttaatttaaataattgttctacaagcattcaaaagttaaaaaaaaaaaaattgaaatgtttttatgagttacctggcttcagttaaaaggtaatgaagaaataatgtcctaaatattagctaattacttttaacttcatgtgatcacaaataaaccatatctagagtcccaaaatatcaacataaaattttatattgaaccttgtcattacttttgttatcattgattttattcatgattcttttaaagctatttaagattgtatatttggatggtttgagatatcttgtcaaaacattcttatgggaacatatcttagtgaacaaaataaacagttgtctgtttatttcaagtttaatgatatgaatcatcatgtgtatcaaaagtttctatctaaaaagattttctaactgcttaacagctcagaaaaaagaaaaataattatatcccaagcccaacaagagaaaagaatgtcttttctgggaacagaattaataactaaaaacaaacagaaaaaatgcacatgaaactgcacgaaatcaaaaacaaccaaaaacttgcacaggtctatttacacggatagatatgtatacttcaatagcttcttccaaaaagttacagtaattcacacacccatcagcaatatatgacagtatttgtttacccataccattgccagcaatggagcttgttgtctatttttaattttaataataattttgatttaattttaatttcttttattacagaagttgaacctcttttatatatttcatacatttgtactggccatctgccttccatcttaaatactgtataattgcaggctttgcctatttttttcatcatatttctatttttcttattgttttatagaagctcattgcacattaagtacaaattgcttgtttatcatgcagtcttgcaaatattttctcagtttagacttatttttttactttttgtcatatatttcccacacagaaattactaattttgttagtcaaaaaattttcaactctttttaagtggcatctggatttttcctctcttttaaggaaaattaaacaaatgtaattctaaagtttcttctatttatcattttaatctttgtatttagatctttattctacctcaaatttatacatacacacacacacacacacacacacatatatgatgcgaaatagcttttaactttatcttattccagatggagaccataattggaagcctataatattttccctctgaatttaaattagacatttatcacaaattagatttccatatataacttaaatctatttctggatgtttttcttttctactagtttctggatttcatatcatgttttttgatcagataatcttaaaagtatattttaacagctggtaatacaatataattttcattttcta

SEQ ID NO: 43577 - DNA, 1467 bp, Bovine  19866880708834
  misc_feature (1)..(1): n is a, c, g, or t
nctgaagagaagaaagagggacctgggaagtgactgcgaatatatgaggagaaccaggaagaggtactcagcacaagtcaaagaaaaggaatttcaagtcacagtaaaagatcatgatgaactcataaagcaaaaaatttaaataaggtcaggtaagataaaaaatgaaaactgctcactgaaatttttagttaagagctagggtgactcagaaattgtcatccaaacctggacagttttgagagtgaaagagagctccagtagcaaatacctcaggatcatggaatattgtcctgtgcaaaccaggacataaggacaccctgttaaggggtcaccagtccccttcatccaacagtttcaatagagagaagcagtgcaagccacactgttaggcgttcagaaggaaagtgcgatgaagactagtctttcaagaacttcggtttgattgatgggtaacaaaaaggttagtgttgcagcagaacacttcctccacttccaactattcatgctctaacctattaagcatcctcggcagtcattattttaaaaaataccgtgtgagaggatgttttattgaataggtacatttttagatatataaaaattaatgtgaccatgtgaaggtgtgtatttagggaattaaatatatgtaacatatgttatttatgtagtatatgtaaagctcaaaaataaagctttttaatttctagtctcatagccaagaattatgaattactaattggctataataggcagtgatttgaagtagaatttcttagtcacttatttcttaaaacaactaatgcaggcaaaacctgtttctaacacctcagtgtgtcatcccatattcattatccaacagaactgtaccttttgaaacagctaatgccagatggtctcctcaataaaaaacagcaggaggcaacatattaatgctactcagcaagcaagtctgcagacactcaaccaatgaaactagtcttcagttgctaagccatcctgtcaccatggcaacatctagttcagaaaaaatattggattttcaggttaaaagggccacccatcttaaaatttaagtatcctccaagcttatgatgatcatacttcagctaaaagaactgcctagattttctcactcatctcaaatcagacctacccatttgccctttcacttaaaaatatttatttacactcagtttctaactttattgacttcctagataaacacattccatttaaaggtgtttttgtgtatataaatttatgtgcacatacttgcaagctaatagttgtaaatataatgacaaatgttactgccttagaaaattttcacttgtacatactcttatcagtctgttattatatctgattaaagagaataagcaaagaaataaataatgtggtaagaccagaatgacattcttattattacttgagatacctaatatgaacattcaaagtaacaat

SEQ ID NO: 43578 - DNA, 825 bp, Bovine  19866880893395
  misc_feature (1)..(1): n is a, c, g, or t
nagctgactcatttgaaaggaccctgatgctgggaaagattgagggcaggaggagaaggggatgacagagtatgggatggttggatggcatcactgactcaacggacttgagtttggttaaactccaggagttggtgatgaacagggaggcctggtgtgctgtagttcatggggtcacaacgagtcggacacaactgaactgaactgatatatgtgtgagtgtgtgtctctgtgtgtgtatatatatatatgtttcttatatgctctgtaagatttgaacaggctctttcttcctccattagcacattcagtacattcaagtttttgattaactatcggcagcagagaccagacacacccttccttaccttggattgattgatatcaggctttgaaacatccctgatagcttgaattatttatttctggaagggtttaagcaaagactaggaaatatcaccaatgtcaagatcttctcttcccccagagggcttgtctttcccattccaatacagtaaagaaaattcctatttcactcaacatcacccttttggagcctttgaagcaaggcagatagaggtgggaaggagcttataaactctgggaattccttctcatgaagaaaaaaaataaagagttgtatcaagatttaaatactattgtctcaacaaacacacacaaccaagcaaaattaagctcacaaaaattcaaattgatgccctagagagaaatagctcaaactaacaggtgctcagtcattttagtgatcttatagagtattggaatttaacagcagtttattgtcttcaccagtaataacaaaaa

SEQ ID NO: 43579 - DNA, 892 bp, Bovine  19866880964831
  misc_feature (1)..(1): n is a, c, g, or t
nactgccaatttgctgtagctttgggacccaggcagggagagctgagctgccagctgccagtgcatccaggattttaactgatgctaatttcaagcatcagtgaacaggaagattgtgaacatcagaagtttggctgatgaatcaaatagtaccctgccagataaacactccattgcatcttagtaccacagataattttctcctcttctctcaccaaagcaaacatactcttttggaaatttcatttttactctaatcctgagggagcaagattcaaagtcactacttcctcagtataaattagttttttaaaattagatttacatttccagaaatcttgagtgtttctagattctctatttcttttttcacatcttttgtttcaatctgtaatttctctctccatattttttcatcccattacatcatctaaaaagaaggctttctctttcaaattcaggatgtgaggaaggtcttgaagagatgaatttgatgaatatctgttcattttatgttgctcaagagccactgaaatttttttcttttgtgttttggttcctgattaaacttccctaaaactcaagtaataacatgcccatttataatgtttactttaaagcatatttaaatattgcagtaacttgcattttatttagcacaatctacttttaaagttctaactgtaagaagctatatatgttcataattacagtttatttgaatgtgtagtattttgggaacagtgaagtaccatattttggggaggtggaatgaaaacaatttatgtatttttaaatgaactaaagtttttttaatgttcactgtctagagtaattttaaaattcattatttctattttatatcataatctgtgaattaaaacatcttgta

SEQ ID NO: 43580 - DNA, 1357 bp, Bovine  19866881316092
  misc_feature (1)..(1): n is a, c, g, or t
nctcaaaaagtcactaagattcacttcaaaatgcaaatattatcatccgcaaatgatcaactattggtgcagtcatgtgacgtggtactttttaagctcaattttatttctgggtacatttttctgattcactttacccatacacacacacacacacacacatatatatatatatatatatatatatatatatatatatgtatgtatatatggccacccaggttatttttgccaacatttctttggataaacagtacaaaccaatttggatttttatcaaactactgtaacgatggagccaggcagccttcaaaggaacacttttcagctttttaacacacacacaatttattcagaaaaaatattcttaccttcctgactgcattattgttgttatttttcttacataaaagctattcttagaagcctaacaaattttgtttttcaaataagaacatctggctttaggttgtatacaactacacttattatttaaattcacccttctttaaggcaggtcatcctattccttacaagactctttaaaatttataactttgcttttatttataataaaaaaaactttctttagaacaaaatatatattaccgaaaaaggcagaactattttcaaaatatgttcatctgaccaatttgatacataaagcctcttcaaggaataattcctcaagttattttaggagaaccaatgaaagagtaaaagcttaaaatgcaaattacacacttttaaaaattctaaatccttaatgattttattttgctattctattctaggaaaagtaaacaaatctttcaagaaataataaagctaagactttttttcccagtaagctataagcaagttcagaaaatgtttcaaactgaacattcttcttacccatattagaaacagtattctccaagtgctattaataattcaacttagaatcataaatatgcatgaatggaagatcacttgccctatcccaatgctcagaaagaccttggactacacttttcagaaaaataaatgtctagtatctctaggcatatctatgccagatgctttaaggaagatgaagacttcagtggcagcttcctggactctgggctgcactggttgctgctcctctgtgttcccacagcagtatcctataatatgcattatgtgccataattatctgttaacaagtcagtttcccacagaaaagtttccaagccattttagtcatccctgctttttcatttgagaaaacaatctcagaaaggttaagtaactggcttaaagtctcaaaagtagtaagttataaagccaggattcaattaagagacatcgattacaaagtcccacagactct

SEQ ID NO: 43581 - DNA, 879 bp, Bovine  19866881498036
  misc_feature (1)..(1): n is a, c, g, or t
ntgtgaattactgaagatccttttgtcaaaatgagagcatcacaagtctttcttacagctctatttcagaaagactggaagacatcatttcattttaacacataagaggaaatgatcatgagccaagaaagatttaaatatcctcagaaacaagacttttgcttgccaacttttaaggaatcagaatttgcttgtcatgatgaaccaagatgttgagcagaaaacagattctcaagtaaaagacagggaccaagcagagtgacatctgcaagtcagatgtttttattaagaagtttgggttctttaaaattttagcacttttaaattaaaaaattatttgatacatgcttctctagtcaaaatcagatcacatcaaaggggagatggcagcagcttcttggaaacttagctgttcacaccactgggtgcccttgttcttgcacattgcttggaggtttataaaacactttatcatgcattatcttagggggttctcacaacaaagtccttttgatcttattttataagtgggaaactgctcaagtgagtcacttcaacaaggtcatgagtgaatgccatagctgggaggctggtctatgactgctaactccagtgttgcctgcaatgatctctcagacagagataatgtagttgatcttcacttgaacgatatctgtgtattaacacaaaagaaggaaaactgatagtttgggatggagctgaagaactgagacaaaaataatataaataagcctgggggagtttgtaaggaggagtgaatttagcagtgctgattttgctggaggctttttatttgttatgattaggcattccaaatgccgctgcgtaaccttgaaaagggaaacaccatgatgaaaa

SEQ ID NO: 43582 - DNA, 951 bp, Bovine  19866881499679
  misc_feature (1)..(1): n is a, c, g, or t
ntactgcccccctgtggagtaaggcaattctcttttattttttaattggactgaccaagttctagaaataagagtatgtccaaactaatcagtgaaatagtgctgaaactggaagtagaaatcaagacatcaggaacctagaacttctcaaagttgtaatagaatgtaaagtttgactcaatctatatagtgtcaaggatgcttaacacaagattttcttagaggatgcctgttggcatcattacatgaaaaaaattcccaaataagtatgtgtgaaccacaaagcatacatttattgtttccaatagtatggagatcttacctaatagctgttagtgttcagaaatgcttcaggtcagggaagggaaaaccaaatctacttctaaatctattctatttcctctggaacataataccctcttgaaatatatttgatacttctattaccaaatactgtttctggcaatgttgtgctatgtatttggcctcacccaatactatttcctgatactgttttattgttctctgatacatttgtcctctgactgcaaatgtaagtttccttcatgagaggcagtgatgcttttcctgaccttgtttttagatattttaccacagaaatatgtaccaattcaagagatttaatttgaacagtgaatgtcacttttgagaataaatgtgataatttggtgatagactgttttaaagggatacgtagatgctgggtgaactctctgaagctatgctgttgaatatagagttggacttggtacaaaccactctgtactaaatccctcccaatatctcttctaccctgtgcgctttttcatacttttctttagactaagggtgtttttaaaaatttattctttaattgggataaaattgctttacaatgttgtgttgattactgctatacaacaatgcaattggccataattatacctatat

SEQ ID NO: 43583 - DNA, 1248 bp, Bovine  19866881619638
  misc_feature (1)..(1): n is a, c, g, or t
natggaaagaaaaatttctgggccgacaggtcaaatatagagggcattttcatgctgcctgcaatgcaagagacccgagttcgatccctgggtcaaaaagatcccccagagaaggaagtggcaacccactccaggattcttgcctggagaattccatggacaggggagcacggtgggctacagtccatggggtaacaaagagtcagacacgactgcatgactgacagtctcactaatgctgttaagtgcgttttgttcttactaactgtgtgtatagttgccaattttaagtgcttttttgaagatctaatctttccagatgttataaaatacctgatacatattaaaagtagaagtaatgatacatcacattttgtaagtatatttttgttaaaattcgtatgaaatgtttttttgagaggaataaccaaaaacgtctttaagcagtacacaggggagggcagaggagaaggaactagagagccctgtgccagtgtatttttaccaatgtgagaacttaccgctgtctctcgtgttcctgttttttattgtgtgtacaatggacaaatgagtcctaattgacaacatctagtggtgggctgccgtctatggggtctcacagagtcggacacgactgaagcgacttgcagcagcagcagcagcagcagtcttactagtggtattgatgtaaactccaatctgatgaaaataatttttcccccatgtttgtatgctgtttgacagacggactcgagatgaaatctctgaggccacctggctgagactcagccctgttccctcccgctcctctccgctccctgtcttcccaagtaagctgtggagccgcttgggggccacgtgaccaagacagagtcacatcctctgggctgggctgcaggccccgccgcctcctgcccttggtcctggtgtggctgaggtccaggctctccaagcccatcctgcatcccctggtgcccaggacacctgcccttcctcccacatcgctcttgggccgcccacgttgctgcaggggtggcagaggctgcgcattgcagaccgggttcccagaaacagacttggagatgaggattaatgtgcaggatgtttatgccagggtgggagggtgctcttgggatcaacacctggggaaaggaagggaaggaagcaggattgggcagagagagaagctgggctgtgatgcatctcaacaaaggccttagatgacgtcatggggtggtgggtggagga

SEQ ID NO: 43584 - DNA, 3475 bp, Bovine  19866880496089
  misc_feature (1)..(1): n is a, c, g, or t
ncaggctcaattcagggggaaaccagtgtcaagcagagctcctcaacctcctctgcatttaagttcgttcttagaaggtgcataggtgaaatttctaagataaaacacaagcccgtttttgttggcattcctccttcgtgaattatgacaagggaattactgcaggctgtactggaatatttcatgtgtggatcattgtaaataaatcctggggcacttttttcccataataaagagggatgtggaactctcttttttattaaatagatttccttgaaaacctccaatgtaagagttacatttacaatgtccaagaggaatgctaagcttgagaatttccaggaaggtgtgaaacttcgaaagtagaggggagagaaggaattggctgccatcacggtcacccagcccggccaggtcagggacaaatctgggtgaaggaggaagtgaggggacaaaagagaggcacaatgcgtaccttgtagagtcatctgaaagaaagtacagctgaatggcccaagcaggaaacataagcctcagccctcaggaaaggaaaaaggttcacaggaaattctaagctatatttctctccaggtaggtctggagggagcatctggccccttgcgtatgtgaagcaatgagaaatagctcccccatctccagagtgcagaggaacttgctaaacacttttcatttttcactgtgatgcctccacagccacgtcagacactgagtcaaagtgtagcagagggggctgccaaacacttctggggcaaaggtttcttgctgtagctctgccaggccccagactattacctgtctgctgccttctttgctgagtcttaatcacttccagctgtgttggctcctgcagcccctcgggcccctccccgtctggcctccctgccctctgcctcttgtggaggaaaaattaagtatcgcacttaaattcccccttaggacctagggatcctgagcaggagcctcgccacagcatccatctccagcagcagacagtgggggctggctcgcctcccatagggtctccttgctgccctggggctgagcccttcccctaatcagttacagctaagcccagaaagaaaaggtacagcgtggctccatggcagagcacccctcgcctcaggctctacccaggtacccaaaccctgtcacttccttcttaagagattggttcttaagggctaaattttaccctctctccggtggctcaaacagtaaagaatctgcctgcaatgcaggaaatctggattcgatccctgggttgggaagatctcctggataaagggaatggcaacccactccggtattcttgcctggagaatcctatggacagaggagcctggcagggctccatggggtcggaaagagtcagacatgactgaacaactaacactaaaccctctccagcctgtcatcttttgaaatacacatttttcaccagggtagctggttatctccatcaagtcagttcaacacaagccttggtggattggagggattggtaatctgtggctagaaggaaactggacagtgcctggcattgtatcacgattaccctattccttacacacgtagacttcactgatcagttgcagagccattttcttgcctgatacactcaggctaaggcttcagcaccttcaacacagcataccagatagacaccaatctggagagactgatagattggggtgaagtctctgcctgtttaagctaaaaccatggggatgtatattgggtcagtaggcagggattacctacatcagtgcttctcaaaattgaccttacatcagaaccaccaggagagctcattaaacacaaatggttggaccccaccccagggtttctggttcagtaggtctggatagaggtccaaaggatgctgctactggcctggggaccacacttagagagtcaccggtctgcaccatatcgaggaaagagaactctattcatcaggcagtgtgggatccttgaaagactttaatctaggtgggagggggttatggagcaagttcacactttccaaagctcagactgtggtagtgtggagggctgccttgaagggagtgcagctgggagcaggaaagctaaacagaggctgttggcatgatccagataaccttcacgatgaggtgtttcacataatcttacagaatgagatcctggcaggagaattgggctgggcagcctccaggagtctgagaaaggtatcaatagaaagttgagaaagctggtttagaagaaagcactaaaaggagacagggagcctcgaatatgtgttggccgtttcccaattttgccaagggctggcgggttcccagaacaggagaatgcgaccctgcagacagggtctgcagaagtggcacttgccaggcagacctgccaagtctgtatgactggctctctcccctccaccctccctcgctttcctgtggggaggtgtaactggggaagggctgcttagagaacaggtggtgataattaccaggagaccagcagtttccctacctcatccttcaaagtgtcaaaaaggttgacttaggaaattacagagtgcaggaagctttcctgatctgttcagttcagtactctttggtggagcctggtcattctggtttagtggttgatgtatacttttggagggacactgaacgatagctgaactctactaagagtgcttttctaaggataggcctaaacttaccagcacacacatagtagaaaagaattcagaattttactatgcactccagatatgtaagtgaaactacatcagaatctgaacaaacagtaacaataatagctgcaaaaggcatcttatcaggcccccgttcatcaattgtcagtggattcacgtggtttttgacggcccttgactcagcaaagaagccacaagcttggtaagactggcttaccacactactctgaacctgctttgtggattttcacctctgactctccccagacagttctccagctgtgagaccccccagccttccctccttgcattaaggtctctctcaagtttaactacatttgtaaatttttgaccatagcaactcatggccatccctctcccttctgaaatcctatggcacttctggctgagtgtgtcctttggtccttagttttgaccttctggtgttagttctcattttagaaagaaagttctagctccccaggtgggtagtagattctttgaaggctggagcttctgggtctcacgtgtctgaaagtgaagcatcacagtcacatgaaacttgaatgggtaatgtggaggacgtgatggttccattcctaatctctgcaagatgaagtctgcagctgggccccacctggaaccaggaacatgaatattgcccgcacactctctctgcttcttcatctttttacagagtgcaggaagctttccttatttgttcagttcagtactctttggtggagctccatt

SEQ ID NO: 43585 - DNA, 1062 bp, Bovine  19866880501800
  misc_feature (1)..(1): n is a, c, g, or t
ncttatctgggtcatgaagatcttttttgtatagttcttctgtgtattcttgccacctcttcttaatatcttctgcttctgttagatccataccatttctgtcctttattgtgcccatctttgcatgagtattgtttgccaaatttgggaacttttcagccattattacaatacatttacgtacatttttcagccctaccttctttttcctctctttttgaggctctaaagacatgacgtgttagatcttttgttatagtctgactatcttgtgtataagtaatgttattctgataaatcacagggttggagtttaccatttttcttacagttacagccatatgctgctggaggcatgtgcacaaaaataaaaaaaaataaaaatccccaaaaatccacatcctgtgaacccatttctctcacaatgcagtgccttctgttagggcccccatatttctttctttattaaaggaaaattgcaacttcacaacatttaatgggctctttatcttttaaagaaaattttataaaggagttacagaaaaggaaaaatgaagcttggaataatggaaataatttttagtgaaacagatcaaagtggaaaaagattaaatataatgctttgttaaaggtctggctttgaacataatactttctcaaaaagccttgaagagagaaaatggtgctcaaaattccaaagcagcctcacagcagagtgatttacccttgattaacagttgggaagccctgttatgaaccagtttgagcctcctctactgaagacaggtccttgcagcagaagtttatcagtttacaaaaacagccaaagtccatcacttggtaagcgctggtcccctcatgtgggcttatatctttgccctctagccaaactcaatcctgctttgatggacaactgtgaaaacatcatcatttgttccttgaatacatctgagagtgttcttttcacccccaaaatgaccccaaagccccctgaacatcccgttaccatgtttcacactcaactgatattccttctcaaacatttgtgctctcagatacact

SEQ ID NO: 43586 - DNA, 2629 bp, Bovine  19866880624658
  misc_feature (1)..(1): n is a, c, g, or t
naaacaattttacacttaatattctctgtagagagacatttggtacaattaaattatcattttggaaagtaggaagatggaggataattagaagtttgggagtttggtagagcctggcaggatgtggtacccagcatttttgccttatgcagaaaaataaataaatatgtaatagtggttattatatagctttgaaataaagaagactttaaaaatttgtgtactgatttgaagtaggtgctttgatgtctacctgagttcaaatcctggtctctctacttcttattggctttgtgaccttgagcaagtacttagcttcttattgcttcaatgttctcttctgcaaaataagggcagtaattgtcatagcgttgtgaggatcacattagatcatttgtgtagagtgctttgagcagtagttggcgagcataaagtaaatgttcagttgtaagctgttattattctttgcagtggggaatagactggaaatgatcagcctaagtctgatgcacatggctcacattttcaattcatttgtttgcttttcctcatggtacatttccagctctcagtcatgtgactggggatacaattaattcatccacagctgttctttaatctctggttactttctgactctttggcacataaattatcaacctttaaactacacaattagtcttagcttgaaagaatttgtataaatctccaaggccatgcacaatgaaacaaatcctttgttctgtctgtttatatataaactgtgagatggaactatggaagcctcctctttcctctaaaggcatttcagaaagaaaaaaaaaaaagactatggtaattaatgtttagcaacatagagaaagctggtgcatttctatcacatttcacatccttgaaactcagaaatgtctctcttcaaatctatttcctgcagtcatatgtcctaatatacgaggttatcttcttgtaattgaaacaggagggaaaggggcagggtaaaaactttaaaagaatgacataacctgaagacaccacataaactgattagaaccaaattggtccaaggtggtggacaagtcaacttccacttgagaccttgaggctcagtatatgttcatcttaatatatcagcaagctaaatgacaagcctgaagctccaatactttggctgcctgatgcaaagagctgactcattggaaaacacccctatgctgggaaagattgatagcagaaggagaaggggctgacagaggatgagatggctggatggcttcatcaacacgatggacatgagtttgagcaaactctgggagatggtgatagacagggaagcctggcatgctgcagtccatggggtcacaaagaattggacacgacttggccactgaacaacaacaacagcaaagctgggtgacacgcccagcggcaccatgacagttctgaggtcaaccatcaaagctcagtctctgggcagtggcccagttcccagaagtcctcacttcttccctgaaatagctcccattcattagcctatgaaattacccagtccgtaaaaactaaccatacaatatttcaaggccactctcaccatctttaaaaggcccacattttgtctgtggagtgtctttttctctaagcccatttcttaccaagcactttttctctcaccgaattctttctgtgatgagacattaagaacccgagcttcattaagttctgaaaccatgtgtgtgatctcagttaagaaaaatctgggttttggctaggtcctgtcctgtctgtatgagttcaagtcccaatctgggtttaggctgggttcaagttctagccatgtgggtttaagtcccaatttgaggtgcatggtttcataatggcttgaagggtatctccccaaacttgtgttcaagccctaacactctgaatgaaactaatttggaaatagcatcttaacagatatacttaagttagggatcatgagatgggatcatcctggaagtgggatggatcctaaatccaatggctggtccttatgaaagaaaaaagagaaagtgttagtcatgtctgactctttgtgaccccatggatgaggctcctctgtccatgggattctccaggcaaaaacactggagtgggttgccattcccttgtccaggggatcttccccacccagagatcgaacctggatctcccgcattatgagcagattctttaccatctgagccaccaacgaataagagaccttataaaggggaaagccaatgatgactgaggttgaggctgaagtggtctgtctgcaagtcagggaaggccaaggattgctgctaatgactggaaactaaaagggggcaggtggggtggattccctctcagagcctccagaaaggaccagccaaccctgctaacagcttactttcatacttctggcttctgtaactgttagcaaacacgtttctgttgttttatgccgccatgtttgtggtcatttgctgtggcagccctaggaagctaataatatcctcatgatgattaaggacattctgaacaattgttttaatctcagtaactgacaaaattagagggtagacctagacaatctacttctgccagtaaaaataacagtgcctcctca

SEQ ID NO: 43587 - DNA, 2240 bp, Bovine  19866880666444
  misc_feature (1)..(1): n is a, c, g, or t
nccctgatgctgggaaagatccccctgatgcagggggagaaggggatgacagatgatgagatggttggatggcatcactgactggatggacatgagtttgagtaagctctgggaagtggtgatggacagggaggcctggcatgctgcagtccatggggttgcaaagaatcggacaggactgagcgactgaaatgatcgtgtagtggaggtgtgtgtggacagcttgcctggggagagggaactcccaattccacagaaagtttagtttgggcactgcttgagtaaaaccagcactgtcccagtgagtccactggcaaacaaatcagaaggaaccctgtggtcctttccaggataatcctgattatccttctagtggacagagaatgatggacacttttgcaaatattcagcaacataaactttctaaaccatctcgaagccataatgctaatgtaggtcaggtaagaagtggatgtagtctctgcccacatcttccgtgcaaatgctatgaaaattagaggttttggtgctttggtgggctggggggtacatgggtgtggggacttactgggcgtggagcacttgaactgggcttcaaaggatgggggggctttgaaggatgaagaagaataaaagctggaagaacggaatgagcaaaagcatggaggaagataaggagaacaatctagagtaagttgatgtgtaatgcttgaattgagaatttatttggaggtggaccagaaaggaggttgagatcagatagtggtgggaaccaatcaccaggctaaggcttttcaactttaaatgcagctgaggaatgacagcaccagggtgataactcaggtcttccggctcccagctcctctccagctctcttcaactctcctgcacggcctcgcaatgtctgtcttcaggaagtatgttgtttcacttggaaatgagataatctgggcttcaggtcatgaaatagttgtgtgccttggccaaatcacctttttgggtttcagtttaaacccaaaatgagatggttggagaaaatattttctggctctttaagatggaagaaatctctttggaagactaatataatgacaatgttcagaatggttggggaggagggaaaaccaactgacaccaaaaatccactggttccatgatttatgctatatatattgtctttcatataacaaacactcctaatctctctctctctctctgctctctctctaccatccttttattttctttttaacattttaagaagcaactgtgctttacttaatttaatcttctgttactgtatctctcttactatgaggcagttttatatgtgaaatactttctgtttgaatgagctgccatcaagactaatagctcatcttttaaatcttttatccattataagtttcatctaattcctgatctccatccttaaggtccaattcccacatgtccgcttgtctttgtctataacccaaagcaggtctcaggaagaggagcaaagcagagactaggaggggcaaccaaccaaatgctggaccatgtaaactttctcttgatgtgcccccaaagtctgccaaaccaaagtccttgaggatctcaaaaattcaaaaccagatataaaataaataaatgcaaatggcacatttcttaactatagggtctccccggacttctttaggtccaagttactccccttattttttccttcattgatttcagggggaatgaggccagagtttgaccctttttagtgaaaaggttatatacatggagagagggatgaaagaataatcaggtcctatggggaaggaaaaggaaaagtaaacatctcccttggaaaataaacttcttgctctttcaaaccctgaatgccaccttttcaagaataatgtgttcaaagagtggatatatgtatgtgtataattgattcacggtgctgtatacctgaaaatcacacaacattttaaatcagttatgctccaataaaaagttttaaaaactccaaatacattcaaaataattttttaaaaagaatgaagtgttccaaactgtggtgtcatccctaagaagacctctttgtagaaaattggccaaattaaatgagccatcctaatctgtacaaaactttttcatattttcatcagtcatgtgtatgtttatctagtgttactcactatgggcttcccacatggcacagggtaaagaatcagcctgccaaagcaggagacacaagaaat

SEQ ID NO: 43588 - DNA, 2133 bp, Bovine  19866880675129
  misc_feature (1)..(1): n is a, c, g, or t
ncatcaaacctggactggtgatccgtttcacatgtgataatttacatgtttcaatgccattttccccaaatcatccccacccttgccctctcccacagagtccaaaagacttctatacatctgtgtctcttttgcggtcttgcatgtagggttatcgctaccatctttctacaatatggtggtttcctatcggaagaggggagtgtagacagaggccccctcatagaggaaagtcagtctcctgaagaggaggcagggatgagggttatacagccacagtccagggagcagtgggatgacaccaccaaagccgaaagagcacagaagtgtcctcctctagggcttggagggagcatggccctgccccacacctggattccaaactttgaacttccagaacagtgagagagtacacttcggttgttctaagtagtccagtctgtgcactttgtacagcagccctgagaaactatacatcatccaaaagcatttctgatacaagatgtaagtgaattctggatgaaaatgcagctccttagaagcgatgagaggttatgggtctggacccctggctactgaccagatcacgtttactgtgcaagtcacctctgtgccgcctcctatcctgagatgtgccctcccatgaggcccattgatatgggctccttctcaatttctcagctttaatttatgagttgatgtcaaaccaggagacttttcccctgaatctgtctcaggctgcccaacataattctgatcatttgctcttgagtggccttcccctctaaggaatttcaaggcgcttaaacccaattctgtgacccatgggagtggctgcgggggttaggaattcctggtttacatctagcctctgacctctccctgtccctatgacttcattaaactgagtccttttgttgagcaggctttagggaagaggttaagagctggcgtagaaaataccatggctcaggcttggcctgacagtgggccaggggtttggtcaaatagatgctttgcaattaatcttaatgtttatcttcaatctcaagagctggcaattttccagaatccattggcttgctcctgagtctgtgggatttcttgcaaggcagtcacttggtggtttacatccaggggtggctgtgttcataccctaaaacccagcaattctggcccgcaggagctctaagcccactgccttctgtcagcctcacacattggccaaggttgattgaccaaatcctagatctggttgcataactttgggagtaaccgttctaaaagacgtgttctattttcttgcctcactgctcttccctgaagcttcttgtttactgtggaatttctaagaatctaaacacatccagggacaatgctcccagtcccacagccatgagttgaactaaatggaaccatacctttgctttcctcccaaaccaatgggtggaaccaatgtaaaacctcaggatcattcactgcgtgtgcagagactcccctgtgtgtttttatgttcctcccgagaaggatgtgtgttcttgcctgtgttttatctaccaaatacaggcattgcattccaaaggtgacaggtctgaacaaccggtcattgctaacaccaattgtggtacagccatacaatgcacccctatatagccacagaatgtcaggctttggaagcaaatttaatgacatggggaaatgtttgtggtctgctattaagtgaaaaaagctgcttacaaaacagaatttacagtatgaaaataattatgcaaaaattaggtagatagccattgaaaatctggaaggctataatccaaaatataaacatcgatgaaatactctatgtcacaaacacacaatgggagaagtctgtgcacccctcaagggcatctatttgagagaacagaagtggctgacaccttggcacagaacagaccctgttgggaagggccatctttttctgaacatacttggcaccatggagactggcgttagctctgggactgtacttgctactgctatgctgtgctcagtcatgtctgactcttgataccccatggactgtaacctcccaggctcctctgtccatgggattctccaggcaagaatactggaatgggttaccatttcctc

SEQ ID NO: 43589 - DNA, 1084 bp, Bovine  19866880742208
  misc_feature (1)..(1): n is a, c, g, or t
nttggctgctcttttggacaaagcactgtgtccttaggtgtaaaatggtaagcaaaaacagacctctcacttcacatctaatgtgagatgagaaacagatactaaacactcacatgcacaaaaataatagcagcaatcacttataatgcacatcagccatagttttgtactctatataaacacaatcacactctatgaagggcctcttctttttatggatccaggaattttggcatagaaaagttaagacatttgcccaagtccagagagtctggatccaggactcccctttttaaccacccactctactgtctccacgctgtgtgctggatggcataagcaattcacaaatataaggtccatgaagggaagagggatggcactgtgagaacatatgacaaaggcatcccatcttgtctcaggtcatctggaggctgcataacggtaactaagccaagaggggaagcaggagggcaatgacacaaaactggtaacaacagaagggcatgaaccatctggatgtacttcattggtggtggtgggaagcaatcttggacggcatcatggagaaaaaagactggaaaaatccacgtagtaggaagagaacagaggaaaagggaacatcatgaattcagaatgaacctaatgaattttgggaacagggagacaatgatgttttagaattgtttcagtcatgagcagcagtcactcaatttgaacgaccaaagaaaacaaggacattaccaacttgagttgctgaaaaggccttggcagcaggacaaaagatgttgttttacatttctcagctttatttttcttcactcaagcagtggaaagacagaagctctagatattatcgtaccagctcagcaaactaaagaaggggagcacttctttccccaaagacccagggccaactctaattggctcagcgtatatcacatcctcctagctgaaccaatcactgtggctgggccatgtggtgctttcattggcctggcctgaatcaggttccttcatctgtttagtgctagcctatgtcccaactttccacttgtgtactttgcccagattttactctata

SEQ ID NO: 43590 - DNA, 1089 bp, Bovine  19866880765991
  misc_feature (1)..(1): n is a, c, g, or t
natttcaagacgctttgaaactggcaaaacattctgttatttccagagttattacaaccgaaatcctggcatagatgaggaggtcagcctgtaatctcatttagatctttttaaatttagaaactttacagtgggttaaaaatagatcacatttgtgtacttttcctcctttcatctctactgcaaaggcagtttggtagttttgacttagcctcgatattagctacagaaattctggtacttgtcacccgggagtctgctaagccaaaataaaagtgattttcaaatggattttgggatgatgctggttatataactgaggagagttacttgttatcccgcacagtacgctctagaattaagggcgcaagattaccactaagatctgtatgtggatttgtgttaagtgaaaatgtgaaccaggagggatgttttcagtagtgctaccctggagggctgtgtccttacctattgatcagaaaagatcataatacttaggtcaagggaagctagagggtcaggctgcttataagcaaaagttatgtgaagattgtacctgatttcagaaagcccagacattctcttctgtgatagtcaccagggttaaggaggtatgagcattttcaagcccagcaaagacagcattacacttaggattaccttgtcatggtgactttaccttcatgaacatgctgaatccagttttaaggagatcagtgaggcctgaagacatatgttcaatgtcaactggatctggtctctcgggattaaatatttcctccacaacctgcttcaacaatggtttataggatgcctggaaagacaaaatattgtgctgtaagtaaaagggtttgtttggtttgtctggagagaggatagctttatctgtaccaaacaaagcaaaacaagtttattttcgatcctgagcaatggctatggttttgtgtgtgtgtgaaaagacaatatagcaacattgattttttgggaattattccactacactagcactattttttggttcttatactcccttccacaagcaaacaactcttaccagagctatagttataggatggctaatttttcaat

SEQ ID NO: 43591 - DNA, 618 bp, Bovine  19866880905966
  misc_feature (1)..(1): n is a, c, g, or t
nactttgccgctcacgactttgcaagccaccatcgcttctctgttcctctggcttgcagatgcgggccctccctgtcttggccccgtgttcttcatcaggcttcccttaggcttcccttgctgctaccctgggcttgtggctcctccctggcccaggcctgcctggctgccaaggccacatctgctcttgccatcagccagctgctcactagcctccagtcccagttcagtaataaagacgtccaggctggaacaggggccagcacggcccacagcccgtctgcctcagcaccagattctcgtctgtagagatgtctggctttcaagtttcctccctgctgcaaatcaaaaccatccgaacactctacagccagcctggcactgagtcgtgggctgaggtggctgaatgctcccggcctggggctccctgtcagcacctggccatcaccctgcccgaatcccaggttccagagctgtgggcctgcttgcagtgagcccctcgtgctggtgaaaaatgagatttcaacattcactttataccctgtggaggataaagctgttgctcaagcttgtggtgaaatcccttaggaatgagaccttgggtaactccgatgtggg

SEQ ID NO: 43592 - DNA, 1392 bp, Bovine  19866880920581
  misc_feature (1)..(1): n is a, c, g, or t
nccctgtttttcattttgttagaagatgaagttaaagggacagcaaattactcattggcttgtctgttaattaaaacaatatggagcaagaattccatctgtggtcagcttgaacaaagcattctctacccggtggtatacccttaaattgcagagtgcgatttccatctggtcccagcccaaaagtaaaataaaacagaactagacaaaggttctcatcttctctattagaatccactcgctattgcaataagtaacttagtaatttaacattcgtcaattttctttcttgcttatgcaaagttcaactggctataaggcaagcagtctagtggggtcaccaacttcgagcagagccttgggactctgctccatgcacacctctacccacctccctccctaaccacctcccaccataccccagcagtggattcctgcagtaaaccccaacagagtaccacaagagtgtacccaggaatgtaccctagcagaggaccccagcaatgtacctcagtagtggactcctgcagtgaacctcatcagtgttccccagcagtacccataggaaatctcccatcatgtagaatctcctactcatcttgggtcccagggaatgttgctatgaacactcctatatcccccaaagccagaaacctgctgtgcatggacagtcctagtgaccatgctgagacacccccagggtgcttcactcctcccacaaacccttactgaccactgtcatgtagcaggccacgtgcccagccctggggagacagtggtgaataggtggagcttgtctctccctcctctcatggaacctgaagcctggtgagggaggtagtcaacagtaatcactaaataaagtttagaatcacggtggaggtggtttagtcgccaagttgtgtccaattattttgcaaccccatggactgtatgtagcccaccagtctcctctgtccatgggattctccagacaagaatactggagtgggttgccatttccttctccaggggatcgacccaacccagagatcgaaactgcatctcttgcattgcaggtgaatcctttaccactgagccagcggagattcccaacagagtcatatgcaaagtgaaggacatgcacaagagcctgtaggagggagatggcgcctcacctgggcaggtttgctgcagaagtggcatttggtgtgcagatgctaagacaagaggtataaggaggagatgggactgccttataaaaccctcagagaggaagaaactcaacatctgcaaagacctgagaggtctgtgtgactaaggcacaggaagctgggaggacaggaccccagtgaagcctgacaatttcaatgacttgtcccaaggtcgaacatccaggacatttggggaaca

SEQ ID NO: 43593 - DNA, 778 bp, Bovine  19866880965686
  misc_feature (1)..(1): n is a, c, g, or t
nttgctgttatacccagagcaagatggaacctgttacttttttccacctgcaaaatgtaggcaatgcttttagccttttttacagaggcacaggattaatgagagccacaaatgaccttgacctgttttgtaactgcaaatgtctttttattgccaaatattcatgaaaaatgaaaatctgctagttttttttttttttaatgagtcaatattaggctaaaactttaaagtctggaacatgtactttatcggttgtttttaaaaattccagtttccaaatttaaacaaaaggagaataagataaatctttcaagtgataatcaaaacagtaggaaggaagtatatgggttgccttataaattgaagtctgtttttcaaaaactatgattttcagtaagattagtaagagtgtctgaaatatttatgttagtaaagccatggtgaatgaggctgacttgctggaagaaatcatgccaaaagttggcatgtcaggatgtggtattagtgtgtttacatgttaagccagttgagaagtttgtgataatgtgctaatttagaatgattgttgactactgaaatctttctatcaatcccgatactgatgctgtgggcctgggactgatggttcacaaaggaagaaaacattctcaaacgtggtgcttttgcagagctccagctagtcaggagattcttttttcatcctaggcaactgttactggtctatagcaccatgggagaatgcagtccttatttcggtgattgagttagatcacattat

SEQ ID NO: 43594 - DNA, 1606 bp, Bovine  19866880968826
  misc_feature (1)..(1): n is a, c, g, or t
nttataaagcaggcccatactacttttttcaattaaaaggtagtgtgtgtggcatctagaagccacaaaagaaagaagaaaaaataaatttccctctcactgggtcaattcctgggtgtgcgacttacgcagctgtacgggctaaagctcagaagggccttgtgctttttatgttctactgtcacaccttgaaattcttagagttttatctttgaatctgtgttttgtaaacgaagtccaggacagaggagcatgtatgtgaacaaaggaactttgtgccataggtatctgctattccttactgccttgggaatatggaattccagtggaccgacaaggcacaggagttcagtgaaatccaaagaagtagaaggtaagtgtgttacatctatagctgcaggtcacagggcgggaagaactgacaaccctgagacgctttactttgcacctgaactagacttgctttgaacgcaaaaagaaggtgtgacagtttcccaaaggctgctattaacaaaataccacaaacggtgtggcttaaaacaacagatctgtactcgctcacaattctggagcctagaagtcaatggggctatgctccgttggaggctctgggtagaatacttccttgcctcttccagtttctggcagtggctgtcagcccatggtgacttggcttccatctgcattttcttcatctgccttcatcttcatagtgttcttataggacactaatcagtcaactagattaagggctcaccccactactgtgatctcatcttaactaactataactagaacaaccctatgtccaaataaaaattaaaatactttggtggaggcacagttcagtccataacagaaggcagtagcattctgagaaatatgaacaaccacagaagcttatcacagtctttcttactggtgttgcttacttgtattaagcaaccacatattatgacaaagaaggaaaggaaaagatggggcaacccgtcgttccttttcctttcctttcttccctaccttatggagaagacaatggcaccccactccagtactcttgcctggaaaatcccatggatggaagagcctggtaggctgcagtccatggggtcgctaagagtcggacacaaccgagtgacttcactttcacttttcactttcatgcattggagaaggaaatggcaacccactacagtgttcttgcctggagaatcccagggacgagggagcctggtgggctgcgatctatggggtcgcacagagttggacacgactgaagcaacttagcagcagcagcaacagccaccttaactaatcagtgtaattgctggttatgtcaacatctaaatactgcccaagaacctgaattaggtgtcattcctgccagtgcaaacatctggtggacccattctggacagtggatgtatggaagacaccctacttcctcctatggcagggcacttggggatcccccatggaaactcagggtctgtccttcactcaggtgaggctattggagggaaaaatttctctttgcattgaaaataaaaatgtccctggactcttcttaggtacataccaaagcagtagtgaatcaagtactaag

SEQ ID NO: 43595 - DNA, 1548 bp, Bovine  19866881228917
  misc_feature (1)..(1): n is a, c, g, or t
nccagaccttagattcaattacaacgagcaggcttcagccaagcgcctgctgggacacaggttcctcctgggaaaagccgggtaaatgtggccagcatatgacatgggaccagcgagttaaattctcttttattgcaatctaaattacatgcaacagcagaactcctcctagaagccaggtaccatgctaagattccagatttaatctcactgaacctcctctaatctgcacgacagccacacaagggagatacagttactagtatctctggtttataaatcaggagatgaagccttggaggggataatgacctgactttacttcccctccgtccccttcctcactctcaacccttaagtgtttagaaaagatgtgtgtgtgtgcgtgtgtgcgtgctaagtcacttcagtcatgtctgactctttgcaaccctatggaccatagcccgccaggctcctttgtccatgggattctccaggcaagaatactagagtaggttgccgtgccctcctttaggggatcttcctgaccctgagatagaagccacagctcttgtgtctcctgcactggcaggcaggttctttacctctagcgtggcccagaaaagactaatgcgtggaaaagaaacatagggacagagaagcctcctctctggaaaggagatatccttgtctgcgtcgttctgctcctgcctaggcttctgggtgtgttgcttttctccttggctgttcatcctctttggagacatgttgtcatctattttgaaggtctgtctgtatcctctgaggtcacacccagccatcagcttcaggacccactgccagtaatgatgcaggctcctttcagcccatctctccttctcagatgtgtaacctagagcaaggaggatatatcccttcacggtaaaactcttaagtactccaacagattataaaactgagttccaagcatgacacccgtccgtatttgtcgttctcactctgagtgagatctgccagggttagtggtgggggttgttattaaatctcttctctgcaaaagaaggccaaaacatgtgctttgagtggaagctgactcttgcctattgggtagttatcagtagctaaaaataggaagtcattaaagtctgttttttgtttgttttgtgggatcttcaaaattgtccgtaatttctcaactataaagataacaggtttagcttttcaaccagctaatgggtacccaccagtcgccttcagtgctcttctgggtggcttccacatcaggtgcagctttgagtgactgccccctccacagtttgtggtcctcgttctcaccatcagcaccccaccctgtgcaccaaactcttcaaggaagagaaacatagtcttttctcaccaagtttagggactcaaagcataacctacctcatccttttcaggcaagcatagtgtaggccagtgtttaatgtttgacatctggagaatacccatttaaattaaaaaaaaaaaaagagggagagacaaaacaaatttctttctagtagaaattttcagtgccatcaatat

SEQ ID NO: 43596 - DNA, 923 bp, Bovine  19866881398347
  misc_feature (1)..(1): n is a, c, g, or t
natttttaaaaaccaaggctgagtgttccttatcattttatagagacttttatagcctagagatctctccagcttgtgtgtaccagcattcatttccctggtgatcagatagtcactggtgttctgcatggcttactggtctaccacggcatgacatgggggacctgggccagttcacacaagggcggcccctccctctcctcactgatcccgagaaccctgatttaaatcggccctctggtcctttggcagttcggaaacacatgctactgtaactccgttcttcaggccctgtacttctgccggccgttccgggagaacgtgctggcgtacaaggcccagcaaaaaaagaaagagaacttgttgacatgcctggcagaccttttccacagcatcgccacgcagaagaagaaggtcggcgtgatcccaccaaagaagttcatttcgaggctgagaaaagaaaatggtgagtggcatggagacgaatgtgtttcggatctgagataaggagaatcaacaggtctgtgtaacctcaaaatgaatccctccccttttttttaaatgggaaaatagtatggccaactactcaaatatcagtttttaaataaaagatatttcttcttttccacccagtatataaagcaaaattggataaaaagaaatatacttaaaaattctgattggaacttccctagtggttcagtggttaagactccacatttcctgtgcagggggggtgtgggttccatctctggtcagggaattaagatcccacatgccacatggccaaaaaaaaaaaaaagtaatttatcattccaaaatggaatgatctttttatttgctccacattcgaggacttttttctgggtaggatcattataagaggaaaaattgcccaaggcaggacacgacggaataaatag

SEQ ID NO: 43597 - DNA, 729 bp, Bovine  19866881434996
  misc_feature (1)..(1): n is a, c, g, or t
ncagtgtactttcaacagtttttttctctttggctgcatcaggtcttggttggggctctcgggatctttctttatggcacaaggactctgtttttggtgcacaggctcagttgtggagcatgggcttagttgctgcctcccctagccctggcatgtgggaacttagtttcctaatcagggattgaacctgtgcctcctgcatcgggaggaggattcttagccactggaccaccagggaggtccttcaatcaacactttcacaatctaatctgaaagcactcttatggaagcactattacactattttgtatttgtgcatgtttaaaaaagctaatcagataaatataaacatgttttaaatattaaaaattccatttcttcattaaaagaaaaataagtaacctaagaatctcaagtaatggaaattgtctggccctctatcgccctctaagacattttgcttctccctcacccatccacccccgggaacccgcccatatttccttagttaagaaagagaaagaaaaaggaaaatatacaagcaatgattttcccagcagggggcagcatgagacagtaaatctgatgttctttttggcttccccagcccccaactttgtctgaaatcctggatttcaatcgggaagagggcggtgaggggaacaaggatggaatccaaaccacagaacccaaattcataaagttaagtggatgcagaacttgctggaa

SEQ ID NO: 43598 - DNA, 676 bp, Bovine  19866881722075
  misc_feature (1)..(1): n is a, c, g, or t
ncatggtgaggggctggacaactgggcaggttcagcatctccttaaaaagaattaaatggcatttcgtaaggtacccatgtgggctgcccaggtaggaaaaattaactccaaaggctgccttgattagaattttttgaagcaaaactcttgctctggatatatgaatgctcatcatgataatagagggatttcctttttcccattctaaattttgcatctcatagagttaggtgtgcttataaaaccagagactggtttttaataaacaaactggaattcttacatgcaaacagtgacaatctttcaatagtctttccataagaacaccatatgcaattcctaaaaacatgaaagtgaccttaaaatattgcatccgtatccagtttttaaactacaaaaggaaatttagacttctttcatcttttttctgtactgcaagaggttatcacctaccttgatgaccaagcagtgaaaaataggctggacgggcaagccaactgcatgatcataatcacacctgccaacccaggagcagtcactgtgtgacaagctcagagctcagtctcattgaatccacacaactaatgctgagagagaggtgtttctaacacatccatgttctagataaggaaactgagggttgagagtatgagaggagtgctctgttacatagca

SEQ ID NO: 43599 - DNA, 1502 bp, Bovine  19866881723928
  misc_feature (1)..(1): n is a, c, g, or t
nctctgtcctgtaaggcgctatattcagttacttcttagaagcccctgacagcctgttccattaagccagcttatgagataacggtgttttgtaagggaacgctaagtgtacaattccagtcaattctcatttaatccacttagtttaatagataataaagcagaagctgatcctaggctttggccaagcacaatctgtgtacttcagttgcctgcttcttgataagggaggcccccaacccccagggcacccttgagtttgtctaaaatggggtatgactcatgctcctgcaattcctttctctggagggcttggcgatctcaggcaggggtccagttacttctccaagcaaccaaatagggctcccgtgtccatgtctgccctcgccaggcccctctcacccgtctccacttactgaagtggctttcctcgggcagagagaggagagcagtttccatggctgtgagtgctgcagggacccacagttcaggcaacaacaaggttaaagtggacagcaagctgagtagctgagcgatccttttgggagggctgaaatgaagctgaacccctctctccagtctgcctactccttctgtttggttcttgcatggagcagattttaaactttctggggcatggggaacttttttcaaaagagcctggcttccagactttgggttttatttcttaggtattcaggaaaataaagcattttgcaacaggaggctgccttatccaaagcttcagtttggattagagatgtagcacctcacctaaggagcttccctagtggctcagaggttaaagagtctacctgcaatgcgggagacctgggttcgatccctgggtcgggaagattcccctggagaaggaaatgacaatccactccagtattcttgcctggagaatcccatggatggaggagcctggtgggctacagtccacagggttgcaaagagtcggacatgactgagagccttcactttcacctcacctaaggtcttccaacacacacacacacacacacacacacacacacacacacacacggaacctgtgtggttgaataagctggggagcacggttggaataggacttgaaatgcctccctatttagagatattactctcttcacagctgtaaagttccctcacatccgactaggaaaagctagggtcaaagagtatcactggagcctggtcaagaggctgttttcttatttgtacccaaattatccaaagatggcctcctcatccttcttccagcccaagattgagaacgtcaggcccatttttccaatttgcatcccgccctcctgcctctcagcaaacccttggcagcagggggacccacctctgtgggatccccaggaagttagagaaagggttggcttgggagggcaagatggccagaaaggacagagcgctgggaggtcatgaccttcctcatccatccggctgtctgacgttgccttttctctcttttcaaaccattgttttaa

SEQ ID NO: 43600 - DNA, 1225 bp, Bovine  19866880423208
  misc_feature (1)..(1): n is a, c, g, or t
nttttcttctcagaatttctggtacctgtctctaaccagagctgcttctactctgtagttcccactatgcagtgtaattaccattcattcctctgagtattcccactgcccacctcctgaccttgttttaccttcatctcattcttagtcttgacatttaaatataatacattagttacatattcctcattcatgttgaaccttaaactatttttattaacttaataaatgactgatctaacttcagctcttggctgtgtggggtgcggagaggggaccccatccctttgattatgggcatgcaggccccctggaagcagggaccattgtccctgtttcattgtctctgcagttcccacagaacccagtccagagctttgtgcacagcaggctctcagtaagcaataactaatcaattaacgtgactttcacaaaccccagctggaccctagtattaaaatcctcacccaaagagaagctattccaaaagaaatagggaaaaccagaagagtcaggagtcctggaaatcttacttgtatttgcaatgatccacaagatggacatccttagcagctggctttcccaaggtatcctttcagggaaaaggaagttgttagtattagcagcaggggcatttattgaagaccactgtgcaacaagggtcactgaacatttcatcaacatgacctccctgaagtctcagaatgcacaaactcaggaggcaagactgtctcactttataaatgaagcagccaaggctttgagaagttgggagacttgctcaaggtcacacagccttaagtagaagagcttgggctttaacttggtctgtgtgattaaatttagagtttaagcttccctggggccatgtgactcttcgtctgcactcaggaggtcatggcctgcagcacaactcactctgtgtaaatcatacggcaaaggagcttacaaacggtggctggtgggctttagaggtgtagcccacacacagattttgttgcactagcaaagtatttgaaaaataaatattcaaaccactgcccagcatttgtaagtggcaggatacttcttataaaaaccgatttccacctttcttgggaaaaaaaaaaggaggatgtggcaaagagagctcctattctccctggcagaaatgactggaccttcagtgctctctcccgctcacgactgcagtgcctgggggcatcagagtccgagacccctatcc

SEQ ID NO: 43601 - DNA, 1729 bp, Bovine  19866880501107
  misc_feature (1)..(1): n is a, c, g, or t
ntccttttggttttccttcttatctggaaaagcagaactatttcattggtcctggaatactttgaactgacgttaattaaagtaagaaatcctccatatattcaccttctcttattcgataacatccaagttgttaagctgccttcatctgcgtttctaaatggtttccgtgttctgagggatgtctccatttctcagattcgcattagtcctaaatgagtgggacgtgctgtctggccagtgcctctgttctttcccttttccttgttggtatccccatagctccgccctctttactcttctctcttcacttattgcattgtcttcgggcaacttttgctactcttgtgccctcaggtaccacctctcgacagcttatttccgaagctatccctataagtactcttgtgtattgaacttggatcctgtatcctttttcccactggcagaagccccatgacaacctcaaattcagcttatccaaaccataatttgtctccttctcaaaacctaattattggtgtgtataccctgtttttgtgacaggcattatcatctacctagctgcccatgctggagccctcggggttattaaggtctgtcgggttctccaggagacaggctctgagatggagatttgcgtaaaagtggaggtttgcatacaaagtgtgttcaggacctgtctcttgccctccacccaactcgctaaaaaagtaaaagtgaaaaccgttttgttgttcactcatgttgttgtggttgtttagtcgctcggtcatgtctgactctttgcagccccatggactgtagcacgccaggcttccctgtccttcgcaaaatttaatgcctaacctggacccagccttacatttcttcttaacccacaactgtttggcacaccactggttactggatttacacatgagatgaggtctgtcatccaggtctgatgttacaatgtacatgcacaggtacctgtgtagacctctgcacacaaccatgaacaacccgaaggtgggtggcaccttgattagcgagcctgtctggacagaggttggaaggccaggagtgtggggaggtggctctggagcaggagtggacgggtgagagagcacagtcttcagtgtccctggaatacgcccgccccgcgaagtctggatcggctgtagagaacaaaaggacttcgtgctaaccttcttgccttctctctcctctctttcaggttacgttacagtggatattttgggggtgttactgccctaagtcgagagcaatttttcaaggtgaatggattctctaacaactactggggatggggaggcgaagacgatgacctcagactcaggtgaacaacagagacaggtccccttcacggggtctgctagccgtagttgtgtgtggttcctgtggatgccaggccagcaggtcatgaggcttgaacttgtcctagaggggtggcagagggcggggaggggggtgaacaagggggctcaaattgctctttgccactggcagttcagagatgacagagggtggtccggttctggcttatggatgtctgcggtccaggagtgttgatggaggtgtctgtggacttggcagcaggtcctagctactgagatagggtctccccagtgaacggaaagtcccagactagagtgtctgtaaagctacaatccgaggaaagtggccagaggtctgttctaagcctctgccttctctcagaccccag

SEQ ID NO: 43602 - DNA, 1729 bp, Bovine  19866880508020
  misc_feature (1)..(1): n is a, c, g, or t
ncttggaaggaaagttatgaccaacctagacagcatattaaaaagcagagacatcactttgccaacaaaggtccgtctagtcaagactatggtttttccagtggtcatgtatggatgcaagaattggactataaagaaagctgagcaccgaagaattgatgcttttgaactgtggcattggagaagactcttgagagtcccttggactgaaaggagatccaaccagtccatcctaaaggagatcagtcccgggtgttcactggaaggactgatgttgaggctgaaactccaatacttttggccaactcatgcgaagagctgactcatttgaaaagaccctgatgctgggaaagattgagggcaggaggagaaggggatgacagagaatgagatggttggatagcatcactgactcgagggacctgggtttgggtagactccaggagttggtgatggacagggaggtctggtgtgctgcagttcataaggtcgtaaagagttggacatgactgagcaactgaactgaactgatttcaaaacacaactgtttgaagtttaacaagatacaagaacctttaaaacaagtaaatttctattataggatatggggcaagaagaagaaggccaaagaatttcattacccagacataaactttcatgtaacctctttgaaacagaaaagttaatgtccgtcttttagccctgtttccttagtaaaatcccctcctctctccttaatgccttcaatgaaaaggcctcttgacagtttctttcatttagtatttaactagtcaataatcataatagccataatattaatcttcatagactacatcatgccctcatcatcagggttaggcaaattaaccctgaattctcagaagctttaaacaaagtttacttcttgctcacacaatgttctctgtagatccaaaagtcctctactaaatggtgactcaggcatccagtctagtatcaccttgtgatatcatcaactcaacacatgggtctctacaatccatatggcaaagtgctctggctcataaatgacacctgtcacctccacttataatctactatttagaataaataagcgggcccaatgtaaatgccaggaaggcaagaaaaagcagccttggcctggctctaaaaaggaaaataaaacaggaccaggtaaccatgtaccactgtctctgtcaccaagaggcacttattctatgcctaattaactaccatgcatctgaagtcttcatatgtattagtatctttaatatccacaaccacttctagataggtattattatcattatgccattttacaaacaaggaaattgagggccaaagaagttaggtagcttaccaaagcttataagaggcctagctgggattccaatccaggcaatggactccagaatgcactacgtcacactgcttctcaaatatgcaagacagcgtgaggcactgttaaggatactcgtcttcaagtatacgcaagcccataagatgaaagaagtattcagatacgttctattaagtcttgagaggacaaaataagaggcactactgagagaaaaaattaaatgaaaagaatatttttgagtgcctattactaaaccagacatcactctagagactgtatgcatctttcatctaagcatcaaaacactcccacgaggtgggtatttttattccagttacacgaataaaaaaacagactcagagagattaa

SEQ ID NO: 43603 - DNA, 1063 bp, Bovine  19866880528995
  misc_feature (1)..(1): n is a, c, g, or t
ntactgatatgtatgttaccagaccgaggccatctttttgaaatatctggttcttgtcatggcttgtttcttcatatctattgagtactagcctagaaagatctctgatggctgtcatcaagtacgactttcctcatttgaagtatgttagtatctctaacgcccttctagaaaggaaaaaacctcagaacactttaatcctaaagacagtgttctttgtggcaagcaacagaaatggatggtgattaattaaagcagagaaagtctaggatgttgggtaactcgtggaaaagatgggaagtctaaaggatcagaaaagaagccacagcccatggaagctaggtagccaaaatgacactgcaggaagaatccagcgaggactcactggacagttcctggtaccactgctgcaggcaccgtgtactggaagccgcacctggctgccctgactacacgctggtggctgggaggcggggaagcacttctggcttctgcagtggagagtgtgctctgctgcccattgagaatcaaacttcggggaattctatgaacactggaagagggtcttgatgcttaacagtcaaaaaatgttaacaatcaaaacatttgagtctatcccttctgatacccaacatttgcccacacatttttctttatgtttacagttaaaaatgggcttccctggtagctcagttggtaaagaatccgcctgcaatttaggagacattggttcaattcctgggtgggggaagttcccctggagaagagataggctacccacttcagtattcttgcacttctctggtggctcagacggcaaagaatctgcccacaatgcaggagacctgggttcgatctttgggttgggaagatcccctgggggaagacatggcaagccactccagtattcttgcctagagaatccccatggacagaggcgcttggcgtcacagagtcagacacgactgagcgactaagcacagcacagcacatactcaaaaactagaatccccatggacagaggagcctagcacgctacagttcatggcatctcagagtcaga

SEQ ID NO: 43604 - DNA, 1246 bp, Bovine  19866880618244
  misc_feature (1)..(1): n is a, c, g, or t
ngaaagaaccttgtgctcatgcaagttcctctgccgctgtagggccagggtcacctgcttctcggctttcttcaccagcctgtcatcttcttgcagcgcgtggctggtgcgcagctcctggatcaactccagtcgcttctctttcccttcaaacatctgtatcaaatcaaatcagagagacccgcaaatcagcattgccagtgcaggcaccaggccttgcaggcagggactgacgaggcgctcatgaatcgcgggttctgctccgccatgcagggccacggaccaggtgtatgcaccgagctgggcatcagccctgttttctgctcctccagctgttcaggcagacaaggaactcagctacccgttaactgctgactgaatttcttaaaatgcctctcaaagacaaggtgacacctctagggtcatgttaagaaactggaaccttcccttcatttcctggctcttcccctaagaagcctgggggtggtatttttcattgtcgtttttctttgctgagaaatctgctcctggtctggaatacacgacctgctgtctgaacttcactgtggcgtttctcctgcggaaatactggcaggaggatgggggaatagcgctgaacacaagacgcccatccagcctccctgaactgactcaccataactgagtctcttaagagttatagctgcctggggaagaaaaaatgttttagctgaggctttacatcagtccctttctaagcttaagaagcacaatgatctgactaaggctttacggccaggaagaccagagttgaatttgctggcagttaacataatcccactcaggctcatattactcacctgtaaaatgggtaactgataaaaaaaaaatgtgctgatatatgtaaagcaaagaatatataatgtgagcatacagtaagagttcaaaactatagttatttatttacttagctatttcatttattattcatgcattgctagctaatatgcaaactcagattattatgactgtggaaaattagagaatccacttggtttgtgatgcttaatagtcaaaactcatgtatgaaaactgctggattcagcaattccatggaagacattagcttcacactgccttggttacacacaggaaacagcaggcggctcctttctctccttgatactgtgccactcacttgggccagctatggcagtaaaagggaaggagtgggtaactcaacagcatagttccacaggacagcagg

SEQ ID NO: 43605 - DNA, 953 bp, Bovine  19866880677141
  misc_feature (1)..(1): n is a, c, g, or t
naattaagtagccccagggtacttagtagcagcgctgggaccaagattcaaatggtaggcaaccgggctcttaattgctgggttttcttgtgtatagtgctttgtgatattgatgcttccagaagaaggagaaatgtgcctttgtgatcatttttaaattaagagaaaattttgaatgatttagatcagcacacccctctccccagttcttaaaaaatctgggcttcacacttggaaaggaggggacacagctgatgtgggtatctgacttcttgggctaggttcttctgaaataagttgaactgaaagcccccattgtgtaaactcccagcccccctgcccccagtgagaagtcatgagcaagtcttgagtctccacatctccagacgccaatggaggaaaactcttcattaacaatgcattgatttgtgactgcacttttataaaaagaacagctttaatagaggcctctgcagccttttttttttttttttgaagtgcagtgtgttggattacttgcaaagcactgaagaggaattaacttttagatgggtacaaggaatcttccgatgtgttgctagcactttttttttttttcaattgagtatataggtgaaaagaatgttacatttcagggaggattatcaggaaagagaatttcttctcagttgatgaaacacagcccaaagaggggaaaatctttcacctagctctgactttaattattccatatgatgaaaaaagttcctccgtttctgcctgaaaaagaaagtgaaaacttgtcattttagtcttgcactagaaaatttataaatatgtttaagagaggaaaacagagctaggtagaaatgttcatcagacaagaggaggactggagccttagtcactcctgtccagaaaaaggaaatgacttatcaagagtttacatgtgccagacacagtccatacatttt

SEQ ID NO: 43606 - DNA, 2245 bp, Bovine  19866880678086
  misc_feature (1)..(1): n is a, c, g, or t
ngtgttggagggggagcagcaggtgggagcagaggagacagattcccctggggctcccacttccatcttgtttgtggagaagacttctcccaatggaactatttccagaggagtcaggctggcagggtctgggcgctggcccttttcggggtctggctcagatctagggaggatgccggctgtctccagcttttctctattggctgctgtggaagtgcccagtgtgctctgattggttggattcttagtccactcctccagaggggcggagactggagctggggtggagctcccagggggctccggggaagcaaaaggccctggactagattcaagaataggctgagttgggctgatctttagagcaggtggtgccaaggaggagagttcctcctcagattcaataattttcagctcctgttgaatctcagaccagatcagggcgttgaccagatcatcttcatcctgaaaaacatcaagaaactgattactttcgaaccaaagacactgggcacagtttcccagggagagaagggtctgcactaccagctgcactaccccagcacacaaaggatagggcactaatggtgactgaagatgtttattaatgctcacggtgtaccacaacacacattaaacgtgttttctcacttgtcccaagaaccctaaaagataaatgctactgtaattactcccattttggagatgaggcaacctatgttcaaacaaattaaacatttttccaaagtcacagagcagcagatcaggattgaaatctaggttagtctacacctgaacataagcacttaacccctgttcattgttgccttataaaaccaacccaatccctgatctcatataacttcagattgatccaatggctcataaaaatgaggttctcccagtggaatgaaatgttaactcctgccctgacacctgctttccaaataaatacagctatcccttcttactaatgaaatacatatttcacaatgaaaaaagatatgatacatattaaaagaaaaaagaatgaaaaatagcaaaatgggacttccctgatagtacagtggttaagaatccacctgccaatgcaggggacatgggttcagttcctggtatgggaagactccacatgccatgggcaacttacacctgtgtgccacagctactgagcccaagtgctgcaactaccaaggcccctaagcctagagcctgtgcgccacaaaaagatgccaccacagtgagaagctatagtgaagagtagcccccactcacaacgattagggaaagcccaggtgccgcaacaaaaaataaataataataaaatagttgttcttttttaaactataaaattctgagcaaatcagaagagtttccattgcccttaggttaagctccaaatcccttccaagcaaccctgcatgacgtgacccacgctttgctctgagcctcactttctctagtccatgttcccattctccagccttgttcttgttccttgaatgttctgtactctttcccatttcagattcatggcacatcttactctttctgcctgggagtctctccctccctattctgctccctacccctttctcctagcttaagttctgaatagaaatatctatttttcagagatgccttctctgacccccatgaaccccctcctccctctgactaggttgagccctcctatgacatgctcccacagaaaccatacttccatagcatcctagaaaagacttggtttgtgatctttctatctattaagctgtcatctccaagaagacagagatggtgatcatcttgtacactgtagtgatcccagtgctcagcagtgtgtctcacacaatataggtatttaatacatgtttttaaatgaatgaatgaattgctgcttttacttgttctcatgaatccagcctggttctcctaccataaacttcatctgcttctcaaagcaatgcaattcatactttatccctcccagagttcaatccccaaaataatgtttgcatctttctctttctataaatacaaacatactttacaggaacccttaatcagccctctggaggccactgtggtggccctgcactgccctaactttagcccataagccttttatacctgtcccagagaccaagttcctgaaagctacttaaaaggcaaagtccttttctcctctggcatactcctccaagtcacactcaggtcaccagaggtatttcccaaatccaagact

SEQ ID NO: 43607 - DNA, 1500 bp, Bovine  19866880716236
  misc_feature (1)..(1): n is a, c, g, or t
natgaataaataaatattaaaaaattaaagttctttaaataaaaaaagtaaatcagtatgaagaaaaagtttaagtaaaaagcgacggagagggacttccctggcaatccagtggttacgattttgcctcccagtacaggcggtgagggtttgatccctggtccggatcccacatgcctcgtgaccaaaagaccaaaacataaaacagcagcactattgaaacaaattcagtaaaaactttgcaagtggtccacatcaaagaaaaagtgatggagaaacatgtaagtctggaagaaataagctgtggcagtgtggctgaggaacaaaagtttggaagatgcaggtctacagaccagatcccaaaccccctgctctcagttcctccgcctcaccccttcaggccatggtgcttgtgctgtgcttactcgctcagtcgtgtctgactctttgcgaccccgtggactgtagcccgccaggctcctctatccgtgggacttcccaggcaagagtactggagtgggttgccattcccttctccaggggatcttcccagcccagggatcgaacccaggtctcctgcattgccggcagattctttactagctgagcccaaggcaagcccacatcctaaagaacagtcaatttcgttacatactaacatggcatagacttcaagataggttcttaagtaaaaaaacgcaaagcaagaacagtatagatcacatgtgtaatatagatcatattacacatttgtgtaataaaggtggggaatgaaaaatagatggtacaagtatctgcttatccatgcagaaatgaactatggcagaataaaccagaaactaataaaaatggttctccataggagacagtgagggtgtggaacagactggaagcaacacagggatgaaagctaaacttttctgaggtcattgtttcatataattttaacttttcaactctgtagttgttttacatattcaaaaactaaattaaatttcaaaaaacaagcctgccaagtgatgggcaggagaaaacagcactgttgtcaggtctgaagtgttactcgttccgacctcaggatgctgttactgggtctgactgagcttcaaggccatcatgtggtcagaagccttgagttaagtcaccagcataactagtggcaatgaaaagaatttgttcttaatcaataaactttcctgagcttgtactctatgtcagactctatagtaggcgctttgtctccctaatcttctttatctttacaacagccctgtaatatgttattatatagtattatgccatgtcccaagattacaagattcactgagaaactaacatttgaactcaggcttctttaattccaatgtaaataatgtcactgaggatcttctatataaccagcactgtgcaaggtatgggagactttatcctacactgtggaaacagccttatatggtgaaataggaccttcttcatgaaaggcattaggcgccaaacatg

SEQ ID NO: 43608 - DNA, 738 bp, Bovine  19866880718787
  misc_feature (1)..(1): n is a, c, g, or t
nttttgaaagctatcacaattaataagggatgagttttttttaaaaaaaaaaccctcatgcctttcatgcaacaggagtgagttgctatctgcagggttgggttaatgccactttctgtgagtcctctgagaggacaggctccatgaaattcttttttgcccttataaaccaatttaaggccagctacaggcaaggctgcagcaactgccttctgagtacttacacaggatcctgagccgggtggctgtgcccatgttagttctcccctcacctcatgtactccccatcactcttataatccatgaatgattctgatcccgacacctcctcaaaatcctccagaaccagactggtggagtcctcacccaggacgccgctgtcgggcctggacattctgacccagggaggaggtgcaggagagctggtgaccagtggaggtggggagctagggggtgtttgctggacagatgtgtgcagagcctgaggaggggttgccgctggctcacggacttcctcgtcatccttctcagactgtggtcctgcatctggggcagcagaaccgaggacgtggtagaggctggggagacggatgtcaaagcgtagcccgaacttagcgaagagcttgtcattgagagcgtagagcttctctgagatgtcatagcccagcaggaccgagaagaggcgagagatgtatcgctctttggtcagaaggaggtgagatttttccggggccagga

SEQ ID NO: 43609 - DNA, 1696 bp, Bovine  19866880815539
  misc_feature (1)..(1): n is a, c, g, or t
nttttgtttataaggaataaataaactatcctaatgttgataaatgactggaacgtgaaacactgaaaatagttctttgtaatatcactgtgatcaccttgaaaatgccgggctcagatttcctgctgtggggaacatgactgactgacagcctcagcggcttcctccagcatccaccactgcttccctcccaggcaggctttgcctggactgctcccagccagtcaccattctcagcggggctgctaatacaggcctgttcctgcaaggagtgagattcctgaaacaggtgactttgtctccaggactccccatcagcctggtggaagcttcagcaaccttgtgctgcagtctgaaacgcccccttctttctttcttctccccttcatggtggtcagacctgcactgcagtcggagccgctcccttctttctccaggctcctctctgcttcctttactgccgttgcctccagtaaacctcttgcttgtcctggtgtccactttgtgaaggagctggactaaaaatggttataatcattattgaaagggagtaacagtctacaccttgacgcacagagtggatattttctccattaaggatgaagcaaatattagtataatgggtttaacttcatttttgtattacagcatttcctcagaattaaaattcagtatttatgattgtagattctctaaaacgggcattagccaacatttcctcaaggaaggctgctcacctttaggacctcacattaatttgcagattaggctgtgagactgcccttattttggacagtcctctgtagctcttcctggtggctcagctgttaaagaatctgcctgcaatgtgggagacctaggctcgatctctggattgggaagatcccctggaggagggcatgacaccccactccattattcttgcctggagaatcccatggacagaggagtctggtggtgggcaacagtccatggggtcgcaaagagtcggacatgactgagcagctaatttaacttttttctgtagctctaggtctttaactttattttatgatttagtctttaacattcataaaccaaaaactctctccagaaaaatgatattgatagttcttcactgttcatttctttttatagccttctgctgatttctctggtttcctattttctttccgaaatcttcacttgactgttatttttgtgacagaccaggtccagggaacagtcactatccggaacatcagcgccctgtcgtctggtttgtaccagtgtgtggcttctaacgccattgggaccagcacctgtcttttggatctccaggtcatttctcgtaagtatgtgaaattccgatgtccactctggttccgaaatgccaagatcttcattaaaccagggaatgaagagtttcacttaatggtacttaggtcatttgaagagaaaaaagaaattgttttgattttaatcattattgaaaatgttaccaaaatatattagtgtacttttcagcctcagcaataggacttgttctttatggtaaaatgtcttctcctcaggatcattagaatcaaatcagttctgattgtgtagcgctggagacatataaaagtttggagtgaccttctggtcatggcaagacctttttgtattttcttctaatcccttatgtctgctaaaatgttgggtgcccaggtcatac

SEQ ID NO: 43610 - DNA, 1438 bp, Bovine  19866880816024
  misc_feature (1)..(1): n is a, c, g, or t
ncctgcaaaggaaagcaaaagaaatcatctggccaatgcatctccttttagacacataaccagtaactacccagtaaagagcagactataccaaacattgcaaaattttatttctaatcttagagttgtcaccaacgttttactacagcacctatctgtaagtatccaggggttttaaattcctacataccaaactggaaccaacacctgtatccttacctaactcatcagaatatataaagtgcattttatgataccttactattggtccataaatatttttaccagttcaaaaaattaattgcacaataaaaagttaaactagcactgacaggtctcatgcttactaggtcacaaaatgataagatcaagttatagactgagtataaatgaatgtcaaaaaagggaagaagagttacaatccatgactgcttttcttacatcaatttatttattaaagtcaactattcatgagagaggactcagaatgaagttgcagaaagctctttgggctgacggtgaggtacctggtttatccaagctctctctgcctgtaaatatttgagtgtagtcaagtcttcccttgcctgtatcactgactcctcaaatgatgaggttgaacaaaatgctctcagtctaattatgaaaggcccatggactaaagaactagaagaagttactgttaaacacatctatttaaatttcctatcagaaaacctggcttatcaaatatttttaggcagtaaaaattctattgaagcagagaaacttcataacagaaataagttaactttgggaaggaaaggtatagtcatggtcacaattcactaattttctgaacattattttctgtagtgggtatcatatgatatggggtcttttacctataactgatatagcttatgaggtagtagcttctatttgaacttcctggaagatgactagtgtgcctggccttattttaaaatactcctgcaattaaccaaataaatcaagtactattaatactatctaaagttacttccttaatactattatccacctatgtcagtgctagtcccttcgtgtcaaaatatatctttcttttactgtctcagtatttcctatcaacaatgtcttctgataagattccagattcctacatattcctcagaaggatcctcctgacatgtgttaactttttttagtctttcagaaagaggatagcttcttttgatagttggctaataatgtaggaacaggacttaaaacagcacaggcatactgaagtatcaccttattctagaaatcatatatgtattcaaaacactttcctacccacctcttataaaaagattaaaatttcagtggcagcacaggatggaacagaagtacctgctcaggctggtttgcattggagagaggaatgaccatccaaatgacattgaggttaatgagg

SEQ ID NO: 43611 - DNA, 1435 bp, Bovine  19866880921692
  misc_feature (1)..(1): n is a, c, g, or t
ngcttggtcgtggaaattgtgaagagatttgctgagcggcttcgtcagatcaaggacattatggaattaaagggctctaagagacctcagtggtccagttccccgtggctcacaacattacactttcttactaataagaaagacaactcaaccacgtgaatccaaagtaactaggaagggaggagggaagagcacaatatatttgtccaaagaagtacaaatgttaacatggaaactggagacatcaaagggcaactgaaacatgctttgctctgagaacaatgaaatcacaaattagcaagaattcaaagtcacattttcagcaactatttttatgacaacgaatcatgtttaagtttctataactattttggaggataaaccttaagaatcttctctgctagcatgttttagtttcagaaaaaaaattaatctgaaaacaaatcataccaagaaaacacagtgggcagtgagtttacaaaatcttataattattttggaagttctgccaatgtgactaactgtccatttgggagaccacctggttttgcataaaaacatcctctttcatgaaaatgcacaaagaacagctgggaaacactatcagtgacataagtcagagttacgacatgtccagccacacccctccaaagctttcatcactacctccttgactaaaacccattgttttttaaaagctcacaagcttttcacttttaatcaacagcagcactacgaaaatgtctatatacatcatgtgacccagtccagatacattttagacactggtggctcggtgataaagaattcacatgacaacacaagagatgtgggttcaatccctcagtcaggaagacccctggagaaggaaatgacaaaccactccagcactcttgcctggggaatctcatggacagcggagcatggtgagccacagtccatggggtcacaaagaattggacacaactcggggactaaataacaacaaatgcctggcttagaccaagagcagtcattatccaataaaagcagagaaaggtcctaaaaatcaagttaaaggatcaggatacagtgattgtggtaaaatgttttttcataagtctgttcacagctgaccctctcctggcatatataatacctatctatgctacaaaggatttaagaaaataaagatgtatgtacacagcctgagctaaagtgaacagaaattaattttaaaatataattctttatatttgaaaccactttttataatctttctacaacacatgaagatggttttaattcctagaataggtatcaccaaaaagtcttattaaattgatagggggagagggcatgctaagtcaaaaaaactattttaggaaaagctttataaatatgttaacatcagtcatatgctttctccaggttattttattgccgatactctcaa

SEQ ID NO: 43612 - DNA, 1150 bp, Bovine  19866880943597
  misc_feature (1)..(1): n is a, c, g, or t
ncaaagatagagacaatttaagaaactatgacagttgttggacatgaaagtgttagtcgctcagtcgtgtctaaactcttttcgaccccatgaactgtagcccgctaggctcctctgtccatggaattctccaggtaagaatactggatgggtagccattctcttctccaggggatcttcccaatccagagatcgaacctgggtctcctgcagtacaggcagattctttactctttgagccaccagggaagccctgctggacacgagcggtaataaacatctaaactttaccatcctgatcaccttcctcaatatacatctgtgaatcagtttccaccttcaaatggagcactgagaaatgaatacagactccctgctggatccaacttgttaagagtgcagtgtgggtccctcagtccatacacactctacagcctaagatgctgttcatacagcctaaaattgagccagattatcagacaactgtcaaaatgcaactgtggagcaaagagacagacatatgtgaaaagtcatacaggctggcgaaaacccctccttaccctgttccatcaatgacccaaacgcactcacttgccagatttataactctcctgaaatacagatgaaaagtagaaggtcggagggctgtcactatgattacagccttttgccataacccataaccctcattttatttctttccagttttgtttttaaattgttttctttctctgattactaaagaaatgttcaatttagaaattttaccacattcccatccagaaatatttatcaactgataagaatctaaaaactagcatttttatgcattcaaccaaagaaaataaataattatccacatatctgtttgttgctatttggtcactaagttgtgtcggactctttgccaccccatggactatagcccgccaggctcctctgtgcatgggatttcccaggcaagaatacttgagtgggcctgccgtttccttctccatatgtgtatataatagaatttttaaaaaagaagaagcagctcctaggggtatataggggccttggaatatttgttctcagctccttctcaactttgaaagtctgtagcattactcaggaaccacattctgagtaatgaggctgaaacaggtta

SEQ ID NO: 43613 - DNA, 1130 bp, Bovine  19866881112337
  misc_feature (1)..(1): n is a, c, g, or t
ntcatttgacagatgaggaaactgggattccaagagaggaggtgttaaggttgtcagaaagttaaggctaggcccaggttttctgattctaagactagagtttactatgtgatgatggaaagaaaatatccatactgtaaaccacaaggcaatgctaaaaacaggcaaagccactgggggccaggagccctggttttcatcccaggaggcacaccctgccccattttttggctgctgcaatacagaccacagggttctcacccagatcacaggaacagtcatgctgctggcatgcaatgcagggtcgttcctatgaagccagtgagctgagctgctggcatcaccctgcctgcagagtagaatgagccctacatcgctcaacctctggggcagccccgggttctctatgattgctgtttccatccactcaggatatgaagaggcaaatgggaaaagacacaaaccccatcccctacattttgccagtatgtagtcttgcctttcagcttggtttactcctttcctgaaggctcggcccagagtactaaacagagaggttattagctcagttcaaacatcagtcagttgagtggaaacacccagcaaaccacttggatttatgaagcaactggcagagtcactgatgacagtggaaaagccattggccttagacacagcctcactctcttctccactgtgactccctcggtgtctatgtttgtttatgcagatggggtcttcatgtactggcttctgggccccagcaaggacccacacaatgaagcttggggacactgtggacacggcacagtcccagaacagtctgtcctttcactggccgcggtggaatgagcacagctctgtgagcgggcatgcagggcatcctctgactgctagccaagccgggcttccaagttccccactgtaaccttggatacggcagggtggggggtggcaaggcactgtgaagggcctttgtttgtcactggaggctcctcagaaggcgggtatggatggctgggttctaggcctgccaaagaaggagggaaaagaatgggaaagaggagacagaactgctgcaggccgatgaaaaaaggaccccggtggggatagatccactgcatgaagct

SEQ ID NO: 43614 - DNA, 2085 bp, Bovine  19866881140801
  misc_feature (1)..(1): n is a, c, g, or t
ncccgcttgttttcatggtgtgtgtttttagttgctcagtcgtgtccaactccgtaaccccatggactgtaacccaccaggctcctctgtccatgggatctccaggcaagaatactggagtgggttgccacgtccaggagatcttcccaacccagggatggaacccaggtctcctgcattgcaggtgaattctttaccatccgagccaccagggaagccctttttcatggtagtcattttatttattttttttgctcaactttttcttaacactgaatttttaaaaaaccttttattttgtattagagtatagctgattaacagtattgtgatggtttcagatgaatggcaaagggactcagccatacatgtacatgtatccatttccccctgaacttccctcctatccaggctgccacataacagtgaagagttccctgtgctgtatagcaggtctttgctggttaccgagcgtgtgctttcccctctccctgcccttggccctttcctcagaggagggcagtgctgaagcaaatggggctcctgggcatacagaggtcctctgcgctgcctgtgtaggtgactgtggttccacctagacacagcttacgtcggagtctttccccagtcctagctgccccagatccagtgcctcagcgctggagtgttcaccgggcttgggctggggcaggaaattcggcagctgcaggacagatgtctgtctgccctgccttggggacaagacccctttgtgtctcccagctgatccttgttcccagcctctgctgttgctgattgtcttgaacctgctctgcacgggaggtgaggtctgtgaggtttctctgtattagggagtgagctgtgacaaagtggctgctcccagaaatctgcctctagggtgctgcttcaagaagcaccaacagtggccactgctgcccctcctaggctccaccatgggactacattgcctcctctgagtcccagggttgagtttttctccccagttctggctgcctcaggcccaatgctgcactgtgatgtgaagtgagcagggcaggaacgttccgtcagttcaggctggggctggaggtggaaggtgggaagcccatcacctgctggagcggacctctcttgccaagtcatcctgtgcacactctttacaggtagagcctaggcttctccagcctctctttctgtcccaacagttctctggccagccaaggggacttggctccttcacacaggaccccaggactgggatgcccagtctgtggctcaacccactcactccctggggtgagtctctgcccatccgatctcccttttcctctgagacccctcctgggggcacaggtcctgactcaactcatcttctgtcctacccaattacatgtgtatctttcttacagacttggttgtataggagtccttctgccagtttgcagttggaatggttccacctgtagatgtagtttcgacatgttctttgtgggggtgacctccatgttctcttgccctgccatcttgatcgcacttttcctgaagcatcttgtgtcagcatctctttctctattgccgttattccaactggagtccagagtctttggcctggactctagcagtggccttaaaactgatctccttagctttagactttctcttttttatcttctgaattatagtaaaatgtttgttttttttttttctaaaaatgtgagtcttattgtgacctcttaattttttcactaactgttcttggagatagatgagaagtacaaatttcttggagggcattcacagcttgcatgatttgtaactagctcatgtttctgatttcatttctgaatatatctgccattgcatccatgcctgactagtcatcttttccaaaattcaatctgtgcttttccattaatgtttattagttcatttttcccttccacctgaggtaacttttcccttgtatatttttattgaagatgtatctgtctttcaagagcttattcatttactacttactttaggatgatttcagggcaaagttttccctttctttcatgtctttgagtttggaccaccaacaga

SEQ ID NO: 43615 - DNA, 909 bp, Bovine  19866881180851
  misc_feature (1)..(1): n is a, c, g, or t
nccctagtttatccatcccccttgcccactagtattctggtgtttcttcataaagggccgatttcatgacatatttcttgtttgcatcataaacctggtataaaaacttttttctattttatttttgcataacttcaatttttaatgacattaaacatgtttaaatgtttagtagtttattgactttactgcttggtaaattgtcgcatagtgtatccatttatttatttgggtctttacagtttttattggtttctatgaactcattattaataatactaaacatgtaatggctatttcttacaaatattgtatttttgattagcttttaatctaaattgctatatttcatatttctaagataactctcttatactaggcttgtaattataggaactgcttaccttcataggtgttgagatagtggttttttactacaaagtcctctgaattgttgtctgggaaacgaccaaggcgagatagaggtccatagacctgtgatgcataatcacaataatccttgatgatgtttcttctctccaacttcccttctatattctttccctttcccatcagttttctgattgctaaaataaaacatacctccatgactatctctaaaatatttttctgaatgacccaaatgcaggctaataaaccagttgtagtattattcacagggagactaactgagctgaataaatttcatcatgatcactcactgcagcccgaatataacacttaagacaaagaacaggtggatatgacagaagctgaatcatccagtgtcctcaattggtactcatcaaaaatcttttataactgcattctaagctctgggccagaaataaaagtttgcgcaatgaatgaaagaaactcaaagtaactgaaaaatacatgtcttcaata

SEQ ID NO: 43616 - DNA, 1036 bp, Bovine  19866881263708
  misc_feature (1)..(1): n is a, c, g, or t
ngaaggatagaagttctgacaggcttgagcatctgccccacgagtggaatgccccagtgtccccggggcaaggcatgttcaccctgaaaaagcagcctgagtttcccgtgtgcctgccaggcagaagtgccctccaaacactacctcagatgcggcttagtgttgaatcagagtgagactcatgactaaacagttttggtccacaaatgagaatccttctgtctcatgctggctaaaaataaaatcatttcatctcagtcccagagcaagatagggctggaagagacttttgagatcatgctgataaactcctcactgcaatagaaactcagaggggaagaagtctcctcctagggccactccgataaatgtccgcctcttagcctctgccctgtgctcattcgcccccccgccccccaagctcactgtctgtatctgtgtggatggcttccacgaagagggcatccccagggtccagacgctcctccaggctggctctggtgtactctggtccagcggggtccaggcctgcaaggacagacatgtgaggggccctgtcatctcagccacaagaactcttatggatccactgcacacctacatgggcaacccttattgttcagatcagaatcccccaacaaggacccaaaggtgagagaactagctcaggactacctttcccagggaaccctaacctgttgagtagagagaactctaacttcttcatgacccagttcctctggctctgaaatgaacttgctaacaccgaccatttggcaagggttaatgtcagtaatatttatcctcatgtagtaataacaatggctgtaatgttttgagtagctactatgtgccaggccttgtgctgggcaacttcacacattctagtccttacaacaacgtgtgtgcatgcatgctaagttgcttctgttgtgtctaacttattgtgatcccatggactgtagcccaccaggctcctctgtccatgggattctctaggcaaaaatacggagtgagttgccatgccctcctccaa

SEQ ID NO: 43617 - DNA, 827 bp, Bovine  19866881333948
  misc_feature (1)..(1): n is a, c, g, or t
naacaggagaaccaaaagttaagcctcaggactttccagtctagactgttttccacctcatagtgatacttcttatcagctggttccttatcccccctttttcacagctcaatgaggaaggctggtcacatgtaaaattccaaagaggcaggaaacaggtgaaagggaaagaagccaggctttctattacttttatagtggtatgtagctttggctttatctctcagctattattaaaatggtggtatggtgtggatcttattccctcttaccaagcagaggcaatctgtctagagacagaggttacaggtctgaccctgcctagaggtagtcacttcatacatatgggcctagtttcctcatttattcattcatttaatcaagaatcttctattgaacacttggtatgtccagaggggcttccccaggtggctcagtggtaaagaatccacctgccaatgcaggagacttgggtttgaccctgatctgggaagatcccacaggccgcgtggcaaatctgcccatgcaccatgcctactgaaccagtgctctagagcctgcaaggcacgactaccgagaccacgtgaagcctgagcgccccagagcctgtgttccgcaagagaagcctccgcaataagaagttggcataccccaactagagacccctattctctgcaactagagaaaagcccatgcagcaacaaagacccagcacagccaaaaaaacaaagaaacgaggttttagttttattagaataaagcatggtacaaaagaaacagcaacaattccatttctcttttgcagaaagcaatgcttccatgtgcgg

SEQ ID NO: 43618 - DNA, 1078 bp, Bovine  19866881343815
  misc_feature (1)..(1): n is a, c, g, or t
nttacgaaaaagattagaccttaatctccagtctctcaaaataagcctgcaaatagatcaaccctctttccaagaccaatatatagtgcaagcctcatcctaattgctctaattacagaagaacataatgagatacagcagcagatggctacagattaaatttgacagagaagaaattctcctctcttatctttttattgaagaaactttgcccggaaaaagaaaaattattttgttcacaaagccaaatatatatttttaaagtgccattctacttttctatttttatcagtagtacctttccttaaaaaaaaaaaatttttactcatttcatgtagctttcattattatatttagcagataaatttgtacctcttactgaacaaaagatgtgctcatagaaagtttgtccaaagtttatataataaatcatatatttccacaaacttgttctaaaatttctaagatatgttctatcaaatataaaatcagggactgcggttatttgagggtaacaacaagaagtcttcatctaaagcactcttagcccagctttcaaaaggaagtagaatgtcacacttccaactaccatgttaatacccttcaaactcagtgtccaaaagtgaagtcactaccttctccttataaataaatttattttcccaacttttttctctggctaatggtaacaacaagctctaacttgggcactatcttttcaaactcctctcacactgatgtcagtactatcaaatggtatctgatgatgtgcttaagtcgctcagtcatatctgactctttgcaaccccatggattgtagccctgcaggctctttagtccatagggattctccaagcaagaatactggagtgggtttccatgtcctccaccagagatcttcccaacccagggatcgaatccaggccccccacattgcaggtggattctttaccatctaagccaccagggaagcccctgactactggagtgggtagcctatcccttctccagggggttttcccagcccaggaatcaaacagggtctcctgcattgcaggcagattctttacgagctgag

SEQ ID NO: 43619 - DNA, 1738 bp, Bovine  19866881409918
  misc_feature (1)..(1): n is a, c, g, or t
nattttttctttggtcgaaatagcggaatatcttaaattgccctgtgactctgatgttcaatggcttagcaatggtaacactgtagtgtgatttttttgaactcaaaacaagattgagatttttctaagaaagaaagcgaccctcaaccactatcatggaatactgagtgactttggaatcagcttttgctgcagacttggtaatatttttttaatgaatccaacctaaaattacaaagtaacacagagcttatatgcagaatttatagtatggtaaagtcatttcagtggcaactaacattgtctgaatcacaaataatggtaagctactttatatacttcccctgctggcaaagctaaaaaaataagaaggtctccattcccatgcatatttgcagtgaatgtattttctgaacttaaactataattccaggaagactttttggaccttggaacaagtgcaaagaaaatttccatattcaaagttatttaagtgtgcaatggaagcatgtccacctaaccttcaattggaagtgattaatctacattgtaatgatgtgctaaaaggcattaaatatcaagagaagaagttattggaattctataggtgccttccaggcaataaatatgcacagttaaaagtatatgcttggggcttccctggtggctcagtgataaggaatctgcctgctgatgtaggagacacaggttccatctctgatccaggaagataaagcccatacacaattattgagcctgtgctctagagtctgggagccaaaactactgagcccatgtgccacagctactgaagcccgcacgctctagagtctgttctccgcaacaagagaagccattgcgatgagaaacccacacaccaggagtagagtagcccttgctctctgaaactagagaaaagcccacacagcagtgaagacccagcacagtcaaaaataaacaaaaagtatttttttttaaatcctatgtttatggattgagatcagtattgccagcacctatctgtgaaagacttttctgaaattgaaatacagttgatttacacattgtgttgctttcaggtgtacagcaaaaagatttggtttaaaattgttttccattatatgttgttgcaagctactgaatatagttccctggctatacagtaaatcctggttgtttatttatacatggtagtgtgtatctattaatcacacattcctaatttatccctcctttgctcctttcctctttggtaagtttctttcccatgtctgtgagtctgtttctgttttgtaaataagttcatttgtactgtttgttagattccacatataagtgataccatatatttgtctaaaaaatagtttcaaaactgaaataggggaaagtctcattgctcatcaccattaacagatgatcatctgtaatcagttttaatttctgaatcccaattaatcaaaatggtgttccctaaataagagtttcattcttttcttcaggagacttgtattgcaaaaaaaaaaaaaaaaaaaaaacctgtagtcagttattattactatcttttgagttttatcaatgaatttgttttctttcttgtcattttagtacctacataatatgcgcacttttgtattttggcccataaagtctaaaatatttaccgtcaggccctttttcttcaaagtctgttaattcctattctacagcagataaaaagaataagaactaaatataaaca

SEQ ID NO: 43620 - DNA, 989 bp, Bovine  19866881443481
  misc_feature (1)..(1): n is a, c, g, or t
ntcattgaacgtgaagggtttgtatacagtagttaagaaacactgaaactgggaaaagttaaagaagaaaaaggatttggaagttgtgatcagtgtctcctcacctgcatttggaacagtaattgtcacttaaactctctggaagcttttcatgtttatttgtcatgtacaatacctaatgttaaatgctttgcacagtaccataggaagaccacgtaagtcataattcaattattattgtctaaatatcctgtagcagccacattctaagtcagctctctagggatagtaggggagaggaagggaggtagctcttgtatttgttccctaaactgttaacttagtcacatcctcagactgagaaattgcctggagtagttgtcagaatatgaacttccaggcagtgccccagatgtactatctgagagccaggaatgatttatgattaactcattgaaaaggcatttggaaattggtgaggacataggataacaagagttatttcaaaaacagtttgaaggaagtgcccaaatcataggctttgccaccaaatcactccttgtaaagatcccaccacaactccagtgctatctcagtggtttttcttgtccttgaaatgctaacctagacctgacctggagctgcagaatttcagattagagagacactttaatcttttctaagaagctgagcttgcttcaagctttattaacttagttcatgattatctaaaatagtcttagtcctgtttaccatagacaactctacttctgttagttctgaaatagtgaagccaaatgtcactgggatccagacccaggaggggaactctgcttagatgtcccataggcacctcaaacccagccggtgtgtaactcgtcatcttgcccccgacctgatagtctttctctcattctttcagggtagtaggcactgagtaccttaagagaataaagacacgttcgtctggacatgaggcaaggagagat

SEQ ID NO: 43621 - DNA, 1473 bp, Bovine  19866881550286
  misc_feature (1)..(1): n is a, c, g, or t
nttaactaatagtgaataaaggactcacggtaacctaaattatttcaatgagaaaagtaatagatagctgtgttgaaaaaattccagtagtgcaaaagcatatatggtataaaataaatgctacccttagccgttttcacataatcaccccttgtcatcagtttcttcagtatccttctagagataggctatacatataccaatagcctatgccatatagacggttttgtacctttcaaaagtttgcagtagtaaaatactttagaaaatctggtataattttgtccttttcccctctgccctcctgtcttaacattagagaagagttcccaggtttagaaccatgttcagcagcttgttccattatccgagatattctgtttattggagcaaggcggatcctgttccatcgttcatcagtcgggattggaagcgacacgagcaaaggcacagggaggccctccagcaacttgccgcgtgagtgtcaggcggctccagctgctattcatgtgtttgatagatgcatttttcttcttaaaaagttttgtttattcactctgtattattttaatatgtacagttgtgatgtcatacctagaccagttgagcttaaattctctttcttaacccctttgaccaaaacaatctggattcgggagcaacagttataggtttattggttagtattaggttggtacaaaagtaattgtgatttcagactgtgaattttaaagtattaaaacgaggctcaaacacatctttattaattaaaataggaaccattacagtcaacacatctgtgccaatgagaaatgagttggtttgttcctgtagcataaaaatacatgttttgggatttgatgaattcttggaaagcattttctgccttctgttggttgtggaagcgttttcctggcaaaaagttgtcgagatgcttgaagaagtggtagttggttggagagaggtcaggtaaatatggcaaatgaggtaaaacttcatagcccaatttgttcaacttttggattgctggttgtgaaacttgcagtcaggcattgtggagaattgggtccattctgttgaccaatagtggctgcaggtgttgcagtttttggtgcatttcattgatttgctgagcatacttctcagatgtaatgaatttgctgggattcagaaaaatgtagtggatcagacagacagcagaccaccaaaacaattaccatgaccttttttggtgcacgtttggttttgggaagtgtttttggagcatcttctccgtccaaccactgagctagttgttgccagttgttttataaaatccactttttgtcacgtgtcactgtccgatcgagaagtggttcagtattgtgtagaataagagatgacatttcaaaacgatggtttttttgatttgcagtcagttcatgaggcaccgttatcaagctttttcacattttcaatttgcttcaaatgcca

SEQ ID NO: 43622 - DNA, 1057 bp, Bovine  19866881730945
  misc_feature (1)..(1): n is a, c, g, or t
ntatgacatgggaaaattttatgaaattcaaatttcaatgccctaaataaggttttattggaacacagggcatgctcctttgtttacatattgtcgaagaccgccttcaccctgcagcggcagtgctgaggaactacaagcccagactgtaaggtccaaaaagcctaaaacatttaccagctagccatttacagaaaatgtttgtgacctctggtttaaaccttccaattaatataaaatatgagtcatcataagggcccagaaacacaatgtgagtttgaaaaagaataatttacacatatactaattctagtccatggaacggtctcaacattcatcccagcactgagaggaaacctaatgtgaagttctacccagctgcaatgttcctggagtgagaatgttcactgctgtagctctagtcagatgattggtgattactttcatagatttccaggcctggtttttggtgtactctgcatcaacaagttttgggtttttccgagatagaagaatgagaggatctcgttctggacttgtcctataaaagaaacacatgacatagaactacgtctcctacaccataagaccactcccaatagctgaaaggtaagcagtaatcggacccaacacgatgaccatatgcacagatgaacaactcacgggttatttaatagaagaggagggggatactagatcctacagcatctaggtggtcctggctgtttgccactgtacccttcagggcaggggagtatttggccctctctgcttgcatctagtctttaggattatgttatactacagccacatcccagggaattatttcccttttagaagcttcatgtaacctctaatcactggtactcatagctgtgtaactaggtaatcaccactcaccaaaacagctacatgacctttgttgggtgtgctctgtaaaacccagtataatatttaaattaaaaagaaaaccaaagggctcaaacacctgaaaacttattgtagaaaaagtcctagttatggttctagtaccagacgatgttgacatttgaggggt

SEQ ID NO: 43623 - DNA, 1483 bp, Bovine  19866880372438
  misc_feature (1)..(1): n is a, c, g, or t
nttcgtaggggtattatttacagtagccaaggtagaagccactcaagcaagtgtctatcaacagatgaatggataagtaaaacgtagtatgtacgcataacttaacattatgctcggtgaagtaagccaggcacaaatagagcaaatactgtatgattccacttccatgggattacaaagagctggacacagctgaacgactaacactttcacttttcactttccacttatatgaggtaccgaggcaccttccccatttcagtgaattatgtcatcatccaaccagttgcttaagcttgaaatctgggcatcttccttgagctcttgatttttcttaccacctcctacatttaatccaaagtaacagagcctctgtctgtccactcaaagacttgtatacagatgattgtagcagaacttcagacacattatgataagagaaagaaaccaggcataaaaaattacatactgtatgattccatttatttgaaatatttagaaaaggcagatctgtagagacaaacaacagatcaggagttgcctgacgttgggggtgagagcagggattaggcataagggaactttctgaggtgatgaagatatcctaaagctggattatggcaatggttgcaagaatctgtggagtctctaaaaatccctgacttatacactttcaaaaagttagccaggaaagcctggctggctacagtccatgggatcacaaagagctggacacttcttagcgactgaacaacaacaacaacaacaacaaagttagcatcttatttggaaagtaacttagatattttgtaatgagtcaaatagattttttatgggcaggatgcaaagaaacatggctgcttgtatcaggaaagagatttgaaagaagggtccacacaaaattaacaaggcccatgcactccacttcctaactgttctccccactggcccttctctttaattctctctgacattacaatttaaatgttttgatcagactcttcttactgtaaatcattctgttacttcaagttaggaacaaaaaaaggaaaagaaaatgtcttgtttatccccttccccagcctgtattgataggaacagcaagctcaaactgtgtgggaaatttcctgccttaagatttatttactctctaaagaaaagctactttgatttcattatttttttaagcatacatgggttttaatttggtgagaaaatatccttgccattaagaagattctgcctcattacctcttataaaaaagccctcctccccaaatttgcagaactaaaggaagcataaattaaaacaacattggtgtttgtcgctttgatcaacaaacacccatctccaaaagaaaaaaaaaaaaacctgcaaaccaagccagattcaaaaacagtccattcccaaagtcaaagcagtcaatataaacagcttagtctcccaactggataagaaagaggaaaaaaaatgggggagggg

SEQ ID NO: 43624 - DNA, 1611 bp, Bovine  19866880404322
  misc_feature (1)..(1): n is a, c, g, or t
ntctgactctttgcgtctcctggactgtagcccatcagactcttctgtccctggaattctccaggcaagaatactggagtgggttgccatgccctcttccaggagatctccccaacccaggggttcaataggatgtattcaataaagttgatgtctatcaactatccatcctttggggccaagtttaaatcccatctcctctaagccttttctgatctctcataaatatcccctgactctcttgcacctgcaatctgtcctttaagaagtgtcccctcacccgccccccgccgcattgtgggggaagcaaatgaataaaatactacataaactgtgaaatgacattacagcaataataaactaaatagataatttaccagatagatagtttattattgttatactacttgaacacaatgcttgtggttatcacactctgtctttcggcacagctatttaagtctgtgcctgttccctgcccacagtcccaccttatccccagcttgggctgtgaactctgaagagaggaactgactccatctttacttagcccagaatgcctccccagaggtttgcacacaggacctcctcgtgctggttcattcattcagccaagattcactgagtatctactgtgtgccaggtatggggctaaaagctgaggggacaatgatgaacaccacaggcacaacagccctatttaagtcccagtttgtagaattaaatctcctctctgctactctactatttgccaatattttcagtaagatgagaatgaaatgaggcctaggaaataaccgatttcttatattaaaaaggaagtcaagaaaagctcatttgtacagttgatatgatgtttttctcatgactgatttaaggtgaaagtaaacgttaccagaaagaatggcctaaagagtttcattgtcgttcactgttctgataaactatttctataaccctttgtatttaaagagtttctcataatctcttgactttgaacagagctttgaggcttaaagtgcttacttttaaaaaaatttatgttttttaattgaaggataattgctttatagaattttgcttactttaaaaaagttagtaaagataattatgtataaaactgaaaaaagttggggctgggatgattttttggaatggtatggcttctcaggtggctcagatggtaacagaatccacctgcgatacaggagacataagagacgcaagttcaatgcctggcttgagaagatcccctagagaaggaaatggcaacccactccagttttcttgcttgggaaatctcatgtacaaaagagcctggcaggctacagtccatgtggttgcaaagagttggacatgactgagggactaacgctttcattttcactttttttaccaaccattagttgggtacttgttttgattctcaaatctctctagactctctgattgattcatgctctcttcagatttcctcactggagatgacttttagacctttcctctaacactaatcttttgcataagccttcaccctatattttcagtttcttttttcctcttcctcgtttttcctccaaatacccctcctccatcatgaaactgccttat

SEQ ID NO: 43625 - DNA, 976 bp, Bovine  19866880581092
  misc_feature (1)..(1): n is a, c, g, or t
nagtctgacaggactgagtgatttcactttcacttttactttcctgcattggagaaggaaatggcaacccactccagtgttcttgcctggagaatcccagggacggggaagcctggtgggctgccgtctctggggtcgcacagagtcggacaccactgaagtgacttagcatagcatagcatagcatatatacatatatgtgtaaatatattatatacagttgtcttcgagtgctgtgctcagtcacctttgactctctgcagctacaggatcccctgggatggataacaaaatctccctgatgctatgtaaaatggcataatatttgcatataacctacttataatgcaaatactatataagtaattgctggtgtgctggcaaattcaagttttgttttttggaactctctggaattttcccgaatattttccattccagtgcaaaaccagaaatgaggcctactatgtgtgtgtatatgtatctatagatacacatatatagatatctatattgacatatgtttctacataaaacacaactttatagatacctatgaatatctctatttctgtaaggatctcatcagataggggcactgagaaagacatccccttaggaaaacaaatgctgctctcttgcatgctaaagaaaaacaaagggggaaggaggggttagaggagtcgcactaaggctttgcggactgaagcggtagtgctaggatccgctggctgcacgtacctggcgcttgtcggcggtgggagatgaccgggacctcatgtggacagggacagcctggacgtctgagcgctccagcaggtcctcagccgacatggacttcgcggccctcccagctgtggccccccacggggagggttcccctggggtaccgttcagtctctgggggccctttgatccattgttagctccactgagcagttctttcggcgcatagtccccgcgggcctttccccaa

SEQ ID NO: 43626 - DNA, 1213 bp, Bovine  19866880704497
  misc_feature (1)..(1): n is a, c, g, or t
naatacttcggtgccaactgagtgccaagtatcattctgggcattttctcacgtaacctttatgctctatgatgtaggacacttatgaagtcttactcttcctcccagccctctccacccatttctcttgtccctccatctaatctgtgtggttaatttcttatctatcttttctagtgatttgttatgcaaatacaaacagaaacagatctctttcactcccttcacaataggaaagttatgtggtgctctgctgctgctttttagttgctcagtcatgccgactctttgcgaccctatagactgtagcccaccagacacctctgccaggcaagaatactggggtgggctgccatttcctatgccagtggacctttctgccccagtggatctttccgccccagggatcgaacctgtgtctcctgcagctcctgcattggcaggcggattctttaccactgagccactgcaatttggtagttattgctaaattgctccttttatgctttaaaggggagacaaataacatgaataattaaatgtcactgtgcaagtgattcttagaggagatcatatcttctttagtatagaagaatagattatttgtatttgaacaaaaatgccttttcaggcatttccagtttatgggaaaatgatgtacctcaaacacgaaacccatcatcttccaaaatgttaaaaaaaaaaaaaaaaaggtggtaattgttctttggcaaaggcactgcttttgagatatcctttagcccttttcagcatccctcacctctagtttctgtgactaccgggctcctcaaagctatacttgagattttttggattcaaagaaaaatctaacaagcaaacctttccaaggctttcataattgcctaacctctgtgtctttaaaaagtggctcagtgggtagaaaggtatgcgttaggtaatataaccccatagcaacacacagtcctttctggaaggagaagttcttttttaaatgtcacatcctgataatatgccctggggacttttggctttggcaactgaatcacaagtaaaaggtgaagtctaacatctaaaatttgcataaaaagtaaaagcaggatcttttcttgtaagaagctttaccccattcttccccacctgttccaacatcctctcatactagttttatgtcctcctcacccttcattttgaaacatttttaagcttaaat

SEQ ID NO: 43627 - DNA, 2598 bp, Bovine  19866880785809
  misc_feature (1)..(1): n is a, c, g, or t
ncctcctagtttctgtgagaaactgttgcttgcaaaaactatagctaattaaaaattgaacttattcagctgcccagaaacccgagtggggactggcaaggggcgggaggaagagcggacaggggcgccctatgagtgacgcccccagcgccattcattctatcgtccttcccttccatttaaccgtcttcgcatcgtggttctgtggggaccggcaggagagggcttacccgttgccacgagctctgtttgcaacagcgagccagcttctgcagagcgcgggccccgattgcccggggccggcgtgcccgcggccactccagaaaccggttctgggctctggccgcgtgtccttcccctgacatcagggtgcccgccgctgtcaggcaggccggccggcgattggctgggaggagggcagtaatccgaactgccttttgtacttggctaatcagggcagccgcctgattgcaggttcccagcggaggtgcctgggtggtgtctgacacctgtgtcttagctctcgccttcgccttcccggagctgcttccccgggattctttccgggccggattcgtgtctctatgtcacctccccgcggcccctgagccccctcgggccgccggcttggccccgtgtcatgctggacgaagatgtccaacagataatcaaggacagtggaaatgccggcttagacttccttaaggtaagtcctttttaaaccaggtatttctcgaccggatttctccatttaattcgacataaatgcttgtatcgggcaggtaaactaaagaaggtctggggagttgtttcagtttaggctcttatggtgaaatttgtaagtgatttgagtgtcagatgtgctggcaaaatgataccaaggcagaaataaagatgttcatggtgagggggtgggtacttgacaaaccactgtcacccttgcaggcagctggcacctcactgtgcactccttcctatttgatgaggcgctccagtgatggtagaataaagtaacttttcatcaaggccaacaaatgtatatgcttgtgccataggctcctcccaaccgtgcaatcctaggagctatcatttaattctcattcccacttctttttaaagctgtctttaactttttcctcttgtgataggaaagcagtttttctttttaaggcttgctcagcacggaggagttagtgactttcactccagcatggggtttgattgtactgcttggctcacttcccctcacctttattttccagagcaagtcaaattctagacagaaggacttaactttgagtcacagtgagatgctttggaatattaagccatgattctgattaagcttaagctctgctatgacttcattttatgtacatttatgttgatcgacagatacttcgggtccatcctgtcttcctcttggattggtgtcagcatactcttattgtagggtttagtaacccaaggttcgtaaaatgactagtggtgtggacaaacgcttacacccttgcctgcttgttgtgataaggaagaaaatttttatttttttttaatgaaaactttctgtatatgggtgaagatccatttataaatccaaagaggttctgaggctactttccccaccatattaatttcaaagataggaggaagctgttccccacttctaaatgattccatttaaccagtaaacaggaatagaacagacagaggtggtgaaaagcaaggcgataaacattcagaaaccacgtactcaagatctatgttaatcatcctgaaatatgttttttttctttcattatttataggcagtcggaagtctccatctttctcagctgttagctaactattctttataaagacattttcctgtaataagatcagtgtatttgtaatactaaatataaatactaaaaatgctgctctgatgaatagaagcatcagaaatgacattgcccatgggttgaaatgtgatcatcatgcaagtctacagaatcatttaaaatataatgtatgtgccccatagtacagatggttgctgatgattgaaaaatcagatcagttggtaggtagatattaagtgaattataaatattgaagggattaaaggacaagtaaatgtggaaagttaaataaatactgaatatttagcattgagttcaagttcaaaatgctaccttcacctatgaattacaaactagagaatgtataaatcaaagttggtttcctggtttaaggataagtcattgctgtatagggagggataaataccatctcaaccctaatcactatcttaaaaattttcactgtccataataacctcagagtcataaaaagaaacagaaaggaagagagagctaatttcaaaacctctcagtcagttcactcgttcagtcgtgtccgactctttgcgaccccatgaactgcagcacgtcaggcctccctgtccatcaccaactctcggagtccacccaaatccatgtccatcgagtcagtgatgccatccaaccatctcatcctctgtcatccccttctcctcctgccctcaatctttcccagcatcagggtcttttcaaatgagtcaactcttcgcatcag

SEQ ID NO: 43628 - DNA, 872 bp, Bovine  19866880805688
  misc_feature (1)..(1): n is a, c, g, or t
nttcaatttctatgtcagatactaacttctgggggaaagtcagtcatttctatcatttttttgtgcattttggttaaaacccatcctattcaaaacttctctcctccctgtatttttttcaggatgtggcaactggttcaagggaagatcgcggtcacctgatgttggaggacagcctggcctatttttttaattattattaaagtagagtggttgataacatattattaaagtatgttgtccaagctctgctggacagcaaaatgactcagttacacacacatatacattctttctttattgtctcatcgattacggtttgttgtaggatattgaatatagttccctgtgctacacagtaggaccttgttgtcatactgtttatctaaaatcattattatgactttctaaaaaaacttatatttacaaaaggtttaacaataattctcttgaactattcatcaaagaggattatacttctaacctcatgccctgctgatactgtctgtcagcaagactcagtgaaagatgaagcttattattttaaacccttggaccaatactggagcagctgaagaggtcactggcgttgtttgttcaatttcacctgcagagactttacttattccaagaatgtgatggtcaacaagttaaatgacttcaggtaatgtaccttgtacaactgggtgggaaatccctaacgctaacaaggggagaaggcgattatacatctggaaaattagaaggcttcttcccttctcaacttctaaatgcatccacacctttaggattaaactaactttcctcctacgaccatgtaaggagttggttttttaaacatttatagtcttttacatttcaatacatttagc

SEQ ID NO: 43629 - DNA, 1076 bp, Bovine  19866880810144
  misc_feature (1)..(1): n is a, c, g, or t
ntttgtttcttctttgggcttgctcccacccacctctggctcttcttgctttttagtacctctaccactgattggggggaaggagcaggaaagaaaaagagaaaggggatgaaaagcaattagccctttggacagaataaagggggaaatgctaaaattaagtttatggattacctgtggatttaattttcttgttttctacgtgactcctgttatcataaataattgagagttttatcaagagcaacatcattgtcttcatcaggaacctgtacgtatgacctgattttacactatcaaaaactgacctataacccaccagaaaccattatatacccatattaaaagcagaaacaaatgactacccttgaagtgtccccagagttactgatatgacatgtggatgagatgtttttcccagaaagaatgtatatcaacctgattacaagccagattcctatctgattcttgggattttgctaaatgtagtaaactctccttttcttgtcatctcccgtatttccctgttgctatttcaaaagttttgccctttgaattaattttcatctttatacttcaaatatagcagttgtttctgaactctgaaggtaattgttatcagacttctcttgtttagaaaatgtcttggttaagagaggcacccagtgagatagactgaggttctaccacttgtgaccttggaaaagttaacctcttgggtgtgtgtcctcatcaatgcattggggttaacagtacttcctgaggctttgaggataaaatgggttagtatgtaacaatgccgccatgagcctgacagtaaagagtggaccaccaataaatgttcatctcctttacacctccacccccttggtaaatttaaacaccgtttgttggtactaacgctgtgcctctcttctgttttaaggatgtgcttttgggggaaaacagtagctttggtctcatgaaggatccgtgttatttgactggcccaggttccaggtatgtgtctatagttatgatgctctttgcctcatgaatgctgcggagttaaatgcttctgttcatctctactagaa

SEQ ID NO: 43630 - DNA, 2903 bp, Bovine  19866880943648
  misc_feature (1)..(1): n is a, c, g, or t
naatggcaacccactccagtatgcttgcctggagaatcccatgaacagaggagcctggtggactacatccatggggtcacaaagagtgagacaccactgagcgcgcactgtatttcttttacagatgaggactaaggggtaacctaaggtcataaaggaggtcaaatggcagagctgatacccaaagattcttccagcagtctggctctagagcccacattcttaaccaaaatgctgcatacagtcctccatccaagtggtctgcagggaccacatcagcagctgggtgaatctagatacgtagtgcagactacactaggctattctatataaggggcttgagcatccgcatatttggggatccacggggatcccggaaccagtccccacggacaccaagggacaactgtactagtatctctcagtggagagaaaacaacacaaaaaggaagggggtcatagatgtatttagaaacagacaggcctgggaaaaaaagactgatttggaagcatcctaagggaaatcagcctatcaagcagctgaagtcctaatggcctcaaaaccagttcccagagagtacagtcccagagctggggccaccagagagcagcacagaaggtctttgagaaggtcaccacccatcccttatctggtgatgaggctacttggaagttcactgtgaaagaacaggcacagtcacactctcagccttcagttcatcctggctgaacactttctccctctctcttcagtttacaaaatccagcaggaatcacagaaatcaaactgaccgagagaaatcactaccgacagggagacaattttacgaaataaggacacgtggctgtccagaagacgccctgactaggaaggggaacgtattagtcactcagttgtgtccaactctttgcaaccccatggactgtagcccgccaggctcctccatccgtggtattctccaggcaagaatagtggagtgggttgccatttccttctccaggggatcttcccaacccagggatcaaagccagtctcctacactgcaggtagattctttactgtctgagccaccaggtatggtgaaatctcgctattgaacaccaccactggcccttcctaggcgagggttgacttcccccatcccctccagcttggccatgtgaccagcagagcccctctctgcagaagactatccacctcccatcctgctgaatttagaaatgaccatttattttggccagtgaggttcacagtggaaagtgactcatctaagagcctggaaagtcagttcagggttcagcctgcctctttctcctctgctgccagactggcaacgtcccagcggagaggacaggacactccctcagctgggtccaagggtcagttcagcatggagtggatctcagaggaaggaacagacagggagtctgcgtgagaaacaaacctctgctgggtaagccaccagatcttgggagcagtttgtttacctcaacagaactgagtctccctgaccaacaggtgtatgcatgttggttaacagccatgggttccaaagccaagttgtcccactaactggttgtaccagatcaggtgagtgatgacttctttgtgcctcagtttccttgactacattatttcttaggaattgaggattaaaaaagaactgtcttgacaataatttaaacagaaaacactttaaaaagtcaagatgctacacaggtttcctgtacagagaagttgtgagttaagccttttccttgcaacagcaggtctgagtaaatttaatgggcacccttaaagagattcatgaagtttatactggcatgaaaatggtacacaaagggagatgaatgaaaaaggattaagtcttaggaggactctgggttttttttattttattttagttctaccaatttattgctaccaacccataaccctccactctcatgcacacatgctcagtcatgtaaccccatggactgcagcctggcaggctcctctgtccatggacttttccaggcaagaataccggagtgggttaggaccctggtttttaagacgtgggtcgggaagatctcctggagaaggaaatggtaacccactccagtattcttgcctggacaatcccatgaatggaggagcctcgtaggctacatacagtccatggggtcgcaaagagtctgacatgactgagcaacttcactttctttctttcctgtcttcataggatccaatgggtttttagttttctttatggacaacacacaatctgaggcgggaggagtcccagcattctccccaccccaccctttgggactcagttgcttcaggtctaagactttagttctgccttttgaggaagagctcaatacagataactagacaggggaagacctggtgattctgttactggatccctccccctctccctgcccttcctcaggcttcctctgttctttaagggctagatttggccacgaaaggaatcaactcccctgaaccttccctgaaacctgaagaattagtgttctgaagattttcagtgtcttctatcaacccagtgcaagaatctgggatactgtaagttgtggggcggcaggatagcatcgaaaatactggaaatgctgtgtagtcaataccatgtcccaaagaatgtaccacaaacgtgatgtgatctctttccatcacctccccagcctcctatctgtctaccaatcccccatcttgaatgctgatgcccctgctacactggatttaagaggctctgcctcacctcagagctttgcacacactgttcccttggcttggaacacttttccccacctcgctttccttgataaatcctagtgcttattcatctgttagataaatttgatgagagcagcaggaacagcatctcaag

SEQ ID NO: 43631 - DNA, 1443 bp, Bovine  19866880963563
  misc_feature (1)..(1): n is a, c, g, or t
nactctcctgaagctatgttttatttggcccacagaatggtggtgctttttttacttgaattcattttcaacattgaaaactggaaattttcatgcgaaaattccagatggcctttttttttttttttttaagaagttggagctcaaggaacagtgagcccactttctgcaaggcccaggcacttactccaatcccccaggttcagcttagtccatttgccttctcggttctataggaaccagagtcatgacacctgtttcacccaagctgccattttgagacaccttgtcagactgttcaaacaatttcttatctgggttacacataccaaatatgtctggcacttgtttcctagcagttgaaaataatgagccagattttcaaataggtgagctacttcctggcattaattctggccatttaaaagagtgttttctctgtaagcccttagttaccatgtgggatgctcagcatacacataatttcaaaaattactcttttcttaatgggtttgcttagtcatcaggaaattttgacttcttaagtaaatgaaacatttggtatttgtgaagtcaaagaatttatttaggatagccaccttgtcatctgaagaacttatattatggactgcattgtggctccacccccctacccccaaaattcatatattgaagtcctaaccctcaatatctcagaatgtgactatatttggcaatagggcctttaaatatatacttaagttaaaatgagaccattaaagtgagccccaatccaacctgactcctgtccttataagaagaatttggacatgcaaagaagcactaagggataacacagaggaaagaccacacgaggacacaatggaaaggtggcctcctgcaagctaaggagagaggcctcaggagaaaacaaatgtgttgacatcttattcttgaacctctagcacccagaactgagaatattcatttctgttgcttaagacaagtatttcgttacagcaaccctagctaactaatagagcttcctaagtcatatttcttgagaggaacctctgtttcaccttatgaaatgtatgcaatacattgttgattgataattcctcttgagtttatgcaactagaagcccaagttgactgatggctgtgattccttagctgcacataagaatcatctgtggatcctttataactaactacaggatcatcgccccaaattctgacttgttggtttgggggttggtcctggccctctggttttataagcctcccaagcggtttgcaggtacagactaaagtgaaaattaactgatttagagggaatgatcccccctcctaaagaagggcctgggtttctgcagttctcccctggggagtccacagctgaccatgccatccaaaggtaggcaggatagatttactgcctgtataacaagacctctgggg

SEQ ID NO: 43632 - DNA, 1117 bp, Bovine  19866881035960
  misc_feature (1)..(1): n is a, c, g, or t
naatgaatcaacattaagggcttctctttctctctcccaaccagatttgtccttcctctgatcaaaagcacagagctggatctgaaatgtgttaagatcctgtcctacttaaggtccccaaatgacaggctctgactggtttctcctctctggtaccagcctctccctggagtatatttccaccttccctgctactcagttcacccctgtctgcctatttgtttgtttaaaatgtgaaccaactggtcaagtacagtaatctaattctgcatttggtctgaggccaacgcattgagggcattcaataaataatggtgctcggtgtgcatttcctagatcctggctatgtaggtctgagatggcactgggatcccaggtggccagcttgagagaggtggtggatgaagggtggtaggagtctggaggccacgaaggcaaatgtgttcggattgtctgacacagagattatacacctgtggggcttgccgaagtgaaacctacacatgcaaatattattctactgagtcggttagggtgtgaccttcttcctgacatgattttcccagattcaatctgggtaaaagtacatcaaggccttactccctatgagcacacagaccagtgtttacttgtcttcattaagggaattctctttcctgtgagtgggtggttctgggaggggcaaggcaggattatctgggcagtcccaaaggaggaagagcatgaagaagacagaaaatcctcagaatagaatttccttgacaatgtaggtccacctaatccattcattcttcttatctatctaccaagagattggtggtgaagctataaagatgaatgacataagtcctcctggttcaagggagacactcaagaaatatttatggaattaatgatttaagaatatgcattagttttactttgattaccatttcctactggagaactttctgtatgccacatgttatcagcccatagttaacagaggcatcacagcactgtgtaaaaaggatcttccagcatatcccctacattcttgaatttagatcccaaattgccttatttttaatgttcttccctatgtcttctcccaatctccatttatgatttctactga

SEQ ID NO: 43633 - DNA, 959 bp, Bovine  19866881040674
  misc_feature (1)..(1): n is a, c, g, or t
ntgcatgtggaaaatagggaatctattgaaaatatctgcactttgctcttaattttgctgtgaacctaaaacagcttccctggtggctcagatggtaaagaatctgcctacaatgcgggagacctggtttgatccttgagttggaaagatcccctggaagagggcatggcaacccactccaggactcctgtctggagaaccctcatggacagagaagcctggtgggccatagaccatggggttgcaaagagttggacatgactgagcgactaagcacacacaaaactgtaaaaaatagtctttaaaataaaacaccaaattacaccaaaagcagaggtcccctggggcctctggacaaaggtgatcttaggggagagtggacggcacctagagcagcagtgagtaccttactgtccagcttcttcatggtgaccaggtccagggacttgagcgaatggccagtgggggcaatgaagtagagacatgcgtggatcctggtgtcatggtagttgaagagagaacgtttgatcttcagttcctcttgcaagtaggcctcaaactgggcatcgatatattccacgatcggcttgtagctagaaggcagaagacggttattaaaacacatttttaaatcagcatgtcgctagtctcaaactctttgtacagtcctccaggaaagtccttagtggttccctgttctctaagagctaaagtccaagctccttaccttggcagcccagacctttggccatatgacccctaaacatcaccccaggctcccctatccttctccttcctagttcatgctttctgccccgcatggcaagctcccgcctgcctccaggcctttgctcatgctagatccccacctggaatggtcttcttcctcttaatctcctggctaacattcatccttttaaaacagcaattagaaatatgtaggatacactgtcactgcc

SEQ ID NO: 43634 - DNA, 727 bp, Bovine  19866881123166
  misc_feature (1)..(1): n is a, c, g, or t
ngcccggccccgccggcgatgccccgcgccgcctcctccgagcggcggcgaggtttgaacttggcgtcggccccgagccccgcgcggccccggggggcgaccgcggcccggcgagcggcgatggtgagtgtgggactcgggtccgctttccccgggcggggcggagggaaggcgggtacccagccttctgctctctaaagggtgtctatttcggtccccgcggcgactctgaagaaccctctctgcaaggataagtcctcgggcgggctttctctgccagcggccggcctgatgggggtaggtggcgccctccgagggtcctcctgacactcctggaccttggccttttttttttttaaataattttattagggaggcagaaactgctactccaagaggaaaagaattgcagattattgacagcatgaaaacttttcaggagaaatgatctgtgaaatattttaattttgataaattgcttcttacgagggctcctactgagtttagaacgactggcctttcttggttttactggatttgtttctgtaggaaagatcccaagagtgcctttgaggcgcatgcctgcccctccccccttgcacttgttccacctcttaaggcagtttctttttaaaggtgtgtcccactgtcatgttgcaggaattaaatcacgaaaatgaaatgatacctgacacacgctttactgtgagctgccagagagaggaaa

SEQ ID NO: 43635 - DNA, 3533 bp, Bovine  19866881192362
  misc_feature (1)..(1): n is a, c, g, or t
naaactaggaggagtggagggaaactcaacagaaaggactttctattgtcattgtttccgaagcataacgttcaatactgttcaaccctggcagacaaaaatttataaaaggccgttctcataaaaaaacaaagcaacagcagtcaatgtagtacactggagtgccacgcggctcacctttgtgtgtgcaatcttggcaaaaagaatttcacttaaacagatcatctgagcctctgaagcagcaggcctctgcagctgtatggagaagcagtgcttgattcaagtttcggtatttgccccagactgtaggggtcagcttaacagtaaccatagacacaaagagagagaaaaggaatagggcacacagaaagagaaagactccaagtgtgtctgcattcgtggctatgcaaatgcattttcattagtttacggccgccatgtgggaaaaaacaaaccatggatccacatgtaatctgcaaacctccttgctacagaaactttaaaagacgtccggattctttttttagatgtggaaagaaagaaggaaagggagcatacacgcacgcatgcacacgcacgcgcacacacacacaccccattctgacatcacagggggcattatactctaaacacagtagtcatctctactccagacaccaagaaagtctgaagcatccttgaggatgtcagtacatttcaaaggtgagactaactgtatttagagattgttcctgtattaactagcaggactgtccctccagaatgctccacttgaattccagagctatttctattcctataatatgaaatctaaggaaacaggattgaggcaggtgtgagatgggaacagaggtgggagtgggacagagaaccctctttcaggagagaaagctcctctagatcttacaccttggatgcattcctttgaaagtaaccttttttttctttgcagaagacaaaattctttttatcttctttaaaaacctttaattttattttggactatagctgattaacaacgttgtgatcgtttcaggtggacagcaaagggactcagctatacataaacatgtatccattctccttcaaactcacctctcacataacaggttgccacgtaacactgagcagagttccctgtgctatatagtaggtccttgttggttatccgttttaaatgtagcagggtgtacatgtccatcccaaactccctaactgtcccttccttccacactctccctcttccccaggaaggcaaaattcttatcccagtttcatgttttcttcctcgaccccacagcctccccagacaccacagctactctctatcacagctactctcaccaaaccagagttcaagggcagccaggccacaaaattcattttgaatgtgtcaaatttaacaacctgctactgctgcccaggcactggtctttccagtgcacatgacaaaatggttctacttgacatgtgtttttcacaaccagccatctagtacgggaatgccatgccctccaccagtggaacattcccactgatataaaagagccaggagtccaccccctcttcatttcaccagtaatttttttagtctagttctgcacaacctaagctcactttaaacctactcccattcaagctgcctgtgacaatatgctcaacagattagtggctccaggaattatgtcattgcatatgtcctcctgggtgacacgttacattaggagagatgatatcattacgtagttctttagagaaactaaaaagagcaggcaagtaaagagaaaagattgtactgaagcaatcaaatcacctgtccgttcacaaattatgagatggataagggaaccattgttatatttacaaagaatgaatacctatgtagtattacactgaaccatacaaaactatcagtatttgacaatttttggtagactacgacggcaatttcatgtgattcaacctgtagcggaactatagtcaaatactatataactaggacttaattctgtgacaatgggtgctatgttgtattctctaaccatcgcaattctataatgtaacactgtgattaccgttacagttttacagatgaggcaagggaagcttggggaggctaagtaatgcattgaacacctcacagctagcaagcattggagtggggattcaaaccctgatcatctgctcacagagcctatactttgaaccaccccccatctccccattacgaaggaaaatttgaattctgactgtggcattcactagctttgtgactctgggcagattattacaaaacttctctaagactcagttttctctcctctgaaatgggattgacaagaaacttaccggatatgaggacagaacgtgctgacgtaagcaaagcacgtagcctagaggaagagctcaaatgttacctccttgtggtggaagggacaggacagtcactctgccaccttcaccaggacctgaactgacagcgcacggcgtgttctcatcacccttcggtggcgcagcggccactcacgggcagaaggacagtgcagcctgcgtgctcgcgtctggaagcgccgctcttcggattcagtgatggttactctggcaaagaggaagtccttcacgctggactgtgcagcagccccccaccacccccaatctggaagagagactctccacgccatgttggtcccccagatctgactctcagccccgtcttgtatttcctgctccctctacttcagatttctactgaaaatctgcaacactttcaccgacaccttagacttctcatttatcctctcttagcttctttagcaatcagctgtagagggctaggcaatccatgctgaaaagtactgatgatccaacctgaaagtggagctgtagaacccgggaggcgggaggcttgacttttggctctgccacttaccctgctaagtgaccctgaacgagtcattttttatttctgggttctagtcttcactaacctagaacattgctaagtttcttcccagtactaatatttgtggtgaggaggaaaaaaagaatatactagatgagtttttgaagaaacgtgagttttcctttttccttttctccaagagctaatagctcatcttctcaggcacatcctgtttccttctgattaccttttaaacacccacaggcaggaggattttctgtcactctgttgataaacttcagacctagatatttaatagatggccttgatttcagaacagcagactgccatggtatttgtccttaatgattcatacatgtccttgtagggtactcgtttgtggttagagatgggggtctatggagagaaagcctcactaaagtaatgaaaaaaatgtagttttcttattttcaacttctttgggtctgcatctgtgcttaacagttacactgttctccagtagttgcaaggtagactcatccactatgtcaggtagatttgacgcctattgggcacttacttgcctatacttttaaggcacagcccagaagctcaaagttctttcacggag

SEQ ID NO: 43636 - DNA, 911 bp, Bovine  19866881279575
  misc_feature (1)..(1): n is a, c, g, or t
naatccaatattagatttggacccattctaacaacctcattttaacttaatcacctctttaaagattctatgttcaaatacggtcatactctgaactgggagttagagcttcactatgaatgggggtcagtacaattcagcccacaacatgctttttgcaccatagacagtaagaacttagtcaaaggaccagaatttactccagaatcatagaagggggccaaaaggagttgtgaaaccagtggtaaaatttgtttgaatatctcctgtgatacttatatcaatcatataaaagatatctgagtttatggagaaactcagatttctgtggatagataattgtttggtttaagcatttggtccataatttttgatttgggaagtgggattggagtgtcaaatacggaaatagaatctacactgattatgtcagcagaggaaatttaatacagggaaaagcatgaagagatttactactctctggtcctgaggagcaatttaacatgggatcattcgtgagggagccacatgtgatgttcatggggtgttctgtgggatatcaagatggtcaagacttctggggaccgtggagagatgatgtgcatagagcagaagggttgacatagccttgaggcaagacagtgaatgtatactgttgtccctcttagtagaaagaattagtagaaagcaagagacttgtgttccttgataattgtttgaagggaaaaaattagatcaagagctgtgtaccagatgctagatacttgtgttaatttgctcaagtgaagttaccatgtcaggaacagcaatgacaatcagcattgcctgatagagtttaaaataatctataagcattatccaacatgagtacatcttctgcgttacccaacatgagtacgtcttctgcacag

SEQ ID NO: 43637 - DNA, 1429 bp, Bovine  19866881341357
  misc_feature (1)..(1): n is a, c, g, or t
nctagcagtaatttctccaaagtataaagtgtaatcaaatcttacatatacatggacacagtttaccatcaaagaaagtttttgagggaagcctccctgattactttactttcttctagtgttacaaaagctaatctggatctagagtgggtacctaaatcctgcagtggaggaggaggtagtaaacctttcaaggatctgaaagaattcagaaacttgactccatcggggcagcagtaaggaagggaggaggagagctgctgaaaaaaatcctagtctttaaggggctagccttccacttcaaagactcactgatgtaaagaaatactctacaatatttcatctctttaattatcaagacactcttaagaaccctcaatatttggtaccttaggagtcattactcagacacttatgaaaattaagcattattttttccacacaattcctatcttacagatggatcatggatacatattgtggaaaagtagtatattagaaggataatagaatacacaatacacctataatacatctaaatatctaggtccacaggtttcttttttctatattattaaaaaaataaattgataaagtgatttttttaaaacaaactttccagaataaagttccttagtgtccccttcttttgaagagttgggtggaattctaagttgagtgaacctaatagaagtagaccatcaagaacaagacaaaaaactgtcctcatctagtttgcactgaagcactgtgctctgctacattcacccacaaaagagagtgacgtggacatttgggaacacagtcaaggaagagagaccttaacagcctagatctctggatcatgacatggaaataacaggtgaaggaattcagttcagttcagttcagtcgctcagtcgtattccactctttgcgaccacatgaaccgcagcatgccaggcctccctgtccatcccggagtctacccaaacccacgtccattcagtcagtgatgccatccgactatcttatcctctgtcatccccttctcctcctgccctcaatcttccccagcatcagggccttttcaaatgagtcagctctttgcatcaggtggccaaagtattggagtttcagcttcaacatcagtccttccaatgaacacccaggactgatctcctttaggatggactggttggatctccttgcagtccaagggactctcaaggagtcttctccagcaccacagttcaaaagcatcaattcttcggcactcagctttctttatagtccaactctcacatccatacatgaccagtggaaaaaccattagtattgactagacggacctttgttgacaaagtaatgtctctgctttttaaatatgctgtctaggttgatcattaactaaagactaactaacctagaaaagatttggcagaaaaat

SEQ ID NO: 43638 - DNA, 1553 bp, Bovine  19866881427174
  misc_feature (1)..(1): n is a, c, g, or t
nttggcatggatccagaaagaggtggctctgatgcctggtcattcaggcaacagaccttgatttctacctcaggccaggcctgagacaacgcaaacttgcttcttagagcactaggattcttttagaaacctgtttcaccttagcaccagttctgtttctctttgttcaacagcagctgcactgatgggctgccaacaggcctgagtcggtagaagaggtattatttagttggaagggagttttctgtcaatctggattaaaacaaactaacaaacccaaaacagaggcggtatcaattatattgcaaagtagttctccttgggaaaaaggatagaagctttagatctactgggtctttgttttaataatggttcagcttggctgaccccgggtgagacagtctaactaaggctatgaaagacagttcccccaaaatgataaaatgcaagagcggtccctaccctgctcctcccccaaccaagtgtaggccctgtaaagataaagagaggcacagaaaactctgtggctggctccacagggagtcaaaacccgagcatcactatcagttgtggtaccatcaatgagtggcaatagacactgagtcttctggtaattaatcaaagcaggccatccaaatcattcattcttttgtctggacacagacatatggtggcccctgtgaaagcactaagcatctgtttccttcactatatgaacctccaattagtcacatagggtcttcccaggcacatagtttggtttatttattttttacatatatcccccctgttttgaatttcctttccatttatgtgaccacagagcactgaacagaatgctatacagtaggttcacattagttatctattttattgttggtgtggtttagttgctcagtcacgtctgactctttttgtgaccccatggactgtagcccgccaggctcctctgtccatgggatttcccaggcaagaatactggagtgggttgccattcctctctccaagggatcttcccaacccggcgatcaaaaaccgtctcctgcactgcaggtagattctttaccacggtgtatatatgtcaatcccaatctcccaattcaacagtttggtttcttagtaacagtttatatggtacgggttatgcttgctggtataaacctcaaaaaatggatgaaaataacactctaagtactgttatatcaggacaatgggattatgagtagctttggtcttttaatcaattacttgggtcaatttttcattgtgatgtagagacatcatttctagatattttaaaagacagaaaaatattccacagctttcaaaagatttactccttctgcaacaaccagagaccttcatgtaggggccacatcctcaagtcataaaaatggcaattttacaacaagggaaaataacttttcactgccagtcctcaccctccggctgaagacagaccatatcttaggaactgcctataataaccctcaaacagataataacactcaaacagataagatccttcaccgcatcaagcttttcactcagca

SEQ ID NO: 43639 - DNA, 1050 bp, Bovine  19866881428627
  misc_feature (1)..(1): n is a, c, g, or t
natcctgtgaaggacacaatctacaagttttgctgctgcctgaaaactatgcagacatcttcatatcagaattcaaggaagtgctgctgttttaaaaaccagcacatttcccacacaaagtgctttaattgctcaaatgttaaagcattctaaaagacgtaccaaaacaaaattttaaaacttgaatgatttctttattcaaatacaagaaaaataaatgaattatttccaatggaaatcagactgcaaactggcaggcacagcccatgaacatgtgtatgtggcccacacagtattttaaaatatttgattcagttgccagcattttcagatgcgaagattgcacctcaaattcttaaatgtccatcttcttttgaaaaattgaaaactatgacatctctaacaccctcatttcaacagctaaaaccaagaggtggcacgtgcttgggcatttatagtaatttaattgaagaatcggagcgttgtcccttttggtactttttttctctcaaataaatgaaccaaacaatgaagctccccatggtcaaagatggtttgatgcaccagtatctgtcccctactatctcaccatgtctcccccttactgtgtctccataccataaataattcactccaggacaaaattgaggcccggtggttcggatggcaaagaatctgcctgcagtgcaggagactcgggttagaactctgggtcaggaagatcccctggagaagggcatggctacccactccaatattcttgcctgggaaatcccatggacagaggaccctagtgggctacagtctatggggtcgcaaagagccggacacaactgagtgactaacactttaaagactgctagactgctagtaaactacagtaaaccatggctcataactattttaaagagaacatgtaaggtaaacttctatttcttattagtgttatggttacattaaatttgacatttttctaatggtaattaagtataagaatgcttgagatctagattatatgaattttctttttcaaggcatgttattgctaga

SEQ ID NO: 43640 - DNA, 862 bp, Bovine  19866882208667
  misc_feature (1)..(1): n is a, c, g, or t
ncccggaagagccttcagcagctcctccctgagggcctccatcagtaggggaggaactaaatgaggtttgagccctgagaagcatcatctgactgttgagaggcagtgggtcaaacccaggaccacctagtgacctacagggaggggatgaagagagaaacagcagaaagggaggtgtttcttcaacaactctctcttcgtgctggttatttgtgaagtgttagtcactcagtagtgtccgacttttgcgaccccatgggctgtagcctgccagggtcctctgtccatgggattctccaggtgagaatactggagtgggtagccatttcccttctccaggggatattcccaacccggggatcaaacccaggccttctgtattgcaggcagatgtttttaccatccgagccaccacttcacaggtatttgtgaagtgcatcataaagagaagaattagagctcatctttactaactgttactccacaatagacctccacatgatgctacagagaccacttcatattaatccatttaggtaaaagacttgtaaaagagataaagagatggtgtgttgctaaaatacacttaaagagccagggttcaagttctgactttctactttctaatcttgagcaagtaaattgcttaacctctccaggtctcagtttccttgtctataaaatgggactaggaacagtggctcgctctccctgagtactagataaacgatagctcctgttacattcacagaaacagaaaattgagtccctcctgaacttgcctctccttgagtcctgtctaagacacaaaaggaacaatagaggcattgagctaagaatctaggtcacatcagacctgtgg

SEQ ID NO: 43641 - DNA, 1439 bp, Bovine  19866880382852
  misc_feature (1)..(1): n is a, c, g, or t
ncatattcttgcctagagaattcatgggtagaggtacagtcccgggggtcacaaagagtcagacacaattgagtgactttcatttttcacttattctttaacaatcatacaattagcatcaatgctacttcacaggaaacttgccccaaaacacaaggatgtggtggagccaggatttgaactccatctgtattaaaccccctgtttctgtgttatactgcatgccacaacattatagaccattcctcagatggcacaggtgcccacaggagctagaaaccatgtctaagcccagtagtactaagcactttgtttacagctgctgttactcaaggaaccaacagaagtgtgcgttgagtgggggtgaggagactaatcagaaggatttctcacctcctttgtagattatagcagcaacttccttatttaaatccatgttataatgttataatccatggtataataatgaagagtgaaaatggaatttgctcatttattatactggttttaatgcgtagtaaaaatttttaatcattcttactcaaaagggaaatgatagtattaacaaaagagaataagagaattcacatattaaatatttttttaaagtctccataagataacttctagcctgtccaagattgcttaataccaattagtaaagaccattaaaaatcatttatggagtttttgtgagtgttcagagaactaatgggttttaaaattgcttgggaatcttcctggggtcaaaggaagaaaataaagtatgaagtgataataaaatgtataaagtgactaatggacaggttgtatatatataagggttccagcaaagaaaaaacattcaatttttacagcatacatttaaacaaatggaaatctcactgccatagcctcttgtcttcactcaagagctaagaaggatgataacattgtgtatcaccacagtccatatcagattctcaaccatttttcagccatcaggtcattggccccagccacctcttcagccactctcacctttagctgacaaaaatcttttgaaaagtagtgagaaaataatgccacatttactggcaccaataaaatgacttgatcttacacagcataaataaataactcaagcacggcttttacatagcaaacattaatactgaaaacagctctccaacagcccatcaaaggatcagctatctctctaagcttttgctacacatgtaagccaacaaaatgacaataaataaatgaaataaaaaggtgcctgatataaaattttgaatcataagagggaaattcagagtaaaagttaatttgaggatttaattttaaatcacacaatagcactcttgacttccccaatagagacacaaacgcaaaatgatgttttatcaaaaataaatgtattagagatacataataatatagataatacagaaaat

SEQ ID NO: 43642 - DNA, 921 bp, Bovine  19866880423974
  misc_feature (1)..(1): n is a, c, g, or t
ntttttagccatgagaaaggcattgtgacaggaagagaaaattgatccctgggttgaaatacagagtgaagttgattttactgtctaaacatttctgaaatctgtgctttgctttccatcctcacaaacctgacttcctttctagaccacggttgtcttttgcctaaattatgcaaatatctctaaaatggcatctctgcttctggatttctcctcatctcatccatcctccacattgtagccaaaattgttcttttggaacagattggatcatgtcactcccctgctcaaaacttcaagagcataccttcgttcttggaactaaggccaaattccactctgggtttctaaggctctgcaggactttgtgccagtatttttcactcacctaggccttttccactaactgcctcctgttctagacttccaccatattaaatttcctttagttattcacacatactcttctctttcaccttgtagtctttgtcaaggctgtatcttctgcctgaaacagtcctctatccatcctgtccctcttttatttgattaaatcatttacttccttcaggtctcacctaggacatgatttcactgagggagccttccttgaatcctccaagtttggtaggtactctgtgtgtgtgtgtgtgcgctaagtcacttcagtcatgcttgattctttgcgagcctgtggaccatagctcaccaggttcctctgtcctcgggattctccaggcaagaattctgagtgggttgccattttcttctccaggggaattttcctaacacagggatcaaatctgcatctcttatttctcttgcattgccaggcaagttctttaccaccagcgccacctgggaatgggtactattcttaggtaatcttataacactcttcttcccctcttactctctact

SEQ ID NO: 43643 - DNA, 1572 bp, Bovine  19866880605787
  misc_feature (1)..(1): n is a, c, g, or t
nctccatccctcctggctactgtgggcgtgggtggagcggcaggcgaaatttattcaagacaatagatgtcttgaagttgttgtttagtcccgccgtcctgtccgactcttgcgaccccatggactgcagcccaccaggctcctcggtccatgggatttcccaggcaagagtactggagtgagttgccatttcctactgcagggtatctttccaacccagggatggaacccgcgtctcctacaagtctcggcattggtggctgatcctttctattcaggactgtcatatgaatgtaataatataatacacggccttgagggtttgaaagagggtgggagaacaaacatatacgcagagggaccagttagggactactgaaataactcaaacacgatgacggtggcttagatcagagtggtagcacttgaaagagttgtggacagtagtgaaattctgaatatttactgaatgcagaactagcaaaatttgccagtagattagatgacaagggtccaagataactctaaggtctttctagacctagagaccatttgctgaggtaaggaaggatgtgatagttgcatatttaaaggagagaaatcaagagttgggcatactatgctttggatgtctattagacatctaagttgaaatactgattaggcagtggtgcatatgaatctggaattcaggagaaaggtaagagctggagatagaaaactagatgttatatagaaaactagatgttatagaaaacacaacaccagggccaaatagtagaaagcttctgtgaggaatgtgaaatttatctgtggttatgaggagccttaaagtatttttgagtgttacagcaataatcttatctgtgtttcaggaagttaattctgactgttgggtggacagtggattggataggtgaaacacagccaggctgtggaaaatcttcaaaacagacagggaaacttggatttaaccagataggcaatgggagtcactcctgaagttcttcaatagaaaaagacatgaagacagtggtatttttcctttaaaattatactggaagtgatttacaagaaggattaaagtggtgacaaattggaaactctggtgatttgcctggattttcccttggaattttccttgctggttcgtgaaaatgtcttgctactttttataagagagattcagccccaaatatggaaaatctgactttcttgctttagtctcttcctagtgttgtagttaaaaagagatattacagaggaatgacaggcaaggcctcacctcgtaggatatcagtggtatcagaagactttctcatacactcatcagataccttcacaatttccatttgccgatcaccatgtcagcctctgggggaacaaagaaaaagaaccaatcccagcccaaaaggagtttacagtttagtggggatggccagctgtaaaatataaaagaatcagagcaccatgtgagagagtctatgcagagagtgtctggaggaaggaagtgattcattgccagagaaagttggagtttcacgggggaagataacactgggctacctctgc

SEQ ID NO: 43644 - DNA, 2328 bp, Bovine  19866880631873
  misc_feature (1)..(1): n is a, c, g, or t
ntgtagctgaccaggctcctctgtccatgggcttctccaggcaagaatactggagtgggttgccatttccttctccagaaactcacacttagaaatataaataacgataataaccatacaacacagcaaatccactcctcactatttacccttgagaaattttatattcacacaaaagcctgtacattaatgtgtatagcaaattaataattgccaaaactggaaggaattcaatgtccttcaaaggataaacatcctgcagcacatccatataatggaatactacttagcaataaaaagaaataaacaacgaatgtgaaaagccgactcattggaaaagaccctgatgctggaaaagattgaaggcaggaggagaaggggatgacagaggacgagatggttggatggcatcactgactcaagctctgggaaatggtgaaggacagggaagcctggcatgctgcagtccatgaggttgcaaagagtccaacacgcatgagcaactgaacaacaacagcatacaacttggatgaatttcagaggcacaacattaagtgaaaggagagattctgaaaaggtcacatatcatatgattccatttataggacattcttgaaatgataaagctataatgatagagaacagatctgtggctgccaggagttagggatgaggtgaaagtgcctataggggacagtacgaaagagtctgggggcaatggaacagttctgtatactgattgcattgatagttatacaaatctatgcatacattaaaattttgctcaccaaaaggtcaattttactttgttaattcaaaaattaaaataaagtagaggagggggaagtggctgggaaatttcttattcactccctttactttctggtaatagacaatagtttgccaacaacttctagccaggctagattgtctgaccagacatgtattaaattgtctagccacgatgtgtctcttaatcacaccagcacattactgaaggtgttctccaagaattacaaaagaacttccaaaaaatttgccagaataagaactgccaaaaaaaaaaaaaaaaacccactcagagaagccaggttctgttattcttggcaagcttaattgccaaaccaaaccctaccaattacaaggtagtatttacatgggattggaatgattttccttcctaccaagggaatggagcacttacctattgctgatttaaatacgtcaaactgaacattgtttctgttgggaaataaagacctcaatttattgctcaattctgatttcaaagttagctttaccattataaagaccacaaaactaggcatctttttagatacatcatgactacataaagggcaaatttgggggaaaaatgctcagaaaacctgtaccttggtcatgtatacgggttggtaatattatatcatgtctttgttgaaataatacataaagtctcaacaaaaaatataaataaatgttgatttattcttaagatgaaaatactcaacaaccctaggagaaataagttgtttatcagagtaaaaataatgaaatgaaaaaacaagactatttcttgaacagcaggtagaaaatacccaccctcacaaaagtcaggtctttagaagtgtttcggtgttaagacaaaatgtcagtaagtaggtcactgagtgcaggacctcgtgtaacctatccagttctttctaactacaaatgtactaagtcacatttcataattcagtaactattcataatccaacttgtatccaccacagcaattaaaacattccagatttgaacgtcctctttagcttgctaatacagatacagcaaaagtgaacacacattcttatagcaatggtcatgcagtcatgcatgacatactatttagcatatcctcctggaaataccaggccactttacctgtctcctgagaaatctgtatgcaggtcaagaagcaacagttacaactggacatagaacaacagattggttccattgggaaaagattacaacaaggctatatattgtcactctgcttatttaacttatatgcagagtacatcatgagaaacgctgggctggatgaagcacaaattggaatcaagattgctgggagaaatactgataacttcagatacacagatgacaccacccttatggcagaaagtgaagaagaactaaagggcttcttgatgaaagtgaaagaggagagtgaaaaagtgggcttaaaactcaacattcaaaaaactaagatcatggcaacccggtcccataactttatggcaaatagatgggaaaacaatggaaacggtgacagactttatt

SEQ ID NO: 43645 - DNA, 3177 bp, Bovine  19866880681516
  misc_feature (1)..(1): n is a, c, g, or t
ngacatgagtttgagcaagctctgggagatggtgatagacagggaagcctggcatgttgcagtccatggagtagcaaagagctggatgtgactgagcaactgaacaacaataaagagggaaaagaacttccctaaacagagcgtgctcaatttgccaggggacaatgacatgaaataaaaacattatctttaccaacttgcacccatgctaatatggtcttagaaatccatgttatgatgtaacctctcagtacaatagtattaccaccagttataaattcattttgatggggaaagaaatatttagttgctactactgagttcttgttctgactctttaaagctatgtagttttggcaaatctcaatgtctcaaagctattgcttagagttacctataaaatgggcatttatagtgctagccaggccaatcctcctatccatgttcagtgctagagtatacagtctttggattgggcttccctgatagctcagttggtaaagagtctgcctgcaatgcaggagacaccagttcgattcctgggggctgtgtctgcgtgtctaccagagtacttggcaccatagagagacccctcttcattgaattgatgtagttaaaatatgttaatgaatatgaaaataacttgcaaactataaagggagttaaaagctttttattagtaagattttattttagaatagcttttgatttacttaaaaaaaaaaacccaacaactgtgattttaggtcatagagttcccaatacctccctccagtttcttgtgttattaaatcttacactagtacagtacatttgttactattaatgaaccaactgatgaaccaatacattacacccaactaaagtctgtattttattaccatttccttagttgttttgctttgtaatgtcctttttcttgttccctgttctagggcctcacccatggtactataacatttagccattatgactctttaggctcctttcgactgagacagttttcagactttgcttatttttgatgaccttgacagctttagttgagtattttgcagaatgtccctcgatagggctttctcatgaaattggggttgtactttttggggaggaagactgaagaggtaaagtaccatcttcatcacgtcatatcaagggtacagactaacaacactactcatccctgttggtgttaacctccgccacctggctgatgtagtgtatgtcaggctttgctgccataaagttactcgcttcatactgtgttctttggaaggaagtcgctatgagcagctggtacttgagtagttgggtattatgttccatgtccttgagggtgagtgctgacaatttatttggattcttcttcatggtaaatttgtctacttgctcccacttacttgtttattcaatcgtttacttaaatcaatatagactatggatatatattttatattttgggccatgatacagtactattttgttgtgttgttcaaatgtaattaacattactattaatattattatcaagcaaaatccatagtagactagtattctgctgaattttagtaggttgtcagaaagctgattgtggagctcaagatttgtgcctattttgttcacttctgtacctagtgcatggcttatgctatgtccttattaatacttttagaattaaaatctaaaatacagtactgagttactgtcatcgattataaagaccatgggtaaacagatctgttgtttcaggattatatccaggatcatagatgtttggtagccatttaaacaatttgcaaatttatcattggatccctgaatgtcctttccttgcccacaccacaatctcacataatcacagctggagaagaaaatgctactctttaatgaattcccaactgtgggcaccatagagaaacatcacatgtaacactaagaaggctcatgcattccctgacattctctgttaacatatgaccagcatggttctctccagacaggctctgaagcagaatgcaatcacatggttgaaataatgagcagtctgtagaaggaagcaaagccctgcttcttatctgcctgcaaagctccttcatctatcacttacacccagtcagtttgaatttggagcaggcgccttcatctgtgtaccctgccatgctctgttagagaatgaaccttgaagttccaactggtgccagctagaacaacacaagcatcgagagaagtggactacacccccctggtggtgttccgcagtggatatttgtctgcagccagggacaagtccaagtgttggctctaatttatagcgtctggcagtttctactcccaggatcttagccaaagccaagctctctccctctgtctgtctttatccatctcatttctcagttaatattttgaagtattcttcatgaacccctaaatgtgccttttggaacttgactataatcctcccagcatctgttacacattatttctaaatcatgattttgccaaattctggttctttctggagcagaaaaataaggagttgagttctaattctgtcattcatgggccagtcattgaacctcttgagccaatttccttatctttatgggggaataaaataatacctacttgaacaagatgcttttgtgaggatcagaactgattacataaaagtattagcccatagcagaggctaagtaagtggtaaacatttgtttatctgaaagtgtacagggaactctttttatggtgttaatgcaataatacactaatgagaaaaccaaatgggaaatatatattagaaaatgattcttcaggaattattcatatcccttgttgataggtggttgagcaggttattgtgctgatttggccagtttattacttgaaggccatttctctgatgatggttgggaattttccaattaaagaattctttgggacagaggaaaattgaacaagttgaaccaggaacgtgactcaccccagatatggtcaatagtgggaaacacagattgtttttggatttcaccttaaagcctgaaatgaatgaaagcaggcagtagaggcgtcagtgggtctctgcaaggacagacagtgagccagcaaagcaaacctgagctcagggacccgtaagagaatatagaacacaagggaaggagcaaagccaagaacccaatc

SEQ ID NO: 43646 - DNA, 774 bp, Bovine  19866880715428
  misc_feature (1)..(1): n is a, c, g, or t
ncccagagaaatgtgcagctttagcaaaaatcgctcccttccctgaaacaaaatattaatgttaccacttgatgcacccacttttcaaggcattcttcatttcagatgttcttaatagaactctgacactgaatccaatcaatccatattaaagggacagcaataggatttgacatgtcttctggaaaattacatgtcctaatacaaaatctgggcatttgccacagagttattttgtattaagtgaaaactgctgcttcagaaaacaaaaaaatgttgcctgaagaaaatttggaactttttattcagcttaatttgataatgaaattcaaaaaatgaggcaggatattgctttttctatgctgatattaatgcatcaaacgaaactactttttctatttgtgtccttgtgttttctgtgatacagtttatcccacattaagactaactttaaaacaataaactttttcaaagtaataaaatatagcttgaaggaaaaagttaaagtttgggtggactgggctaattggacaactaggcttactacccagtctctttttagaaagactgtggttatattgtggatagtctatatcttctaagatacaaaatattattacttgacaccaagaataactgaattcattaacttctgcctgatataatgtatgcctttaatgttagaatcatcatgttcaagatttggacactgaaaaaggcactgaatatttactgtagccctacatccttaataattgcattccttaatatata

SEQ ID NO: 43647 - DNA, 1879 bp, Bovine  19866880802089
  misc_feature (1)..(1): n is a, c, g, or t
naagagttgaattttaaaacctggatctatgtaaactcctaacctcctaaggatgtagctaactttctgcaattccagttgcccgagtctaacctttccttatttattaaaattaagaggtttgactggaaaatcttgagtgccttcttcctcttaaaatctagaatcctataactctatcatgtttcttctgtagcaaggtgtcagggtattaatgaaaacatatcacaaatagtacttctctcacaaataacatgttatctctcaaagttcattcctcaggaggccatattcttattttaatgatagtgctgttgcttaaatcatttttggagaacatagcaacatattgagtatcctctctggtggcaaattacttttccatgaaagtggatttgatttttgtaaccagaccaaaaattattcaaagccaagtccaatggatggtaaaactgaaaaaatacatagaaattgtaaacaaaatatgatatgagtttatcaaatatatgaaactgatttatttttgagcatcttaagccagaggtttaaagcagttaggagaatcgatactgagcaacagttacatccgtggaataagtgcctggcctccaactttaaggggctcacactcaatgggatgtgtaagttctgccagttggttacaaaaagtcactctctatcaagaagctagtgattcatggctcttcatgataaagtattgaaaatacaatccacatgatttattacccaaatgctcttttatcctgagacatagttcctttccgatgaacttttcaactatgttaagaaaagaaatgccaagtcctgatggttttccacctcccagcagaatacatacatacatatatacacatgaaacttcccttcgcttattcatcaaatgattttaaaagtaccaggacctatattctaccacgtaaagattctatgacaatggaagaaaacagaaaaaatgcttctttcaaaaggaaaatgtaacatgttatcattgaagatgattttacataaaaggcaaagatttgaaaataaaacatatttctagacagaaacaaaacagggataatcaaataaataaaatcacacaaatttggccgtatctctaggcctagtccgatagcatgtgttttagtgatacaaccatggacagataaaggagtagagctgaaggccttctgcctccacatttttttattttctccccatctccaattttctcttctcctttctttccttttttgatttttatggattacacatacatttttgcatggtgtgtataaaagcacatacacatatgtaaaagaacattaaaaacacaattcagagtcacgctcaagcatgatttggaaatatttatctaaaaacattcaaatttttacataacctgaactaataattctaattttagaaatttaccttaataaaactctagtgggttgaatggtgcccccacaaagttctgtgcgtgttctagcccagcatttgttaatgttactatatgagggaaaagagtcctggaagttacaatttagttaatgatcttgtgatgataaaatcattctgggtaggccctacatccaatgacaagtgtacttgtaagactaaggcagagggagattacagagacagatgaggacggggcggagtgaatgcagaggcaggtattgaaaggatccagccacaagtcaagcaacgccaaccataatgcaacgaacattatcttgcttaaaagcctggcatgtgggaattccatgatggtccagtggttaggaccctgtgctctcactgcccagagccaggctatgactcccggttggtaaactaggatcccacaagccacaggcatggctgggaaaaa

SEQ ID NO: 43648 - DNA, 1247 bp, Bovine  19866880839529
  misc_feature (1)..(1): n is a, c, g, or t
ntcggacacgactgagtgactgaactgaactgaatgtataaaaaagattgaatgtggagacagtggagccttcctactttgctggtggaaatgtaaaatggtactgcctctttgggaaaaaatttggcatttcctaaaataaacaaagaattaccatatgatgcagtgattctactaagtatttaccccccaaaattaacaaatactctgacaaaaacttgtatacaaatgttcaaagcagcatttcttttaatagccaaaaagttcataacctaaatgtccctcaactgatgaaatgataaataaaatttgatatttcataacatgcaatttcttaatcaataaaatgaaattaactactgacacatgctacaatatgctaagtgatgaaaagcaatcacaaaagctcatatattgcatgattacattcatataaaatgttcagaataggcaaatatatagagacagaaagttgactggtggttcagttcagtttatgtgaactgaatgtggaggtgggtggtatagaggagaatgctagtgagtacagggtttcttttagtcatgattaaaatattctaaaactagattgtggttatgggtgaacaatgctgtgaatatgctaaaaaaaacattgccactgtaatttggactgtagcctgtcagcctcctctgtccatgggattctccgggcaagaatactggagtgggttgccatgtccttctctaggggatcaccctgatcagggattgaactcacgtctctggtggctcagggtaaagaacctgcctgccaatgttgttccgataaaagtcctcattgaaaactttcattcccgtgatttatcttcctgaaaaatataggatcacaatattttggttggcaacgggttgggaggtgtgaaagaggaagttggggctggtgagagttgtggggagttataaaatagaatagcattttgtactgataagaagggacataacagcaaatgcctacttctttcctgactgcaggttgtggtcaacttgattgaagacaggtttagagtcagcttgagctgcaaggtttcaataagctggtcaaactcagttgttgaaatttcattagaacacttggaaatagcaatttcaggagtttgagggattttcctctccccttttgcattcaagtggtaaaaaataatgcaaaaatttcaggccaatcataggctacttgagtatgtataataaggagtctgctgctgctg

SEQ ID NO: 43649 - DNA, 768 bp, Bovine  19866880912634
  misc_feature (1)..(1): n is a, c, g, or t
nctttttgtgaccccatggactgtagcttgccggcttctctgtccaggaattatccaagtaagaatactaggtggttttcattttcttctctattccatggagtatcacaatgaaaattaagtcttaaaatttggtaagacactgagaaaatttctgttacttctttgagtccttggttgcctatagggtgctattttataggttgtatgtgttgatatgcatttagagaggaaaacctctcttagaaaaatcatgagcagaatactgagtattttttttaacttccaagttcactcatgaaattctaaagagcctcaatttgttttttactgttctagtttatatgctctatcagatcaggtgtaattttgaaggtcagagtaaagttaagggagaaatgattctcacctgaatccaaaatatcttccttaaggaaggagggaaaagagtgttgaccattaaataatgaaatatatttctcccttaatcagaaaggtaagtaaaatttccctttgggcttaatcagaagcctagcacttgcaatatataatcatacaaaatgtaagcaagaatttccatattttattaatgtagtaaattctgttataagagctaaaatagcttttccaaatgagatttttcaatataagaatccttttcagaattactaccagttctgtcaggctgataacccaatactgggatgtcaccaaacagactatatttgattagaaaaactgggtacacattagcatttggggtcatat

SEQ ID NO: 43650 - DNA, 1255 bp, Bovine  19866880944681
  misc_feature (1)..(1): n is a, c, g, or t
ntcctacttagtcatgactcaaaatagacatttttataagtcagagccagccttgtaacaggctccattgaaatttgtcagcttagctgtcttgagtaaatccacaaggttagttttgtctaatgtgttggtatgttccaataaacagagtccaactgacattttacaaaggctttaaaaaattaattaccagtaaagtaataccatctccccatttattaaatgaagtggcaatctaaattgcaaatgttttttaccccccagtgtcctctttctctggagaatacccctagagtgatagtcactggcaacagaagctctggcaaagcagtggggttttttctccctgaaatctgccaagagtaacaaataattctgttaggaagtgctagcttagccactaatcatggtgacgtggttcttacttgagtggatcgtgtgaagacatccctttctattagtttgaaagattttgattacaggtaacacaaactaactggctagtgttaggaaaaagggagaaaaaggtatataaatttgcaaggataccaaggatgtcacagaagcaacgtgaggatagggaaccaggcatagatactgggtatgaatgaaggcacttctgttcttttatgccaagagggaggaagccagggtcttttaaccaagcaggatggtctagagctgctgctgcatgtaggacatcactgatgctgctgttgctgctatgaatgaatcttaatggtcactttggttttgtgtccctcactacagagtcactgtcccgtgttggagcttctggttgattgagactgggacacttgcgcctgttctgtcagatgccactccaaagaaaaaagaaagatcatcagatggtactccaatgatctctggtttcttgctagaaaagggtgttgatggggaactgccctatatgataaaagtcctctacactcagaagacgagcacctgaactagaagacatggatgaaacctgccaaccttccagcatatgcttagaacccttagaacttggggtcaaaataagatgatagaaacagagtatatggtcatttgtgcttggtatttctaaaaaactgaaatatgaaataagtacctaaagtttgcaatgattacagcaggtctgaatgggtaagtgttataaactggagaagtgatccatggcatggacatttcaaggtcatggaaatattgaccaatgaggaaatatagtctactgagagtcatgtaaaaaaat

SEQ ID NO: 43651 - DNA, 1039 bp, Bovine  19866880952569
  misc_feature (1)..(1): n is a, c, g, or t
ncatcttttaatttcatggctgcaatcaccatctgcagtgattttggagccccaaaaaataaagtctgacactgtttccactgtttccgcatctatttcccatgaagtgatacaactttctcaaaaacaaaaagacatgaggaaggaaggaagagagaggggaagggaaggagaaaaggaaggaaggaaagaaggaaggagggaggacttccctggaggtccagtgggtaagactgtgcttctaatgcacagggcccagattcaatcctggttcaggaacaaagatgccacatgccccacgatatggccaacagtttaaaaaaaaaaaaaacaacaaccttaaaaaaaaagaagggtgggaagaaaggaggaagggagggagagggaaggagagacagaggaaataagtcagctaatgctttcctgctgataaggtcattctaatgatggactagacctttggagttaggtattacgaaaataaagtctaaactgcactgacattttcttccctacattatcagccatttgcctctgaaatcatgattctaaatatttttatgatatatgaaaaaatgtaaaaatgcaagaaacaaaacagtgtttatgtattcacacatattttcatacaggcatgcaaagtaaagattatggaaaaaaatacactagggttgtaataagtgccatctctagaaatcaaaattgcacatcaatttttttcctcctcattttgcttatctataactatctttgtaaaaacagtacgcatgtggagcttttttgctttgagaagaaaatatgatccttctgtcagtgggccccatagcccactggttctcaacctggctgaacattagaatcacaaaaggagcttttaagaaaaataccaatgtcctgacctgcttcctgagaaattcatactcaggtcatctgggatgattccaatgtataaacagagtaaggactacaccctgtaccttcagttctctgctatctcatttgttgagttttgctggagggaaaaaaagcttttctacag

SEQ ID NO: 43652 - DNA, 1154 bp, Bovine  19866880975419
  misc_feature (1)..(1): n is a, c, g, or t
natttaactctccagctcattaagaacacctttccacattaataaattcacctatacaacataatctttaatggctgcagaatgtccaactgaatcacaatttaatcagtcagtatagtatagctagatattcaagttgtttctaatttttcacaattccaaacagtatgtgatgaacatctttgtagcttaatattctcctactttgttagttactgccttggaaatttctcctagaagagatagttatgggtcagtatttaagtcttttatacataacctccggaaaggttatatcaatatacactcccacaagcaacatatgagtctccttacaagactacatgctttacttgagaaatgctaacacaccaaactttggtaaagagtctgtgttagagttaagagagtgtgtaaattacatattgattcatgtacatgtacataattctttctctagatggaaaattatagagacctatggtttttctgccttgcttagtagttttttcatggctcctgtattcacaggctttataaacagagctttaaatatttactgatttgtggcaaaccaggcaagataattattccaccacatatgaaggcatgttttgttctcaggatctagattgtctgaggctttgattagctacccaagctgccgagtcctgaagtttggcttattttcttatttgaagaaagtctaacaactaacttgaagtcagaaagtagcaaagcagatttataaagacaaactatttacacacttcagaggaaaacttggttcgtatcctttgtttaaaatcattacgaggtcaaagcacaaaggttcccagtgaatccaacaagttattattgcctgaaaataattcctatcaaagttgataatagataggctactggagagactgtgaaatttgcttttcctaaaaaggtattgaatgatgacttgaactgtcattaatacagtttatttcttccaatattataagcatgtgaaaagtgacagtgaaacaatcagtatgaattggtaaaaagactgatgacagagcaagatctgggaggtatacatggtgtagaagaagataattggacttgtatttgaacttgagatattttattcattgttttccatccatttaacaaatatt

SEQ ID NO: 43653 - DNA, 2058 bp, Bovine  19866880980750
  misc_feature (1)..(1): n is a, c, g, or t
nttattgcagtctagtataggatggagtaacagttttgaccaccttacaaaagagggactgtttttttcttaatggacaaaaatgctcaagaaaagagacacagaaaatgctccctgttttgaaagcatcctcaataggggtaaaaaaagaaacaatatcagctacctgaaaaataaatacaaagaaatctctcagatgcttggggaaagtaaaataagaaaaagatactgggtgggaggctgggggtggcggggagccaaaaagcttgacagaaaattagcatctgcctctttggctctcaaagggtgagatccctctgctacaaaatagcaagcctccccaggccccctgccctgcagacccaacagagaataatttctcctcttaccttttgctctgtagcgctgccccttcttccaggtagatggagcggtaataagcgtgagtttccaaccttgcggaaagcctcctccactttggcagggagaccacttagcagggctccgtcttcagaactgcggttcctctaaaccctcacagccttttccaactgatgacagaccatacagccgcagcagaagcagcagcaggagcagcagcagagagcctggcaaatcatagatcgtcccctaatgagaacacgctcagctctctgtctcccccctcccctctaacacacccgccccacactcacattcacacacgccagtcagtcctcactgattcatgatttcccctctgaggattttcttataaatgtgctaacgatatagttgtaatctggaaggctgatggtgccagccagggggtttgaagcagctggtcttatagttgtttatagtctaagttctagggaaactcaggcacctgcgtaaagtcctgggtaaagtcccactcccctgtgggataggacttagggagagcgaagccatctcagtccagacacagccctggaagactgaaatatctgtctgggcagagagcacacttttttctctatgatggaaacctgaggactatttctctggtgaaccagtgaggtcggctcccttctctcatggtatatgaatggagaatgagttaagactgattttaaaccatttcagctgcaatcttctgaggcttatacagattattttttttaacccatttgagataagaacattgatttaaacctacatatgatctgtgaactttgtttttcaactctgttttagcatcacttactagaatctttctaactgctctggatacctctcccctcttcacccaccctctggactacagccacatgtaccactcagcaaggttctgtgtcaatttatttctaggtagaaaacatacccagtggaaatctgaactgaggccactctgataacacacctctgaaacagactatataagccatcttttttagaaaagtatacttcggcttgatttttatttctctaaagtagcccaggaaacagtggaaacagtgacagactattttttgggctccaaaatcactgcagatggtgactgcagccatgaaattaaatagacgcttgctccttggaagaaaagttatgaccaacatagacagcttattaaaaagtagagacattacttttccaacaaaagtctgtctagtcaaagctatggtttttccaatagtcatgtatggatgtgagagttggaccataaagaaagctgagcaccaaagaattgatgcttttgaactgtggtgttggagaagactcttgagagtcccttggagtgcaaagagctccaaacagtccatcctaaaggaaatgagccctgaatattcattggaaggactgattttgaaactgaaactccaatactttggccacctgatgcaaagaactgattcatttgaaaagaccctgatgctgggaaagattgagggcaggaggagaaggggatgacagagcatgagatggttggatggcatcatcgactcaatgggactgagtttgagcaaactccaggagttggcgatggacaaggaggcctgttgtgctgcagtccatggggtcacaaagactcggaca

SEQ ID NO: 43654 - DNA, 2442 bp, Bovine  19866881038159
  misc_feature (1)..(1): n is a, c, g, or t
ntggcggatgaggcaaactttgtagcctaatttgttaacttttgaagcattgattgtgcaacatgtgcttcggtgttattgtggagaagaattgggcccaatctgttgaccaatgctggctgcaggcattgcagtctttggagcatcaatttgctgtgcatgtttctcagatgtaatggttttgctgggattcagaaagctgtagtggatcaggacaggcaacagaccaccaaacagtggccatgacctctttttgtgcaactttggctttgggaggtactttggagcttcttttcagtctaaccactgagctggttgttgccagttgtataaaatctgcttttcatcacacatcacaatcctatcaagaaatggttcattcttattgcatagaataagaatcaaaacaatatatatatacatttttttttttttgctttgcagtcagctcatgaggcatccatttatcaaactttttcacctttccaattctcttcaaatgccaaacaaccatagaatggtcgacactgagttcttcagcaagttcttgtgtagttgtacaaggataggctttggtgatcctctcagttggttgttgtcaacttctgatggccggtcattgcactcctcatcttaagggctctcatctcatttgcagaatttcttgaaccaccactgcactgtatgttcgtcagcagtttctgggccaaatttattgttgatgttgtgagttgtctccactgctttatgacccattttgaacttgaataagaaaattgctcaaatttcctttttgtctaacaccatttccctagtctaaaataaatgtaaaataaacagctagtaatgtcattagcaaaaaaataataataataaagcaggaatgtgcattaaaatgatgtataagataaccacatttatttaagaatgtattccaatgtacttcagtactttggccacctgatgcgaagaactgactcattagaaaagaccctgatgctgggcaagattgaaggcagaaaaataaggggatgacagagggtaatatgtttggatggcatcaccgattcaatgaacattagtttgagcaaactccgggatttggtgatggacagggaagcctggcatgctgcagtccatggggtcctaaaaagtcagacacaactgaatgactgaactgaaatgattccaatatcaaacagcaaaatttaacaatggaaaaccacaattatttttgcaccaatgtagatacttagaagctagtcccacacatgctctccagaattctgcttacatgaatctgccactccttttaggtcttgaatttttccaactgtgcaatgttggacctggcagcagtgaaaggtagtaagtgcatatcctaaaaagaatcagcatgtccttgtaagccacttgcaggtctggccaattaaagtatgtatgatcctccatgagtttccctttaaccaactggatgttgacacctagagtggccttggaaccatgcgttccatcagcctgggtctccacaagactgcatggaaagaaccccacatcaccctgctctaccagcaagctggcgccacagtggactgtcacataagaaactaacatctattgtgtttgagctattttggacttcagatctactggttatatcattttgcttactttctgtaaaacagggccttttgctttcttttctttttacttgaaatgtggtttgtaaattattttgaaaatgggaaattaatgattcatagaattaatgtcatagatatccttttctccctgtactcctacataaatttgtagatgtgacaactctaatgataattagatatgattagcctgcatgccactcttagaatgttatttattccttcccattagtatcacagaagctacaatcttcaatgccagggggatgcaaaacatacataggaaacctttcaggaaaatatcatgttgatgagcaaaatgacctgagtgactatcaaaaaggatctttatgcaggacaaatgtttcattgtggcttttttccccggagaaaaagatatccctttatacaaaacattatcaacatgtattgcacgcaaacagctatgtatcataagtacttcttttattccttaattcagaacaagatcacaaggtaagaaaaaacattgaaatacctacagggttcccaataaccctatcaaggtctcttttcaggcagattaaataaccttgaaatttgagaccttggaaaatttttaccagaactctctttaccacatttagagtttgttatgcagggtaggtgaccctactgagctatgtgagtagaactttgagttactttatctaagtaatgataacttattctaagttatcttattaacttattatcctaagttaccttattctaagataacaatttcaaagaaatgataact

SEQ ID NO: 43655 - DNA, 1027 bp, Bovine  19866881063617
  misc_feature (1)..(1): n is a, c, g, or t
ncatatacggtaccaatgtactgaccttttgatatacaaagataaacttctgacttgccactaggagattcatgatttgctttgtttttaaaagttgtgataattttaagcagatctacgtgaacccttttctggtcttctcgcatccaatggcacacacttcggaaacactggcaaaggttcaagttgcaagtctctggctaggagtagaaaaacactgattaacttctgcacagatgaccaacagctccattctaattggcaaactgaacagacataactaatcagtgcattctctctatgcagactatttgtctttaaaatagagatactccctaagttgaggaaaccagagggaatcacctgaataaacgaataagtagtggaggaaatatctactaagtatctactattaaatctactgtttagggagtacaaaatgaacaaattatggctaccaggcttaaaagggaatgtagaggttaagaaaaacaacatatctacacataaatgcaatagaatactgttttactccctcagaagagcaccacatttcaagccctgatcaagtaagactgtctttctgcaatccatttgtttttttccatgctattctgcacataagtcatcctctggtcctcaaacagctgctatctgacactgatgcacatggaatcttagaagtatacttttgtcatcagacttacgcatacccagacatatacttcgtttatttacctggaattgtgcctaagcacccatgctgctttccagttcaaaatgtcaacttctccattgtcctcacaatacttaaaaacaaaatgaatcaatctggcattgttctcccagtctcattaggctaaatggaagtcagcatgagagtcacagttttagaaccaaaataggagatgcttaatgttatttcttgcagattctaatagtcaaacagtttattaaatacaggagatgaaaaattaacaaaacttaacagtggtttgtgctacctctccagtaagttaacactttt

SEQ ID NO: 43656 - DNA, 2550 bp, Bovine  19866881232202
  misc_feature (1)..(1): n is a, c, g, or t
ntactctgctctctacatgacccttgacattcaaaatttccctgttctcagagacaacattcaacaatgtccactaagccatttttacagagcctctaagttacactcatttcagaaaacatttttaaaagcaagcactaaattaaatactccattaaaagaggttttattagacactaataggagatgaaaaatgtcttctgcataggactttcaataaagggtagcactaagagtattatgtctcttccactgaaacaggtaagagaggcattacagctctaacaaaaatgaaagtggagttattttctctaagagccaaaagaagtttgacaacttcccttcaaggagattcagtaaaattaatcaacccactaacccactgtgatttttaagtaaggtcaacattttagtttagtcttcctccctcccattcttccttccttttaaaagtacacagtgcttttcctattaagaagtatgaaggatacatagaaacttcagagaatcaccttaaaaaggtgtaactcacattattatctatggtctcttttagccgtgtcaggtcttccatggctgcatcccaattctgcattaagatctcagaggccagttttccccagagtgaactcaaagcatttctatccgttgctggaacctgttgaagccatcataattaattatattctgaatactctggaggaatagataatgttaaaccctacatatccacccagcctactaaaaaatctaaagctctcttcccaaaactgccctttatttggatcacactggttaagctgactcaaacagctttcatttaacttaatttactaaaaatactcaggtctttgatattcagtctagatcagaaaataaagagtaacctaaaactaggatacagcaccagtgttttagcataatccatttcagataattttaatcagggtttccctggtggttcagatggtaaagaatctgcctgcaatgcaggagacctgggtttgatccctgggctgggaagatcccatggagaaggcatggcaacccactccagtattcttgcctagagaatcccaatggacagaggagtctggtgggctatagtccatggagttgcaaagagttggacacgactgagtgactaagtacacagcacatacacaattaatcgaattttagagccctaaatctttgccaagatttaagattcagaagcaatttgttgctaaaaatttggagtaaagatgtggaaatgaagacttgtggatctcatttacaatttaaaaaaaattttcagaacaaaaaactttctgaattacgatacaagtggaaaaagtcacaaaaagaaaagcaagtgtattggctaataacattaataattatcaaaggaatatgcaatgagcaacaaaagttcattttcttatacaatcctaataccatgaaaggtaaataaaaactttttatcttcattaaaaatgagggcagaaatgatgcatggagagcataacttgttgaaaattatacctctattcataaaagctatagatttcacactgcaattttaacctacaaaaaaagagaaatgagggccatgctctctcctcttgccattggtggaagagtatcataaacccaaacacctataaggactaggctaccaacaaaaacaagtaaagccggactctcaaaaagcaaggcaaagaaaagtggattatataatgactctgaactgtgctaaagcagcagaagcaagtgagtgtactggaggcagaatacctttttcactgaagcatttacatggtggtattaattgtaaagtaccattagtacatatcataattacaagttaaataaaattatatgggcaggactggaaatccaaaaactaagaattttggctctaccactataaacagctgagccatctgtgctttagcttcctcatttataggataaagatactatcagaacccacctcaattgttgtatgagttagatgacataatatatgtaaacatgattacatcatcatctgacacataatacaaactcagaaaatatgagtcattaccaaaacaataatgagactagaaatgacgatacagagtactataggctgccttaactatgaggattaagaccacacctaattcagactcagcctatactaagattcttcctttgacggcaataactaattcaaatatactgaaaaatatataacaaactcttaaaacaggcaaactcttagaacaggcaaatagcagagactgaatttgcaaattaaaattggaaacataatgaaaccactggttcttattattgttacaatttatgtccacaaaaaacttgtatacgaatattcattatctttatttgaaacagacaaaacccagaactaatccaaatgtttattaatgaatgaacagaaaaactagtatattcctagaacgtaaagaatcaaacttctgatacatacaacaacacaaacacatctcaaaaacttgctagccaaaatatgccaggcacaagacttaaaaatatcat

SEQ ID NO: 43657 - DNA, 1056 bp, Bovine  19866881299244
  misc_feature (1)..(1): n is a, c, g, or t
nggcctcctttccattacatcattttcttcaaaaggtacatgggtctagacataaatagacatagacataaatgatcttaagaccattcctgatcttaagaactcatagtttagcagaagaaacaaaccatgtaaacagttaagaaaatacaacatggctaagaggagaccaccaagcatgagcaaggtccattcctcattaacgcttctgctttagccttctggtgtccctgaaaactctgtttacctgtttgggttttaggctgaaaattctgcctgtctccctatagaatcttaatatttacttcgacattgttggctatatcaaaagtaacttgacttgcatgctctgctagcttaattccctcactggcggtagattctagtgttggcttgagatatacataacaaagtactggggaaaatatttttaaaacttactttcttaaagagaccatatttttcatgtcagatttttcaaataagatgtctggccagataattgaagctggctgttatcacacaagagaatgtgttcaagtgataattgtcatgattagaagcctgtactgcatttcagtattaccatttcctgtcagtaatcatgctagtctggaaagcaggcagtgaacgtttatttggactgcaggaatttttaaagacagataacacaggcacagaatactctatgaaagacacacagagttaaaagtatttgaacagatacataggtatttgaattatgtcctggagtggctagtggtttatattagcttgtcaactcttagattcatcacaactctttcagattcctctgagatacttctgactactgggaattgctactttcccctcaagaatggcgtcgccacattccaggtcctagcactggggaaagataaaaagagcagtgatggttccctttgcccaatatccttcacttcacatattacaacggctccaaataaggtagatttagctgtcaatcctagctttatatgaggtggtaaggaagaaaaaaggggatttaagtcctccaaaggcaccttctctctg

SEQ ID NO: 43658 - DNA, 874 bp, Bovine  19866881335995
  misc_feature (1)..(1): n is a, c, g, or t
naaacgcttgtatgattgtgttttagttttgccaccagctaagtagggcaaagttgatcctatctcacaaggaactctctcccacattttctctgtgaacttggacgctcagatttgcttacctgcttccttgaagatactgtgctgttgaaatatctattagaggtctttgaattcaaattcttattctgatgagtcgagtcatttttccacatgttagagttttctttaggatctgaaggaatgggatttaagaagaggatcctagctatgaatccgtagaggacagtggctaggatcattggcacaacataaaagacaccaaagtccattaggtaaataggtgagtagtaattcctggagatcttgtagccacaggacactacaatagcatctttataggtgctaatattgagatccagcaagaagaaccagagcatacagtaaatggatgtgaaagcccagacaaagatgattatctttttggctctggaaaatgtgcagagaaactgggctttgatggggtgacagatcgctatgtaccgctcaatggtaaaggctgtgattgagcaagaggatgcattaatgcccaagtactggaggtaagtaatgcagagacatccaacgtagccatagacccaggaaccgtagatgctgtccgttatgttggggggaggcctgcagccaccaggaccatgagatcagctactgctagactcaccaggtagcagtttgtgggggtcctcatgtgcttggtcctcatgaccaccagaactaccatgatgttgcccacaatgcccagaccacaaataatgagcacaagtaagatggtgaccacttggtattcgagggccaccacagctcgaggctgaag

SEQ ID NO: 43659 - DNA, 1228 bp, Bovine  19866881356325
  misc_feature (1)..(1): n is a, c, g, or t
nttagatcattagtagtggagtactactaagtaagatacttttatggaagctagaaggatttgtataaatacagaatatggggccctccccccttcaagaaccttaaatctgttaggtgaaatgagctagattgtgaacagctcaagaaaatagcacaaacatgaacaatgcaattttaagagtcacaatatttaagagaagatgacccataagtacttaaaagtttccatatagagtataggtcagagactgtgtatataaagctaagtttttaactcagttaatgtcattttctttcttttttctttttcattagcatgttggcagataaactgaacatgactccagaagaagctgaaaggtggattgtaaatttgattagaaatgcaaggctggatgccaagattgattctaaattagtgagtgttgtctgtgctatgtattagatgtcagttgctgattattttatacttttgggggagtttttgttaggacattcattctagaatttttgttttaatatataatagtttttttgaaggcagtagcattctcttgttttttttttttgttgttggatgaatattgtcatctgtactgtgcataaaaatatttgcaacatacatgtaggttgtgatgttatacttatgacttaaggaactcggttgttaacgttataggaccaatttttctgtctcattttagggtcatgtggttatgggtaacaatgcagtctcaccctatcagcaagtgattgaaaagaccaaaagcctttcatttagaagccagatgttggccatgaatattgagaagaaacttaatcagaatagtaggtcagaggtaagaaccacacatcttctgttgtctcaaatttggcagtaaataatataattgttacatgggcatcatttgagaacaaattaattttggttgtgtctgattttgtatttgggggtaattttatttaagaatcacttacactgaaaagatttttcttatatgttttatgcgttagttaggaaacaaattaaattatgtgttcctagttttattacaattgggtgtttttttctcttacccttcctgtgtgccttcattatgtccatttccttagtgttttcaacacatcattttgatactggcagtgataagttaacatgtgttatctctctttccaggtgcttgaaatttgtgttcctttaaaagaactacttctgcaaaattgtt

SEQ ID NO: 43660 - DNA, 1612 bp, Bovine  19866881373622
  misc_feature (1)..(1): n is a, c, g, or t
ntctagttcttatccagaaattgctgctctttcccaacccctgagagtggggttgagtgactgactctttttcattaattcagtagttatttgacatttattatgcacaaataagtacgtggacaataaaaatatgagctggagagtctgagaggtgctgtagtcagtcagtaatgcaagctgattagggatccctcagtcagtgagtaacgtaagcttccaaaaggcccaaagtacattctcttctgcataacactgagctcagaacagactttttcctggtaaccaggcaggcacacaaggacaagcatgccataacaactgcaattggatttgagtcccaaaatagactctgcttggttatattaatttacttcaaattacatatgcatctctctgaagtattactaaataatatgtttcatagatattactgatagaaaaacctcattagatcatgccattcttttttcccctggcaaataaatgagttctctagtaccctatgattagtgggatttggttatgaccaaactgtcaaccgtttggaagcacttacttaatcatggtagcaagggacaggtaaatatgtgcatttaactgagtccacaatgtttgctattctttgggctttatttctacctattgggttatgcctgacaaatagagtttacttcattctgtttcagtaagtaatatactgttaaagagtctttctaatccagttaagtcttctaaaaatctgattatgatggattaattaaaagcttgttttatatctccgaaacgttgctcctctattcctccaaggagccttctgctcatttgcagatttatcagggaaacacaagagaactaaattggcccaccaaaggttcacagtaactttggaaaaaaactgctggatttctgtgtgattggctgccagcatctttaggcaggtgcctgatcaacaggagtatttgctgagtttgagaaacacagaggttgacagcctgacatctgcagactaattggattcaaatcctgaatctactattttattatttgtgagacactggaatattacttagtacctgtctgcctttgatcctctgtataaaatggacctcaaatagaagcagtatagtgttgtttataaagattagatgaattagagcagaaagctggcacctaataaaagttccttaagtgaaaattgcatttataaaaaggtaatgagaatttctcaagtttacattttttgaaaatccttactaaaatcctaagagcaaaagttagtattttcaattcatagaggaaaccaagcttcacaatcaatcaatgattacttccaatatcacaaaactactaagaactagaaccagaatttgaactaaagtgtccttaaaggtaaagtctgaattcttgacatgatagcaataataacaatataaactgaataccaaaaattcaatgctgcttttgtgttcacatacctattcagcattacttagtgcatgtgtcaaaagtaaaaagacatggttctgtccttaaggccaaaaacaagttaaaacaatcacttctaatgtaagatgggaagaattcatgaagaaaatgtcattaacctgag

SEQ ID NO: 43661 - DNA, 1966 bp, Bovine  19866881393880
  misc_feature (1)..(1): n is a, c, g, or t
ncaatcaccacctctttattagaagagaaaatggaggctcaaaatgtttttttaaaaaaaagcaaaacaaaaacccacctggaaagtggcaaagtcagggttccagtggctgattgcctgatttcaaagccctgcaggacaacactgtgttcattctgtttgctctgggctccccctcctcctaaggagagggttatttcactctgctcttttgtatgtctaatctcccttttcattttccatgtgaccaaacctcctacaaagcaaacccaaaacctccttgcgtgcatgtgggctcagtcacttcagtcacatccaactctttgtgaccctgtagccagccagtctcccctgtccatgggcttctccaggcaagaacactggaatgggttgccatgctgtcctccaggagatcttcctaacccagggatcgaacccatgtctcctccatctcctgcattgcaggtgaattctttacccactgagtctcctgggaagcccccacacccccttagtcaaatgtttttaggtaagagaaagacctattactcactttggaaactcaaccttttgaaagattttccccaccaaagatttgacaattaacctttaaaaatattttaacaaagtcataaggaaaattggctgaaattttgccagtatctattcagagacattcaaatgtgacaaataatgacacagctgggtattaaatttgcttccatagataattaagaaacacacatactgtgtcatggaggtaaggaaaatctaaggtctccatgactatagtgtttccattagctaaagagccacttttaaaataatgactgtgcttcccactgtgactaactttatctttgaggtgacattctacccaaaagggcataacatttctctcaacaaatccatgattctcctgcccattaaaaaccagccattccataagaagtctgacccctctttccactgatatgagaatctgctgcataccacttcctttagtgaatggagaaatgtggatgtatgatcaaaagctgggcactaacaggcatggaccaaggctgtgtaaagatttagaatcatattcagtacccaatttcgcaggacggagctcaaaaaaaggaaagaaaagagaaacctactctaacaatgccttgcaggaaagagtctcatcagggtcaggaattaaggtcacaggagaacttgtgaattactcttacagaaaacttctctttcagctctctttgcgaatggtttatgtttctcataagagagatgatttatttagtgatgtctgcatcagcctcatcctacgtgatgtctctgaacactaatggggggaaaaagttccctgaaaaaactatttctgtggttaaagttgggaatgttgcatattccatcacacagtttgagatacacaagatattaagaccctaagaaaaaatcccttaaatttttgtttaatgtagtgtttccaaaacttttttgaccactgaagtcttaaaaaaaatactattaatatcctacccctcacccccaaacctaccatatgattttcatttattaatcaagggatattttttaaagcataaatccagttatgtctcatacacacactcaaacatctccaatggcttcacatcaactcagcatggaaatcagagtcctgactgaggtgcccagggtcctgtacaatctggtctctcacctctatcaatatctgtctagcatgcacctcctcaggccacactgaaaaccttgttctctctagactatgtcagatactcttttgccttaggaccctttgcattgctattattcttcttgcagtattcttccccaggtatttctatgcctttcacacttactccattctgattgccactcagctatcactttttcagaaaattcttacctttctatataaaatatcatatttaaaacaataagattttcctctgtc

SEQ ID NO: 43662 - DNA, 2255 bp, Bovine  19866881439354
  misc_feature (1)..(1): n is a, c, g, or t
ngatgaaaaagacaaaaatgagtgtaaaacgacatagagaataaacggtcgagtttcgatcagagattcacgtgccgaaagagtgaagcttttctttttccttttgggaagggaggaaaaggaagctttttctagcttctatgtataagcagacaattttttttccccctctgtttctcatctctgagacagactctgaagtttgtatgcaaaagacatttgacttggctttcattgtattgcccaggggtaaaaagtggagtgtggggaaccaaatgatcattatttttgctttttaagtgaatcatagtaatatgcctctgatccaaatatcacattttggataagtgaatattttaaaaacccaaaagttagaatgaagaaaagaagctagccactgaaaaatgctaatgtgtaactgtgcgagtccatttctattgttagctaaagaggcaaaattataccagagtattttgcgatactggtgaaataatgtgaaaagcaaagatgtgattaccataaatttcaagatagaggctacatattcaagggagggaggaaatagtgatttggagaaagcaaaaggacaggctttgggacaccacacttttctatttcttgacctagatatgcttatatgagcattcttcttgagttaaatattgaaggtgactctatctcatgcacagttctgtatgtagtagttcataataaaagatcagtatacttttggagagagttcaactttcaagtacctgatttgaatctctaagagtttatattataatctaagaattttattctctcatcttaggaagaactagaaagggttttctttggcttggaatcacccagcatcttgctgtgcatggagggtgggagagtatacagtcgtacggtccctcaaacaccaagtgaccacgctctcctttgtcattttttcaagaaatgttcaactgacttcaactttctccctgtcctttcacttctctttttcaagatatgatccagctaatgggtctattactgcaccaaagtttcttgctgaagtcattaataatattcaataattcagccactcactcaacaagtattaattaaatgtcaaaggattctatggtacgtgccagatgtataactgtgaactgaatggatacatcctaacttttggagaatttacaatctgatgggggatgtgccaatttaataggcaagtataatgccaattcatcagtgctgtgataaaggaatagatggtatggtgggaccataaaggaagaggacttaattcagaatttacaggtcaaagtagacttttcaatgatagaatttccaagtgagataaatatagaaagaagttagtcctttgaagaatgaggtagcatgatgaacagtgggaggcaattcagaagttaaattactggagctgaaaacgctcagtatgtctatagtatgaaatgtgagggaaagtatgtcagtaacgatattggaagtgtcctagaggacagatcatctttggacttataattaaggataaggtgtgtggacttaattttaaaaacaacaaaatgtcagtgatggtttttgagcaggataataaggtcatacttgaatttttaaaagaccatgcgggggaacagattgaaaaggaactagtttagtgtaatcaaatagcgtataaaaaccatcttcaagctagagataatgacagtgaaatttagatataatgatacagataagttacaagaaaaaaaatatgtatcacgcagacattaatcagaaggaagctgaagtggccatattaaagtgggcttcaggatgacaaatattaccagggatgaagggaaataaaaatgataaaaaggtcattcatcaggaagatacaccaatcaaagctatgaatgtgcccctcaacatctctgtggggccatatttctggctctggtaaatagaatgtgtatggaaatgatgtgtgttaacttccagtataagatagttaaggatctgatgtttctatttcatgccatgtgctatctggatgatgctaaaatgaccttgaagccacaatatgaaaacagcctgggatgctgaatcacaacttagaagagtctgatccatatcagactcagatgtgagcataaaataagcttctattgtggtggtgaggttttgaacttgtttagcacagcagttaactttctttccttaattgcagcccctcctgagccaaaaaggagctcaaatgggagacagaa

SEQ ID NO: 43663 - DNA, 1150 bp, Bovine  19866881478789
  misc_feature (1)..(1): n is a, c, g, or t
ntttaataaagcatattatgaacctagggatggggggattcaggagagacacaaatatgatccaaatttataaaaggagatgggggtccctattactccaccacatctgtttgccacatgttcataaatcacatcagtgttttgaacatttctcctagcaccttcctgtcactctggttttatagttcataattttacccctcttctctacatacacacaaaaattctcattattatatttcaggtttgagagtgacatttgacgaagaattaagtcaagcaactgcagcaaatgactgtggctagtgcccaagggccctccagtttcatgagatttggccacagtaagcaaaagtgggagcaaaacgttgtgtttattcttaagaagcagagaaataatatgaagacactaatgacctctgccaaaccaaaaagaaagctgcactttgagtctgaatctacgagacagagttgccaaaaagaaagttgccaacttagataatttccctgcaaatggaatcctcggaactactgtggatactacatttattttcatcttccagtggtgctaatgcatgtcggcacggactgcagcgcttgtcctctaggagtttgccatctctgacacccatgacacgtgaagacagagcaacaggatataaggctacatattcaagacagactatgtgacctgttggtttatttaataggggggaaaaaaaagtaagcaaactgaagatacagaaaaagtcaaattagacgaaaccggagtctctggctcagtcattatggctgattaacttctccctcccctttgcttcaaatctagcactgttgaatggaacataacaaccatgaaaacatatatatctatatttatgcttgaaaacaaaaaagaaaaccacatgaaacgaacagtcagtctgaagccagagcaatgaatgggagctaaagccaaatgggccattcagctatgggacctggatattctaagtcactgaggttttcacccaagagaagagagtttggggaaaagcaggggcttccaggcctgtgggtgtggggagctataggtgcatgctcagcattaaagcaggagccttgaagggattagagaaagttcttccactggactgggaatttggtaaga

SEQ ID NO: 43664 - DNA, 947 bp, Bovine  19866881608121
  misc_feature (1)..(1): n is a, c, g, or t
nttttattgtctgtatttttggtgtcatattgaataaattattgccaagacctggaggtggttacattttagaagtaaggtgaacttgcctaaaattggaagtcaaaagtgagaagcatgtcaccctactttcctactctgttcctgctgttgcttttgtcttttctgtcaacaaagattgtagagtcgtctgtttttctgttggctacattagaaaaggttccagtgtccagtcattaccttcatgtgtggtaatactgggcctccatttcccaggtacaggtacagatttgaagaagtggcattggggacttctctggtggtccagtggttaagactccatgcttccactgcagagggcttgggttctatccctggtcaaggaactaagattccacatgctgtatggtatggccaaaaaaaaaaaaaaatgaaggttgttggtggtgttttacctttggcagcagtagccaacaccttcctaattgtaggctatcctgactgcagaaatggtggctggactgaaaccaacagcttactgatcacagaaaagtcagctgcatttttaaaagcccagttttgcatgtgactttgggattcattcctgaaagcccaacatagaatttgttgcttcatcccacccaacagttgtgtaagccatttgagaccctagaataaatacttttctacataatcttttagccaggttagattctagatatatatctgggatagaatttttttttccccacaactgaattgttgctagtggtaaagaacccacctgccaatagaggagacagagagaccagggtttgatccctggattgggaagatcccatggaggaggaaatggaaacccactccagtattcctgcctggagaatcccacaggcagaggagcctggtgagctatggtccatggggtcgcaaagagttcagaggtt

SEQ ID NO: 43665 - DNA, 1152 bp, Bovine  19866881907309
  misc_feature (1)..(1): n is a, c, g, or t
ncacgtattatgtaacaaatgagttctgtgtttaaataagtatggaaaacactgcacactatatttgactggaagatctcaaatctgtgtattaaagttcctagaaattcatcagtaaagaaaatgagttaactctaaacatatatttcattcactcaacatttatcacacgcccactgtgtaccagcagccaatgctaaggtgagagcaagttcgatattcaagcaaaagtaaggggaccaacatggctcaagtgaaatgagccagagggagggtcacaggtgacgagatggagagggttgctcatgatgattcctctgggcagttcaaagcttttggctttatctctctaacttcagtcaaataaagttctttgcttttaaggactcatgtgattagattcagccaatggagataatttagtatgttctctctgtaaccttaatcacaactgtaaagcccatttaccatgtaatttattcacaaattccagggattatggcatggacatctttgggagagggagcgttttgcctccccaaatctttaatgtaaagattaaaggcatttttcaaaagatatcctataattttaagctttttctgtgagataagagattatagataataccccatttagacaatcaagaagagaagcaaaaaaataattgtaatatgcaaaatataattaatttcctaaatataatttctttccttttcttctttttcatttgcatttgatcccatttcattccattcaattccacagctttaggtgaacaatttctatacgccagacaccaatgttagttgcaatggctatgaagatagaagacatatttttagctcttaagaagctcacagcttatttggagaaacctcacaaatgcaattttaagcaacatgatatagcaaatgaacgttagtggccaaataaattgagttagaactacttatacaccctaaagtccctaatgctatactggaccacaggaatatgtccgaagtaactagattttcaagaagccgcagcagtctccgtaaaacatttttctcctttgcttgtatcttcagctgccggtataaaatcttttggggcattgccttgtgactaaaagggaaaacatttcagacttggcatgagcctgctcat

SEQ ID NO: 43666 - DNA, 1918 bp, Bovine  19866880209597
  misc_feature (1)..(1): n is a, c, g, or t
ntttcccatgaagtgatgggacccgatgccatgatcttcgttttctgaatgttgagctttaagccaactttttcactctccactttcactttcatcaagaggcttttagttcctcttcactctctgccataagggtggtgtcatctgcatatctgaggttattgatatttctcctggcaaccttgattccagtttgtgcttcttccagtccagcatttctcataatgtactctgcatataagttaaatagcagggtgacaatatacagccttgacgtactccttttcctatttggaaccagtctgttgttccatgcccagttctaactgttgcttcctgaccttaccatatattaatttagatataaaataggatctgtttatgaacatccaggtgtgataaaacagtaaagagaatgcagtaagactccttccaactcccaccaaaaaaaaggtgttatacagactgaaatccaaccagggttcctttccagccatgtcagtggagctcatctattagtctgtagaaaggggaatcttttctaactataaagacatcctccgctcttagctaaacacctgcagagcttccttggaagagttctcggtgtttttctaatttacacaaaactaccatatgggctagcagcagtcctttgccatttatctttcagtgtattcctgcaataaaacattattaattgcctcagcctataattgtttaaaatatgtgttcagtaagttcccttaactatttcttcttcaaaagtttcatcattattctctcctttatttttctaagtgaactttggaataattctgttaagtttccttatcatatcttcttctttcctacctttgatcactaaactcttctgttagaattgtgttaaacttatatattagcctactcgaatcacttcattattcaatttttccttctgatcctgaaacagaagatgcatttctatcttgaaaagagtggacttctgcacccattcatatcatgccttccagcccattagcccataaaactgccacttgttgggtcctagttttctgctgagaatgaaaagacttttattctacaataactacagaacacaaacaacaactgggattgtcacagcccgactttacagtagaaaagagggaaaacaaagatcttgatccaggtcaggtttccacttctagttccagttcacatgcacccgagactgtagtgagtgccttataaggaagccggtcatgatcaaaagagaaaaacttgtagcagctttatggagaggcttggcctaatgaccagggctggtctcttgagacatgctctcctgcctcagcatttgtaggccagaaaagtttgctcaaagtagctttattttcacgaaaagctgcagaattcagaagatattttgtccacttgaagactcacatacttaaaatacaagaaatagaacaaacaaatcttactgcaaaaagaattaggttatttttcttttaattaggttggaaacaaataatacattctagactgtctaaaagtgattttgggcacaagaaaaccttttatttgaaaattatgatttgtgttctttcatgagaatgctaatttcttaaatgactttcaaagttttatatcagaatttacccagactgggtgagcagggcctgacaaaaatgtaacgcaagtgacggcacctaaacacttgatcttgacaaaatgtgatttggggaaatgtcatcatcctttaaaatgcaaagggacattggctcctatcacaatctaacaacaaaacactgagtctctttttcattacagggataaaataatattaaccatggctcttctgcaaaaggcaatctatggtatgaaattgctagaacacagatttgtcatgttgattccctgtcaacaatct

SEQ ID NO: 43667 - DNA, 1649 bp, Bovine  19866880340576
  misc_feature (1)..(1): n is a, c, g, or t
natagtttctggtcttacatttagatctttaatccattttgagcatattttggtgtatggtgttagaaagtgttctagtttcattcttttataagtggttgaccagttttcccagcaccacttgttaaagagattgtctttaatccattgtatattcttgcctcctttgtcaaagataaggtgtccatatgtgtgtggatttatctctgggctttctattttgttccattgatcttagtaaacatcagtattcctaaatataacttgttacccttgcaaggaagtagaacagatctttaaaatacccacaatatcttccataaaattctatcactaaggccatagattttaatttctgagaggccaatagattctttcttgaaagcatttattatttataacacagttgtaacttatgtataatactcaagccaaatcaaattttaaaattacaaaaaatagacttaaatttgtagatttacaagagaaatcaattaataacctatcatgtaggctgacacaggaagatgaagaagcagatttagggtaagagatggaattcgtattgatgagtctatgtatgcctgaaatgtgacatgcagtttatattagtcatcaagatttctaaaaatacaaaaatatttaaatagctcattaattttaaataattaaaattatattagagtgtatcaaaattttgaactagttaaatcattattatactgaccatcattacattaagttcaaagaacaaaatgaaataatttcaaaagaatatgaatgaaattgtagcttgtaaatattcatatatgcatgcataaattctaatcactgtatggtttttatattagggatggtgacatagatgaatacagcagtgtattggagaaaacagatatcaaaaccaatttctagtgtagcatgtaaccgctgatataatcactgtgtgagcatgactcctttgggagaggaaaacagaacaactacttgcctgagggagtgaggaaaggccacggatgagattcatttgaactggcactgactgaggagcaggagtttgccaagaggaggagatggagtggggtattccaggcacaacattctcaaagcatgttgtgtgttcagggaacaaggaggtcagtgtgcttggcacaaaaccatagagaaaggaggaaaaggttggtgtagaaatagattttaacattctgtgcaaaagattttgaactttatactgcaggtaatgttagggcagaagttttaggcaggaaaaatgaaatgacccaatttgatgtggttaaaaaagattgtaagtggggagtaacatgtagataactacctaaacagaagtgagatcagccaaaggaggccagacaggaggaagagataatacttcaagtgaaagactttaagggactgaactaaggtattcaaagaaaatcagaacaatattcgagacattagtaagaaaaaattaataagcaatggagattgattgaatatagatagacaaaaaggggactgtattagaagtattcttaaactttgaacgtaagcaaaaacagaagataacaatgctcattaaatataaaatactggggggaagatgattaacaggaaaggtaagtagttctactttcaggtcagttcag

SEQ ID NO: 43668 - DNA, 2009 bp, Bovine  19866880406878
  misc_feature (1)..(1): n is a, c, g, or t
nctatttttgaagccagtaaattttttattttccccatatatcctacccacttgaaatgactgttggtctatgaaaaattaagagtgtctatttaaacaaatcacatagatttctagttgctttagtcaatttcaaagtaatactaaagattaagtcaccactgaaaatatgttttaactttaccacttgttattcttatcccaggatattagcaaaatagcatcttaattttcaagctacaacaggcttatacagtgaattaatgtcatattactgagatccattgattgtatttctctaaacatctttaccaatgttttattttaaattaaactaccaaaatgaagaaattagtttgactattttattagtttcctttaatcattctaattattattctgctattttgtcagtcttctaaaatcaaattcttgttagtgtaacatttgctacagtttgtttttctctgtttacagtaatgaaaaactgtgaggataatatgaaaagccagtgaatgcatctcttttccaaaagctatcacacgaaaatattcatgtgaaactaatttagtatcttagcaataactattaaatcagttgagttctctttgaatgacagcatgtcaaaaaatttgactctcttttctgaaataggtctgtatttacataaatttcttatatccagatgccactttttctggttagtcttttatagctagctaaatcagcatttaaaattttaaaacataatattaaaagtagaatgaattttccttttatgtttaatccttgatttttttccctaaagtttattaaatttgactttctgcttatgtttctctcaagaaaggtttaatactttgaagcattgaagagacatcttaatgaactaataagtatgaaatattattattatgaggcaaaatgcactttccttaatcttatgttcttatataaagaaaactttaatcattttaccacatttcgtacttgattttcagtcaaacaaagtgctttccctattagccaaggtagtgtctgtgtttgcatcttggaaaatatctaggcctcttagtatacacagacctaaaggagatcattccaataaatattcaggagtaagccttggtaggattttcaagaatacaggtgttgaagccaactaattagaatggggattttataagaatttgctcagggagttaagacttatgaaataaaagatgattaggactatagggaaacttgtaggtagttctctcattctcattccaacaaaaaggctgtgatctctgtctagttattgtacattcttcatagcaaatgtaattaattccagctgggaagatcccctggaaaaggaaatggcaacccactccagtatttctgcctgggaaatcccatggacagagaagcctgacagcctacagtccatgggggttgcaaagagtcagatacgactgagcaactgagcatgcaaaacttagttcatggcaaaattatctagacacgttagcctcgttttcagccatctcacttggaatcacataattcagacactcgtgatacgctcagaaactcttgggaacttcaagtagaaaacatgtgaacagcagatttgggcagtgaaactataggctgcagaagctctgggtataattccttgacagatataaagatgttcattaaagcacatgtaatacattaaatttaatacctaagattgtttgatcctcttgtttacaatcaacagaaacatgtcaaattatcttaagtaatcagaagttgttgtaagaataaatattgtggtgcatgagtattagtttatctattcagctccttttctctgaaatacccaacttcaatactggaattacccccacagtctttgatctgttgtgtaattcagcttccctaggcatcataatagaatatttgggggaagaaagctgagctaatcaaatattttttctctacaaattagtaatttaaaactaaatgatagagaa

SEQ ID NO: 43669 - DNA, 995 bp, Bovine  19866880687237
  misc_feature (1)..(1): n is a, c, g, or t
nctttatgaatgaggtggcattttaaagaatggttgaagtctagaaatcagaaaaggtaaaataaaacagagtaaggacagtttaaaaagtagaaccattcgtggtgtgttaaggaaacatccaggtgtccagactgactgtagcacagcatcggtgaagaataatgagagatgaatctggaaaaacaggtggaagccagatcactgagtgccttaaaatgcagcctaacaagtttaaactgtaggcagtggaaggtactggcagtttccgttttgtttgtttttagcagatggctgaagttattagagttctacttaagacagaataaccttatattcctgtgcagggtgaaatagacaggaatggaggcaaaacaggtcattattctgtgcagaaacaagccctgaatctaaatgatgatagtgaaaacagaaaggggggaactaatgggagtgaaattatcgcccttttcgatatcttgaaataaaatctttccacatttacatgtgcagctattatcttgtcacatttttacaatgaaagtctgtcattaacatttttctgcagtaatttatcttgttatctacggaaataccttgtttgcaatgtgaaactgttttctatacagtctttgtgggtgtgaaagtggtcttaaggtgggaaaaatattgaaaatcaaagagatatttggtgatcaattatattcatattcagagtttcacttttttgtctttcaaaggtctttataagaatcaacttgagtttcaaactagaagttgaaagaatatgataaaagttagaagccatattcatgtagggtagaaaaccagtaaaagagaagaaactcaatacgtaatgagatggactctgtgggagagggagagggtgggaagatttgggagaatggcattgaaacatgtgaaacgtcatgtatgaaacgagatgccactccaggttcaatgcacgatgctggatgcttggggctggtgcactg

SEQ ID NO: 43670 - DNA, 1272 bp, Bovine  19866880720549
  misc_feature (1)..(1): n is a, c, g, or t
nagctgtcctggagtagtataatatttactcactctacagtgattagattattattattattttactacaatattcttggtagcttttctgagatgggaggatttgtatacagattacaataaaattgaaaatctgttctggattatcacaaaagaaaaaaaaaaaaaaaaacccgcagaagggaggtttagaattttttgtatagtgaattcattgatttactgcatttagtaggtgtttaggcttccatatcatcctaccttttaaaaagaaagatatataatatgtaatgtaattttatggatatcacatggacatctttgagttttattcctagattgtctatttcttaattgttttaaataaactttaatgtatactgtcatgcttcttaaacgtgttgccttatttattaaggcattaggaagagaaaaaaaaaattcactgaagttttttagtgagtttttaaaaatctactcactgtagatttttacaactataaatcaaaacctaaaaataagctttctaagtatatatatatatatatatatatatatatatacacacacatatatatgtatgtatcaagatagtatcaaatctcaaaatagcattattttgcaaactgcaatattttgttgtatgtttacaaaaaactaatgaggaaacttttcctttagtttagctttccatacttaatggatttgcagtaatacagcattactgagatataaaaactatagcattccccctcagaaaatcagaattaaacaaagtaccttaaaaatctagtctaatactcttactttacaaagtaaaaaaaaagaaaaattgagactacctaagatgaatgattttcttcaaaatatatagagcttgtttagtgacagaaaccaagacaacatgtagaggtgaaaatccttgtaatcgcattgcactgtgcacaagaagctttaggtcacatctgtaggctccttttcctctgtgatcctcaggttgaccaaatttaaagccctgcatttattcagcactcgactcaaagctattgaaatgctttaaatgcagtgttttacctaaacatatgcatagctatatgctatgaagtagcatatatgctcaaactcctgcacaattgcactcatctcacacgctagtaaagtaatgctcaaaattctccaggccaggcttcagcaatacatgaaccatgaacttccaaatgttcaagctggatttagaaaaggcagaggaacccagagatcaaatttccaaca

SEQ ID NO: 43671 - DNA, 1160 bp, Bovine  19866880823825
  misc_feature (1)..(1): n is a, c, g, or t
ntctcctgcactgcaggcagattctttactgactgaactacaaggggagcccaaatagtactttaaagtatttaaagaagttcaaatagtactgtgtaaatgcaaatcaaggtatatcttgccttaaacattattttgagtctgaaaagagacatgtaaactacatttatatatgttaactcttagtttggcagtggatgagtctcacttgttagtaataccctatatttaaggagttctaaatctcattactgacatggtctagtctctagcttcctttgacaagatctgtgtcactctttccccctgattcatttcagtttgatcatgttggctttttttatatgcttgaactagtcatgtcattccattttcagaatcattgaccaagctaccctttcctccaggaacaacttttctcctgaatatttgaggacatccacttcttcctagtgctaagatcttgaacaacaggcaccatcctccatgtgcctgtgccttaaaatcctcattcttaacaaatgaggttcaagaacaaagttcttgattactttcaggttaaaatggtggcaacctaaattacctgaaacaatgccttccagcttcccattaaaatagatgtttgtgattttcagaaagcacactagtatataactttaagttatgtaaaatcccactatccacttatattatcaccaaattcacaagaatgttctcttgtcatctagggtcctacgatgatacaccaaccacttgtgctaccaccagtcaaaactatggatggccccaccttcaggtactgcatatgaatatattacaaaaggacactcacgccttaatgaaactaacatgttagatttacagtgatattgaggacaatatgaatatgttaacaatcataagaaagatttcacagaatgatacataatataactccaaataacttctgaataaaggaaaactttgaaaggcaatctaacaaactactaataaagatggatttatgggcatctgtcaaacttacagtcatttccttgggacctttgggtatgaacttatcccacatgtttttgttcccttggccagaggactaggaatgttaaattaatacaaatggctcttataagatttattaatatccttaatttgggtagtattag

SEQ ID NO: 43672 - DNA, 1583 bp, Bovine  19866880897606
  misc_feature (1)..(1): n is a, c, g, or t
ngaaatctaacagaaaacaaagtattttgaaaagtattatggttaagatcaaacagattaaaacggaagggtcaacactaatggaggattaaagggaattgtataacctttactgaatgagaacaaaaagaactgaaaaccaaatccaattatctctgtgaaaaaaatgaaaccaacacaacattgtaaagcaactataaacaataattttttaaggcattgtggcaattactgaaagctgaatatggtgagttttagataatagtaatgtatcaatattaatttcctgcttatgatgttgtaatatggttatgtatgagaatgttcttgttttcagttaagtacaccaggcctttgtgttgtcaatttagtctcaaataaggaataaagaatcctttgtattgattgcatggataacttttctgtgggtttaagatctggtttttttaattctaaaatttacagggaaaaatctgcatcggtaaggggattttactttttaatcatttaaatattattgacttcaagttagacttctttaaaaggaatcagaatttacctgcatgatcctttgtataattataactggatcaaatcagtcagtgcttcagaatcagctttttgccagacataaatgaaagaacggtgtttactttttaactgtacttcctctcctattactaagcatgaagttatttttttttaatatgttttgtctttagccttaagttccaaaaattcattgcatgtattaactatgcttataaacttgttttgacataataatgtgacttgatatgatgtaagagaaaaatagaaacaatgcctgaaagactatactaattgtacttaacaaactgtatttctgaagatttatgcttaattataatgattgtcggctttaagaatctacatttgatatattgtgatttcatcaaaggtggattttattttacatactttaattgttaaaattgagagaaaagtgagtgaactgcactgtatattactaaaatactttgattttccttttaagaacaaggtgttgatatttatcagattttacagagagacctttaattcttcacaaagtaaattactataaaatttctccaaatgatattctagcagtgtatttattttattataaacaagaattttgcccaatcaataaaatttggcatattctgtgtgaaataggagttaatttttcactaggataataatggtataaaaattaagaaacctgacaattgaactttgaatgatcagttggatcagtattgtcatggctgtaattacttccacaaaaatatcatttctccttttaatatgcactttgggtgaatggcatgacttacaattatcatgaaattgttttggtcatcttaacaatcactacatacattttctgtttaaatgaggaatgaatttccattaattcattaaggatgtttttatcaaatgcttaatttgtttccacatgtggtacatgggaattattgaggatgagagagagatacagttaagacatgagtattttcttatgactgtaaaaaaaaattctcttttcccttcaaaaa

SEQ ID NO: 43673 - DNA, 1631 bp, Bovine  19866880945129
  misc_feature (1)..(1): n is a, c, g, or t
ntattgcagtactccagatctttttaaaactatgatttgcaccagaaataaataatagaaatggacggtatgtctttttgtgaggtagaaacaaagtgagatagactggatagtttaaatgtaaggaaaaggaaaagaagtgtcaaaggatcccaggactgacttgtgtatttgggtaaatgattgggccatttactatttggaaaagtctgtaataaaaatgctcttatgaagggacataaatggaaagagaaatcaacaatttagctcagtcatattaagcatgagctatcttagagacagtcaagaagagatttgaaaaaagcaattaggtacacaagtgcagaggttagaagaggggtttgagctaataacagaaaattgaggatttttttcattagtatattatctcacatatttctaaataatttgccttctagacataatacagcataatataaatatatagtaattctaactctttctaataaggtgtcatattttgattattgtagaacaagaggaaaagggctaataattattgagcatagactatttatgaaacattgacaggtgttttacatttttttgttttctcaataatgctatacatttaattatttacacttaaaccatgggaaaactgaaattttaaaaggttgattaagtttccctaagatcaatcagcttatcaatgacagaaacaggattcaagcacaagggttttgttattaaaacccattttctttctgtaccaccattgtgtaaaccatttttcctttcttccttaatgagagttaacaatatccataaataatttttcaaaatagaaagtaaaaacaatgatgttgctataagaacatgtgtagctacagccggtaaaataacctttgttagaagttataaccacttccaagtaaagtgtatacatattttattagagtagctgaagaaatggtgatatgatttaagcagcattttcatttacttgtaaacatgagtgtgtgaatacttttttgtgaccattttttaaaagttatagttttcctacaatttccaaaagtctagaaagtaagtttgattatcttaacacacacatatacacacacaatcacagtaattgtgtcttagtagtgattagttatttccaccacagaaacttggtatttgagggcttaaataattccttaaggtaagaattaagcaatcaaaattctggtactgtttattattagaattacctggagggctggtatttgttcttttttctatttttgactgggggcaggggcaatggtaaacattttctcctagtggatttttctgaaatgtgatcatgcatttttttttttttatagcatggggaattctattccattagtttacataattccatctcatttggaatatgaagtgatatttcctttctatctctctctaagagtttggaaaaaacaaggttgcagtgtgagcagactagagatactacttcgtgttcttaaatgaaaataatttatttttattatcatattggaaatattacagcaaaatttaaacattgtctttgatataccttctactttatgtaacccaagatgttgttctatttcatccatgcatgtaattctgcc

SEQ ID NO: 43674 - DNA, 1966 bp, Bovine  19866881024427
  misc_feature (1)..(1): n is a, c, g, or t
ntgaaattaaaagatgcttgcatcttagaagaaaagctatgaccaatctagagagtgtattgaagagcagaaacattactttgccaacaaaggtctgtctagtcaaggctatagtttttccagtggtcatgtatggatatgagagttggactataaagaaagctgagtgccaaagaattgatgcttttgaactgtggtgttggagaagactcttgagagccccttgggcttcaaggagatccaaccagttcatcctaaaggagatcagtctgggtgttcattggaaggactgatgctgaagctgaaactccaatactttggccatctcatgcgaagagttgattcatcggaaaagaccctgatgctgggagggattggtggcaggagaataaggggacaacagaggatgagatggctggatggcatcactgagttgatggacatgagtttgagtgaactctgggagttggtgatggacagggaggtcctggtgtgctgtgattcatggggtcacaaagagtcggacatgactgagtgactgaactgaactgaactgaactgaaatgaattacaaagaatttaaaaccaagtggtcaaaggctatcttatttccaaagagaaattagttatagcagaagttagggacagggccgtttttattttcaaaagagaactttttcactgccaaattctttggaaaattttcaatgtattgcaacataaaacatggaagagctcgttttgtcataatttttcttttaagatatgccactattatttgatcttcttgttcattaatatctgcaagttcctaacacccccactttgctttttgtaggtgaggagttcagtaaatcttttaggctgaattatagcaaaacatccccaaatggtagaattaatctgctagaagagacatttaatattaaacattgataattcagtaaaaaatcataattgttttaattttattgatacaaaattgttctgcctggtgaaaattagccaacaatttaattttcttttttatacagaaccttgtcatttttttaagtaatgaaagccaccaacattcaagaggacacttgttttgtctacttgatataggcattaatctaaaatagcttgtaaattatttagatgttataaaaacacaaggatgaggctaattcatgcattatgacatatagtgaggggattttagcttccagaaacttcttctgggtctgagttttagaataatattatggtacatgctttgttgatgcattaatagcgtaggatctattacaagactgttcatgctggaacacagtcagaatctatttgtggaatcaaggcaagatcaatgagcacagtgaagagcttattctattattagccattttcttgatgagaatgaggttagacacagttgtggcataattgtgtctaaaatcttacttcccctgaaagatattaaattgaattattcattcttataacctgttgagaaagaagcttagtattatattaaggtgacattcaacatataaaaggaatatttacagcctggggtgggataaggagttctcttcatgacagtaaattagattgtattttgagactaccttaaaagcttctagaataaatagctttgaaggactgaatttacctttcaggggaagacaaaaaattatggttgtaagaattgcccaatttggctttttcaacttaaggaaattatgcattttatagtagataaaatgatagaattcccagaaccataaaaaaattcagagagatcttccaaaactatcaattcaaatgaaatgtttcacctaatcaccaatacagcagttttcattgtgagttagaggctttccagatagaatattggctctggagactaaatccaaaggctccctttagaatctgttatgaaagaatctgttttattatttgaatgcttacaaaaattctaaga

SEQ ID NO: 43675 - DNA, 994 bp, Bovine  19866881031822
  misc_feature (1)..(1): n is a, c, g, or t
ntaaatgtcagaaacaaaacccccatttttatctatgaaaaatgaaaaggtttaatcattttttaaaaattactacaataaacaagaaaattctttaagcaataaatacctctatataaaactattactgaatattttgctcaacatgatattagaaatatgtcattgttttcttaatgtaaattattaaatttttaagaggtttagttttatttccagcaaaaatacaaattttgttattctatttactgtcatagaaaaatgctacatgctataaatcaaccctgaatattcactggaaggattgatgctaaagttgaagctccaatactttggccaactgatgggaagagccgactaactggaaaagaccctgatgctgggaaagactgagggcaagaggaggaaggaaggagagaagatgagatggttggatggcatcattgactcaatggacatgagcttgagcaaactctgggtgataatgaaggacagcaaagcctggcatgctacagtccatggggtagcaaggagttggacaagacttagcaactgaacaacaacaacatctacactaatacctctccctctctctctctcactcccttggtctctctctctctctgcccttaacacatactcgtgagactttacccatgagacagagagttcaaacttgaattttatctatcatgccaaagaactagcatctggctcaggtgtcgtccagccctacagaaatactgcagacaaatctctaagattatgtctatttggatgcattatttgcagagcacttttgaaacagatgtgagggcaaatggacacagttctatgggctaattctattgtttgcaacctctaaaattatctttagaatagaaaaggaatatcagtaatgcttgaatgtgttaaagaagcatgcttcctacaagaaaagagagagaatttctcttaagttaatattaatgtatcatcacaggctgttcaggga

SEQ ID NO: 43676 - DNA, 741 bp, Bovine  19866881038667
  misc_feature (1)..(1): n is a, c, g, or t
naaggtcttctggaggagggcataggcacccactccgtattcttgcctggaggatcccatggacagagaagcctggcagctacagcacgcggggttgcacagagttggacacaactgaagcaactttgcacatagaatacatagataagggaagctgtgggatttaatggattgtaaagatttttcttcctgattaagtgattatgtatgtttatcgcttgtggaggagaaaaagcaaaatattaaataaaaattgtcctaacatatacatcactttataactctacaaactttctcactgaacagtggcagatagtttaagtaaaaactggtaacggtttattacttcatctctggagtagaaacttcttggcaaaatgggtcatttaggtagctcacagctgttcacattttcaaactctctggaaatctccctagagtgatttataaattttgtagaacattctgttgagaatggggaatatgttaaattcacttttgaaagtcaaaattcttgctttctgattccaataattgactaagaaggaagtagcagtttcctctggcttgtaatttgagagcacctgcagcttaagagagaggtcagcaagttgaaattaaactctttatgaaaatacagatcaaatatgggttaaaatcccaaagacacccaggttcataactgacttagctgatgttacttcattgtaagaagagcaaatgaaaagttatgttgacaag

SEQ ID NO: 43677 - DNA, 1892 bp, Bovine  19866881077724
  misc_feature (1)..(1): n is a, c, g, or t
ntgaggaggctgatatttgaaggtgaccttgaagaactaatcagctttttacttcacagagaggcggaacatctttcttcaaagtgaagatcagggaatgagtagttccatgtgaggctgtggatcgagcagcttggatcagatgagctggggccagcaactgtgactatggaatgttgctggcaccttgtgaaggacatggctgtgtacccatggtgatgaatgaatttgtattttaggacataaccctggtagaagcagaggagattgactggagtaaggagagctgctaaccagacattttgtttgttgtctggcttgaatgaactagtgaaccacagtacagagtgaagatgaagagacatattccagttctgtgatgcttgaagctttttacaaatttcaaggctctcaaaataaaaaaaagttcaaaattataagcacaaatttaggtacaaaaacaaacactttataataaggaaaagaatctgaaaacattactaaatttaaagggttgatgaatgctaaaaattttataaaatttgggaaaataacacagtatttctatgacataccttcctgacagttctacctattaaagatatagaaactttttagattcatgctctttaatatcttcatatgaataatgttcattatattaatacatatacaaaatatgaattataatagcattctgtaaggagagattagaaggaaattaaagcttttttcatattacagttgatcattttttttaattgatggttcagatgcaaaagcatgtggcttcacacagctgaatctgctgcttatatgcaacaggaggtgccctacacacaggaattctggtaagtttcagcacttttcatcaaaagaaggaagaaacagagtatggtgactgaactgtacatgctgccaataaatcgtatttctaaccagaaatcactgttgttttggttaggcattttatgggaatcaaatgtccctttaaaattatagatgtttgaaaactggaagaattttctatatattaacttctggttctgtacatattaaactgtgtttctctattctcatagtttcagtgccagatgttggaggataccttcttacagtgacacatttaaatctttctggcttcttgctgttacgctgggtgagtcagcacagtgtgtggtagaagtacttctggaagtcattcctgtagcaggaatgctgacaattatgtaaccctttataaaagtgactgtaaaccacattggaagagaccctgatgctgggaaaggttgaaggcaggaggagaaggggacgacagaggatgagatggttggatggcgtcaccaattcaatggacatgagtaaacttcaggagttggtgatggacagggaggcctgatgtgctgcatccatggggtctcaagagtcggacataactgggcgactgaactgaactgaactgaaaccacattggtatgttccaatacaccaaaactgaaatattttcaatttagttggcccttagctggattccaaacatgctttgttgtccccctaacactacttaatatgaatggaagtgttatgaggagcaatcagtgtggacagccatcttaattgattgtgatgtttttgaaatttttagaaaaacatatgaatatatgatggcgaaggaaatggtaacccactccagcattcttgcctggagaatcccatgaacagacgagcctggtgggctacagtctatgggtcgcacagagttggacaagactgaagcggcttagcacagcacagcatgaatatatgaacacattggtaagaggcatctcttagagtgtaggaaggtgtttgtgcatgcaagatgcaccaaaatttacactacattagttcat

SEQ ID NO: 43678 - DNA, 821 bp, Bovine  19866881722933
  misc_feature (1)..(1): n is a, c, g, or t
nttgcaaagttacagtttatttgatttctaactacgtatatccaaaaatgcattgtaacatttaatcatgaagacagctttttctctcttgctccatcttttggtcttcacattgtttatagcattattttaaattcaagaattcagaacaaatgcattttcttacggtttcaagactaaaagaagctatcattcatatgtatatgttaagacaataagagcagtaagtgagacctgtagaattattttttaaaaatcaagcaataacttattttggtttcatgtgaaaaaattatgcaagtaatgaaagaaagttaatgcattgtatgttggcattttcttagtgaaatgggagtctttttctgatcaattatttggaaattgtaatagagaaacacattgtttagaaaaataatggcataaataaaagcaatagcaaacaagatcttcataaaaaaggcgagtagaaccagcagcaaaggaaaactataaagacattatgtttgagaataactcattaaagaagtagaagttgctgatgcgttacttcaaagggaaatatgtttaatgtatttggaagatgaaagaatttgcagcagaaggagttagctataggctgtatttaagtcttacacacccaccttaatattgggtatagaactgtaatatcttttccaaaacgtgtattttttttcctttcaaattatgatgacattttttttccatcagattatataatttcctcttttaagtatattttcaagtaaactttatattttagaacagtctttgactcacagaaaagtgatgtcaatacatat

SEQ ID NO: 43679 - DNA, 1711 bp, Bovine  19866880366443
  misc_feature (1)..(1): n is a, c, g, or t
nccccctgcattgggagtgcgagtcttagccctggaccccaaggaagctcatcacagactttgtatgtaggtcactggctacaaagtaggtttgactctctctgggacagttctgcctgcacacgactactcttgcagtttgtcacggtgtctaacaagacacaggagagagaaatggaaacaaaccacttctgagcaccagcagtagcggtcgtcactcacaggttgtgagagttggaccataaagaaggctgagcaccaaagaactgatgctttcaaactgtgctggagaagactcttgagagtcccttagatagcaaggagatcaaaccagtaaatcagaaaggaagtcaaccctgaatattcactggaaggactgatgctgaaactgaagcttcagtactttggccacctgatgcaaagagctgactcattagaaaagaccctgatgctggaaagattgagggcaagagaagggggcggcagaggatgagatggttagatagcatcacggactcaatggacatgaatttgagcaagctccaggagatagtgagggacagaggagcctggcgtgctgcagtccatggagttgcaatgagtcagacatgatttagcagctgaataacaacaaacagtagcagatgtcgtctgtctgcctgtctgtctgcccattctctttccccctttcctcatagcatccacagagaagaacttacaaataactttcatgattattttcctgtgcaaaacaaaacacaaatgagtatctcaatgaattacactgcctcgtaaaattttgtgctaaatccactatcatcttataccaaacgctgctacaagtcagtagcaagaaccagtgatctagcaggaaaatgatggaaggaaaagccaaaactataaattctattcattcaggatttgattgttttttttcccctaagaagtggaaacaagttgatttttgtagaggggagtgtctcgtattcagtaagagcagtcacatatgccggacaccaccctgctttgaaacagagctgttatatctctgagagtggccagatgcctggcttctcaaaacaaagaaaataatttgttttcccaagagaatgggagagtgatccaggaaaatatccccttgcttcatctccatcaaaagtatcaaatgcatgaaaatttagtacggataatttgcatctgttgggggctttcagcatgtcaaaatggtttcacctcagctgctatattatgcaagactgctagtgtcagaaacccaactcaaagtgattaagctttaaggagaatttactgtctggtataacttggaaattcaagcatggcttgatccaggtactcacaaggtaccatcaagacttggttcttttctatttgttcccttagggaggtatttaccagggaagaggaggttccctggtagctcagtcagtaaagaatctgcctgcagtgcaggagacctgggttcaatccctggatcgggaagatcccctggagaagggaatggcaacctactccagtattcttgcctggaaagtcctagggacagaggaacctggtggggtacagtccatggggtcacaagagtcagacacaacttagcaacaaaaccacaaccacctaccccaggataaatgacagcaggagctccttgctgtttacagtcccaccagctaggggcccaagaagaaaaaga

SEQ ID NO: 43680 - DNA, 1155 bp, Bovine  19866880386235
  misc_feature (1)..(1): n is a, c, g, or t
nctgcaggccagagaaaagggtcaagaggggagttcccgtaaaagtcaggacggaggctccaggaactcaagtttctcccccttcatgacttgctgcaaactctaaacaaatcccggtctgatttacatcccctgccccgagccaggccccgccgggcgctgtgcctcttacggagataaagatggtcgaagatgagagagggcttgtccatctgtcccaagataaggagcatctcgttgtctatgaattccttgaattctttcaggttacagttcatctgtttctctaattcattacgaatctgcagagtggaaaatatcaggagggtttaaaaaaacaaaaaaaccccacaacaaaccagttccttcaaagaagtaaagtcacgacatgaactatgctgttgctgctgttcagtcccagtcgtgtctgactctttgcaaccccctgaactgcagcccctcaggctcctctgtccatgggatttcccaggcaagaatacagagtgggttgccatttccttctccaaaggatcttcctgaccctggcatcgaacccgtgttttctgcattggcaggcagattcgttacctctgagcatcctgagaagcccaactgtggctgttttcataagaagtatttgggggcttttttcaagagtcatcacatatgcatttagacatagcgaacacacgcatgggtggcaggaacacagggctgctgctgctgcaaagtcgcttcagtcgtgtccaactctgtgcgaccccagtagacagcagcccaccaggctcccccgtccctgggattctccaggcaagaacactggagtgggtgcaggctactcggcctcaaagtgactctgactgggggacgtttattatttcaaagaaggaatctgattccctggaatcttttctactgagttgaaagcacttaatgcttttccaatgctcaaatctatcaccatgaaaacataagatcagtttcatctagctttggaagataccacgatgggcttcattatgtgttatttcataagaaaactgttttgtacaccgttaacctgctactgaattcagctgttactataattcacagcattccgtggacgaaaagcaacagaaagaagaaaacaagtcatccagaaaaacgttaaag

SEQ ID NO: 43681 - DNA, 3419 bp, Bovine  19866880500716
  misc_feature (1)..(1): n is a, c, g, or t
ngctagagggagtggccgtctaccccgggcatcgtgcccaaaatccctgcagttagaagacctcctccactgtgtctgcaccaggacaaagtcacagcgaccctttgcaattccctcttctcaaccttagtcttttttctgcacattaacagtgatgtgtgagtcagttgcttaatgcccgaaaaagaaaaagaaaaaaaaatctgactctgggaaacccacacacgcttaaattctaggactggaattctgttcagagccctaaatgaatggcatcctcacgtcgccttcgatttgtcctctccatctggaatcattgtaataatgggtcacggctcatgtgtgtaatgcatgaactgtgggaaacaatctatatgcgcccatcatttaatccacacaaaatcctcagtctctgttttttaaaagagtaagaccagagatgttaatttacctaaggctacccagctaggaggtggcagagtcggggctccaccccaggtcaggctaactcccgcatccttcatcctaagcctctgacctctgccaggatttgcctagcatttctggaggcaagctctcctcctttctactttagaaaaatgccatcaagggggggagttacttatcacctgacacagcccactcactaccctcacattctctctatttgcatcagctactcaggaaattagagcaaatcctatttttagatgctggggttcaaatgacagtgatgtatgggttagtggctcatttttatgaaagtggctcagaggtgttacctgatctgatgtttggaaactctcttacatcaccgttttgatctttaatagagtttatttcaaagatcgctttgtttcttgcggctcctctgtgagtcctacaacagactttggccagaaacaataatacttggagctggaatagatggcacggagagagggtgagacttttctcagaaacttgaaacacaaaggatggcggggatgagcggagagcggggcagggcctcaaagtagagtttgcccggtggctgagcagcaggcaggcccttcctgccgaaactgactgtgtgtgtatgttagacaaaagctctacaactttactactcactcttcatagctaatcgcagtctcttagttttgaaggttccaccagcaggggggccacacgatgtctgtggggcgctcgggcaaccctaagacttaggcaagaaaagaaaagagcagaaaaagagggatggagatgatagagggaaaggaacaaatacagagcggttgatgcaccctggcagaaaatctgatttaatcagtttcaccctcttgtcagtactggaaaagacctttattcccatttaatagattaggcaaccgaggccagagtggtcaagcaaggacttattactgcagagcacatggctaatgactgtgaaattaggatggcaagatttggaaaacaaaactacaggacacccagttgaatttgaattccagataaatgattttaaaacatttagtttaagtttgtctcatgtaaaattacagacttatcctaaaaatttaactggacatcctgtcttttattaatacctggcaaccgtcactgagattcaaacagttctgtccattatttctcagatactcgtttgctttatatataatacttcatttatattatacttttatatataatacagcagaatataattgatgatgatcatcagccaatattggttgagggcagtgctttgcctctcctatttcacttgaaaccctgtcatcctcacaccacccccatccaatgggtacaattattatttccatattctggattaggaaactaagtctcagtgagatgcaataacttggccacagtccacagccagaaagtaccagagctcagatttgaaattgttactgtcttgcctaagcatggtcacttaagaaacagccttttcaaaagttgagttaacacacatgtagaaaagtgctcaatatctaaacagaaggttcaatgacatgctgcgaacatctgtgtaggtaccaaccaggtccaggaagaagacgtccagcactccaggagtcccacgcgctccctcccagttgcaatgctcatactcctccttggagattccgtcactctggcctccaacctccagctgagtttgcctgcctccaaacgttatgtaagtgaaatctttacaggaagtacccgttggtgtttcatttctatccctcaacactgtgcttgttggattcaccctgtggtggtgtgtatctggaatctggtccttttcattgctgtatagtgttccaccagctgattatacataatgaacccatcctattgttggtgaacatttatgttgtttgcgattagtttaaaatgtgatattttttttgtattgaagtacagtccatttacaatgctgttattttctgatgtacaacaaagtgattcagttatacatattatatatatatatattcttttcatgtttttccattataatttatcacagatattgaacatagttctctgtgctgtccaataggaccttgttgtttatccatcctatttacaatagtttgcatccgctaatcccaaactctcaatccttccctccccccacctgccttggcaactacaagtctgttctctatgtctgtgagtctgtttgtgttttgtacgtacattcatttgtgtggttaaaatgtgctcttataagcaacaagcacgactgctgtgaacattctcctgcgcgtctcttggcggacacaagcattcatttctgttgggtatatacctaaaaggggaaatgctagccagaaaggggtgtatattcagagtgcgtagatataccacacaggttttcaaaatgtttgtaccaacttacactcctaacagcagcacattcaatttccagttgccccacattctcaccagcacttgggggttgtcagttttggtaattttcgtgtaacggtctccccttgcagttttaataggcgcgcccctgatttctaattaggttgaacaccttttaatgagtttattggctctctgaacactttacttttgtgaagcctctgtcccagtttcttgagcatttgatttggctgtctgtcttttacttattgatttgtgggaagatttttaataagttctgaataggagcccatagttctgggtattggaaatatctgctcccattctatgccttgactcatgcacttaaatggtgtttattagtggaggtcttatgattttaatatatgaaatatatcagtattttcctttttgaatggtgcttcttaaacaagaagtcttctcctacccccaagattataaaggttgcctctgctctaggcttctggaagctttgttcttttgcctttcacatttagatctacagctca

SEQ ID NO: 43682 - DNA, 1010 bp, Bovine  19866880618001
  misc_feature (1)..(1): n is a, c, g, or t
naaattaaatttcttaaacaaggccaggaatttttgtgtattttgctttctgacagagctccagcccagtgcctggcacaccgcagatgcttagcaaaggtttgttgaatgaataaatgaaccaatgaccttaaatcatcctccgtgctttggggaacatggagaccatgcataggaagtgtgcttggcttttggcccaaggtgaacatttgataaatgttggctataatgattatgagctgggacagccagaggaactggggtccttgggcaggaagcccacctgccctgaccccagcccccaagcagccatcttcctgcccttttggtgagggggggaaggagatgggactcaaatccactgaacccaagacaacttttgtttcctctgagtcctcgatctggatggctggactgagctgaaccttgacaacgggagagcagccatgacatctcgatggagatgttcacggtctacgaaggctcagggtacacagcggccagaccagtcctcggccactatttattatcattgcaggcacttttctgaaagagacggcaggagttcgggcacatcactgcttccagctgtcccccgtgaatgctgtgtgcccactgggtttccaggaacataaaacccgctgtcaatggacttgcccagagcctgcattcgctgcgtttttgttcttgtttagttattacattaagtctcctgtgattacagagccgacagctggtaaggatttgcatatggcatgaaattaagttagttcattttaatgtctaaactgagcagggtgtgaatttgtctggtggaaactctgtctcccttatctgtgtttgcacatctgctttgggcactagcttctgaggtcttcaagtctcgtttctcctcactgtgcccaggcaggacagggggttggctgcccctgcgagaattccagaagggatttctgcacttggggcttagaacgttctcttttacatttcaggaggaattacgacttaag

SEQ ID NO: 43683 - DNA, 1006 bp, Bovine  19866880646735
  misc_feature (1)..(1): n is a, c, g, or t
naactccagcagcgagtaccgtcatcctcatcccattttatgagtgcggaacccgcagcttagaaaaggtaagtggcttcctcaccttctcaatgctagtaagtgatgaagccaagattccagcccaagttgtgtgtgtgtgtgtgagactcagtcatgtctgattctttgtgatgccattgactgcagccaaccaggcccctctgtccatgggatttaccgacatcaaagcgcacgcattctccatctctttctctgaaccccaactgactgtggaaaaagaaaatacagataaacaaaacgaagaaaacaaaataaaaccactcctccacctaccctgcgagaggtaacgtctttatgtacattggtgagtttccacccagctgttttccctctgccaaaggggaggttcttgctccaggcacatgacccttggtggtctgtaattgccaagcaattaagggatgacaggaaatatataattcatgggcacatctttcatgctggttgctggaaggcagcgaggcatggccgtctcccagggagagtttcaaccttgacacgggaggagacaggatctcaggggcttagaaaagaatttcggaatcagagaacctgccaacattgaaactgaccctggaatcccagcacagaatgctggaggtcagggatcctaacatggggccttctcatagagtcttatgaaaaagcattaggataaaatctagaattaagctttagaagcggagacgacaacttcgtgaagctggagtcagatgggtctaaggatggtgttctgatacacacctctctttactcccacaagcaaaatctagaacactgtctagagacattcttcattgtcataacttggggggcggggtgggagctgttggggggacaacgctggcatctaatgggcagagaccagagacaccaacccctacaatacacaggatggcctccacacccctgccagccaggaattgtccagtatccacaatgt

SEQ ID NO: 43684 - DNA, 817 bp, Bovine  19866880666506
  misc_feature (1)..(1): n is a, c, g, or t
natgtaatactttgtgcagtgatctctcgttagtatgtgtccgtcagaatccatcaggctttaatgccccttcccacaaataactgaaaacaaacacagacagggcacattcctgattggtcaaaaaggtgtgtacccaacctttatactaatctttgttcaatccccagcacacacgacaaacatctaccacagaacgtggcacctggaggcctaatatacaacacaattcccagttttatttcactttctccccctatttatttatgcaaactctcagattcaagagttactattaggcttcatatccaaacatggtgctgtgactctgaaatgtacctccaaggcaaaagaaaaaaaagtttcctttaaattaattttctgaaatacatagaatcaagtccaaaatagtcttcccatgtcttcagttttacaggcagtgcagaaagtgcagtcctataaacagctatctatttgccttcacaattgaacagcagacggtacaaagcaactgcttatacttaatcatgtttctgtctattctagcaggctggtgtcaggagagagttctgccagataaggacaatgaaatgtattattatagagtgactaccagccctacaagtgttgtctgaggatggaacccggggcaggaaggctgaagtgagagggcctactattttgttgtaaccatttccaaaagtatatacattcgttccccaaacgcgcactatattcaattctgcttaaatgtcttataggaaagaaaggcctctatatcttgctcccctgggggaagatgagcgacttgcaattt

SEQ ID NO: 43685 - DNA, 1815 bp, Bovine  19866880704749
  misc_feature (1)..(1): n is a, c, g, or t
nccccataccctggctcaaggaacaaagatttttccaaactgttcatccctactttatattcatacaggttttcattttagggaaaaatgctgatcaaaatcacttgacgtgtccaaagttcagtaactatcatactgttgatacatcagaagatctttccagaggcacggtcatctctcaccaccagccttggaataattccctgaaaactcattctccacaaggagaatggtaagttaaacatgtgctcagacgcaaaggaaaagtttgcagagcctgggcataaggcctccattcacactgtgcagagttcaaaggagtcaaaaaagggtaactattgaagtgggtttttctttcttttttttttttttcaacttcctttttcttagagcagtattatttatgtggatatgcgttctattgaaatctcttcaggccctgctcctccacaggaaggagctacagtgactggtggggggcagggggtggtgcagggagagtggtccacagggcaaggctaggcgcccagcagctggccgggaagaccaatgcacacaacacagggcctgcagacaggcggtcaccaagagtgacagctcatacatggcccaggaatggaacattctgaggaggtttaaccttaagggaaccagaaacgccagccttaggtggaggtgagaggaggggctcaggaagagcacacacagattgggttaccaggcgctggaaagtaagctggccaccacagccgccaggcacggtgtgggagccctcacctgcatgtgagcaaaaagaaacagtctctatgggcacaagtgaaaatgccaagcaaaccattctggcactgcatgtcctctttaaaaactggattgaagagtgaggagaccattttaaaagtccatgaagaatctggcggcagttactgtaaaaatatggatattttatcatcagaaagcagaaaggtagaagagttggcatttcctggctcagccacgcctaaatatacaacagcaaatggagaggctctatctcctaacttcttaacttaacagaaaatttataaagcaaaaacctcatcactgcagacaaataattccatatactacctctggtctgagaacctaaaaactaggaacccatgatgaggtagaaatgagtcaaaacacagttcagcttgaaaggaaaagctggagagcaaaagaactatccatgtaagagcaactacaggaaactaaaacaaagtatttgacacccactcagaaaggaggggaactggttgccgaacccctgtcctgagtgtcatctccctgaccctggggtttcctcccacaggaccctccacgaatggggaaaagccccagaaccaccccttccaatcccagctctgcactggtttacccacaagcctcagagcagaaacccacccttccttgaagtggggatgaaaaccagaaaaatatcacagctctttttttttttctttctttctttaggcaaatgctttgggctgcatggccaacgcagctgacatcttgcagtggttgtaaacaagcaggagcaccagagcagagacccaattcagtagcctgtatcatttactcccgacttatagctcagccagaaaggaaacccaagtccccgctcctccgagaaggccaacacgtgctcatcactgccctccggctcagcctggactcagcttaggtcccacccccagtcagtgcggaattcaacttggcgagagcagaacgtctactacatatggttacaaagaggcttcggacaagcggggacggcaggaatctgtctacagc

SEQ ID NO: 43686 - DNA, 2220 bp, Bovine  19866880765492
  misc_feature (1)..(1): n is a, c, g, or t
naagaaaacaatcgttttgttcttgctcccctcaggacaatgattttgttcttataatcagtggaaaagacactgctcctgccattctgatcagtctttctgcaaagagattaacaagatctgacaaactttcctcttccgctgaaactgaaaacaacaaaaccagaatttttattatgaaagttctcaaacatccacaaaagaagaatagatatctaaggaaccccaataacaaccgtccccaaattgaacaatgattcaggatggggtgggaggtggaagggaggttcaagagggagcggacacatgtatacctatggctgatttatgttgatgtaatgtcagaaatcagcacaacattgtacagcaattatcctccaattaaaaatcaatatttaaaaaatgattaacattttgctacatctgtcccttttatgtatttattttggctgaattttaatcaatataagtagagcaacattgacaaaaggaggcatttttaaaaataagaaaatagatttttttgttaatgaagaaatgaacttgaaaacatttactagtgactatttactagcgactagcagccatttggtgaaagcacaaagccatcacacaattaggcagctgtacagctgaaaaacacaatagctgtaataatgaggacatttagacaattaagccacttgaaatttctcattacgaagcatgtctcaaactcacgcccttagtgggggtgaaatataaatctttttactacaggatataaaataatgagtcattaaaattaacttctgcttaaaagcaaatactgtcgacaaaattgaagacgcaggagaaacacacatgtcctccccctttggtaatgtttttgaataattaaatgtttgggtcgaatctacagactatgatgcaaaggcttcatttcttaccttttctacgcttctttctttctgtaatgggaccccaaataacatagattcctgctgcaagagcagcggcaattccacctataacaccccagttcttcatgactttgtatctaaaaaagaaaataagttgactgtctttcctcataacaaatacaatacatgtatatatagggacaggtacacagatataacgtttcatcaaaataacccattggcccgccacatacctagctttcaaattaaagtaatatacagtataggatatgtcttgaaaatctgcacacacaggaattaggatttaaaacctaagtcggagcacaacctcaaaaagccccacttcactggagagcggggtccagggctttcctcctgctctgtctctcatcctaccgccacactggccaccaccccagccaaagccacgctcccgccccagggcctttgcatggctgccctctctgcctggggtgctctccccgccagtcccactgcttggctcattcccgcccctccttcctttttttaaaattattttttatttttttgccttgccatgtggcatgggggctcttagttccacaaccagggattgaacctgtgccccctgcagcagaagtgcagtcttaaccactgggctgccaggaaagtctctccctctcacatctaacaaactatcagaacctgctctcatgacattttacccagctctactttttcttttcaccatagtgctctccactttccaacataacattcactgattcactatgtttattctcagtctccctcaaataaaatgcaaagtccccatggacagggatctttgttttacacactaacatattccaagcgcttccaagtgtttagatcacacagtaggtttttgatagtatttactgaattattggagaaatacagacatggatttatcttttaggttattaaatggtgggagatctttatacacagtataaagatagatagataaagtataaagataaatagatgtaaaaatagatctttatacaatcatataaagatcttctaaatatttattacatattaaatatttcttcatttgaagcttgacttcaaccactgaagttattcttttactacaaataaagaaatttcaccagcaatttaaaacactgtcttcacacacagttatgtatttccactaaataaggcaaacaatatacgaacttttgcaggaagtgggggctgagggtagccacagtgctcagtccgaaactgcagcccggggaggagggtagacagtagaagggac

SEQ ID NO: 43687 - DNA, 1290 bp, Bovine  19866880782901
  misc_feature (1)..(1): n is a, c, g, or t
nttgattaattttttgaaaacgtctgcccaaatacacacgtctgagtcactgtagtttttgtcactcaactgtcctctcaagtgaaaataatgtcccatgaaaaaaaaggaagcagtccagcttgcagctcagacagtaacctgagatttctttgctccaagccctgtacttgggtatgaagaggtgcttgatgtgtgctttccgtttgtcacccagaatatcaccaagatggcactgtcttaatttgtgccaagggccactgtagctgtggtatcctcagtccaaatgtcagcacagtgaaaaagtccaataagtatgtcggtgtataaatgaaagtagttttgactttgcaggcctcctggaagggtcttggagacccttagccgtccatggatcatactttgagaactgttgccctaaattttttcttagtgtcctaatgtgtatttacagtgtttatgtatgtttataaaaactttttaaacaggagaatatagtgtcttataacggttgggatgaacagaatattgttttgtaactattgtgttgagcagcatctcatttcacgtcagtgtgggaagacttgtatgaccctgggcacgaaacctgctagtcgctgtgttggtggctttcccctcaagggggtgacatcctagaatctctctggggactttcccctgtcgccccagctcttgggtctttccacacaccttgcacatgtaaaagcagaaggcctggctgtggaccgctgttcccaggtgcctcttgcaccagcactggcttctgagggaaagagtggtttagaagaaagccttcacttttgactagggagctttctgagacaaggaggaagcattaaaactattggcacgaagagcgcggtgtctcctcggcgctgaaggtgacgctaggctttgctgccgtggtgttagctgtgtgagggtgcaccccccctgtgtcttctgctgggtccctgtggccccaactctgtgttttccatcccagggcccatggggacacgcagcactgcaggaaggctctgcaccgggccgtccagtgtaccagcgactacccggagcacgtctgtgaggtgttgctcaccatggagaggacagaaggtggggacctcggtgctgcctcgggctcggggcttgtccctgaggccagtgtggtctcagggcagtaggcgtaaggacacatgtgtttaccagcccgccccaggggcctctgtgatgagaccatcgtgcggtgctcgccactagaggggagtcccgctgcctttctcacac

SEQ ID NO: 43688 - DNA, 2585 bp, Bovine  19866880842984
  misc_feature (1)..(1): n is a, c, g, or t
nattcttgcctggaaaatctatggacagaggagcctgtaggacttcagtccatgaggtcacaagggtcagacacagcttagcaattaaacaatattccctataagtctatctgaattgtgtggcctcagctccttcacccatgacaataatcttacctgtaatcaggaaacatgtctagctctctgagagtcagcttccgaaatcccagaactatatccttccagtaagggtcctttagaggaagaagagaaggcggcacagagatggatgaacatcaacaagagtgataataacaaagacttacgtaatgtttaccatgtgtaaggcactgtgccaagcattttactcataccaatccattcaatcttcacaacaacccattgaggtagatgctatttttagtcccattttacagatgggcccattcaggctcagagagtttaaataagttgtctgtggtcacccagctaataaacagtggcactgagatttgaacccacacagtggggcttcatagtccacgttcttaaccatggtgctacgtgagggtaagaataaggctgaggatgaatgatatggtagggtcataaataggggaggaaaaaaaaggggcgacagtgaaggtcaccaagggatgagagtgggaagttgcagagggaagggtcagacaacccagtagggggagattttggcctcaccactgaccaccttgaattctctgagactcagttttcttgtctgtataatggagttaatagtcactctctctctctttttttaataatcactcttagaaggcagtttaataataaaatggaaaacaaaaataatttttaaagcaaaaatagaacttttttaaactttagttatttctttctcctttttttcaagacttttttttttaatgtgaaccgtttgttttttcaagtctttattgaatttgttacaatattgcttctcttttatgttgtagttttttggctaggaggcatgtggtatcttagcttcccaaccagggatcaaacccacacctcctgctttgggaggcgaagtcttaaccgctggatcaccagggaagtcccacaaagatagaacttaaagcaaacctgttttgaaggcaggagtctgcctaagggccttgaaggacctccccctcctcccaccctgcctgggcacgccttgatctgtgatccagactctgctctctgtacggttcatggccaaagacgtctcactcaccggaacagcttcacggaagaggttgtagcctgagaccggggccaggcccatgtttgcagcattgggagaaccgatgaggctcaggagatagttgaaggtctgctggttccagtgcctgagaggatcccccagagtcttggtcacctaatgccctgagctggacaagagagctcccagggtcggcttgcacaggatcattctcaggctggtagggtgtgtccaaatccagaaattcaccccattcactctgcagtgactcaagtgctagtcaccccccataacctttttcatatttcgacattaacagagaagaggagggacaaaggattctccaccaccacagagaacaggcttgtggttgtcaagggagaggggctgggggaggggtggactgggaggctgggggtggcaaatgtaagctattatatgtagagtggataaacagcaaagtcctactgtatggcatggggaactacaatatactcatatgcgcgtgctaagtcacttcagttgtgtcctactttttgcaacgctatggaccatagcctgccagacccctctgtccgtgggattctccaggcaagaatactggagtgggttgtcatgctttcctccaggaggtcttcctgacctggggatcgaacccgcatctcttatgtcatctgcattggcaggcaggttctttaccatgagcaccacacccactatactcagtatcctatgataagccataatggaaaggaatactttcaaaaaagaatatatatagattatataaatacataactgaatcactttgctgtacagcagaaattaaaacaatattgtaatcaactatacttcaattaaaaattttttttaaaaaatgctccaattttcagggcagaaatggagaaacggacatagaaaacagaccaaaggacacagcagaaggtgagcagggagacagtgagatgtatggagagagtaacatggaaatttaagtaccatatgtaaaatagacagccagtgggaatttactgtgtgactcagcgaactcaaacacaggccctgtgacaatctagaagggagagatggatacggagatggaaggggaggttcaggaggcaggggacacaggtgtacctatggctgattcttgttgatgtatgacagaaaaactgcaaaattctgtaaagcaaatatcctttaattaaaaaaattaagtggcaaaaaaaagcaaaaaaagaatgttccatcacaactacgaatatttggagcccacttccagcttgggatcatgtagctgccagtttaaatgaaagctttgactgctttagggactgtgagtccccgtgggttcagg

SEQ ID NO: 43689 - DNA, 1546 bp, Bovine  19866880856263
  misc_feature (1)..(1): n is a, c, g, or t
nttactgttgggtgtgtaaatatgaaactgttttataggcatataccttcgacttgaacctaagtcctttctgtatttcctgcaatttatgtttcagagtcccgttcgattcgataccttcgacagtctttccctcagtattccagcctccacatgggtatgtacccatctctggtttatttcgagtctgtttcagagacatctgaatctgaaagagctttgaggcatctcgtgtaactcaggtactacacatgactcagacacatagttggttgaacctgtcttagttttaatctgtggttaccacgacctgtcggggaagaaggtggtttctctctcgctgcagaaattttggctttttcaaatacatatacacacacctctcaagttcagagatgcgtaaaacagcacagaagcgcatacttttctgcagtattgggtcctcatacccttgaatccgtccagaataacaaatctaggatgctctgaactctccattttgttcgggaaacacccacttgtgtctgtgaggcctcgcagcctacctaagcagagtaaagctctgggcttcaccctgttagcggtgtcagtccagctctccttgacttgtattcatgaacgtgcttcttgtgccatagggtcatccactgaccctggaccactgccttcaccacttcatctcgtcagaatccgtgcgggatgtcgtctgtgacaactgtacgaaggtatgactttaaccctggctgccatctcctgagctggcccccatgtccggatacaaggcctctcatacccttagccctgagctctgttgactggcccagaggctccctgcagccacagccacctccacctaacttgcttagaaagttggcagcccacggactatatcttttcccagatgagttgtttcattcacagaatgtttaaaggaaaaaaattgaatcatatgctttgaggtgagacatgcccgctccaatttgctacagtcccctccatgcccacctgtctcactcctgcccaactgccccaggaatgtcatcctctgaattaagagaaagtgtacgggaaagaatttttgaagacacaaaacaaaacagatgacaggcagccagtgcagagtttcattgcggcctctttgtttctcttgctgcaacagtcacaattatttaatgactcttgtttttgttcagttgctaagtcatgtccaactcttggtgaccccgtggactacagtatgccaagcttccctgtccttcactatctcccggagtttgctcaaactcatgtcattgagttggtgatgccatccaaccatgtcatcctctttaaaacagtgaaagcgaaagtcgctcagtcatgtccgactctttgcaaccccatgggctctacagtccatggaattctccaggccagaatactggagtgggtagccattcccttctccaggggatcttcccaaccaaggagtccaactggggtctcctgcatcacaggtggattctttaccagcttagctaccagggaagcccatttaaaacagtaa

SEQ ID NO: 43690 - DNA, 1743 bp, Bovine  19866880884557
  misc_feature (1)..(1): n is a, c, g, or t
ncccagaatgcctgggaaaataacccccatatcacacaggaataaccatggttcagggcttgagtttcattgtctctcgctggctggtctttgagccacaacttcagtgtggtctccagggatcaaaggaagcattgaatccaccagtacagtcaacaggaaagaaaattgtttcttgtggcaggaaagaagaaaaaaggaaattatttggtccagtgcttccagatcccatcttgaacatgtccatcacccatcacctcactgggtaattgcacacacagttcctaagttaagctcaaattagatgctgtggcctacattgggggaataacataattcactctgttaaatttggccccaggattctgtgtttataaatccagcccagcatgggatgcaggacaaataaaactctgttccctggacaggttcagatgaggcatccattcttattaccaaccccattaaaattccccagaatcccaagacttctaaaggggtggtgatccatgtcagagttctcaaactcagatacctgcagaggctaggcaagtaatatcagtaaatgaagaggcagggtgggtattgtgtgaatactcactcagtctcaaggagagagccactaccctgccaataattgccacgtgggagatgagcccagagttgccaaccccagcttcatctcttagcagctgtgtgacctcagtcaagtcacttaacctccctgtgactcaatgttatccacaaaatgcctacctgttagggtgactgtgaaaattaagcattacactgaagtccttagaacactgcccaacccctaggaggaactcagtaatgttgactgttactggtttctaatacttgtttatttgtctgtgcccggtcttagttgcagcacacgggatcttcagtgttcattgtaacatgtgggatctttagctgtggcctgcgggagctaggtccctggccagggatcaaacccgggccccctgcattgggagcatggagtctaagccactgggccaccagggaagtcccagctgttattattaagtcagtagttttcaacaaaggattctcataaccattaatgtgaacaagggtattcaaactattctcattgtagagaggctcatggcatgggacaagaccaggttgactaaacaattttttatttgggctggaatgctgacaacacgatgcacagtcgtattgggacttccctgctgatcatcaccttattcaactcatgcctttaatgtgttaaaatttgaacaacttattaattcttattttccacagtggacttagcaaaatattttcagttaaggagtcttagggaatagaatagctggattcttgatgagaggacatttggagactgttgttctaaaaccagagtatagatctgggtttgacaccaaatatgctaggagtcagacacgactgagcgacttcactttcacttttcactttcatgcattggagaaggaaatggcaacccactccagtgtttttgcctggagaatccccgggatgggagagcctggtgggctgccgtctatggggtcgtacagagtcagacacgactgaagcgacttagcagcagcagcagcagcatgctgagatccttgacttcataatgatactcaaaaggacactcactggttactcatggaggatgcaagcaagccaacgctttactgtgaaaaaatagaaaaataaagggaaagaaatctttat

SEQ ID NO: 43691 - DNA, 1832 bp, Bovine  19866880945140
  misc_feature (1)..(1): n is a, c, g, or t
naaaatttgacaactggatctgagcctgatataggctggctcctgcatcctagtgtgcccttccacttgtctggacctcccttgcccttgaacatcaccccaggaattgccccatccatccactgaacacgaatatctgctatgtctccatggatccccttatacagcctatgaaggaactaggagtctccccattttacagaagaggaaactgaggctcagagaagtgcagtcacatgtcccagatcatacataaggatctgagattggaatctaggcttgaatcagaaagacacattcttaccactaagtcatgaggtccttgagatcatagcggggttctgggggaatcccgtgccccaaactcccgctcctgctgacctgtcctggcgtctggaagtcccctcagccaccctttgtggctcccagttgctgagagaaggcgctgggacttgttagttgctcagtcatgtccagttctttgcaaccccatggactgcagcctgccaggctctcctctgtccctgggattctccaggcaagaatactggagtgggtagccaatcccttccccaggggctcttcctgacccaggaatcgaacctgggtctccttcattcaggcagagtctttactgtctgagccactagggaagccccgggatgacgaagttgaacccagcttgcagagagcaggcacagagcagacccgggattcaagactgagagagggggctgcaccaaggcacgggcgtttcctgggcactcagtctatgcccagccccacggcaaatgctttatctgcctgatcgcattcaggtctcacaacaacccgtgaggtgaggacaattattatcccacatctctgctagagaaactgaggttcagaaagctgtgacttcagcaagttgcactgctgagaaaccagactccgctgacttcagctctggcagtagggaaggaaggagggtagacaggaaatgggggacagggggtggcatgctgaatttactcttgtccctttggaggggggttgctgccagccctgcgggtgcttcatctggctgtcaatctggacaaaggctccccaaaccttcctccataccccacccctgcctgccacccaaccaagtcttacctgatgcctaagcacgagatatgtcctccataaaccattttcagatacagaaaaatgactggaagtacaccaaatcgttaagagagattagccaccaagcgtgggattataagtgaattttatttggttcttttgactttcctgtgttttcctaatatttttcaatgggcagaacaaaatcataagtgtttaggaagtctgggggtcccaggtctccccagctagtgagtaaaaccatccactctttagctatgaatgcccacacaggaaggctctgagctggtggtcctgacccgggggcaactttgcccccccaggggacatctggcaatgtctggagataagctggttgtcatgacttgggggagcattgctggcatctagtaggtggtcagggaccccgacaaacatcccacagtgcacaggccagtcccccgaggcaaagaagggtctggtccaaatgtcagtggtcctgaggtggagaaattctgctctccccacttggcagtgagggcccttggagttccccttctcaaaagtgtttggaaacccgaactgtgtggccatgagcttgattgctgtgtctcctcttggtggctggaagcctgtagccataattgctcaggcttttgccctctggggtcccacggggccagtgccccatgcccaagcctggcacagtaaggatgctgctg

SEQ ID NO: 43692 - DNA, 1652 bp, Bovine  19866880950913
  misc_feature (1)..(1): n is a, c, g, or t
nagcaggcttgtggcagaggtttggggggagtactgtgtgagattaccataggagctatttcatcccgttggcgttttacatgccactctctagcctttcttctgcagctcgtctttgcccattttcctctgtgaattccagcctaactgtgctctgttttttttcctctccccagcttaagtgagagctttttcatggtgaaaggagcagccctcttcctacagcagggaagcagccctcaagcccagcggagtcttcagcacccccacaggcatgcaggtgatggctctaaactgatgctcttacccagggagttatcttctatgcgactgagcaaccctccaacactggtgttcagcacttggctggttttcaaggccagggaaatagcgcagcacaggttggtgatgacaggtgcaggtcagaggctcttttcttgaggccatgtgtgttttcctgacggcactgggagccagcacccttataaggtcagcagctttctgtttggatgtgaagtttccctactcagtctatcagttaactgcagattttaagttacggtatcctgggcttctcctggtggctcagacaataaagaagttgcctgccttgcagaagacccgggtttgatccctggtttaggaacatcccctggagaagggaatggctgcccactctagtattcttgcctggagaatgccatgggcagaggagcctggtgggctacagttcatggggttacaaagagtcagacacaaccgtgcatacacatacacacacacacacacagaataaaatcacatgaaagaatttactggcataatgcaaggaactacaggttctgggacacccaggctttcagataaaagagaatactttacttataaccaaattttattatatgacaataaaaaattctgttcagataatgtttgggatgtgctgttaatcactcagttgtgtccagctctttgtcaccccatggactgtagcctgtcaggctcctctgtccatggaattctccaggcaagaatactggagtgggtagctattcccttctccaggggatcttctcaaccaaggagtaaaactcgggtctcctgcatgcaggcagattctttactatctgagacaccaaggaagcccctagtttttatgggaaaaaaaatgagaaataacctgcagtatcttattttttgatgttaagtttttaattttaatttatgattatctttgggtatgaaggacttttaaaaaaagttaactgtgtatggactttggtacctgacatgctccaagttagagagagttgtcgttattcagtcaataagacatgtccaactctttttggcccaatggactgcagcatgccaggctccactgtccttcactgtctcctggagtttattcaaattcatatccattgagttggtgatgctatctagccatctcatctctctgcagtccccttctctttttgccttcagtctttcccagcatcagggtctttttcaatgagttggctatttgtatcacgtggccaaggtattggagcttcactaaatttaaaaatgttagtttgacttttctatgtgttatctcaaatggactcttaaaaaacaaatgaatctccaaaatgcgtctttaatat

SEQ ID NO: 43693 - DNA, 1533 bp, Bovine  19866880962291
  misc_feature (1)..(1): n is a, c, g, or t
nggactgagttgcatctctcacgtccccggcattggcgggcgggggtctttaccgttagcgccacctgggaagccagatgaccatgtggatgtacggatttttgctgtgcaagggcggggcctctgtccctcacattcactctctctatgactgcacagtgcctggcagtccgcaggggttcagaagacatggaccgcattgacaaatgggcaagggagtttggcaagggggtgaagatgcagagacagctgtgggactggcaaaaatctaagcaccagaagcagaaatcaaaagagccttagctttaaggcttagggtcaggcctgggtttcaatccctgctctgctgcttatttctggatgtcgggcaaggctaacctctgggagcctcagcttccatacctgtgaaatggggagaaaagcccttgctattcatacagctgtgacatggctggcacacttcaggtgaccaactagggcccacgttagagaggcagtccctggctatgggagcaggcgtagaccctctgaggggcaccgtggggcctccacatccccccatgcctggaagtccagcccccctgtggtttggggagcaagcccccgccctgctaagcacgccgtcttttggcctaaaattagctcacaaattccatggctgcctggtcggtgcttccaaccgacaattcaaaccagatgtttccagctgttggggcccttcctccccctggcccagcctgcatgtgccctggggaggtcggactctacccgggggagatggatcggagcatgcactcgggggccctggcaggatcaggagccagcctgggcctgtgggctcacccctctaaggatgggggccgccttgccagctgacctgccagcgagtgggggctgggtgggtgaccgctctgcctttttcggttcaggagccttgtggagcgcctgctgtatgccaagcctctgttctcgctgctgtccagatgctgtgagaaggagtctcagtccgaggcgccacttgcgttgctgttgttattattagcatatgtatttagtgccaggtggcgctactggtaaccctcctgccagtgcaggaaatttgagagacgcaggttcgatccctgagttgggaagatcccctggaggaggatagggcaacccattccaatattcttccccggagaatgccatgggccgaggagcctagcgggctacagtccatagggtcgcacagagttggacacgaccgaagtgacttagcacacacatacacaccaagcctgtaagggcttccctggtggctcagtggtaaagagtccttccccctccaaagcaggagatccaggctcaatcctacagttgggaagacgtcctggaggaggaaatggcaacctgctccagcattcttgcctggaaaatcccatggacagacgagcctggtgggctacagtccatggagccacaaaggagttggacgtgacttagcgactaaacaacacccgtaacagataaccagggctcgttacattcgca

SEQ ID NO: 43694 - DNA, 1941 bp, Bovine  19866880979953
  misc_feature (1)..(1): n is a, c, g, or t
nccagcgcacgcaggtgtggaagagctacaactggggccttagcctccagacgctattccgtttctattatcaccgtcacggtcactattttccctaccacgccagagctccttatcttcgtcattcctacaggcaaacaactcttcttggaggaaaagaatcttatttctaggcctggacacagttgaccggtatggctaagagcgggagttgcggagtcgattcaaagttcaaagcctgactcgccacttgcaggaagtgtaacggtgagcaagagaattccctccaccgggagcctcagggtcctcccacaaaacgggaaatacagcaattccctcgccgggttctggcgagggttcaataggataacgcttgcgaagcacctggcgagcagtaagcgctccgaggaccggagacgcgctgggaaactgaggtttggaggccttggcgctttttattacctccgaggaccgaggaggtgggctggggcctgggaacccgagggagagagcccgccgcccccgcccacgcccgcgcccacctgctcctccagccgctctatctccagctggttcttctcctcttcgtcgtacccccactcgtactccccgggggagctctcggccgaggaagccatggcgtactcctcatctccatcgctctcactcacgccttcctcctgctggtcccactctggccccatggtcttgtacgtcgcggcggccacggcccgcgataacaccttcctcctcgcccgagccgccttagcctcatcctgctctccctcagcctcgggcccggccttgggctcagcctccgcttcagaagccgatgctgcggccgccgtcgccatcttggactttcagagactcccgggtcctcacttggccgccaaagacccgcagtagtaggagctgcccgcggcgcgcgcctggtcaaaatcccgctcgtctgccacctgaagagaaactatgcgccttggatgacatggaaatctctagatacacgagattcatgttattttatatactttcagtagctcttgttcggaaaagaaagctcaccaacagggcatgccttccggcacaacgtcggacagcacttgggcccttaggcaggaagtggaagccatagaggcaaccacggactgagcgtgatggttgtagttaagggtttggcgccatcttgagaaggtcaaaaatgattcttggaataaataccttaccacctagtctgacctggcgcgtgattcagtctccccagcaactgagcctcaaacgcgcagaaaagtcttaagtcctcagggaaggatcgattgcaccattaatgagaataactcatttcccagagattccttctctttatttaatgcctggcgcctagcacttaaatacacgtgtgagttttgatttttaggatcatattctgcaaaccagtatcaataaattacattaataaacatttacttagaatctcttcattgctatatcttgtgatttaatctgtgccactttgctttttaatagagacataaacatatacactttttaaaatcagagcaacgtattcttgcctttagttaagcttctcactttagagatagaaaagccttgatgggtctatttattgccttgctccctcattagcaagcttaatcgtgtcgttttgggttgttttcccaaagcaccctaagtagatactcaacacaagatttgctcaatggatttagaactgtccttgaattagtacaaaaaagatcgaggtttacaaagacgctatctttcacctaggagcacacagccagttaggagcagaaacgagattctaactcaggactgttcaagtcagaatcccaactgggcccctctgcgcaacctagggcaagttactaaaccgttctgatcctcaaattcctaaactgcagaatagagccaagaagg

SEQ ID NO: 43695 - DNA, 721 bp, Bovine  19866880991989
  misc_feature (1)..(1): n is a, c, g, or t
natgctgatgacgaggtattttttttagccttaaatagattatttacaatgtatctagataattgggcccttactgttataatgggttaaaaccagatgtatctgtgtgattaggaaaaaatctagcatgtgtatagtctgctttccttattttgcggaagcgtttccctgctcctgcatcatctcacagcatccctggagattcaggacaactgccgctcccatggcagaagaccagggggacggggatgatgatcagtcacccagcagcccacatatctggacttccaggcttgcgaccatctcaagaggtccctggagagtgggccttaggaaaaggaagggtacatctacatgatggtctgggtcccccaggggatggctctggccttggatgcagtgggagggagatgtggattccaaacctccctggggtgggaatgtacattgcttgaacacctactgtgagctggggggctgtgccaggcacttcgcaggccctgtcttgggcagtgcacacaagaagcctggagaggaggaattaccagctcctttatatacacgggaacaagggaggctctgagacatgcagccacctgccccagcccacacagtgggcatccgtggcaggattcgaacttgcatctatcccagactgagcctggctcctgccctcctggcaaaccctttaagagcacctaatctgcgcatctccagtgtt

SEQ ID NO: 43696 - DNA, 1181 bp, Bovine  19866881207944
  misc_feature (1)..(1): n is a, c, g, or t
nactgattcctcagagtaagatttggaataggtgcatcgtggtcacccaggtcaggctgaggaccatgcttccctggcgggcaggctggcgacactcccagacaagaccctggtgtcagctgaacccagcggaggcccaggcagtccccattccactgggccaggtgtgtgtgcgtcccgaggactgggaagtcctgctacggacacaaacagactgtgagttctccagaccgcgagcatcagggagaaaggagcagcgtgaagcttctctgctcccggcaggtgtcccttcccgacttcatcgcagaccccagctctgatggggaaaggagcgtccctgtgatacccgagcctggggcaacacgtgcccaggtcacgtggccttcacctgcctggccaaccgtagctttgtgcacctgcccttctgccgctgcgtactctgaaatctgccatcaaagagaggtgccgggtgtgaacagtgccccctttgaatgtttggttgtaagcagacctttggtcagaggccagggactgggccacggctacggctgtaaatgtgaatgatctctaggcacattctctacccctgcttcttcacattgtaaattattaggcgttagttagcagccaaataatcttatttctagcattcagttatttacagtcacttcttttttttgcaaaaacccgagtcaaactcatagtttatgccataataactgttgatttatgtatttgctaaggtaccttttgtatctgctgtattatagcaataaaagaatcattttgttaggaaaaacatcaactggtattctttcataattcaccagtctgatacaaatgtcctctttctctgagttctgcgttgtacccgtaagaagccctgtgcttgggtgaaacccgttccgtgttccctgttggtaaaagagacagcagctccctctaggagtggagagcgaaggagccaacagaagcgcttgctgttaacaatgttgttcgctttgtagtaggcaggattttccgaaatgtcagattgacccggggagccagaaccttctttcggactgggagactgtggtaccagtgagtgttggtcgggtggttcatcatgagtaagctgccatgggccagctggagcctgaccacctccagcctccgggacgggtgcttcccccgggaat

SEQ ID NO: 43697 - DNA, 1757 bp, Bovine  19866881241794
  misc_feature (1)..(1): n is a, c, g, or t
ngttacacttgaactcctcaattttatggtggaagccgaggctgataggaaagacggggccatgacacaaatccaagtttctagattccttatccaccaacacaacactttctcaggtaaaagtactttgggaaaaggagtgaggagcaaggagggaaaactctttaaaagccatcttttattctcaagacaatttctggatccgttccatctcagttatccattgccgtaagaaatagcccctaaacttagcagcttaagacacgggaagtcacacactgtcacttctgccaagctctactggtcacaacacagaccacacttggtaaaaagtatgggaggggactacctaaggttaatggagaagtggagatcactggggaccatctcggaagctgccgaccctacacccacggcccctgcccttcctcggttccaagaggtctgcccaacagcccgacagcttggactgcaggttccctgggcagggagtctttgcaggtgtgagtttctccacctgtgagaacagtgggatcccagttaccaaccgccgttcctccagttgtttaatgaaagctttctagccatgttactctcattggccccaggagctgccttgcctactcctgcctgaaaacatggtcatgtcgatgtggagaccggctctgatactcgagaccctgctttagatcacagcttctaaaaggtgtggctaacacccgctcctcttcccacacggtgatggtgactcagggtgaccactaaccagcatggagtgtggaccctgaggtgccaccgcctgcatcctcagatttccctgcctcacctgattccaggttgcccttcccgccacgtccatcagccaggcatctggtgcctgggagatgctgggtagaaggctgcagaccacctgggtgcagacagcaggccttttgggcgcatcctaaaaactctccgtgaaagcttcctgttgccatagtaacgtgttgacatgggaattaacatgggtcccttgctagccaagaaaaccaagcttttaaaacccattcctctctttcaaatagataagaattcctaggaggcctttggagggacatcaaagcctctttttcaggtgttgaggaaatgctcgttaaaaattactgtgaaatgagtgcagccctaatcagggagatggtggagggtttggagctcttagaggaattagaggcatcagcttagagccaaggcaacttaaaaaaaaaaaaaaaaagcttttctgagatataatttgcacagcacagtccacccatttaaaggtatgcaattccatggttttttaatacacttagaattgtaaagccatccccacaatgcagagacctgggttcgatccctggatcaggaagatcccctggaggtagggcacggcaacccactccagtattcttgcctggagaatcccctaggcagaggagcctggcgggttataatccattaggtcgcagggagtcagaggtgactgagcacagaattgtaaagccatccccacagtcaattttaggactttttatcactcctcctgaaaagaaacccccatcccttcagcagtcactctcatttctcccccactgtccttcctcagcccccagtgatctattttcggtctgtgtaaatttctctattctggacaattcctagaaatggaatcatacaatacgtggtcttttgtgactgtttcctttcagtgtttttattcttcttgcttccttaagctt

SEQ ID NO: 43698 - DNA, 2422 bp, Bovine  19866881245361
  misc_feature (1)..(1): n is a, c, g, or t
nttgagcggctgttgtgtgggtcatctcagcctgttgcctggtctggtgggagggttagggaagggatggtacagcatttaaaagcccaggctttggggcagatggacctatggtcaagtattaactcctcttccaaaagaccctccgtctcccatcattcctccaggaaggtctctctggcgggatggagaagcctttctcccaagcctagactaagtgtggtacacaagaaagggcagcctaaatagggacatagtctgggctcccccagctgggtggactcgagcaacttagctcggcagtcagcatattagtcagtgctcctgtgatggcaggtgacaaaaaacccaccttcaatcagcttcagccaaagaagaaaatgtagtgtgtcttgtccccaaactaccgaagagcctaggttgtcaaatgaatgaattgtgccattctcttcctaactctcatctctgcttgcttctgacttagcttggttctcctgcacagactgactttgttccagggatcttggctgttggtaattctgggcttagaaaataccagtgtcacaactcaagggagacaggcttctttctcccagctttaatctaaaagaatccaaaaggtaggtcctgtgtccttccccggagccatcaatcactggctggtggcaggtgaatatgatcggctcttccaaggtcagcgtctccccaagatgagagcaggtaggggctccccaggtggcactagtggtacaaatccgcctgccagggacggaggcgcaggttccatccctggctcgggaaggtcccctggacaaggcaatggcgacccactccagtagtcttgcctggaaaatcccatggacagaggagcctggcaggcgggctacagtccatgggggttgcaaagagtgggacatgagtgagcatgcacacgtgtgtgcaacagaagaacacaaggacagggtgctttgaaggcacaaagagtaccaggacagcccacccattcacccgtgtgtacatatgctcacacacctattaatttgattataaaactctcatctaacacaatccaaaatcccacctatagtcaaatgcacccaccctcaccctctggcgagaccacccatggtcatagtacttccagctccaagcccagcatttctgggttgtgagcactcatctccctcaggactcagtgtggcaccttatgatcctgaggcctgtggatcaaatggaagtgaagcctcctcaaatgtacaatggctggaggacagatctgggcttaaatttgaagcgagatgcttccaagccataggcacacagacagattgcatcatttcgaattctacttagaaacaagtaagatggagtaacatgagtggggaccagccagaaagcatatacgtatgccagatacaaagattcacttctaagacagggagatgggacagtcattaggatcagtctcttcatctataagatggattaataagaagggtgtgaggaccaaatctttctaaatgaggaatggcacatagtagacagcacatagtaggtactcgatgcatattctccctctcacacacacacagcttttgacctgatgacaatgacctcattctggcaaaataaacaatggctccctccctttccctttcccttcctctccttcctcctttttctttctcctcctgcccatccttggacactctgtcctctagtgaactattgaactaaggttacttgccaaccatggcccatggaagttctctctcccagcccagatgcaaacttcacacacacacacacacacacacacacacacacacacacacacccccctccccgggccatgcttccctctgtgacacaggagagtcatccattgttgaacaagcacagggacaagatgtcggcttttccagagctgtcaccgtctgacgtccctgctccagggaggcaatgtttcttttaaagatggactgtttttagttgaccaaatcacctctgtcttatgaaagaaattcaaggtgatcagggttgagacacatctccagcgaggctgacaaattctgcacctcctagggcggcgttgaggggacacaatttctccttaacgagcctgtatcctctgctagaccctgttctccatcacgagttggggcaggggagtggcgaggagcccacagtttaaatagacagcagcctaggcctgaacgagatcaagtggcatgtagcattttcctcaatcattctccaggagggccatttaattccaagggctggctgggtcctcaggctcacctccagtgactcccaaatgcaagagcactgggttggggtccgatagacctaaatttaaatctttattctaccgtcagttagtttcaggtctgggacagctcacttcacctttctgggc

SEQ ID NO: 43699 - DNA, 1651 bp, Bovine  19866881253899
  misc_feature (1)..(1): n is a, c, g, or t
ncctcagtttcctcttttacattgatggggaatattaataattccctcacaggctcattctaaggatccacagagacagtatgagtaaagcacttagcaaagtgcatgtccaaattaataatgattgtaaggacccacgggaaaagccttgatagactgtaaagtaccgtcttcgtgtactatttaccatgacgtgtaagaacacacgtactaatctaagaaaactaagtgaatggtgtatcattggatggttgtttaacataattcaagattttcctctgagggactcccagggtggtccagagtttaagactttcctcttgcagtgcagtgggtgtgagttcggtccctggttgagaagctaagatcccacctgcctcacggccaaaaacccaaaacagaaagcagaagccatattgtagcaaattcaataaagactttataaaaatgatccacatcaaacagaatctttaaaaaaaaattttccttctggatgaaagcctttaccttggctcacaaggtgggaaaagtgggaagaacttcaaacagcgccgtgaatggctggtttcttatgccactcaccttaacgacgtgcctattatatgcaagaccctgtggaggacatgtttatgcagataagtccattttaacctcactggcccgatattttcatccccacagtgaaggaaactgggcctcagagagattaagcggcccaaatgctctggaatgtccccaaagtgagacagtgatttggatattgaggtgtccaagtccagtgttccttccaagaaaaaaaataaccttaagtcatcttgtagaaatgacggcaggctgtcaacggatcaagctcttcagagctgtcttaataagagtcccgtgtgcttggcacttagggaatgaggctagctcgggttgctgggtgcccagttgccatcagtagagcccaggggtgtgcccttaaccctggctatgcaaggtcccttcctcccctctgttggcctccaaggcccacagccttacccacgggactccactgcccccgtagaccaagctctgccagtgcacacgagtttcaggctctcttgtttccactttactgctcagaggaaggaactggtaccaagaggtcaacaaagccacatagccagaggcatactcatcacttctgaaacgctttcagctttgtctccttcccccaccaccccagatcttacttttctcatcttcccaaagctaagtacattggctgctacctggatgacacccagagccgggcccttcgaggcgtgtcctttttcgactacaaaaagatgaccgtcttccgttgccaggacaactgtgcagaacggtagggtcccaggctccctgcattcagacctcttcttttgcagcttcctacctgtggtggtctttctttttttccgtgggagggcatatgaaggatgcatatgaaggactttaagggaagggtgaggcaacggtgtgtgtgtgtgtgggcatgcgtgtgcacattctcttgcctgaaaaatcccatggacggaggagcctgtctcatggacgctggagatcaagagtagggagttggtctgtaggaatctgtgtgcagttatgtgaggctgtgcctaggtgtgagtttacagtgtacact

SEQ ID NO: 43700 - DNA, 2436 bp, Bovine  19866881283340
  misc_feature (1)..(1): n is a, c, g, or t
nggggtccctgagcaggtccccctgccaccaaaaccaggctcgcggctggaaggagaatcacccagaggacaatgcttttccgttttttggttttatctccaacttggctgcggaaaccccagcagagtccagttcttgtgggctggagccattttctcctttataaaactaggccatattgagaatgtcctgccgttcagggccacgggccgcagttgccaggaggcaaggtccgtgggaggagagttgtgagcaaagaggagggaaagttgaatttggcccttctgggcacaaaaagtccccttgttctgccttagcaggagccggcaaaatatttccctgctgtgcacggaccaagcagcttcaaggtcaaaagctgctaggtcttctaaatttctgaggacacccagcagcccagtatccccagggaggcctggaggtgatgcactctgaaggtctgagttctggggccaaaaaatgcatcccagatactcacagctgccagcctggcacacagtaggtgtgcagtaaatgcgtatcgagtttacttgaattaaaatgaaatcctggcagcagcatttactggctgtgtgaccttctgtaagatactccacctttctgagtctttgtttccttatctgtagaatgggatcgataacaccagcccctaactcttaacgtgggagatttaggtgcagtgacgcacaagaagtgtttagcgcagggctggcccacagtaggtgctccagaaatgtcaggaaatcgcttcttttgccctggacactgtgttaagctttttacatctgctgccttgtgaaaacttccatctactctctgaggcatgaattcgttttctcatttctccagagaaagaatttgagtcttgagaggcatcttacccaaggtcatggccagcagacagcagagctgagacctgagatttgaagcccactgtcctaaccactggactttcctggtagctcagatggtaaagagtcagcctgcagtgtgcgaggcccggggttcaattccaaggttggcaagatccccgctgcccccggagaagtgaatgactacccactccagtattcttgcctggagaattccacggacagaggagccttgagggctacagttcatggggttgcaaagagtcagacacgatttatagactaaacacacacacacactatcctaaccactagactacctagccaacagctgggctaggcactctgctgtgtactttttattctcccagcctggggacaggatactcgaggaggctccccagagaaagctgcatcatttactggctgtgtggcctcaggcaagtggctttgcctctctgggcctcagttttcccctgggtaagggtcaacacaaggctcaagtataaaaagggctgggcagtgtcaggcatcttctaagccatcagtggatggtgttgataacgatgaaggtgacggtgagggtggcccacctcaacccttccttcccgcaggctggcacgatgcgcgtggtcgtgatcggagcgggcgtcatcgggctgtccaccgccctctgcatccatgagcgctatcgctcggtccctgaagtcgctggatgtgatggtctatgcagaccgcttcaccccactcaccaccaccgacgtggctgccggcctctggcagccctacctctcggagcccagcaacccacaggaggcgtgagtgagggtcctagcgggtggtcggggcagagcctgcagagaggatgtcccttctcagggttcctgtccccaagaatgactcttccttgaggctttgtcctgacgtgctgtaaagacaatactagcacacattaagtccttgctgtgtgccagacagatgctacacttgaccgtggccgaaaggccaagaggccatgtgtgtcagacagatgaaggttttgtctccatctcttccttaaactgggtggcagtcagtgcccagtgcatccggctatcaggaagacgtctaagtgggtggactgatgttcaagtttagcaaagaagtggcagaggtcattgtttcagtttagaaactgccgactgcttcaacacaggaaccctcaaatgaatattggctcgattagaagtttcatcttcatgcccataaattatgaaaccaatattcctgatcagtgggtggcatttcaggggcctgacctccttccatctcatggctctgtcatcctgctcgtggctttcaatgttgccaggagccagtgaatgactgtggaaggagagagcatgagggccaccagggaggagtctttagagtccattggccagaatgcggccacatggctgcagccacccctaactgcaagggagtctaggaaacgtggtcgagctgtgtgcccaggagaaagataaagcgtttggaagcagtgagcgatgtcttgggcgttta

SEQ ID NO: 43701 - DNA, 887 bp, Bovine  19866881353426
  misc_feature (1)..(1): n is a, c, g, or t
naaaaaaaaaaacttccttaccctaatcgcgtctcagaccctaatttaaggtactgaggtgaattacatgatggttcaagcaaaatctttgggttgacagttatttcctcaagctcttctcttctttcaatagaaaaattatgtaaaacaaatgttccctgctattttggtaaattatatgctatatatacacaacaaatgccaggaagttgtgagccagcttgtttcaaagccctcgtatagttaacatatgccactgctattttctttttctttcacattacactttttttccccttggaaaatcttggctcatgtcactgataactgcttttaggaacccatctgattcaaaatgtcgtctggctttctgagtgtaatttaatgtcagaggtctctctttacatccgtcttaagacaagttttaataaataaagggccctggcttctagtggattgccagagaaggaatgtgaacagatcctggcttaaagcgccagggagctaagccatttctcaaagtcaaatttcacaaaggtcagtgtcctccatgctcaaggtacaaaggtgacctgaacgcagctgggttggagggaagccaatattgacacaaagcctccacagttttctgttcatcgagctcagtttatcttcacgacgttcctgcaagcctgtcttcatcccgcttcacagatgaacgtgtctgtaacatgcttagctaatgttacagattgacaagcgttctgtgaatagtcgctattgtgatttatgttgattatttaagttaatagatgtgcaggtttaaaaatttacatattacagagggatccaaaatgaaaagtaaaatttctttccctcaaaactccccatccccatccgtcctcctt

SEQ ID NO: 43702 - DNA, 790 bp, Bovine  19866881367890
  misc_feature (1)..(1): n is a, c, g, or t
ngcttgctttttatgagtaggcgacaggcgtggctggtgcttatcaaggccctgtgcgtgtggtttctccactagaaccttccatagggcagagctggtgggctcccattgaacagatgaggccaaggaaggggttaaccagactcaacttcctgtcccatgaaattgctggacgccatagtgtatatccacctttaggttattatcatacttttgagaaacaaatgtttggcagaaccctttcacgtgtttttacagaggctggactggagttggtggcaggggctggtggaagggctgagcctttcagtccaggcctggcgtgcttgctcgccagccgaggggcctcagccagctccctcggtgcctctgtttcctcctcctttagggaggggaggtggtcagtactgacgtgcacgtgtgcacacacaggtgcgcacacacagtcacaacctttgatgtgagtggcatgtggggtgtagctgggttcactgagcccccgccctccctcacttttccttcctgcagtctgtgtgtaaagtgcctctttgctttctcacccaggagaaggagaaagcacacgaaggagcccgacccatgagagccatcttcctggctgatggcaatgtcttcaccactggcttcagtcgcatgagcgagcggcagctggctctctggaacccggtatgtaccatcgcggccctgctaccgcttcgcagcctcgagctctcccttttctgagcgcgccttgagatgggtcagtagatgatagggttcttggtgtcatatg

SEQ ID NO: 43703 - DNA, 1377 bp, Bovine  19866881489441
  misc_feature (1)..(1): n is a, c, g, or t
nggccccactttcctgacggcaggggactttaagaggaagcctgtttaggacatatttcgtaactatgagcttgggcactacccccactacccccacttgggcagttctcggttcctggaaggcagagcgcttagccacttcctggaagcagaaagggagaacaaaaacagaagacccaacccaccggctcccgggtcagggaggtacctgggtgagtcagggagattgggagggtactgtggaaggggccaggttgtgttccccaaggtgggctgtccccctgcacccatcccttcacacggaggcagcctggggtggaagagagaccactgagctgctgtataacctgagcagatcgctttaccaagtctgagcctcggtttcctcatctgtaagatgggtggtattgtctcaaagatgagaacagaatgagatgctgcaggaaggtcccttgatgctggcatccagcagggggctatggacagaggaacagaggagatggggggcgggcctcttgactccgggagggtacggaggtggcgacctccctacctctctacattagggaagctgcaaagacctatgtgagagcagagacttccctgcctgttcgggatgcaacagggagccctgggaaaagccagtatctccctgcctgggcctaagccgaccagctcgtcccaaatgttcccagtgttagcactgaccatccctcgtccccatcagtctcaggcaaccaggaccctgggacctgccatactgtgggcttcaagaggaaggttaccggggatacagcaccctggagccaggctgcagctgggcaggcctcacccatatgactgaaacccgcacggttcccagaggctctgtgactgcaaagagcctcgcaggtaacaaggagaggagcagagtgcaagcagcatctgtggcaggtaggataatgactttcatctttgctaggacacgtgtaccctaacgaaacaagacggcataaacccccactgtggatggatcgtttcaccagctcatcatgtgggggacccgttcgcctacccacctggcgtgggccgctctggttcctgttacacagattagggaagcgaggctgagggtagtgaagccatttccttcagcccccaccttttgcctcttctctcctctgatggcaggaaaatagttgcttaccaccggagaggggtgggtggggcacagagaggggcagagagatgccacatcctatttatctcatcgcttgcccgacagaggtgatcagacactgcccgtttccttccaccctgaactggggtacttctgcctgagccgctctcaggcagtgtagactagagagctgccagggggccacccccacacccacc

SEQ ID NO: 43704 - DNA, 2103 bp, Bovine  19866881619430
  misc_feature (1)..(1): n is a, c, g, or t
ntatggttttttttttttggctgacaggtatctgatgtcctgaagaactaaactccagtcgctctgtcagtttagagaaatgtgaattgtagctaaataattccagttaccagaggaggattacaaaagtagtttctaaatggaaaaatatttcgacatgtaatggattagtcaagaagcatcatgagaaagcagagatattctcaacatcgtgtttaaaaagtaacacacacatgatttccgattaaagtggaaacggagaccatctttaaagaaaaggggggtgagaaagccttcccacctcacttttctgagtttttaaatgcctctcacttcagccccacagtatggggagtccaaaggctctggtccaagggatggacagtggaggcggcggtggccagcacaaagctggccggggccagcctggaacactagcggatgggaggaggtgctgccggaagtgcacacccacgggggcgaaactgtcggtccccagagcttcacgctgtcagccccagcgctgtcttctggagaaggggagaaggtagagtcactcacgtctctctgaaggcctcacgtgtccccatcagccactgaagtgcaaagtcactcgagaactaaaaagatctcccctccctggcgacagcgtgcctacgccctgtcctgtgaatcttctctgtccccaatcacaacctggtctcaggacactcaggctgtctgaaacgtcacagaaacatccacacaggcctggccactaactgcaaggtcaaggctggcatttactcctcccgctgcagcgaagcagctgtttctggagctgaggccccagctcatgaatgggaaggagtctccgaggaaacctgttttgaatatcgtgttcacctgctcttcaaacgaagagatctgccatcggtacattcttaagacgtccaacaagcagcttgcatccaagacctcttcgtcagtgacctcttggcaggataaagctggaatcaaaaaaggcaacagttattaagtgaaccaacacaacaactaaccaagaaaacctgtgcagaaagatgtgtcaaagctaattaaaaatggaaggactggaaaattcaccctggaattatatctcttttgttactcttccctgtagccttacccagttaggacgctggtagacacctggaatttgctgaatgaatgtaatttttcatgcggccgcagcatttagtaaccgactttcagatatctgaattactatcatcaacagaaacttactgttgcaagattaatgttgaataaaatgagtttaactctcaacttggagggacaggagggcccttaaacatctaactgttcccccctacactttctgtctagctccttctctacaggactgtcccaggaccattaggccttgtttgcatctgaatttctattactacaaagcatcaagctctatgaggcagcctgaaggagtcctctgaatggtttacttttttctttttgtcattgttgtttttcgtcgcgccacctggcttttgggatcttaactcctagagtagatattgaacccagccttcagcagtgaaaacaccaaggcctaacgcctggacaaccagggaattcaatctgagtagaatcaagcttaacagatacacataaaagtttgatgagcttatgaatttatactgcaattaaatctacatcaggggttggcaaacttttgctgtaaaaggtcagctagtaaacattttaggcttggcaggtctctgtagcaactactcaactctgccactataacacaaaaagcagtcatagatgatagatatataatatgtaatattatatagatatgtaatattataaagatggtacataatagtatatattacatagatacataagcaatattacatagataaaatgtaaacaaatggacatggctgtgtttcaataaagttttattcacaaaaacaggtggcatgcaaatttggccctggggccaaagtttattgattcctgatcctgaccacccccttccctgagcatattattaagtgttgggggccagagtgaggtactccgcccatggcaaaggtcatgaggaaggag

SEQ ID NO: 43705 - DNA, 996 bp, Bovine  19866881804602
  misc_feature (1)..(1): n is a, c, g, or t
nttcccagcatcagggtcttttcgagtgagtccggtcttcgcatcaggtggccaaagtactggagcttcagcatcagcatcagtccttccaatgaatattcagggttgatttccttgcagtccaagggactcacaagactcttctctagtaccacagtttgaaagcatcagtctgcttctgtccaaacacccagggatgactctgggggcctcttgatccactcagcacactccctgacttcttagcaatgcctcctaccccagcagggtgcgggttgagatctttcttgggttcatcaaacatccccagctcatctgcccactgatccgaggggctatcatttatcccaaagcatcaccgggagtttctgatttattggtgacgggtcagctgtgttctttaggcagtttatggccgtgccattaaattttcagagattaagagcatgatgggaaagataaatgtagtgattctggggatcctgggagaccagttcctaggagaggcccccataccccttcatgctcacatcacgagtccctttttgctgctttcatgatgaaaggcatcctgtgaggaggagatttgctctcagaacagaaggagggccattcctggagttatagggtagtctcatgctagaatcatgaatatctgaatcagagaatcacagatggttagagcaagatgagctcttaaacccacgtagtccagccctctcattttactgatgaagaagcggaggtcccaggtggggaagtggcctaaccaggagcattcaaccagaaggctgtatcctgactctatttttccagtccccctcttgtggctccaggatgctcttcttctagagatggggattaacttcacagttgaggaaaaggggatctcacatcttcatcagcacccccaccaccttacagaaaaagaagctgaggttcagagaagatatctgacctcctgagtattaatttcactgagacccctaggttttg

SEQ ID NO: 43706 - DNA, 1895 bp, Bovine  19866880488700
  misc_feature (1)..(1): n is a, c, g, or t
nttcaccagcccgctctctccccagcactgacgtcttcatttgcacgagccccatcaagatgtacaagtactgtcccttcgagaaggtgagacacctgctgcggggcctctgctcaccttgcctgcgtcctggggaagggttgggaccctccccatccagcccacctgggggtctgggccggggcctcctcccaaacgttaaaaaaaagaaggaaggaaattctgtcaactatagatgtttctctgacttttcttgatttttcaaaatctctttgattagccattactttagcgataaaaaagtaaatacatttgtcactcaggaaacagttaccaggcccttgctacaacactgggcatctggggctgaaaaatgcctctctctgctcttgggagctgaggacagcgcggcaggaaaagagacaggtgtccccggctctgtgctccagcagggaggaagtccagaagcccaggctggctctctggggaagggaggaactgggaggaccagttgtgagtggtgggacagctgagcaaaggccaagagacctgggggaggcacaggggcagaagcaggaaggggagggagaggctgaaaggcagggcctttacagaaccattggtttgggcttcaagcaacaggcaccccaaggcctctgaagggtttttaagcaaagccaggcctggagtgtccaagtcctggatggcccagatgtcagcttgtactcacccagcttggcaaggagacagccttgtgaacccatttagtgaacctaacagcacccagttattctgggatgttcatgttactttgtgaccatggaggggctttaagagaagtgggccatttgtgcagattccccatctgctggggaaggtcacttggagcagggtgttggcggagcccccagacacgcctgtacccctggctctggcactgcacacccactcccgctgtgggtccagttctcatgtggcctccagaccaaagctcaggtagggctggaaggcaggctggtcagggcttctggaagggacgacgcacctaagggttgcatcccttttccttgagctggagccttgcagggtgcatgggggacctgagctgggttggggtgtttggtcagagccgcggtactgccgcttcgtagctgtggactgggacggctctgtggtcccctgcacgtgggtagtctccctggtggtgccctggcctcatagcgcccccccccccttcttggcccgctctcgttccagtatgcctgggtggagaagcactttggccctgacttcctggagcagattgtgctgaccagagacaagaccgtggtctccgctgacctcctcatagacgaccgggtggacatcacaggcaagtggcctgaagtaggggaggggcaggcatgggggccccaacccgagtgcccatcccccagccccatagtcaccagatctgtgtgaggcatcctgtccagccttgaaccttgagctgagcctcctccctttcagagagacaagcttcttccccacacgcacccccagggagtcagggagagtggtccagccccggggtaatgcactggggcagccttgatcgcgtcaccatacaccttgaagccttgccttcctgttaaatgagggccagactctggctgccaaacatttctttttagcaacagaatcctttcttttttcctcaaaagtaatttggactgaatctaatatgtaaaccaggaaagcaaaacctaatttctgtagttgaaggtggtttggagctgtatttttcccttttgcttatgggtgtccccctccccccaaaataaacaaaccttgagtttgcttattaaggcgagggggaatgattggttcaccaaactgaaaagctaacgtgggag

SEQ ID NO: 43707 - DNA, 1291 bp, Bovine  19866880524901
  misc_feature (1)..(1): n is a, c, g, or t
nggacagaacatgcaaaggcacaggcaagagccggtgggggcgcagcccctgggcacacccccagtgcctgcacacctccctctggatggggcagccaggctatgaccctccttcctgcccgccctgtttgcaggcgactacttcgggatcctcaaggaggccagagtgaccatgttcccgttcagcgtcctggacaaccccatgtactggggcagcacagccatctacctgggctgggccattgtgtgagtcagccctcgtgccccatggagcccagggtgctggttagggttcctttcctggggagctcctcactggtgggagcagagaacatcctagaatgaggttggcagactttctcttaaaagagtgggaggctcctgggcagcaggtgacggagtggctgtggttgtgaaatttgaatttcacgtcattttcacaagtcacaaaatattcttttgattttcttaaacaactacaaatataaaaactgttcttggcctagggaccacaggctgccaacccagtgctggaactgggcagggaggccccctgcccacagccagcctgcaggatccacaccccacagactagggctcctccggccagtaacccacagtccaggagcctggtacacgtgccccccacggcatctcccatctgtccattttctggattagaatttcttccatagaaaggttttctttgtagaaacaattctgcttttactgaacgctagaaaacaactttccaggaaggtcacaggtgcccccagagtccagaaggacgaaaggacctaaaggaacaaaccttgatggtggaccgtctggagcggacgttcccccaccagccccaccttcaggggtgggggggtacatgggatccaggctctgggctttgagtgacaaggagctggaggggcacttgtgggtctgctgggaccccccgcctgtgcccacttcagaccaggaagccccccatccacctgccttcagcctggcccctctctcctggactagggcagtgggatccagggaggcaggctccccccacaggcttacccactccccatagtgtctcctacctgagactggcagggtgaaccccacagaggtccttctgcaaacttccctgccagcacacccacctttcctctcactttcactcccagtcaatctttccaaacccaacttgaggtgtcccctcctccaagaagtcctccctgacctcctgatatacacacacatacaggttcttcctactggcttagacggggcctcccagggcaaa

SEQ ID NO: 43708 - DNA, 2674 bp, Bovine  19866880749669
  misc_feature (1)..(1): n is a, c, g, or t
nctccctggtcggttttgaggacacttccgacctcaggggcactgtgttctcgtctctgctggggctgctgtcccccagctcctcctcccctggggccacgtcctccagccccgagcagggcaggcccggaggcatgacagcagtctggcactgcaggcccacacgagcaaggctgtcctcaacatcctccaaaggactctgtggccactcgctgttcgatctctccctctgcctggagtttcccgtctgcctcatctaggctgctccccagggtggacggccccagcacagcctgctgcaggccccgcccctccctctccagcgccttctcgtgtgcgtcctgcaggcgccgcagctcctcctccttctcttggagcctcgtgtgtgcgccctggagctggccggccactctcctgaaggagtgctccaggctctggtagtcagcctcccttcccctcagcttctcctgcagtgcagctacatccccatcggacagggtgacacggcccagcagctcttggaagcgctgttgcgtcaggtcgcgctcatcgcgcaggctctgcacatgctcggccagcttctggatgctggcctccttcatctccagctgctcctccagccgctgcactgcctcgctgccctcggacccggggctcagcttctcctcctgcagcgcctccacccggtgctcgtgctcctgcagccgcccctcgaaggcgcgggccctgtcctctgcttccgccaggctccgaagtagctcctgcttctcccgctcgcagctccccagcagcagctcatagttcctctgcagtttctcctccatcagcctctgggcccgctcgctggcacccagctgctggctgaggtcggtgatgcgctcctgcaactgctgtacctccttgtgccggtcccgctgcagcgcctgctgccgttccaggtcccgcagctcctgagtcctccccagcagcagggcctctgcgctctggagctttcgctcgctggtgcgcagctgggcgctgagcgcggcctcgctctgctgccactcctccagctgctctcgcaccttgtccttctccagcttcagctcgccctggagcttggccagcgcctgctccttgatggcaagctcggcggcagcgttgcccagccgcaccttggaggctccggatctcggcctcgtgatgccggatcgcatccttggcctccccgtagctgcgcttcagggcctgaatctgccgtgtgatgagctcctggcgctggcactgggcctccagctcgccgtgcagatcctggttgactctgtggagcctctgccaggtgccggacggggaggtggccacttcggtcttaaaaaaaccgatgaaacacgtgttagtaacactcggcctcccagttctgagtgtcacacctctggccagggtcaaccacagaaaggctcctttgtgggtctgtcttttatcctttgcacaatttttttttccccatttaaaaaaaactaacaaatcatctcaattttttggtaagcagctgtttccagataaacagaaaacatgaacagtaacatcaaaacagctctaactgcacagcttctaggagaaataaaccaaacaaaactgaataatggagcagagtggtaagcaaacgaagactgcgggacgagagactctggcaggaggcgggggcaggagcagagcagagcatcatttgtttcgcaaaacaaaaggcacatggctctagaccacaaaccccacaagagcgcagcacccgacacgttgccccttccttctgggacaggagaaggaagggcggcaccgctggtggacgtcagtgaggtgacatccgagacactcgtgtgggaggtggcgcccgtcctccacagtgacaggaagaactaacctctacctgcaagaagacaaaacgagggggaacggaaaccatggagaaaaacgtgagagttaacaaaacaaacaaacctttgtggagttcaaaataacaaagtgaagcgtgcagaaaataaaacaattgaaacgaaactcctcaaactgaaaggcatgcaaaatacacagaactaattaacggaggaaaaaacaagaacacgaagggagtgagaacagctcagcctgagaactggcctgcccatggctccctcgaggtatgctggcggggaagccacaggtgtgacactcagttatgtaagttaagagacagtccacagccacacgtgccagctcctcctcccggctggcagcacggcgcccacccgccaccattaccgtcctcacccgtaaccctagaggccctcctcgctcacccagacttgagatcataagcacagtgaaagcagaggaggttaagaataaccgccctctgacctggcagggaagtattaacatgtctggcctggggtcagacacaggtgggttctgaggttagcaatgtgcaaaatctgctgccagtatcttctcggcctgatgtcggcaagcagcccaaccggggttttaaaaggtgctccccaaacctgcagggtctctgcacagatgtcccagaaagtcctggagtgacatgcgcaggaaagaggggtgcccccataccaggtcccagggcctcagggtctgaactgggcatggcaacaaccaggctgaaggctggaggagggcccagggcacatgggca

SEQ ID NO: 43709 - DNA, 1088 bp, Bovine  19866880945289
  misc_feature (1)..(1): n is a, c, g, or t
ntggagagaaggaacacgaagtgagggctgagggcagcgaaaggccccaatcctgcagagacggggacacggagctgctcagcgccggctgcggtgacggggctgggagcgcagctcctgccggggctgtggaaacctctggcccgtgcacacggcttccgcacaggtgtcacagctcacgcgctcgctccgacgcccggctgcgccgtgaccgcagccctaggccgctctcagagcagcctgtggttgtgtcgctgtctccaggagctgaacaaccgcctggctgcagaaatctcacggctacggacactgctgactggggacgccggtggcgaggccgctggttcgcccctcacacagggcaaggacgcctacgagttagaggtatggctcggagccaggcccttcaccagcttgcggcacacgagtcgcacgtgggaccaggggtggccccagcttatgggaaaacccaagtcacgccaggacacagagaacagttagccagacagcatgggacctctcgaggccccagggacctttacatttaacccaccctcactcccttgcccctctccctggtttccaccacatcacaagtgctgacctccaaaacggaacactgagcagctgcgtgacactgcagctccctcatttctctctctaggtcttgttaagggtcaaggaatcagaaattcagtacctgaaacaggagatcagctccctcaaggacgagttacagacagctttgcgggtaatgcacgtcccatgagggcctggagggtggggccacgtgggtcgagatcacacacacaggctcaagtgcgttcactgtcaggagtgttctggatgctggccctcgggcggggcagcggacatgagggagggcagtcctgcccccccttggcggggcccagggccccagcacacggccatttcctgcgggtgctcctggaggcggactcacttggggtggccaagaccggggtttccagcctgaagcacagaggtgctctcagggtcaaggcagcaccagcctgcccagagccggggccctgccatgcctgttgtactttgtgtctggtttctgc

SEQ ID NO: 43710 - DNA, 1447 bp, Bovine  19866880954164
  misc_feature (1)..(1): n is a, c, g, or t
naatggtttatctgggacaagtcaggagctgcctgtgagaaaaaggcctgtggctgtcactgaatgtaggctccaggcctgctctgtgctacgcaaggagcaccatggtaaacttctctccttggtcttgaaaatcaggcatttgcttagaataacttacagtttgctgggtaacagtaagggaggctggacctccttgctccgtagttagtgccatgtttccttttgcatctcacacaggctctgttctgctaactgtcgaatctggtttcttccccccgcacacctttagcctcttagcaatgcataccacgagttagcgcaagtgtactccaccaacaacccgtcggagctccgcagcctggtgaccaagcacagcgagatctttacacgggacaacaacatggggctggtgaagcagtgcctgtcctcgctatataagaagaacatccaaagactcaccaaggtgcagtcctgtgggcctccagagccaggctccgttctcctgtccttgttggcactgaggcagcagcgcagggtcccagccggtcctttggggaccttgaggggtgcctttccagggctagtatggggtatttgagaagaagagcaggtgaagaagaagtggggaggagatgtggctgctctgggaggcagacaggtagctgaagggagggaggtggcctgggcagatgctaagggtacagctgtgcggcccgggacctcacagcaggctaacccacctgtgggcgcttggctggtgcacttgcgctggggaaggtaagccaactgtgtagtttttattttttaagatgaaaatagacccagtggcttttgatgctggaaaatatgcttgttatcaagtgttaagactgtccaggaaagtgtaaaaagaaaacgaagccttatgttagccagggagatggaggtgttcactgcaggtaatgggaaaccggcaaagaacagctgcaatgagcagggaggggacagctcttccctcgagacacagccctgcaaggacgcagtggacaagatggctggctgccgggcaggcggggacacgggattgtcacgggggctcagacctgctccacaatcatgttctggggacgtttctctggatccgtctgctccatgtgtgcgaacactcccactgactataaccagggtcacatgctatgtgctgttctatatcctttcttctggtttccatggcaacgtaagcctgtatcacagtgactgtgcgttgtgctttgttgtacagacaatcataattttctcagccagttctcttctgatggacagtcaagtggaagtttcttactttgaaaggaaaaatgacagttctgtatatttcgaaatgttcacttttctagtcctcactggtgctaaactgcctagatactgcttagaattcacaggagtttcatttgggaaggaggtgcta

SEQ ID NO: 43711 - DNA, 815 bp, Bovine  19866881388834
  misc_feature (1)..(1): n is a, c, g, or t
nccttaccctccttggagatgcacaccctgggagtggcttgggcagcccctgccagggcaaggagccacatgtgctcatctggcacgtggaaaagccccctttcctagggcccctcactgggagagaaatgcctgcctcatcagtctgcttctgcacagatccagacaccaggctgcttttctctgagctgttctttattcctctctcttagcccgacctgctgaatttcaaaaaaggctggctgaccaagcagtatgaggatggccaggtgagtggctggaactgccgtggccccaggcactggggagcgggtgcaaggtctagctggccttgtccccatgggtgtgggagcgctggcccttgtctaccacctccaggattgtgaccacgaccccgtctcctcagaagtgggggtgtggtgggcagtgggtgcaccagcctgcctgctgccagcatgtggactgcttccccgctcctggtgggcatcagcctcaggcctggggatgcccttcaacctgagcttcccgcctggccacattctgcagaggtttcctgagagcccaggttccccaagaacaggctccctggttgtgaggtggtaggcagcagctgagatgcagccacaggtctgggaggagctggcggacttgagcagaaagaacgagccactagtggctgctgggggtggagatcaggcctccaggaggcaggagaagcctcgggtccctctgcgagacccccggatgcccctccccgccctccttctctctctctctctctctccctctctctctccctctctccccctctctcc

SEQ ID NO: 43712 - DNA, 1311 bp, Bovine  19866880263728
  misc_feature (1)..(1): n is a, c, g, or t
nctggaattagattgccggagaaatataataacctcagatatgcagatgacaccacccttatggcagaaagtgaagaggaacctaaagcctcttgatgaaagtgaaagaggagagtgaaaaagttggcttaaagctcaacattcagaaaacaaagatcatggcatctggtcccatcacttcatgggaaatagatggggaaacagtggaaacagtgtcagactttatttttttgggctccaaaatcactgtagatgatgattgcagccatgaaattaaaagacacttacttcttggaatgaaagttatgaccaacctagatagcatattgaaaagcacagacattactttgccaacaaaggtccgtctagtcaaggctatggtttttcctgtggtcatgtatggatgtgagagttggactgtaaagaattgatgcttttgaactgtgttgtttgagaagactcttgagagtcccttggactgcaaggagatccaaccagtccattctaaaggagatcagccctgggatttctttgaaaggaatgatgctaaagctgaaactccagtactttggccacctcatgtgaagagttgactcattggaaaagactgtgatgctgagagggtttggggtcagaaggaaaaggggagatgagatggttggatggcatcaccgactcgatggacatgagtttgagtgaactccgggtgttggtgatggcgtgctgcgattcacggggtcacaaagagtcagacacgactgagcgactgaactgaactgaaccaaggggtaaggcccgtgctctcatcagccacaatgcatactgatcatctggatggtcagaccagtgaaaacagctgagcatcagccctgagttttggctaaccttgatgtactaatagcacaatgccacaggacctttgcatgtgatattcactctgcctgaaatgatttctctcccttcttcaccaaacttgcctctgagtcactgaggtaagctaattccagtcaacctatgcatgagggtgtcccaggaatactaattttccatgtagacccaatggtccttggtctcactacttcagcagcagcactgattaaacactagcagtatgcagcacattgaaacatttatatctgtatttctctatgtggggagacaatgatggaagttcagcaacaattcccaaggtgattccttggtctctatccaccccattgccaccacaatccccaagaaagttattactttgactaggcatgatctcacatgtcaatgaattatatgtataaaccaagggatgctattgaa

SEQ ID NO: 43713 - DNA, 778 bp, Bovine  19866880355054
  misc_feature (1)..(1): n is a, c, g, or t
ncatcgagccaagagttgacttactgagtgagataaagtggaactcagttatagcctgactaattatctggcgggcacttggctgcatcgtcttaaatacaggctaccgtgccagggccgctggtgttacttacagccctgggcacattattctttggccggcattcaggcagtttcagatttctgccatggttcacattgtgacttgagcacagttcaggccgatacctgtagcatctgccccacacagcaagcactctctacctgctgagtcttgtgtaaccccaggagcccgctgagtggcgcttcatttcacactgccagtcagatttcagggatgttaacatggtgggcagtccctagagcctttagtaaaaatggattacaggaggttaagggatgtgaagcgagggaggaaggaggaagaggaagcaaccagagaaaaaggagaggatgtggaatacttttggcagagaagacagacaaaaaaaaaaaaaactgatttattattggactattgtaatagtagacttccctggtggctcagactgtaaaagcgtctgcctacaatgcgggagacccaggttggatccctgagtcgggaagatcccctggagaaggaaatggtaacccactccagtattcttgcctggaaaatcccatggatggaggactctggtaggctgcagtccatggggttacaaagagccagacttgactaagtgacttcactttcacttattgtaatagtggttgttaaatcccatatcccagcatt

SEQ ID NO: 43714 - DNA, 1358 bp, Bovine  19866880372608
  misc_feature (1)..(1): n is a, c, g, or t
nttcctgcctgctgttggtattgtggggtacagttcactgaggtttcctggctgcgctgaactaaggcaggtccatgcagcaggaattccagaggctgtgagaacagctgaagggcaggacccgggtttgcttgttgctagccacctgtatgtcccttagaagaaaagggcttccagagtccttcttcttggctagcaggactcttatccctggctgtgtaaccttgctcaggtgactccacctctctgggccttggtttttccatctctaaaatgagaaaacttgaactaagatctctatggttgcttctgccacaagtgtttcatcatagctctcccatctacctgctgtgggttagactgagtgacggtagagcatgaaagtgtattgacaaagaccacatgctatgtaatttgccgtcaataaatcataattaaactgagctactgtcttacatcaccttttctaccttctagggaagtggcatggtaatttgtatagtgggaagggctgcccctttaattaaaaaaatgaagaaaaagatattaaaaaaaaaagaaaggaaaagaacagagccagtgcagaaagtgttttgaagtgtattggattttggtaaatggtttcttccatcaatgtcacaggcgcctgtgaaggccagtggtataacaagtctggagatttaattagaatggctttcgagtttttaaaacaccacttcagtggaaaaccatccattttttcctcctgatctgcctcaggatccttcaaatgacatttgtttccttgtttgcagaaatcttttattcttggaccaccactgtcgagttaaattccagcatcttatgcctttgggtaaggttggttggataagagattttgttgttgttagaatgcattttttaaaaaaagaaatggaaaaatacactttttatgaagaatgaaatatttaaattttgaaagctcttcccatcagcatttttaatttaaataccttgcttttggggatgatcctaggggattgttgctcttaaaacttttaaataagacacttgaatgtaggtcactttgcagtcattgtacgtgtcacatcctggtaggagcttcaacttccctctgtgctgagaaagatggtaaaattgcagccagaaattttttttttaattttaaaaattaaaaaattaactgttactggagtatggttactttacaatgttgtgttggtttctcctgtacagcaaaataaatcagccatacatacatcctctcccttttggactttctccccattctggtcaccacagggcattaaggagagctcctgtggttctacactgtggttctccttagtgatctattt

SEQ ID NO: 43715 - DNA, 2759 bp, Bovine  19866880458143
  misc_feature (1)..(1): n is a, c, g, or t
ncctggtgggctgccatccatggggtcgcacagagtcggacacgactgaagcgacttagcagcagcagcagtagcagtaacttaaaggatgtgtattttagtgttttagattgtcacatagacttttaccagaggtgatgttactggggtgagtgcatatatatgaacctgtggaaagagtgcctttacatgggggaatccagcccaggcccaatcacacacatatacacaaacatattttttatcttttcagttaaaatgaggaaaacatagatttggagagccattctttcattttataaacttaagaagctaggactaaattgcatttttttttcttctatgatactgattttttcccctacttctctcatgacatagcagtcaccttatatttatgaaaatttgatgtaataaaatagcattttacaagctttaaatggagcagatgtttgaattcttttcaagtgtcattgatcttttgctttcaaaagtaaggtctgttcctttgtgttgcttaagcactggacactcaggttaagagctttattgagatacagaaataattcacataccatataattctcccgttagacgtgtacagtacagtgatttttagtatattcacagagctacagccatcaccacagtcagttttagaacattttcattaccctagaaagaaatcttgcacccgttatgtgctacctccccaaccccctgtaccctccagccctagccagctactaatctactttttctctttatggatttgcctactcagaacagtttttgtaaatggaatcatccaatttggtcttctgtgacttctttcactaagcctcatgttttcaggcttcattcatgtagcatatatctgtacttcattctttttagggctgaataacattccaagcattgcattttgtttattcgttcatcagttgatggacatctgagttttggctgtattacgaataataccactgtgaacattcatgttcagatttttgtgtgaatgtacatcttcatttctcttacaaataccaaggagtggaatttctggatcataatgtaactatgtgtaactttttaagagaccgccaaactgttttccaaagtggctgtaccatttgatatttccagcagcagtgtatgaaatttctgatttctttacagtctcatgaatatttattattatctgtcttttccatgttagccttcctaagggcatgtgacgtggtatctcatttatggtgggttttgatttgtattctctgatgccgtgtcaggtttgttgttgcacacatatatgtaagggacggggcaggcagtgcttctaaatcacagcagtagtttggccatctcatgcgaagagttgactcattggaagagactctgatgctgggaggggttggggacaggaggagaaggggatgacagaggatgagatggctagatggcatcactgacttgatggacgtgagtctgagtgaactccgggagttggtgatggacagggaggccccggcgtgctgtgattcatggggtcgcaaagagtcggacacgactgagcgactgatgtgatctgatgatccacttaaatttattcccagtcactagatattatgtgtcttacatccccaggtcagataacttagcaggtctttagtgcagtcttctgttcaaatgtccaatataccatcaacacagtgacctgtttctcttcctggattactgtttcttggtgttgatataaacagtgtactataattgagccttatgaaaaaagaatgccaaaatttgactactgggtgaaagagaatatcctgaaggtgttgacagtgatctttataagacacctttgttaagtaatgggtttgtaataaacttagaagagagtaaggaaatatgtttaaacagatgaaatcagaggtaaattgttgattaacccagggatggagatcaggagtatcatttggatctgagacaaaaagaatatttaaaacctttggttactttgaattgtctttatcaacagctcagattctgaaaggaagatgtttccttttcagtggaagccttaattttatcatccagtataacagatgaaacctgttatggtgtagacagtgcacagtgaggaggcagcccgggtttcagtttagcagtatagtcaacagttaagtcttttggtgtgagtgctgtaattacataaataatccatgtggaaaggagatttgctgaggtgtttaatgaatcgtgtttactacgtctgtagataagagtcgcagtgttttaaagtttcatctttgtggttatctgtgatatgtgctcctggtgttagcatagatctaaagaccatcataattacgattgtttataacatattgtaaagaacccttggttaatttttaattactcttggtggagttgggggtatgttgagaacatatttgaacccaggaaattataagttgtattccctcctcccagaagatataagattatatatgggccatactaggttaatgatggagaaggcaatggcaccccactccagtactcttgcgtggaaaatcccatggacggaggagcctggtaggctgtagtccatggggtcagacagagtcggacacgactgagcaacttcactttcacttttcactttcatgcattggagaaggaaatggcagcccattccagtgttcttgcctggagaatcccagggacgaggaaccctggtgggctgctttcta

SEQ ID NO: 43716 - DNA, 1439 bp, Bovine  19866880531770
  misc_feature (1)..(1): n is a, c, g, or t
ntgggttggctactctataggactgtagcatggcaaggactcccaaaataaccctaaacacagaaagcaaccccccattcctagggtggggaaggaagttccactatcagagaccccttctcctctggggaggaggctccaagatgtttgtcatttgtcaaaaggccaatttagcgccctcagaaatcggaaatcaacagatttcataccatccgtcactggtacctccctgttacggagtttatctgaaaggacaggaaatattccatatggctcttgtcagaatggccctgaagaaggagacaagatgcccccaagagtggtgaagagagagcaaggacgggaatttaccctgagattaaaagagtgggaggaggaaggaggcaacaagaggcaatggaaagagacgcagaggagagggagggcatggggcgccaaggagagagagagactcctgccggaatgatgacgtcatgttttccacttatctcatctggcatcagccacccaggggcttgttttcatatgaatgagaatgttactcagcttggtctttgtgtatttcccccccaaaagctatttgtcttaatcagcatctctaaccggaaggcggaaggcgaaggcaccccactccagtactcttgccggcaaatcccatggacagaggagcccggtaggctgcagtccatggggtcacaaagagtcagacacgactgaacgacttcactcacttttcactttcatgattggagaaggaaatggcaacccactccagtatttttgcctggagaatcccagggacagaagaccctgttgggctgccatctatggggtcgtacagagtcggacatgactgacacaacttagcagcagaagcagcagcaggaggttttcacacaggatccgttcaggtgcttgtagcagggctgcacagctgcaggggtggatgaactgctattcatgatggtgctgttaatagcatgtaaacacctggagatgttctgcccttttcaatcacataaaatagagcagttttctatcttctgaagagagaggagtctcttaactaaatacccatgttacagctatcaggtattatcataatgccctgtcatatatctgttttaattttaagctcagaacatatataataataatttatgcaagttaagttctcaataaatactactattaataattactattttatttttattctttagaatatagttgaaaacaactttccatatccaataagaatttaagcaaatctgtggcaaatttgcttttgccacaataaatgtcttgccttgtaatttatgaaaaaattttttacctggactggatattggatttattcctcattggcaaagttagtgagatacatgtgatttgttatttattagttacctttactacccccaccccctcaagaatgt

SEQ ID NO: 43717 - DNA, 4163 bp, Bovine  19866880544563
  misc_feature (1)..(1): n is a, c, g, or t
ngaagctgagtggtccttgtagcgactttgcagaggagtacaacacgagcaggctgatgtcccttggcgtttattttgtcctgtatgttggcatgggtcacacccgccttatgttacacttgacttccgtcttctattatagtatcagctctttcagagaagggatcatctgtcattcaactttgtttctcccataaccatgggaggtgtttctctgtgtcatgggagaagctctatgatccaagacagccaagcccagttcttaaagagggagccacagagcatctaggaaccagaaattactaaggatgaaaatatattggtttaatatccaaagaatattatccctattatacccatgtgttttagtttttctgttctaaatctctgaggcctaagatcttgagtcattttgctacttctccttcctatgtgactagattcaggctgtgctgggtctggcatgctccgcaatagtgtttctcaaccctgactccaccacagagtcacccaggatcactcctcaacaccctgatgcccaagtagctgagaccccctaggtgggacctaagcatcagtagctgtcagacttgcaggtgattccagcgtgaggccaatgctgagcatgaggtgtttgaaggaggggaatctcttcattgttttatctccagggcctcctagaatgcttggcacagagagagtattcagacgtgtcagtgcctcctgtttcaccatgtcctcacgggtgtcacataacttcagtgtgattctaagaccctcccatccctcttccggggcttccgcatctcagcatttgcatccccatctgtctagtagcacaagctagagcttgaggttcatctctgatgcccatcccagccctccccagcttcccagcccttcgttatgggatgtacatgctgagtcgcttcagttatgtccgactctctgcaattccagggactgtggcccaccaggctcctctgtccatgggattctccaagcaagaatactggagtgggttgccatttccttctccaggggatctttgggacccagggatcgaacccgtgtctcttatgtcgcctacattggcaggtggtctctttaccactagcgccactatggggattttacactaaatctgcctcatggttacgcatttgtttccatcctcacccacatcctcatccgtggtcccgccctcagtcccctgaactacctcagaactgcccagtcagctgcctgcacgcagcccggcctcaccaatccactgcccaccccagtcagaatcatctttaccaagcgcaaatgtgattgtgtggccgtcgattgaagcacttcaggtgacgtgccactgcgggttggcgaccaaactctttaatcctgtggacgagaccccatggtctggtcctcgcatccctgtggcctgtccactagaccccagggtctgacccgctttcgcagtctccgttcagtccactctctgccacatctttgctctccagccactctcgctttctttcccttccttcaatcttgcactccttccagtcttggggcctctacatttaaaagaaggctctccccacatgcccctccctctttgccttgttaattgtcgctgcttcttcagttctcagcttaagcgcccttatccccgtaaagccttcttagacctgttaaaaactcctttgtctcatggtcctgtggcctcgggctcacttctccatgagtgtttttatctcagtgtgtagctcactttccatctgagtgattttctgacctgtgtctttctgccccgcctgactgcagccacatgaaggcagggttgtgtctgattttgctcattctctcccccgtgccaagcaaagggcagaacacctagaatgtgctcagtaagcccttgtggactgaatgcctggcctcttttgtcccagagctccgtgcctgggagtagctgtggcttctcttgcctcctcttctgttaggtagtggctacctcgcctgcctgagaccccatgctggttcctagccgcacagtcctatgaaagattccacgtgacgcatctgctttgccctattttcagcagcctcctaaagatctattaatatccacgtccatcaattgcttttctatgggaatcttttgatgtttctgaatctccttagaactttcccaaatcttaattttttaggcttaaggtgtatcttctgtcctgccctttggcccagtagggatttcaggagttgctctttttttattttagagcccatgccagagcgtcttacgtcatccatgtgcttttacacgtgtttgtggcctcatagtgatgctcagaggatcagtgtttatagaagagaaacacagggtccaggactgcagtctccctgttcccatcacagcctcctggttgcctttaatccactgcacaacccccctcccccactttaaaaaccactagaaactaaagcctgtctccaacagttgtttctttgaacatcaatggatagaacattagcctcgatcctgattactggtttttgtgaccttctaagacatttcccatttctcgagctcactttactgacttcataaaacgaaaagttaagaccagattattaaggatccttcagtcttaataatggtaatagtaatactaacggggaaaattgtagtaataatgatattagctagtatttattgggcacttaccacgtgtcaagcaccatgtgtcagtattttaattgtcttggggaaatgctgtgtttttcctttgttctttctcacaacacttctgacaccagattgtgtgggcttttcttcgacattgaccagttctgtggcaccagctgggtgtcctgcaattcagttctgacactgtctacctagagttaacatcagattctacaggtgaagggcttggtcctgcaagactgtctccacttcagatgccaatcgcaagtccagattttcacctgtgcttctgaccagttggctgtccatcagaagttcccatgactgcctacttagattcaggtaattcgctaggatggctcacagaacccaggattctggtatattacaaaggatattaaagaatacataggtgaggtccagaagggtcctgaacacaggagcttctgtctctgtggagtttggggtgtaccaccttccaacacttggatgcattcttattcaccaacttggaagctttccaaacccgtattttaaggatttatggaggcttcaccacataatcgattattaacttctagcccctgtctcctctctggaaaatgagaagtggagctgaaagttccaagcttcttatcatggcttagtcttgctggtgatcagcctccatccaggagcccaccaagagtcatcgcagtagaacaaaagatgctcttatcactcaagaaattccaaagaatataaaagctctgtgtcaggaagcaagatcaaagactaaatattagcaggtaccagatgcagagactatatatatatatccttttatttcacacatgttttagattctttaatcccctctacaagcaaccaagtagggctctttctgtggctcagtcttacagatgttgaaactcagacacagtgacgttaagtaacttgctcaacaccacagagccaggaaatggcagagctaggattcaaaccacccaggatcattggctccaaagccctcactcttcaccagctaaagtagaagtcactaaagtaaagcataccaagctttgggtcaaactgatctggtttgaggactgactctgccagttatcagctgtctgattccaacatgggctcttctgtacacctgttttcccatatgcagaaaatggaaatagtacctgtagtaggtgtatcagggctcttgggctgctataacacaatactccagacatttattttctcacaatctggaagctagaagtccgagatcaaggtgtcagcagctctggtttctgctgaggcctctccccttggcttgcaggcggcacttctcactgtgtcctcacatggtcttagctccatattcctgcgtgtctgtgttctaatctcctcttctaataaaggtaccagttgtattggtgtccattagggcctacctatagatctcattttacttatacagtcacat

SEQ ID NO: 43718 - DNA, 733 bp, Bovine  19866880590606
  misc_feature (1)..(1): n is a, c, g, or t
nccaaccagggactctttacttaactttcagtgtccagggttttaactgtggatatgtttacatggtttgcagctacttctacatagagttaagttagtgccagcatcttggtgtaggaataacttccaggaatacctctgtggctcaccaaatcaactcatgagtgtcacgacaaaacagcagggcccaccctttagctcacagtacaaatcgagtaggacatcacggacaactgggttgatgagcgtcatggattcaaagaacagatgtttagtcaccatgtaagaaaattggaaatgcccccaaatctcacagctcataagcaaaaggatatctaagtaaggttttcccaaatttgacaataatcttgaaaatttatacattggtgataacgagttttgaaggtaaaagaaacttctagactatctacccaactaaagaatcgactgtattagaggaaagactgagttaccttttcaatcatctgtcaaacactgtattacctttaaattctgcctgtaaaaaatattacaaagctgtcatagacaagatcagagattatgaaatccattcacgtgtttgctacccgcactttgccaagcagctaattagtaaaaatgttatttttatgaatgttgtgatgtttgtgctatttgccagcttttcagaatttttaatttgctgcacttttctgattcaaaaataaatattcacttccatacccaatttcat

SEQ ID NO: 43719 - DNA, 3840 bp, Bovine  19866880591898
  misc_feature (1)..(1): n is a, c, g, or t
ngaaaatttagcaccctagctctgccccactaaatgccaacagcacccctggttcctgtgacaacctcactgccaaaatcccagagggtgatgacttctcccacacccatccccaccgagggccataagtctaagtcagtcgtgctaattcaactcccatttgacagtgggtggtttagaggtgtcatatgatctagttctggacaatagccttatagcaaagatcactggagggacttcattgaaaaagttctttccttattccctgtccttagatgcagttgtaggatgcagttgtggtgtcggtgccacagtagctatcttgagaccatgtggggacaaagccagcacactggagttggcagacgagcatggggcctcgcagacatcgctgagtagctaagctaagactggaaatgcttgcctccagctttcctgccaagtgagacggtcaagttctatttttgtttaaggcattttttactgccttgtttttaacctgaaatacctgatagaaagtatatggttggtctaagtgggaaataaagagatgtggaacacatggctcctgaccttgaggagcttatattcctacagggagagcaggcccacataacaattacagaaacggtgcaaaaatattcgggggccagcttcatgcttctcctacaagggcagtaggagttaggaccaggcgcgtcagtcagagaagcctcctggaggagggggaaagtccctacctcctggcttcaggccctgtggaatcccctcccctaagtgtgtatggacttggtggctcactttaaaaaaaaaaattattttttggccacaacaaggcatgtgggatctttgttccccaaccagggactgaacccgcatcactctgcagtgttagcatggagtcttaaccactgggccaacagggacgcccccgactcacttctaaggaatatggtgggagtaacgggatgttacttctgagatcgggatacaggaagactgtggcttccagcccaggtggagccagaggctgcgtcgtgaggcggccccgaggcagggcccacgtgcgatcttacagtgggatcttctgaggcccactggccgtcacatgagtgagctgggaagcggatctttcccccagtgagcttgaggggactgcagcccttcccggaggccatggccccgctgaagtctcacccagaccttacaccacaggcaccagctaaaagctgggcccagatttctgacccagagaaactgtgtgatgtcaagtgctgcttaagttcgttaaatgtggggatgtttattgtaggcaataggtgactaacggaggggagggagctggaggtctcaatttttgacatggccaagacggaaaaggggcagacttggcctgagaccttgcgtctaccgggcaggggttcctgggtcagagctggcttagatcccatcagattccagagccagacaggaccctggggagtcagggttgctggggaaccttacctttctttattcactgacataaccccatgggtgagtccaatgtctgacacacagtaaggattctataaataaatgccagttgacatagggatggatacctgcttgcagtaagattaggttatgacaaagtataacccatgtggaaagacaactgcccccgagcccagattagaaagctttttgaatccctccagggaggagtgggtagaggaagctggttagggttagggcaagccacagtccatggggtcacaaagagtcagacatgactgagtgactaacacacacacacatacacaggcggtgagctggggataaaggcggggctcaagcaaggatgccacccagacctcagaagagaggtgacacgtggcctcaccaaggaaagggctgctgatcccgaggcagtgatcactgggttctctctggtttttagcactgagcctctgtgcgtcttgcactaggcagctgccatggggcgcccaggaatcaaggggaacaactcttcctggtcttttgactcttgaagtaccactccctcgacccaggaggtgaacaggctgggggggcgttcacgggtagaaaggtgtctgagcccggaagccctttctgtttgtgggaacccacgtgcaggggcagctggctctccccaggggtcgacacccatgatgccgactcaggctgcaggtcctacgccccaagcctctctcacccccaggaccactccagccaaggtcttcagataccccttcacacaccagccagcagttcagccaccaaccccaggcccaaagcattgcttggcctaaaatacacgtatgtcccaaacggggagccactgacaggcctggtccccaggccaggccctagtgagcatcttcccctgagatgtgcaaacaccttcacatccccgcgaggcagtgatgccaccagccctggctggtttcccgtttacagcttcctccagaacatgccagtggggatgccaagtgtaagaaacaggaggggaacctgttttatcatcatctccttgaggggggacgggaggagagctccagaggggctggaaggataaaaggagcggaggggacatcaaattctggggttatcacctcccccagaagcagactctggaagcattcagttcagtctctcctctgccttttctcttgaaaattacgtaaccagccagggagaacaaaggcttcccaagcctcccaacaatactgaaatagctcggagagaaattccagcgacctcattggagctccaaagcccacatcggtgcagagctgggggcgggcagtctgggtcctcgagtggtggggagtgggtgctggtcgccacgggaacagcatgggggcaggagctgcacctgcccaggctcgaggctgtgagtgtgactttcagatcacaagtgtgtgaggctatgtgtgtgtgccagcactgaaatccttctgatttgacacaactcctccatttgacctttatcgatgcaaaggaaaaacttctcattttttttttcctaaggaagaaaacctgggatcgcagaagatgttggcctctttcaaaatctaaatcaggacagctctgacttcagtggctaaataaggtgagccctttggggcttgctttgtttggactgtgttctaaagggcagagatcccagccagggtctcagcctctccaaagcagagcctgcctctttcatttctcccacactcacaccagcacccactgcacggtgcccacaggccactgtgccttcctgaattccgggactactctctctgagcccagacttcatgagccatcgtggtccctggaggagttcagcgttcagttctgattgttcctgccaaacgctggggcccatacagggagccacttcctccctccctgtagggtcagcggatggcaaggatgctgaaagatccctggtttgtagctaaaggatacagcgttatcttgcctttagatcagaaatggcaacttgcgtcacgtgtactactatcaacccacttttgcacccacagcagatgctgataaccagtgatcacccctctttcctgacgagccaggaagatgagaacccttctccatcagcattctgagaggccctgtcgacggcccacagctggtgctcagggcagagcctctctgcgtggacgggcaggctctctctgagctcctgcccccactgggatcaacccccaccgtgttccccaggcacgcagtctgacttgctggtgtttattgagggcctactatgtgctgggcaccatcacacacggtcaacaatgtttgaggctccatggcacatggcggggaagg

SEQ ID NO: 43720 - DNA, 1622 bp, Bovine  19866880617989
  misc_feature (1)..(1): n is a, c, g, or t
nctgtagcccaccaggctcctctgtccatgggattttccaggcaagaacactggagtggtttgccatttcctcctccaggggatcttcctgacccagggggttcaaacccaggtctcccatattccagacagattctttaccatttgagtcaccagggaagccttctaaggtgatggtggctttttatcagttgctgttcaatgtaaatagttcttacagaaattttagctccttaacatgttccaagaaacagagctaaagttttaacagatctctgttctcaaatactacacaaaaaataaaaaacaccctcttatttgtttcattttcctatctcaaaactttctccttttaaaaataggcttagaacatctgtgattgccatatactttaaagtagccttgttttatttactcaaaatataacaagactgaaaaaaatttaatacagtatacagttttaagtcactcacaaaattatcaatcataaaaataagttcggctgaaatgaagaaaaatgagaatttgggtgtttttaaactatgttacacatgattctaaattatcaaacacattatttatacccactgaaactggttctgtgagacttacttctaaaagtagccagtttttaccaattcaaaacttactctttctgtgtatgttttatgttccccatcacattttttagactacttgcagtcataaatagcagttcaaattcaaagagtcaacagcctactaaatccagttttaaatcctgatgcatgccccccacccctgcaaaatgtacattttcaaagcagtaagtacttttcttgtaaatgttaccagcactcacccatacagactagttctaggtcaataaaaattaaaggggatggaataaaagaagagagaaagttaaaagaaagggattacctaccattactctgcagtgttaatcctgagagatcttaaatttttaaagggggaaaaaaataaaatattaatcattatcatgaaaataatttccatcatatttaaaattacagaatataaatttaagccagggattcaaaacttccatgaaccatttcaattcaagcatagtaatataaatgctatctaacaatgcaaaagtgctttccatcttatttttcaagaacagtgttctaagcaggcaaaataccaagtatgtataccttagttttagtagtcaaaatataagcttgctcagaattcaaatttaaataaacatatttcattaaaaatgtccgacttttaacattagttgaaatcctgggctatctccaaatttacaatttaacttagaaaaattaaaacactattgatatcttttccctttattttatgcttctaagcataaaagtcaagtttacttaccaattccaggtgacacaactcgttcatagtgatatggattcacacagacactatcacattttaagtcaaatgcatactgacaatatttaacatgttttagttcatttttgtgaaggtcaggccacctccagagacgggcatagatcacatgaggaaatcccttgcgaccagccacctaagaaaagtaaacgaccatttaatgagcatcacacattatgcaagtcacttgatacatt

SEQ ID NO: 43721 - DNA, 858 bp, Bovine  19866880645425
  misc_feature (1)..(1): n is a, c, g, or t
natttaattatttgtatctctttctttccatgtaatagcacatgaatgcatacatacaaactataaggaaattttattgccaccctagacaaggaactttctgcacagcaaaacaggacataggcttcttagcaggacagtagcattggcacgatgaactgtattctttctgataatggggacctcgctctaaggggtcgagaagagtcggacacgactgaatgacttcactttcacttttcactttcatgcaacggagaaggaaatggcaacccactccagtgttcttgcctggagaatcccagggacgggggagcctagtgggctgccgtatggggtcacacagagtcggacacgactgaagcaacttagcagcagcaacagcagcaactcttgaaagcaatgagtcagatcatatcctgattgccccctggtggttcctgactcaaattgcaggcaaaggacttcactggggaggaaaaaaaaaatggcaaaaatagcaattcagatctctgaagaaaagacaatattatagcttcttagggagtcacaggtttcctaagtttgttaaatctacacatatacagagaacaaatactgtatcctgtgcagaagagtgaatctagccagggctgctgcttcattctcttcatactgtagggtcccctatagggctacgtacacatctgaactttgcagatggtaaatgaagcaagacaattgtcaactcaatgctctaaaattaagaggacaaattagaggacacaagtgatctgaaatggtaaacaatcaaatgctctctgctgctgctgctgctgctgctgctaagtcgcttcagtcgtgtccaactctgtgcga

SEQ ID NO: 43722 - DNA, 1309 bp, Bovine  19866880651342
  misc_feature (1)..(1): n is a, c, g, or t
ncaattaaacactggaaaaatcatggtaaattaattttatgtagaagaaggtatatcaaaaaaacaatggatcagtccatttcattcataaggcagatttaactcattctctgtttttaagataaattcatttttataattcatcctttaaaaaataaccaaacaatatttaaaacacttaacctttgcagcttccaggaacacatggtcactaatatgccgggtgttacagagaataacagctaaagccacacctggaatacatttaaaatagtttttttagtaaggtcacttcaaattatgaaaggagtgaaataaaattcctagatttaaaccaaattaatggtaaggcatccctcccccaaacaacctatctgaaaaaacaaagcagccaagagaaaacagaaatctgagtactaaaatcaaatgatctttaactattacaattctcatttactagaaaaaataattttagaaatatcaaatggcttttcgcaatttagttttcacatttatcaaatttacaaatgtatataattcatcaacagttgttacaaaaacattaattcccagtccatctctaatcctctatttcttgctctacagaggtgactgtttttaattctcttagccgattattttattagtttggtgcaaaaataactgcagttttgcattgttgaattttgccatttgatattggaatacattcttaagtaaatgtgatcatgttatatatagttttaatgtacattttttgctttttttttgctaatgacttattacttgctgtttattttatatttatttcaaactacagaaatgatattatacaaaaaacaaattcaagtgattttttattcgagttcaaaatggattgtaaagcagtagagacaactcacaacatcaacaatacatttggcccaggaactgctaacgaatgtacagtgtagtggcagttcaagaaattttgcaaaggagacaagagccttgaagatgagaagcatagtggccagccaccagaagtcgacaacaaccaactgagagcaatcatcgaaggtgatcctctcacagctacacaagaagttgccgaagaacatcgaccattctacggtcatttagcatttgaagcaaattggacaggtgaacacagctcagtaagtgggttcctcctgagctaactaaaaatgaaaaaacatagtcatttggaagtgtcactttctcttactctacgcaacaacaacaaaccatttctcgattggattggacatgtcacaaaaagtagattttaggcagaaaggaagaagaa

SEQ ID NO: 43723 - DNA, 1736 bp, Bovine  19866880652944
  misc_feature (1)..(1): n is a, c, g, or t
ncttcttgccggaacgagggacaagatcacctttcttattaccccacagtaaatgagtcatatctttagtttacagagaaagatggtcatttactacctcttttgaaaccctgggccttcctgagagctgttactctgttgtccaagtcttttcaggctgctgtaacaatcccagagactgggtggcttacggacagcaaaaatgtttacctcacatcctgaaggttggggagtccaagatcgaggcgctggcagagtaagtgtctggtgggagatgcttcctgatttatagatgctgtcttctcagtggggctctctggggattcttttataagcgcgtgaatcccactcctgagagcaccaccctcatgacctaatcacctcccaaagcctcccacctcccaataccatcactttgggagattaggcttcagtttacgaatttggggtggaggggtacacaaacattcagtctatagcaactgtgaaatgatttcttggggttgaatgcctcctaggaaatgatgcttaaggaattcactcactcttcaagaattcaagcacaatcccaataactgacaggcaacaagtaactgacacatcagaacttctgtgaaaacaaatgcactagtttacaatgcgcaagcccacattcctaatacattcactaatctttgctttccctcctggtgagcgcatgtcctggccatgagataccctttatgtggactcagtttgggctgcaaattctattcacaaaataatggtacttccttagagatttaggttgttatattcttgacttagttgaatagaatgtatattctgctctttgatagttgactgattgccctggagaaataactggaactcattatgctttcactgcagatttgtgtgtctgtgtgtgttatttataataaaaatattaaaaacacatttgtgtgtaatctactcaactgcaattttctttctccatgaaaattattcacataagctgggctgctcattgtatctgtcattattagcaaaattcctgatgcctaggacagaggctggcttagacgagtgctggtatcatagaaactacagtctcttcttgcctatatattttataatggtctcatataatggtcttcacaatttctggtgaagcaaaaatgatttcagcaattaagaaaaaacttcctaaatgtcccttgagattttttcattcaactacaaaacctctcgggtgcatttgcaattgtagtcgtgtgtatctccttctgacattgggagattgggattcatgggctagagatccaattccacatttactgagtgcttacagaggtggtgtgtggcttcccccaaaccccatatttgtcaagtccacattcaggttcagaaaaactgggggtgatgataacaccaatctggaggtggggagaggaggaagggcaggaagagaacaaagggaccaagctttaaaagttagacaactcagagcctttgtcctgtgggctgtaactatcagagtttaaatacagaacactagtctaagcatgtagtaagcactcaataattgattgaggcaaaagtcagatcagttgttttgtagattcctgggggctaggaccttattagcttggcataatatctgttactgatctagcacaatagagtattcctaatgaagatttcagggatcaaaggttgaagttcatggaccattctagggcggcaagctcaat

SEQ ID NO: 43724 - DNA, 1171 bp, Bovine  19866880702267
  misc_feature (1)..(1): n is a, c, g, or t
ncgtggacattccttcctacagactcggctgtcaggtttgacagatggcctggctgcaggagtggggacagagggcaagctcgtggttcaggcggcaccaggcaacgagagccagctgggctgatgcaaggtctgaaatctgagctggatcccaggatccagccagggcgggtgggacagggagccctgccccccagccccctccccccgccaccccactgccgctgcgccaggcaggtcagcaccttttctcagtgtctgtgacctggctggaggcagatagggtggcaagggagagcagaggaatggggcctcagagagaaggccggaacacgttcaaggtcagagatgccctccccactcattgcccaccccagccctgtggctggtaacaggttatgatgcacccatctcctgaggaatgcacttattctcttgggttggccagaaacttcattcgggtgtttctgcaaattgggacgaactttttggctaatccagtagtaaaaattcatgatccacaagttttggcagaaggccggaagtcacagccaccccacagctctgttgaggggtgcctgcctgagatgctcagaggctcccctaaagtcagaggaactggggtaaggagaacagaacttcagagaactcctagcttctgaagggcccagtggattaggtaagaagaagtcaggggccttgagaacgagtgtcagtgtggccggggcagctctgatctctgcagctgctggtgtgtttagctgaccaccatgtggggtctcagcaccaaccggaccctgtggcttcaacatcacactgcgggcccagggcatcacgggacctgggagagctgagcccctagctggataaggtatgccgagaatgagtttatcagattcaccgtttgtgccactgtccacagagagaatggaacacagagtggggcaactttgatggaaggaggaggcaagatgagccagagagtaagactcaaatcctgggaggcctcccgggagtcctgagtagagggtagggaggggaggaggttaggcggatggcagggataaaacggtgccagaggcaaattcaccagcagcacatttttttttttggctgtgctacaggcttacaggatcctagttcagccagggattaacccaggctgcggcag

SEQ ID NO: 43725 - DNA, 1246 bp, Bovine  19866880857682
  misc_feature (1)..(1): n is a, c, g, or t
nctttgtgatttttttttaatttcaaggataaggaaaaaatttttataaatatccaaacagaaaaaatgaaaaaggatatctataagctggtaaatggagttgtatgcctcaaatctctcctctgaaacactaaatgccactagacaatcgtgcagggagccccctcactccgccagcttgaggcactgggaggaccacagtataactctacgtagagagagttacattcatgactgtgattcattacagagaggagacaaagcaagtcaacaggggggcagggggagatgcatggaacgaacaccagggaaaccgggcacacactttcaagagcctctccccggggggtcacacaggacacgcttcttcccaggcaatgaattgtgacaacacagtgacatgccctgactagacactcagggcctgatagtcttaccgggtgctgatcctctaggcaccctctgcctactgtgtaccaggattccagacaaccagaaggaaagtagacgtgaggcatcaaccacgtgctttgtacagtttggacacaatgattcacccttataagttccggaagctatgggaacccttcccaaattcaagttcccagataccagccaagggtcaacctagccagcaggcctttctaagagtaacagtctcaggtctgctccattaactcttttctgcacgacaatgagacaatatctgcagatttttaatttaaaacacggcccaatatttttttaaatttaagtatagttgattttagatattatgttagttttaagtgtatacaagcttccctatggctcagtgggtaaagtgtctgcctgcatcgcaggagacccaggtttggtctctgggatggaaagatccctgagaaggaaatggcaacccacaccagtactcttgcctgggaaatcccatggacagaggagcctggtgagctacagtccatggggtcacgagttggacaggacttaatgactaaactaccaccaccacatagtgatttaatatttttgcaaattatactccattttaagttattgcaagataatggctataattccctctactatagagtatgtgtattcttgttgcttatctattttatacacagtattttgtatgtgttaatcccatgcccctaatttgtcccccaccttccatctcccctttggaaaccacaagtttgttttctatatctgtgagcctgtttctatttttcatatacattcattt

SEQ ID NO: 43726 - DNA, 1043 bp, Bovine  19866880928606
  misc_feature (1)..(1): n is a, c, g, or t
ntacatttaatgcccctaacttactgaacatcatagtcttacctagtttaccttaaacatgctcctaactcttagcctacagctgggcaaacacaaacctattgtataataaagtgttgactatcccatgtaatgtttttgaactatggtgttggagaagactcttgagagtcccttggactgcaaggagatccgaccagtccatcctaaaggagatcagtcctgaatattcattggaaggactgatgctgaagctgaaactccaatactttggccacctgatgcaaagaactgactcattggaaaagaccctgatgctgggaaatattgaaggtgggaggagaagggaacgacagaggatgtgatggttggatggcatgagtttgagtaaactctgggagttggtgatggacagggaggcctggcgtgctgcagtccctggggttgcagagtcagacatgactgagcaactgaattgaactgaactaatcccatgtagttgattgactactgtactgaacatggaaaaacagaatggttgtgtgtatggctgactgggagctagggctggatatcacacaagtgcattgaaggaaaagagcatagtccaaaattaaaatacaatttctactgtatgcatattgctttcacaccatcctaaagtcagaaaattataaatcaaaccatcataagttgggcaccacctgtggtcaactgagtcaacaaggatattgatctcagaaacaatgagtaaatgaaacaagatgtagcattatacaatttacataaatttaaatagcatcaagaccttcctcaatattactatacattgatatggatacatatacacactataacattatttcaaaaaagatctttaaaaatgagaaagagagcacctttatgattgtccctggggaccatgatggaatcagttagtctggtttattgagacagggctacagtctagtgcccctgcgtgcaaaagtcatcttctgaataaacttctaaaaactttgcaaaagtacatactttaaacatta

SEQ ID NO: 43727 - DNA, 1705 bp, Bovine  19866880945328
  misc_feature (1)..(1): n is a, c, g, or t
nggacacaacatgtgatccccctgttctgcgaggtcggcgaggcccctgagtggcaggacttgaaccagatcctgagcccagtatggcctgcccaggaatggcgcagagggcagggtctcccgtggccatgcatttggagggtgtttacaggccaccccagagacctggctgcacggggtgctctctcgtggtttcctgggccctggaggaagcatcttcgtgaggtcagtgagacaagtctggtgacggccgcgtcccgctgcggtgttaggttctgagtggagccacggggctggggagtgggcgagctgacacaggttcttctctccaaagcagaggtttagtcaccagggaattagctcccccaggccgcccccacccatctgggccccgtggtgacttgtgactctcacgctgagctgcagttcccagggggtggggtccagggtgctggggggaggctggttcccattgaagcgctccccagatgccaagttgcagccagctcagctaattggcaagagaaggagaagcaaaaatagtgaaaatctgtgaattaataaaacagccttgaagcaaccgccaaaatgtgtacaaatcatgaagtaattagaagtgtgaagaattctatcgggttgactgtttccaaatccagcatctgatcgctttaggaggccaagggctggcaggccaggggagtaaaattctttccattgcattctcatctggccttcttggagcctgggtttcttgaaaccctttcggggtccaggcagtggctctgggacctgcttgagtcaaatgtgcaccttgtgaaggccctttaggacatgcaagatcttgtcccaatagcatctcatattttagaataaaactttaaggtttcacaagcgttttttggattgatggtcgtatttaatctcactatcaccaaatatttttatgtcagtaaaatactaacaattactctaaaaaatttagagtaggaaatcaaagtccagagagtgaaatgctatcaacccaactcccaagagctaaccagtagcagaacctggggccagatccagggtctcctggtaaccccgccactcttcccctctcctgtgcacttctttcctttggaacctcctgtgtctctcagcccatctgagccaccagggaagctggctcagacgagctgctcagcagtgctggatatgtctatctcatgattctcatggctgagagctgaatgcagttttgtttggccaaggtattaaatttagataagttgctcgacccacttgtttgattaataaactaaggctcaggcacagtcacctatttgttgatttaaatttcattttatatccagattagagcagggaggagaaaaggatccatttttcttatctttttggaaacactttacggagacagatttcaggtattatgtcttgtcatttacccgtgagcagagatagaaacagtacgtggttagagtttctttgtttggatttgttctttctgatctgaggggactttaagggtaggagctcacattcagtaattgaagggcaggcatctctcagggctgaaatgcagcctgctcagggttagaaattctgagagcagacattggagcagaaccctgggagagtcatgtaacgagcttgacgtgtgttgttaattccccaagcggcagcgaaagctcccgggaggatg

SEQ ID NO: 43728 - DNA, 1829 bp, Bovine  19866881012975
  misc_feature (1)..(1): n is a, c, g, or t
nacttgcccccagaggaggaggcaggaggggctggcacgcccgtgtcagtgctgggggacgcccccactctgtcctgaccctgctctaggcccaccagtcatattgaccctgatgttaattcttccccagatcacggagattttcagcctgggtggaacccgcctccgggacacagcagtctggttgccaaggtgtgccccgcactgtgaggggtcgggatggcggagggaggggttctggccagatgtgggccctgagtcgtgagagcagccagcgttttggcatggtgtagtgggaggtaaaggcccagtacgactgctctggtcaccatcagtgatggagtgtgtgcaggaccttagaaatttctcctgaggtctgggccagggccctccttgaggagggttacaggaggtgatggtgggagaggtgatggtgccctgtgataagattggaaagaaaagggaagataaggaaagcttttcccccgtattcttaagaaaatccacaggggtcagacttagaagtttttattcagagaatcatcatttggggtcttgaaggcctgtggagtttccaagagatgaatggatgggctggtcagtggggggtagtcaggagatctggtcctgagatggctttgtgattggggcccacacacaactgaagtatcctcagtggaaggaatcaggctgtgtttcttgagattttctggagcctgttgaggtcattaactgtttcagctgctgcacagaactgtcctacaggtgtggcagtggaaggaaggatagggaggtgggaggactgtaggactgggctggtgggaggaggtcaggggaatgctgcctcctgcaggactgctgagagccctgaccagagccagacaggcaggcgtaaactgttgacctgaacccctggattccctttgtcctgcagactagtgtctgcaggccagaaactgctccacctgtacttgggcgagtactgaggtactgattgagggcctgctgggcacactggtgaatcagtgaccttgggaggcttatctttcgggagacataggattcctgccttcagggagcttataatccaagtggtgaagctgtttcccctatgcatgaaatcattacatattaacagaaaagtaatgatgtgctatgttgtctgcaatggaagattgtagaagagagggaagggataattaaggggaaatggaagagtaggaaatggttttgtgatgcttcattttgcacatagggaacctgattcaacatacagacctgctccctcttctctaggtccaaggaccttaaaaaacctggaggtagaaagcagtagactggaggcttctacagactgtaggactcaaggtgatatttacagaccgactttatcagagacaacactgatctgctcagaggctggaccatagatggattgccagggcttgtgtgggagtcaggaactgggaaaacctaccaccaaaccagaggagcaggcctgttcagtactctgagcttatagaggaaataagcagaaaaggaagacaaagagtagaaagtttgtgcatctcctccaaccagtgcaaaccccaggagcctgagtgtcataagaagtgtggatattaaagatgggggagctgggatgggagagccgacgtgattaaagccaccttcggcctaaacaagccatcatcataaataattctaaatggatttggatgagacctggtagtgtctctaaacatttcctcagggagacagcagttcggaatgtattgggaatggaatgtgaataaatgaggaaaggaactgctattcgttgagttcct

SEQ ID NO: 43729 - DNA, 900 bp, Bovine  19866881032527
  misc_feature (1)..(1): n is a, c, g, or t
ngagacaggaaaggctacgcactcccagtattctggcctggagaattccgtggactgtatagtctatggggtagcaaagagtcggacgtgactgaacgactttcacttcacttcacttaaaactccccactgacagtaattctagaatagcatttatttttcttactctgaagaaatgagatactttaatcataagtacttgaactccctctttgaataaagacagattttgaactttggtgaagcttattcagtgtttatggctgggaccgaattcagtttaaacactcatgagctgtgtgacttcattttttaaaaaaggccctttctaaacaagagatgcaatctgctggatgacaaaggaggttgtggaggtggatctggcaactttatgggtcatggaggaaactttggaggtggtggaaactttggtggaagaggaggctatggtgatggaggtggtggcagcagagggagttatggagggggtgatggtggatatagtgggtttggaggtgatggtggcagctatggcgctgatcctggttatagtagtagaggaggctatggtggtggtagatcaggatatggaaaccaaggtggtggatatggtgatcgtggtggaggatatgatggtatcgatgaaggaggacattttggaggcaactatggtggtggtggagactcgaatgattttggaaattataattgacaacagcaatcaaattatggacccatgaaagggggcagttttggtagaaggagctcgggcagtccccatggtggcagttatggatctggtgggtggaagtggtggctatggtagcagaaaattccaaacactcagaagaaaaggactacagttcttagcaggagagagagcgaggagtgtcagaaaag

SEQ ID NO: 43730 - DNA, 1663 bp, Bovine  19866881041688
  misc_feature (1)..(1): n is a, c, g, or t
nacttgggtttaggttatctgggaagtgaagtcaggaggctccagggaggaaacagggaaagtgagatggagaaagccaaatgcccgtgcaaggaagcgccaaggagcagcctccatctgttggcaaactgttgccttaccctgagtaccaggtggaccatgacttacgagcatctctctggagaatggggggaggttgaggcatctatcactggctcctatttcccatttacttcccagagacttgcctctgtgagcattaaccccactttgactttctgggttgtgcctgggaacagtccagtgatgcctggtgaggacggaaaaaggcatcacacagagaagaagagagggtcaggtgcttgagctgggaagccgacagcatgcagaaactgctcaccgtagctgcaaactcgggtggtttccagggatatgggacaaggcatcaaaatgtctgctaagacgctatgcccatcttaactgcctggagggtacttcatctgggcagctaggagctctcttaatttcttctcacctatcttggactttgggcacaaaggtattgtttattccacttgattcaatgtgatttttccatctccttgataaaaaatggtggaaagagtagaattatgtcctgttcccatgatttattcatattatgtcacccacctcaggcaattgaattctatcctctccctaactcataactaggaagttcaagatgcttcatctttttgtggtttttcttattcctcccaaatgtactaccccaccatggccacttgtttctataagcaagagagaccatttagaaagttggagttgctgattccagtctgctttgacagcgatggtccggtgtagggtgtgtgtgtgccagaaaatgctgaatgttcctgagactcctcaactcactatcattagacagacttggcttcatagaattttgaaattttgaacttggattcactgacctggtaggtgaggggaaagtcctcactttggaagactgttccgagcttgcacacccttctggggactcgttttgtgtgttggtcactcctggggcagggggtggaccgaacattttataattaacctcccacgagaacaacttgttccttaaattcagaggccaagaaactttgaatagaatcagttgagagggactgggttgtttttttaaaaaattcaagtggagcaattcttattcagtcagaaccaaaatcccgtctaactttatttgcatcacacttgttggcacagatcgcctggtgatgaaaataaaagagcctgtgtaaagatctgggaataaaaacagcagacacgagagaaaaggaaaaggaacagtgaaaggagacagtgccgaagaaatagagcaagaagggagaaatgggggcgaacaggcacagggggagggaaagggtgtccgcagagaacgcttgcgttgcaggttccttcaagaacggtactgccttaaccacttatcttaacggtgagaccatcaagacacagtgtcacccaaatagttaatgacaaagcctgaaccacggtctcccagcgcttgttcagttttcttttcttctttctctccccccatgtgggttcattcattaattttttaattgagttgactcagtgtgagaatacaaacaatcac

SEQ ID NO: 43731 - DNA, 1221 bp, Bovine  19866881209355
  misc_feature (1)..(1): n is a, c, g, or t
ntgacattgggggtgggggagggcgctcctggtgtatgtgcaccgcaagcagaggggtttgcagggaagaggaaggccttgtgtccatcatttaatacaagtttggtctggagaatatgcctaagagtaagaagattcctgttcacataggaatgataaatcagccattcatggaacgagtactgatcaaacacctagtgtcacaataacaggatggcagtggaggtcactggactctcatcagcaagccagatccccacgcccaagatggggcctgcagagcaccgaatgggcgccagctgaatacgtgcagccacgtgcagtctacacctgtactgcagccgctctggaacacaggtgcgcccctctactctaggaccgtgggaacgtatctgcgactgaaaagttcagagaccaccaacagttatcttttttgtttcatcaaaattttattaagaaaaccagagttcggggaggcacgggagagcagactccacagtcccacccaggcacagagaacggagagacgtgaaattccgaggccctctggtaagggcagacaggcagtcagacggtggacggatgggcacagggactcggggaccgtcggagaaacatgaatggcagaccagacaaacaggggtccagggccaggcccgcccgcagcgcagggagatagacgtgtgggccaccagggctcagcgctcggcgtttgaccgcaggtcggtggtgagcgggtcatgctggatggtttggtgcagcatcagggccagtaagcccgcccggttggtcatggctgtgcgaacgttgcgctcctgctcaaacagctcgtccagcttgtaccactgcgtgggcagcagaagccttaagaagcggctctggagccccgctccaccctaccccggctgcatccacattggcatccgcacatccgcggtcagggcctagcacgtggtcagggcctagcgcgcagtcaggacctaccacgcgcacgcgctccaggtccacctcggcgcgccgcagcttctcccagcagtagtgccggttgcactggcgcttgggcaggcggcagaagtcaccggtgagctcaaaaacatcccttacaagggggcacccgcatacctcgtcagctggcacctgcagggaggccggggtgggtgggggaagttgcaagttcggaggagagtggaaggaaccgagaggggaggcgggggcagagag

SEQ ID NO: 43732 - DNA, 779 bp, Bovine  19866881298150
  misc_feature (1)..(1): n is a, c, g, or t
ngcaggcagattctttaccgtccgagcctcattaacctctaaagtggatgccccttaagtgctgatctgatgccctcctttctcagggctgccccctccccactccctgctctggatcctctccagtgaaattcatctctcccccggtttccatggaaataaccaaaagcccagttaagttcctataggcctgcagcccccatgtggtcccttccttttacactaaaaaaaaatcagaattgctttaaaaaatgacttatttttatttgtgataaaatacacataaaattcaccgttttaactgtttttaagcacaaaattcagtagtattatgtacattcacattgttgtcccagcatcacgaccatgtgcaaaactgagtcaatgcctattaaacaacagctgtccatactccagcccccaaagcccccgtcgaccagcactctttctggcactactgaatgtgactattcatataagtgggatcatacagtatttgtctgtctgtgactggcttctttcactcagcataatgtacttctccctgctttaaacagcaggaaggtgggagcaatggagctgagcttctttttaaaaagtactttctcaaaatgtggttgtcttctcactcaactagagctcacatcacagataaaagctttgcatgttatccctctgggatcctaatcatcagctctgagtcctgttacagtgcaagacatgacaaaatgtttcatttgtttgggatcgccagttctataaccgccgtccttgccagg

SEQ ID NO: 43733 - DNA, 832 bp, Bovine  19866881322155
  misc_feature (1)..(1): n is a, c, g, or t
ngaggaaagaaaaggtaaataagacagtggcagttccatcagacatggctgtgccctgcttgctagtggtgttaaagagcagaggcctaggatgagctcagtgtcttcagctcttctgtccgctgtgagttctttactcctcacagagcattttacaatctatatacgtgtatgactgctctaaaaatacggttaaatcataatagctaacgcttgctaggtacttattctgtgtcaaaatgatctacagatattgtgtcatcattgtcataatactcctacatggtaggtggcattatccacatttatcagatacgaagaaattggttcctggagaggtcagggaacttgcccaagattaaggcagctgggaggggctcactattgtttaaatacctaagtgtcataaaagactgtaagccctgctaaggcagtgagctttttttgtttattaatgtatcccaagtattagaacagtacctggaacataggtgctcagtagatatttttttcaatgaattaatttgttgactgctagtccataaagagaaatacttaatagtttgatatctgtttcctggactttaaaaatatatactatatgtttttttaatttttttttgaataggcaatacatggtccataaaatcaaaatactataaaaaggtatacagtgaaaagaagtgctcccacccctgtccccattcccccctacctcaggtaatcacttttattagtttctggtgtttccttccagggtttctttgcgcaaaaatacatgttttatttccctcttttcttacacaaaaacatattgtgcacttttctggac

SEQ ID NO: 43734 - DNA, 978 bp, Bovine  19866881393647
  misc_feature (1)..(1): n is a, c, g, or t
nctggaagcagtgctctttgtacatgtttggatttcctttatttttgtaccctacaagattgtgtagttaggcagaaatttttgttttgctttagtgatgattaaaagtgactattatgtgtaaaactaatctgatggaaatggtttcaattgatttcattgttttctacaccaaagttaaaggagttagataaacctaaaccagaatttaataccattttgttaaattattaaattttggattttttgctccacagttgatgaagatttaattgttttaaaaagagaaattaaaaaaacatcaaaaaagaaaagagaaattcaagcagttgacaaatatgtctagatactattcatttgagcaactttcagtactgttagcacagataatatgccaaaacatatgcttagtaatgagtcatatttagagtttttggatttttttccccctcatcctaaaatgtgtaattttggtgataggaaatgtggctaaattccagcttctcaggaacaaagtattttaggttgtgtcaccttgacactattacatggtgtacttggcatccaggaaaatttgttttaaccgtgagagtggataaaaactagggtagcacttacctatgtagaactgagatggtagctcattagaatcttaaaacttaagttttgattatttactattgtgaattatatcataggtcagatggctactacatactgtaaagagtctgtttttacatcttaatttaaagttggtgataattctaaatacctttaaatttaaagtctatacttcattgtttacattttaaatgagaattgtttgcattttggaaaacttgttactgtgtggcgttcatctttttgttgttgttgttgttttttactcttaaggtttaaggcagtgattctcaaccttggttgtgctttgatgtctcttggggagttttgcaaaatactgatggctggatcgcactt

SEQ ID NO: 43735 - DNA, 812 bp, Bovine  19866881429045
  misc_feature (1)..(1): n is a, c, g, or t
ngctttctcttttaatacaaaacatactttgttacagagttctcaggaaaggttcaactgttttttagccacagacttcaaccaggcaaaagcatacagaaagccacaaaggacctaccagagcccttagctgatcagttttccccaaagcagaagctaagtgtggctcgtctcttgagttacggcatggctcctctgacttcaggagaggagacagaattggcagatactaccgccaaatctgtccccaacccctagtcgcctcttccaaatggttctgcagcccaccaggttttcatcatctacaagctttcacacttttcccttaaatcacacgtccaaggcagtggccagaacccaatacttggaagaagtttgttgaatccgtgtttagccttttaaccgatccaagccctgagtccttctatcaatgacaagcagccatagcaacagcagctggtttcatcccttcctttccagctaccactgagctggcctctaccaggactccccaacccccctacccttgacccacccccaaagaaggcttgatccttgaaaaagccaagtccattaattatactaatccaaggatgggctggaagagaactctgaaaggaatgctccagccaagttttctgatcaaaatggacctaacaagagccaaaaataaagtgaataatcatccactggtattgttttcttgagtcatataaaccattttaattgatacagtttaagggaatttccctattttgagaggagttaagaaaccaaagacccaaagcaacgacctctaatatcactaggca

SEQ ID NO: 43736 - DNA, 719 bp, Bovine  19866881469201
  misc_feature (1)..(1): n is a, c, g, or t
ntttgcattgaacttcttttatcttcttttaagaattataacccccagtcacattcaaatgtgttgtgtactagcacactcaatctgttaatttgattttagctcacctgaaagtttattctgccatctctttttaacttaaatataatttgagattgacagagtgaactatatttttttttcaaaaagctattaacacaattattataacttatctctgtgaatcaggacttttttcaataatataaatttaataaaatttagacataaactggacaagtattacataagaatcaggttcaatgttctcattgtctttataatgattagaatttatactgaaaatgtaataaattaaatagcatagttcagagtctgtctgatagatattgttagaagttatttagaatgttagtgtttttccatcatttgtatttggttttctgtgagatcttttttttaaaaaatgttctgcaacattacctctgggaacccctcagacttgacattctatgtaaattacatttttatatgtaaaacaaaatgtatttgtggccttccaaacattatagtatacactaatggccttaaacggttttagtgaaagacaggggattaaaataactaattaaattaagtaaatgataaccgttataaaggaactgtaagcagaatcataattagtgaatttgctaattattttccccactgcttggctg

SEQ ID NO: 43737 - DNA, 1635 bp, Bovine  19866881753926
  misc_feature (1)..(1): n is a, c, g, or t
ntgtattctattttaaaatccacagcaacaccggagtgcctttcttgatcttgttgtctcctctagtctctttattgccttccttttgcagtaagatgccttcattctctctctccacatagttccccagctctgtagtctagcttcttttccccattgaaactgcattttcagaggtcacctgggtgcccgtgtatgcccagagagggttttgttttagcctcattcttattttttcaaggcatctgttttctctccctctgctttgtcttccaaacttccactctgatttacttcagtttatatttgtccacttgtctcccagttagatctcccaagcttttccactgcccagttatcgtggctaacgggctaagctctgacatgagcccacctgtggttgaattataactctgccactaattaaccatgtgaccttgagcaaggtcatctctgtgcctcaatttccccatgaaaatgaggatcataattaagagtactaacctaagaatcaaacaagatagtctacacactatctaccccaatgtttggcactcagaaatattcaataaacattacctgttagcataaccataagctcctagaacttaaaaaaaaaaatagaactttttcctttttctcacacattgcccaagttacccaacacacacccagacagtaaataattatcaacaaatagatttatgcacttgggtggagaatccagggaagaaagaatgatggaagggaggctctttaattgcgcgagtattttttatacacaggcttttttgtttggcttggttttcccaataaatcatttacattattgaaaattcaaatcagtcctttcaggacctgtttgctgggcaggaaagggcatcaacggtcaaccctctggctggtggtgcagcagtcagtcacaatgaagccgcttggccgggaacacagtgtcccgtcctgagattcaaaagtgctccaactggattagggagggaagcgccgcagcggcggccgtgagcgggggctccctggaaccggtccactgagtgatgccgccatctagtgaccgccctcgggatcgcggctgggcagggccctgtccgcgcaggcgaaggagcctcagaattgcagtcctgtctttagaaactgtgggtgggactcggagtgaggggcgaataaggggcgaacacagcacagagaggtgggaaaacacctcatcccggtctggggaaggaaagggtacaagggggcttgtgtccacctaagacaacgttgtggttatcagaggtcggtcccctcccccacttcaatccatctaaactttgatttgttttgtttttcctcatatgagtctcactttccagcactctgcgctgacccgttatcctgaacagactctgcttctcgtttcctttctcctatgttaggaattcagggctgggaaaattgagccgagtcatcccatctggcggctaccccgggaacagcagctctgcgcggtgacccggctccggccgcacctgccgcatcgccacgtgaccgcaggtaagggccggctgcgggctgggaccacctgggctgcggctggaagaggccacggactgcttgcgtccccagacctttctggaatgt

SEQ ID NO: 43738 - DNA, 731 bp, Bovine  19866881816512
  misc_feature (1)..(1): n is a, c, g, or t
nctccttaagggtgaggtggtggttagttgctcgtcgtggccgactctgcgatcccttagactgtagcccaccaggctcctctgtccctgggattctccaggcaggaatactggagtgggttgccatatccttctcaaggggaatcttcccaacccagggattgaacccaggtctcctgcattgcagtcagattctttaccggctaaattactagggaagcccctaagggtgggggcctcatggtaatttttgcatttccagtgcctggttcagagcctgactcacagggctcagtaaaggttagctgttgcttctgattcttttcatcatcatcatctaccatttaagtgcatttttattttttaatcctgggtattacataaggatatatagggttttgttttccagggggaggggatcctcaattgtacatgtttaaatttcatttcaaaggctaaaatctttaatgctgtctgatgtagacattatttactgtgctcaatttcagatacatctatataatgggaatacaagaaagaaatgagaaattgttttacagaatactgcaagatgatattgaaactctaatgccaattgtgtatacaccaacagttggccttgcctgctcccagtatggacacatctttagaagacctaagtaaggcttatttttaaaatatttttgcaaattaactattatataggaaaaaaaccagcaccgattacattt

SEQ ID NO: 43739 - DNA, 1491 bp, Bovine  19866881994012
  misc_feature (1)..(1): n is a, c, g, or t
ncccttggcatggttggtaagagcattgaaatacttataagctccttaactctcttgcaaggttggtggctacctgggagaccaaaacaaaataaaaaagaataaatgacgtttattgagagcttcctatatactatgccaagtttacaacaatatgaaaaagcattgcatacttagcattcccgttttatagatacgaaagttgaggcttcagaaaggttaagaaatttaacccatgtaagtagcagatatcaatgataggattcaaagctaagcaattttttaaaaatcatgaacatttcttaaattgatgagaaactagttaatggaatcccatgtatccatcactgagattcagtagttaagattttacatttacgtgatcagttctttttcctttgtttctatttaaacaagacctaaatatcctgttagatgcttctgtgcagctctgagatatgcccttgtttcgtcacatagtgacaatgccttttattcattcctccaagtagttagaatgataaagaaaagaagctgaccgtatgacctaggccgtcaattcaacctacagaaaactcttcatttagttatgaaagggtgggatgatttcttaacttcgtttcacacagtggtgtggtttttcacaaaggcactaatggctgacccacactgaactcagatgaaggatacagaggccagtggcaaccaaaactgtcctaatagtgagctgtgcctctttggtgagcttcattcaagccagctttcctaagaacttaccatctacataaaaaaattaaacaattgaattaattctttaatcctgagagctaagtcaggctgtgagttttaagtagattgtgcattggtttttgacatacggaatatttctgctggactcacggcatgaaacttacacttaattttttctttaaggtctttgatttgcgtcagtgtcaccgtcagatgcagcagcaggcagccacggcacaagctgcagcagctgcccaggcagcggccgtggcaggaaacatccccggcccagggtcagtaggtggaatagccccagccatcagtaagtatgcttttgattttttttgttttttcaagtgtagtagttggtgctttatcttgattgactcagttaattagttactttaaccagtaatagaaagtgaagttctttttactgggataataacatttttgaatttgtacaaaaaaaaataaaaaagcctgttcatctataatagttgccctttgtttatggccctgtgttcattctttttgtatcaaaaaagggactgtgggataaagaagaaagggggttgttattattatattgatcagtcttccctatttttgttgatgcttttaattcttgcttcaccagctagggtgggttgtaatcaccagtgtgctttgcttcattctacaaggaaagcatatttcaatttcagaattacacgtctctccaacttttttttaagtgta

SEQ ID NO: 43740 - DNA, 1176 bp, Bovine  19866880410152
  misc_feature (1)..(1): n is a, c, g, or t
ngagcgacttcctttccttttactttccacattggagaaggaaatggcaacccattccagtgttcttgcctggagagtcccagggacgggggagcctggtgggctgccgtctatggggtcgcacagagtcggacacgactgaagcgacttagcagcagcagcagcacgtactgtgctctaggtccttgttgttcaggatcgtattgttttttaaagactatggctcggttggccgtgggaggtctgaaaggttattccacttcagggacttccctgttggtaggagtggagaggtaagtgaaaagaggaatatgaaagacggtgtcatgtctcctatctgggaaatcttgagcaagaggtaaaatcccgactaggcttgttagactggctgtgacgatagagggacagggggatggctgaaatgacctagaaactttctggccttttaaactttcttgatagacaggtgagaggagggccaaagagagaggtgtgtctccttttattcccctcccagtcaaccaacttccgcccaagccagggatctgtcacaactcgagaggtggaaattctggtttcccttgcccagagctcccagtgcgggctttgccactatgggtacctggagggccgcactcctggcccaaccgggctgagcctcccgtcccccacctctggggcctgggagccctcccttctttctcttggatggcaccccccgcccaagagtctggatacctgggttctatgctgtgactggctcaacggtatgtgagatgtgatggctgactggaggggtggcagaccaaggggaggattatgcagagaccagggggacagatagcagcagcactaagaccagagagagagggggcagctgcagaggctgggagacgaccagcctctccctgccctgggccgctttccgtgtgatgctactagtcagcctggagggctggtctcccatctcctctctgcaagaagaggcctgtaggcctcagagtcagagaacagagcaggccggttcagacctggtcttcttgtttgggtcatcagagggtagggctgagtacaaggccctgggtatcaagagatctgaaagagccaggagaatcaagtctgaagaatctatactgtgagtacaggaatctgctccccagaaagtcctggagccag

SEQ ID NO: 43741 - DNA, 2712 bp, Bovine  19866880445700
  misc_feature (1)..(1): n is a, c, g, or t
nattcgctgtcttctgcaggcaaaggcctgggccggaaggagaatggtatcacccaggccctcagggtgacgctgaagcaggacacttatggggtaagactggacagactgcgggaggtcagtggggatggaagatgggggccttgaaaataggatgagggaggggaatgacaagccctgagttcacatttctctggcaggtgggacacgaccctgccaaggagttcacaaatcactggtggaatgatctgttcaacaagactgcagccaacttggtggtggaaactcggcaggtataagctctaatagtaggcatgtaaaacatgagggcctgggacacgtgggggtgagggtgacgtggcatccactcacacatacttcccccaggacggagtacagataagacgcctatctaaggagaccacccgccaggatcatgccaagcccaacttgctgtatcagaagtttgtgaaggtattagaggctgggggtgagagggctcacccttttcccttccctggtctcttggggtctgaacaattgccttgcatgccctacctgttctcaggactgtcctaagtggggtcctgtgactaacctcgctgttgctgacccagactgcccagatcctcagcaagaattgaaatcttcaggctgcctggatccctgccatctgctgagggggctgcaacagggagtgggaggtgggggacagtcaggagctgccagaggagagcagggcggggacatctatttcaaaggacttagaagccaggagacctgagagattattggacccattgtcttttattttgcagatgtggccagaagggggcaggtggctcactgaagagcccacaggtggctagtaacaataaaaacctgttctagccaaggactagaacccaggtgttcagacttcccttttctggcgtgccaatggaagggagctgacatttaaccatcttccattacctgcttaagggctctgcatgttatccagcagatctctcccattcatcctgtggccatcttcagccccagttcagaccatcatctcctgcatgatttctttcacagcctcataactagctaggctcctcactgtagtctcaatccccatgccaatcagttcatcctccacaaagcatccagagtgttctctgtaaaacacaagtttcactgtgtcactggctcctccttgacctaggatgacacagtctacaggtgtcagactgactcggatggcccttcaggccttgtcctcgccttcttccctagcctgtttcttgccacttctcaggacctctatctacgctttagccagattgattctgaatctttttcaggtatcgtgttttttcaccttcaaatttttgcatatgctccctctgtctgggacattctgcttcctttacctgctgaccttttccttgtctttcaaagccaagttagttgtaggaactattccccaaaccctgaagcctgagtcaggtacccctcctctggcagagataattgttgttcagtcactaagtcatgtctgactctttggggacactacggactgtagtccgccagtattttcttcatagttgcctacgttctgccacatctccttccctgttaaccacgtaggatctatgttggctgcacccatttcattcttattccactctgtatccctagccttttaatccatagtaggttcttaacctggttaaataaagaactgtgcataggtattggggcagggtcagggggcgcacaggttgtgaaaagaaccatctttattgtctgttgctagaaccataagatgaccgccagggggcacttgtcccactgtaaagacctgatgacccaagcacttgtccctcccttctccttgttttgcccactagctagcttggctgtgggccagggagccaggactgcgcctgccccacccattcccaactgcagcccacttcctgcccaagttgacatatgcaggttggcacacctctctggaggtctgtaaggaatgacgtcgggggctgacagatttgtgcctctggctacttgagatggtgtttgggagtggtttccagagggaagtgggatgacggtggtgttgagtgggccttgtccatccccacaattcctccttctagacggccacactgacttcaagtggggagaagccagacaaggactgggaaagctgcagtgatgacgacagccaggagcccaagcctccaaatgtgtgagacttctttctagtgctggggcatatgggaggagatgccttcaaatctcagaagaaaggaccagtataacgcttgactgtggtcttcttggtgggtggaactgttgtactaatctttggcacttccaggttctaaataggaactcactggtgaatgttttagagggaaggagaggtcaagcctttccaccacttgtaattcctgattcccacccctctccaacagtctgaccgatgagatgctgctccaggcctgcgagggacgaacagcacacaagtaagtagtggttggcttcttgggctcccttctgttctccccatcacaagcccaccattgaggtggcctgtgccactcttcaccccagaggaaatgattcctactctttgcccatttctgaagctgcctgaagataggtagctcctccttaccaacttgcctattagggaaagattaggcctctttt

SEQ ID NO: 43742 - DNA, 727 bp, Bovine  19866880468042
  misc_feature (1)..(1): n is a, c, g, or t
ncacacacacacaactaccccaaggaccaggatacacggaatgttgtgggggatattggatggccagaattagggcctgcttctttggacttggaagatggtgagaggcaggctagatgcagtttctggctcacattaggctgtacattttgccaaactccctctcaatcagggtcggattcacagagggcagggcaggcagggaggctgggggaggtggagggagtcccctcctgtctcctcctgggtcttagccacactgtaacttccatgcccccgatctgctttctggatcttcacaaggatggttagagtcagactagactggatcccattcttcactcagtcactcatgccctacttcagtcacccttgggtcactagagtcacccttggccagcctgagagtttcctctagtttttcctcttctgtaaaatggggtaacactaattccaggggccgttgtgagcaacaagcaagatgtgcatgtccagtgaggagcaagggccctgccccttgtcagggctcgattccccgcgaagcatctgaaagagcacaggtccaggagctgtggttgggggagcgtgtgctgaataccaagaaggagccacacggcatccggtgcctggcacccagtccctctagcagctttccctttcctgtggtgaatcactcctcaccaaccctggggactcaagagtccccagcttaccacaaacactacca

SEQ ID NO: 43743 - DNA, 1472 bp, Bovine  19866880555241
  misc_feature (1)..(1): n is a, c, g, or t
nggtggagggtagaagtgcttcgaagaaacgacctagaccacgtgaggggtggtcggaacctctcaccagggggacgccatctgaccacaggaaatccccttcgatggtcctgtcattgagcccgatccactggtactcccggtatcgatctgggggacaaccgcagagacgaaagtgtgcagtgagctttgctgccagcagagggcggccattccccgtcactgagcggtctgtgggcgctagcgggccaagtccccgcagccccaaatccacccttcccggtatccttatttctccctccaacctctgcacacggcaggaaggaagacaggggcgtaggggtgaaggaagaggaaaaataccactagggctagaaaagggaaagtctggaaaaagtaaaaactttcaacagcgccagagtcggggagagtagatggaggcaggagagccagggaggtggggagcgattataaacgagcccccaaggaaccaccaggcttatgcaggtgtgttttctgcgtacttctcagccctcctctgccagaagccccactgcccacgtgtggagtgggaaggagggagacaggaaggaaaagtgaatgaatggatgaggtaaaccaagtagtgagtacctgaatgaacgtataagggagttaatagcacactctttaactgactgactgatgagtgagggaatgtgtggatgagagaacaggtggcgagggtcgcctccctccctgtccccagcccactgttgatgaagtcctgtggctgtggcgtgctgatgctggccaggtgcgcgccgtacatccggcacttgttctccgcctcctcccagctccttcgggcagaaaagtgcttgtaacaggcaccctggaaaggcgtcccaaccggggctgcagaagtggaggcctgggacacagaagggcaggcagcttatggggaggaccccagaactctgagaggctgggtccccagacagggagactgggctcctcccaccgccgcagaccgaggggcgggcctgagggcaggagggcgcgcccaagagcgagcgcccgcttaggagctggaggggcctcgtgcagggcggccctgatgccttccttctctgcagcgagagaccagggtgaaggctggagtcccgacctgggtctctgccatccgccatccgaaagaaaagccgaaccttcctctcctcccaggagaatggagaccgacaagtactgagtgtgcctgccaaattccaggctcacagactccccgagagagtcgtttttggttccacttaacagataaggaaattgagggtaggcctcggagaagttatgtgatttgtctaaaatggtaattcattatctgcgtttccactgcaggaggcctgagttcatccctggtagggaaccgagatcccgccaggcgcgcggtgtgtccaagagcaaggacaacaaatggaggttcactaatgaca

SEQ ID NO: 43744 - DNA, 1069 bp, Bovine  19866880599389
  misc_feature (1)..(1): n is a, c, g, or t
ncaacaggctcctctgtccatgggattctccaggcaagagtactggagtgggttgccattgccttctccgtctggtatgagcaggtgacaaaggcaggcaggacatgctgtcctgtcctgtctggctgagcaaggacaagcccccagggcttttcttagcccaattccaccttcccttcactggttttctgctcttggttcccttccccagagacaagtcaattcattctaaaaatctggttatttgaagagagcaggtcctgaaatgataggtctgctcatcctttgcccttttgccccaacactgagatcgtctggtggtgatggtggaatgtccttcctgttctctgtccttcagctctcctgtggtgatggcagcctgtccccatccatttctaaagtcttggaatgactgggatccctcacatcttgccccaaacccagggtcccacagtgctgaggccattctgttcatccttctgtctccaagggatggcttctctcctgagcctttctttaccagtctgtctaaagtagtacttcccatctccttactctgctgaattgttctttagatagtaaagttataatgtatgtttaattgcttatctgtatctagaatataataataggggcagaaatcatactatttggctctgcactccgtcctcagtgcccaggagattgcttggcatggtacatagtggacacttgattaatgcttgaggaatgagtgatgaagtcctggggtgctccctgggccccatgagtgcttcacagagaggatgagagagaattaagagaattccatgatctctcagtctaacccagagccctcacatgcaggcatgggctggggggagagccacctctctaacctcccactggcactttccttctgccacagactctgcccagccttctgccatccctgaggcagccaacccagcctctgacctggcctctgatgcactggaagccattgtcacagtgactgagaccctggaggaactgaagctgccccaggaagctgggaaagcgagtcccgaggagccatctactccatccc

SEQ ID NO: 43745 - DNA, 1679 bp, Bovine  19866880599390
  misc_feature (1)..(1): n is a, c, g, or t
ngggcaagatgtgagggatcccagtcttccagactttagaaatggatggggacaggctgccatcaccacaggagagctgaaggacagagaacaggaaggacattccaccatcaccaccagacgatctcagtgttggggcaaaagggcaaaggatgagcagacctatcatttcaggacctgctctcttcaaataaccagatttttagaatgaattgacttgtctctggggaagggaaccaagagcagaaaaccagtgaagggaaggtggaattgggctaagaaaagccctgggggctgtccttgctcagccagacagcacaggacagcatgtcctgcctgcctttgtcacctgctcataccagacgggagaaggcaatggcaacccactccagtactcttgcctggagaatcccatggacagaggagcctgttgggctgccgtctgtggggtcgcacagagtcagacatgactgatgcgacttagcagcagcagcagcataccgacaagctaacctgtgccctaggctgcttctgtccccacctgctccccactctagtcatcctcctccctagttccatctcctgattcagttcctctttccatttcatcccagaatagtgcttggcatataattacaatcagtgttagaagtgttagctactgttattataattatcatcatcaccattatccatgttccagtaagcctattcagatggacctgtcttcctgtggacttgactttcctactccgcccagcctcaggccaaagctgtctggagatcagtcccagtggaagtaaagcttttctcctagtctttcctcatgctgggagtgagacatcttgtcttcagtcagactcggggctcccatggcagcagttgcatcttcctccttcagactaggggctccctgagggtaaagactgtttcttctaccaccatttctgcctccagcagaaataccagtattagtacaactaaagtaccagtactactgaaggctcccagctggggcaaggactcagatactctacggcaatgcctccctaactgtcagtcacccttggcctgggccctgtgcctctcctctagctctcaatataagacgtgggcaggaagctgtctctacacccaactgtccttaaggatctgctccctgtgaggggtaggggattacatctgtccatcagtatttggtgttaaagagttgataccttcaagcttaagctgaaggctctggaaaccctgctgagggctctggaggctatttggttaagtgaagtggatcattccttggattcagagaatgttggtcatctctgctctgttcatgagctgaccagagatggagacatgattggcagcccaataggggagaggggggcagtttaggcaatgcagagaggtgagccctccttgaggccacacagaccaagtcagagggcaccacccgcagcaccaggaggcaaatggcaaagacccaggagaaactggtcagggccagggtggaactggagggctcgactctgactgcctgaggttggtctcagcctctgcaagggagtgggctcacctcggaagcagtagacgttgaagcggctgtgcttgttggggaagccagtctggttggggaagaggaagagagtcttgacaccagggaggcccccaccacagcg

SEQ ID NO: 43746 - DNA, 1171 bp, Bovine  19866880677209
  misc_feature (1)..(1): n is a, c, g, or t
ncccgggccagggggtgaaggtccagtggcctcattagatgtccccaccactgtgccccttctccagccctgcccactcctcaagtcgcccagatcgctcttccctttcagatcttaaaacccaacagaaaaggagaggtgttgtttagatctcagtatgcagccttagctctttcagcttccccatctgacttgctttctccttgtgcaaacagtaaaggggaagccatgtctgttcttttgcccaaggacagcaagacaacaaacggggctgggtcacagggctctgtgcccaaaccgctccagaacttgtcttaaatagcaataacatttacatctcccacctgggggttgtttggaatcaaaactcaatccagtggcttttcacctggaatctaaacaccaagaaatctcctttattcgttccattccgtggaatgttccacacagacattctctgtgggctgtggagggtaagggggtattccagctggaggcagggggatagatatgatgacccctcaacattcccttcaggggatccctgggtcaagcagcatggagcctgtttcccatcacatccccaacgcctccaaactcatgcacctttggctggagagaagataaaagccctccagggccaccctattaccctccctccttcccttactgcctctccccaaccccaccagatgattcctgaacaaggtcagactgtaggacaaggggaacagtgacagctggggctttagcatctcacagagctggctttaaattccaacacacgcatgcacacacacacacacacacacacacacatccctacacttctcactgtgtgaccttggacaagtcacttaacctctctaagcctcagtttccttgtctgtaaagaggggatataaaatatgagtagcaggaaaaagggagtggtgagctggggaggccatctctccccaccactctacctccacctgcctttaagagggcagatcaggctgtattctcctagaagagttacaaaccactctggtcccagtcacacacactgctacccccacctcaggaagatcctgtttccatctgtcctaaatccctcttcttgcaagtaaggtctcagagacagacaaaaaagaacctgtccatattttttcttagaaccctttctcat

SEQ ID NO: 43747 - DNA, 1528 bp, Bovine  19866880810298
  misc_feature (1)..(1): n is a, c, g, or t
nccctgaccttgcctctgtccccccactaaccccctacccaggtactatcgtggtgctgtgggggccctcctggtgtttgacctaactaagcaccagacttatgctgtggtggagcgctggctgaaggagctctacgaccacgccgaggccacaatcgtcgtcatgctcgtcggtaacaaaagtgacctcagccagtcccgggaggtgcccactgaggaagcccgcatgtttgctggtgagagcccaccacaacccagccggacccctccggctgctctgccaatgtaatcccagcccttggtccccctgtagggctctggcctggacttcctccccaggctccccacttccattctgcctgcctcagaatctcctagaccttcccctcagtgaccctgtgtccctcgttatgtcccacccatttgccctgtctttatgggcaattattcatagctggttttaaggcagcccacattgccgtgctcagagatcctaagtgtggcagatgggcttcccttgactgtctcctgtcacactttccccaggagctttctggggtttagaggcagcaggatacagggattaagggtgtaggctgtggggtcccgtggcctagcccgtgtctcttggtgatcgtgactagatgtgggacacaaagcaagttcttttttcattctctctgtttctgggctacagtttcctcttctaaaagagaggaatagtatttagacctaccttccagtttgtctgtaggtttaaatgagccacacatgccaagggtttagcgcgtaacgaacgtacatggtaaaacgtgaagtgaatatgattgtcttgacccttcacaactaacggtgtgcttcctctctgtcagaaaacaatgggctgctcttcttggagacctcggccctggattccaccaatgtcgagctggcctttgagactgtcctcaaaggtagagcccctgcctccattcgacaggcaccgccatcccacccctgaggcttctgcgggcagcgggaggaacgcagacacccagccctcgcccgccccagccgattcctcatcccctctgtgggcccccccagcctcctcagagcctccctcatacacccccacccctggagcttagggaaagaaccagaaggccacactcccagggacctgattcttagtcccgctccacccacgtaagtcgacgggacccaggtgcccaaactcctcttccttccagcaaaacccccagtgttcagaaaggggcacgcagagtgtttatgaggagggtgggcttctaatcttcatctgccctgatcactgccctctgccctcacagagatcttcgccaaggtgtccaagcagaggcagaacaacgcccggaccaatgccgtcaccctgggcagtggcccggctgggcaggagctgggtcctggggagaagagggcctgttgcatcagcctctgacctgcccccactgtgttccggtgccccccagccctgcccagctccaggagctttctctgccctgttggt

SEQ ID NO: 43748 - DNA, 797 bp, Bovine  19866880824183
  misc_feature (1)..(1): n is a, c, g, or t
ngtaccctgcacttaaatatgcctctatttaaaatatttatttatttggctgcaccaggtcttaattgcagcatgcaggatctaattctctgactagggatcaaacccaggcctcctgcactgggagcacagagtcttagccactggaccaccagagaagtccctgctcttgttatttctgatgttgcaaaattgcccactgaagaggttgtactggtatctagtcccacccattggaactaagtgcctgtatctcagactgggcaccaatcgttaggaaaagaggacctgaagcgcctcagggaccagcaccagggtggagtggggtgggcttgaaagacaagagtggcatgcgagtgtggggtgatggaagtggcaatgtttcagagaagagaaaagaacaggggaatataaatccgagcagatggacctgagtttaaagattttcttccccttatagcggtggagctttgcgcagttatctgaccctttgaactgcagtttcatcatctattgaatgaaaatggtgactgcttccctttgtagttgttgtgagtactgcgtgtgtgtaaatatcccacaagcacagtagccattgggacttttctatacctggtgtatgtggcggagatcctatgattgtgggggagcatcacagggggatagtgttggaatcatttggtgaatctaagtcttttaatgatgaccgatcatgtgtggaaacttggatccactggtacatgtcactgtcacccagagcgaggcggactttgaagtctttgctgtggcatgttaag

SEQ ID NO: 43749 - DNA, 1607 bp, Bovine  19866880831151
  misc_feature (1)..(1): n is a, c, g, or t
nttttctttcccaacatttgagaagtaatagactatgcctcctgctccccgaccctcgccccaacgccaccaacccaaggtctccaaagtggacacccctcctgtaacctaactcctgtttctcatgctgtcacgtctggcccccctctttccccaaagggacagaccccaggccccagagtcccaggtccgagaggcccctttggtcttctcctcttgcagtcataagctcccctccccacagcccttattcactctccccacccccatgactcagctgtggcaccagaaataaaccgaggcaggtgccagggggccactgtcgaggaaccacctcccagcagctgcgggctcaactgctgacaagcggagcccaggggcccaggaggggtggctgggagacttcagtttcaggggtggggagatgtctggccccctcctccgtcttccctgctaaggagagacaccccctcgctgtcagcctcacagaccccctctccttcctgtctccccctttctgcctctcctcatctttcactcttccacttcctcccctccctcctccctggctgcttcccaactcttgaatcctttgatgtctcctggattccctctttttctattggcctcatttccctggaagttctgtgttgaaagagaacttcggtttaccttgatggggataaaggtacagaaagacattcttgccaaggatactaagaatcctaagatgccacttggggtccaaagaacatgggcccaggggtgtgggctgctccttggctcgagtccaaagtggtcaagcaacaggcttccctctgttaacggcttctaaagacctcgaggaagaatcatcagggaataaacacagaggtcacaagatctacccactcagagtgttgataagagtctagagtctttcagcggagaatttcctcccagagttcttccttctccctctttgcttttctctcctctccttcccaaccttttctcctgctctgcctcaggcttccagttctcccttcccaggaggaagcaggcagttttacaggaggcagacaggaagtgagatctcaggaaggacctctagcctggggaacagaggaagctttccactgctggaagcccggtacctggaccctcactcccggcagggtctgactgccactcctggggaaagctctcccgcccacgggggtctgacaggctgagcatttttggaagtctttgggagctactgtgtctcagaaggcagccaggacaatggggccctgtctctctctgcacaggagacaggctcacagacagagcctcaggactgggacaaaggcaccagtgaggtcagggcagggtgcgggagtcgaagtgggagagtaggagaggaatggggaagggggatgtgggtcagagcagcctgagcaaagccggggactctggtggatggaggacctctggaaaacccacctccctgggctctcaggcccattctcaatgctcaaacccctaatctaggctgggcctcctctctccacatagactcagacatcctccgacctccctcaaccccaggggaaaggaaaccctgtgggggaccccattttaga

SEQ ID NO: 43750 - DNA, 2986 bp, Bovine  19866880856461
  misc_feature (1)..(1): n is a, c, g, or t
natctagaaggcaagtgacaattagcctagcaacacactcagagcaagggagggaaagcatgttccaggataaaggagcattgcacaaaagcttagtgggacagcattcagaacagggatgatgactctcccaccacaagactgccgtgggaacttcctatgggggtccagtggtaaagactcagtgcttccaatgtaggaggcacgggttcaatccttggtcagggaactaagatcccacatgtcacaaggtgtggccaaaaaaactaaaaacacaaaacaacaacaacaaaaaactcgtaagaaaaaaagactgctgtgaaagttaaataagccaagaccctaaaaagtgcagcctgatgcttgcacagtgtagacgccacaaacgctcgtggccgctgaccaggtgctccctctgtacctcaggggaaggccctcagaagaaatgtcttgttccaatctacctgccctcctagtgggtgctggattttctagtttccaggagccctggcagcacctgggatagcacaggagaagttgttgctacagtgttgtgtggggaggaaaaccccaaacccacagggcaaggtgggaatgggaggagaataggaccacaaaatcagctgggagttgagaatgaccaagtgagcaggagaggggatctccagggaaaagctcctgggccacactacaggcagaggccggaagcaaggcagcaagggtagggatgagaagtactcggagaaaagagcagcctctctcaagtgagtgctgacagtacataggtgtggacccgcagaacaatggagagaggcccacatacctggctctgaaggcttgtccacatctccattgacacagcgcctgagggtggccgagacgggtgcttcagtggtgggctggaggagcaggttgctgaaggtgggggccagtcggaagcagcgtttggtctggaacatctgggtggacatggcttgtagattgctggcaatgctggcctcgctggggcccagaggcccattgagggattcaggagcctctgacctggcccgagatggctccagggctggggaccgtgtcccgtcctcatcctccatatcttccaggtctgatcgggactcttgactgttcatttctgaatctgtctcagcgtcaaaagctgttcccccaccttcaagactcttgtcggagccactgtccgagccctcactggcccgggccgagtcatggcttgagtccgagtcaaagccttcactcaggtcactgtcatcacctgctttgggtgggtggcggcggcggcggaggcaggagaggcgggagaacttccgactctttctgacctcaccctctggaggtactacaggaggaggctcaggccccggctcctcctccttctccaagggttccctggactccggttcatctgtggaaagaggagggtcaacgctgggacactggcaggcgttgacagcccccaccccgccacacctgtgttcccctcccaggatccccacaccccatgctaacctttccacagccacaacccccccatcctggtacctgtgccatcactctggaacgccgggacgggattctcgccctcttccagctcagcttgcagccggatgttgacgtgattgacgaggtgggagaagagggccagggtgaaggcaatggctgcactgtactgcttggatcctaaacccaggaaagccagtgttaggggctaatggccctgaagagtaggaagcaccattaattccaacctcatctcacctgttctcaactctcccaaggatttaattacctctaaaaactttctctaaggtaaaaaaagatttctcaggtctctgcactcccaccatgtaatgtgcaatgtgtcagctcatcctgcttcctcttgtcccacctcatcctgcccagctctgatgtgttcacacaggcccctccccaagcatgttcacacccagtcccgtctctccctcccttccatccaaccttgctctacatatacctctggcagaaactaactgcccccggccccactgccaccaagtctgaattccatctggatcaacagttaagcatctcaaccactgtctgccttggtcccagacaagggtgcatgtatctgtgcgtgtgggagggtggagggggtgggaatatgcctgttgcctttgtttgttcactaggagctccttcagggctctctcctacaggcagagacacaggtagtgaagggactacttgtggaagctactttatggataaggagctgcagaaaagggtagtgaggatcccagaagccagtgggagagaaaagagggacatagggagagttacctgctctcttcaagctgtgcacccccataaggcagatgatgaccatttgaaagatgagaagatctgggaggaaagcatatccactctcatactcctcctcatcctcactggccaggctgaggttgggtgaggagggcaggtagaagagacagaggttgaagtcctccaggactgactggcaaagtgatgtcagctctgagtccacggagctgtggaagcgcaggagtaatgggaggtcagtgatgggggctgaggcaggcacaaagagctgggaatacaggattcagagaaaagactatgggatcctacaagggagacttcagagaggaggagggggactcagtgctggctgatctctaaagcagacagaataacacgggaagggcagacatacagtggaagggatgtgggtgggcttcccattcggccattccttcaacttccagtaagcgcctaatctgccagagggtgagccacccagagaatgggcatggaacctagggtgagacagtgagggatgccgagaaaggactaaccagctcaagaatttccaattgagagacagaattcaccagcccccgccctcctctccaagtcccctgccataaaggagccactgggacggggctcccaggacacagtt

SEQ ID NO: 43751 - DNA, 2134 bp, Bovine  19866880887421
  misc_feature (1)..(1): n is a, c, g, or t
ntggttgcaatcttagcaccccgctcctggcagtatgtccgcgcctcctccaaggtcagcttgtctggaggggcacccaggaacagctctcctggggaggaaaaagaggctgggttaccaggaaggtagctccttccacccggggctcccactgggactctgggcaagctcctctgggcctcagtttcctcatctgtggcatggagcccatcgtcctacttcacaggatcaaagtcttgacagaaccttgctgctgctaagtcacttcagtggtgtccaactctgtgcgaccccatcgacggaagcccaccaggctctcccgtccctgggattctccaggcaagaacactggagtgggttgccatttccttctccaatgcatgaaagtgaaaagtcaaagtgaagtcgctcagttgtgtctgactctttgcgaccccatggactgcagcctaccagactcctccgtccatgggattttccaggcaagagtactggagtgggatgccattgacagaaccttaggatggatactactactcaaaggaacctggcccaacttcctcattctgcaaggaaggaaactgaggctcaaagatgctaaaacgtaaagggatgtatggaaccttctggtgggtctgatggtaaagaatcagcctgcaatgcgggagactggggtttgatccctggatcaggaagatcccctggagaagggaatggctacccactccagtattcttgcttggagaaacccatggacagaggagcccagtagtgcatggggttgcagagtcagacacgaacttgagcccctaacactggatatccaccaaagagatgtacagcaggtggcagcagagtcaaactcaatctcctatctcagccacctgtctggaggctttggctgtgaacctgtctctatgacagtgtttggacttgtctctatgacagcgtttggagagagggacactgtttcccttactcctggctacacacttaaacacagtatggtaaggtccagcagaggcccaggaggacctaagggcagccctggagaggggtctcttcccctgggaacctcccacccccaatcaccatttagttcttcagcataacagtaaacatcatagaggtcatcggggtcgaccactcccgtagttccggaccccaagggaagccatccatgtctccataacaggcctctcgtggcgtctggatgggatacctggggcggaggtacaaatgccttcaccaggagccgtcctgtggtgacccccggccccccaccaatcacattgctttcagtgcagccaagtgtcttctcagctctgcagaaatgcatccccgccagcacacagtcctaacccgcccgccgcagaccaacttcgtctcccacaggcagggagccctatagggcccgcctgtggcagcagccggcagcccctggtagaatcagaagccatagccccctcagaaacaactagaaattcgtggtcaacagccccagcccacctcacggtctggtcggacagccagccagcgtcacactgttcatagcccccgaggtaggcggcatagagctgctccggagtggcgattcgggctccgatgcgggcacaggcctcctgggccccagcgaaggagaaagcgtagcgggcagagccctcccggtagagaaagacgacccctgaggggcagagaggaccctgaggcgggatcacccagcacactgacttccccttactctccttgtcactcccctgtagacaaagggtaaagtccagattgtgctcactctacagcatgagggacttaatttagactgtgggtagaattttcctccgcctgaagaaagaaaggaggtaaactccttttccagttcggtctgcgtcttctaggcgtctgcttccgtcccacacagtgggctcccctccccttctctgggaaccctctccatctccgacctctcacctttgaccttgacctccaccgcgtcgctgctgtcgtcgatgccgtgctggacctcgcagcggtaaatgcctgagtcgttgggccgcagctcactcagcaccagggagacgtcggtgagtgacgccgggtaagcaggcagtgccacgcggaaccggtaggcctcgct

SEQ ID NO: 43752 - DNA, 3482 bp, Bovine  19866880892112
  misc_feature (1)..(1): n is a, c, g, or t
ncagcccagacagaacgggtattaaggaacccttccgtgggcctccgaggagtggttcccgactgtgccgatggctaccagcggctcctggaagatgccatggcaaagaagcagcgcccaggtagtggcctcaccttgcctctccccttcttggccggccccagctacctctcaccacctctgagccttctttgcctatttggcttctgcttaggagatacagcactctgggttcaacatgccatgaaggatggcactgcctactactttcacctgcagaccttccaggggacctgggagcgaccccctggctgccgcctcaacacctcccacctaacttggaaggagatccaggttggtggagcccctgtgagagagggggctcgtggtggggaggtttcctgtgggagaggctcccacccaccaggacaccacaggccctctcttcttccacttctgcagtcagctgtcaccaaggtcaccactgcccatgaccgccagcagctctggaaggccaacgtgggcttcatcatccggctccaggcccgcctccgcggcttcctggtccggcagaagtttgcgaaacattcccactttctgaggacctggcttccagcagttgtcaagatccaggtagcggactctgcccttctgaggtggcacagctgggcttccctgaagttcagaggttcctcctgctgcttctttgctgagtggagttggggagatcttttggcctctgtgcagtagtagtaagggatggatgctggagcccagactccttgggtttgaatcccctctccaccatgttaactaattactcactctctcccagtttcctcatctgaaaactagtcatctgaaagttgtagcacccctctttagggtgttatgaggtgatatctaaagtacatttaaacagtacctggcagataggcaagaacacaggcaaatgctagttactgttgtcctcatcatcaccatccagagggtatgagagctgctttttagcttccccacagagagagcggaacaagatttagcatgacatcagggtttagacaccaggaggactagaaaggagtagtgaagaggtggtagtggtgattgttaaacagaaaagggatggaatcccttggggaaagaacttctacctttctctccagccagccctttccatttttattcttccaccctttgggtggttcagtgtggcctctgagaccgacccataagtcactcaggcacgaggcgttgggctgaggtgctttccaagccaggaacagtgggagctgagcaaacagaggcctcctcaggcagacatgctctggagggtctcatggcaaggtgggcagtgtaaagagactttatttaatgaacacctccaaatgcccagtatctgcaaaggataccatttggcactgggcaagggtgagagatggtgtgtgagacacagatgcgtgctcacgtgtcttccattgcaggaactggaatacagtgggtgttagatgttgtgatagtggggacacacaaataatagcagagaacccagggttcctgagggagccagaggcacagagacgggcaaatgccctcgatggtgatatggaatacgtggtcactgagcgtgcaggctttaagtcctgaggctgcagtttgcgttttggtcctgttacttatgggcgcctaccgagcccttgccagccctcggtttccttattcatatggtgcttgcctcatgctggttgtgagggtaaagcaggaaaattacatgtagcacttattgtggggacatgctctattggtgaaagccgttatgagatgttaaatttgggggcattgatcccagaactcagaaaccttagccatcagcatttagtgtctcaatcaatcctcctgaacacagcctggaatttcacaccagctaaggagcagagaagccacaccaacagtgggagaggggacagagtcagaaagtgagttcgccacccatcctagagctgtgctgactctggcctgggtctgggaggcagagaagggagagggggtcggaaccccaaggccacctgccctccagctagggagagtgagagtcagaaacgaagcagcttgggtctcctgagagctctaaccctggccaggactccagtcagggtcaaaattctcaccaatccagactgagaggctttctctcttgaaggagaagccatgtggggatgggtgggtggtaaaagcagagaggagacccctccgccttttcctataacaactaacagtgtgtcaggcagtacctggagtgggaggggaaggggtgctgagaagggacatagacttggggctccctggcctctaggctccaaaatagacagctggtaccatgggaccaagctgcctgttttatatctttcccaacagaaggacggtgtgagtcttaggtggaaagcctgcccaggagagttggctttaggaaaggctggaagagcagttggctgaaagggggtgctcttttaaaaaatgttttggctgtgccatgtggcatctgggatctttgttcctcgaccagagattgaacacataccccctgcactggaagcacagagtcttaaccacgggaccaccagggaagtccctgaaagtcaatgcacttaacacactaaaccatgacatcttcagcggcagagtgtcctccagggtctgagtgcccaggagaagtttaatatgtgccctaaaagacaggtatcagtaggtagagatagggctggggtaagggcatagaaagacaaaggtttggggcagcagatcataaagcatgtttgaaagaaagtgaaatgtctgaggtggctagacttcttaaaggatgtaggaaccagtagacagtcagacaggagtgtgggatcagatggttgagatgtcctggaaactggggctatgagaagcatgatccaagtagtgttttaggaaaattcacacaagcttggggtgaagggggaaaggcccacaggaaggacaccaaaacagaagggagtcatgggatttgtgtcttagagaccaaagcgggtgtgattattaaggagagggtcatttagacacctttgcagcagactagtcagcgaggaaaggccatcagcctgacagctgaattactagggaccttggagggaagatttgctcagagctgaggttcagagctaagtggtagagttgtaaagagaagtgtgagttatgagaacatgaatgacccgctgcccagagggccgttggcagagatggtgggcacacagctctgtgcctgcacacactttccagccattgcaccatgcacgtctccagactttggattgtgtgatggtgtgtgggtagttttttttttaatatgtatctgtttggctacattggatcttaattgcagcacgcaggatcttcgctgtgtcacgcagggtctttcattgccgatcacagactctccagttgtagcacgaagg

SEQ ID NO: 43753 - DNA, 1512 bp, Bovine  19866880936044
  misc_feature (1)..(1): n is a, c, g, or t
ntttcccggccctggacattgccctctgtctcctgctaaggtttccttcctccaagagaacctttttcaatcttggcttttttttttcttttcagaccaaaaagaagaacctacttcatccagttggcttcagtgccctgtgagaagccttcctgattgacggaaagatgagactaaattctagcaagttgagtggctccttcaagaagcctgtgtgcagggtagaagtggagaggccatagcctccagcctgggcagcccattggcacctggagccacctcaactttgcctcccctttgctcctgtgtctataagctgcccagcccagcccgtcctggtttctcctgtgtcttctgagctgagatttctctgagatggaagccccatcccatgtctaataaagactcttgaatactgaacaacattactggtggtagtgggtgtgcctgggcaggggaggggctggatgagaggagactagttaccaggctccctctgagacacgggtcccctacctctgggatctaaggcctgatggtctgaggtggagctgatgtaatcataatagaaataaagcacacaaaaataaatgtaacactcttgaatcatctcaaaaccatccacccactcaggtccatggaaaaattgtctttcataaaaccggtccctggtgttaaaaaggttggaatcactgctctgagagacctgtgctgtagaagccaccatggcaacaaaatggggaagcctcactaagagagaacctccacctgtgcagggctgggcggggcgcaggtgggctccttccacctctctgagccgccccaggcttccgggaacaccgtccacgatctggttacttccagctccgagcagtgggctgatgctcccagccaaggaggcctctaggtgccatcccaagaaccaagagaatgagagaggacggggatgctcccctggagtgcctgtgtggaaagtcaccgggtggccctctatcttggccgcaatgggacacatccttagaaatgttccccagggtttgaacagaccagagagaaagagcacccctgcttcacagggtcacccactcctgcttcctctctgtccaccctgagtggagacagaatgggatgaatgtgcccaacaagaaggattcaggttagacagcaggtaggacttcccagcaatccctgggagggaacctgagggagtggggaaacacggcaagaaggacctgtgctcttggtctcatttcccccatgacacacctgtataaaacatgctcccccagagataggccccctggaaagtgttggcagagtccagagtgccaactccttttaagcattctgctgctgctgctaagtcgcttcagtcgtgtccgactaccactccctaaaaagtccttcctcccatctaacaatcccttcatggaactatagcttgaatcctagaatttttctaaataaaaagacttaagataacacacatggtacaatttcaacagcacaaag

SEQ ID NO: 43754 - DNA, 1585 bp, Bovine  19866880945507
  misc_feature (1)..(1): n is a, c, g, or t
nccgtttcaacctgcttgggttcctttggcttccaaaatatagtgatggcccagatgagagagaaactcgtgatgcagctaagtttcccttaaaattatgctatacagatagaattcttcagtaaaagaatgtgagttagtgattgtctccctcccaggggatcaacctggagagcaagcatgaaggaaaacagagccccaagcgtcctgcagaggcctgtggtcaccatacctggcgcgaatacttgcctctgtctggacttgcttggtcacctttcacctttgtctggcaggctctgcagagcccccaggtcactcttggctaatggtctgcttatcactcagttctttcctcgtgccagagtaatctaacaaatctgatctaatcttctttgttgcgcaccttcagaccttcacgggttcttccatatttctccaagacttgagtcccttttcctcctcctcctggtatgtgagaccttccgaatatctctccgacccttctcttcacatcccaccagcctagccgggtcagacaacttgttcttgcttgatggccgcagccttgcccactgccaggctctgtcctctagattacagttcccccacattgtcaccggtgggaaccagatgaaaatgtcccgcagagctgcctcacagcttcctcctctgtgaaatcgtcctcctctctcccctgaagtctcccctcccctgcactgccagggtactagtggggaaaggaaatacctttcatagccgtgacagcaatgccatgtagtaattctgtatccttatttttttccagtagattttgtgctccttgatggcaatgcccatatctgcctggcattttataagccccagcatttgaaaactaaaactacattgatgcaccatggcccctttgcagcccaaatggctccgccttgaagctggttccctattcctgtgccctgtcatcaagatttggtctctggaggttgaccaacctcatcttagctgcgccccataacctcctgtcagtcttgcgctcaccaccttaggaactcacctcggctatgacagccactccttgttacctgctgagctattccacttctaggcctgacaaattgcttcttccagaacctcttcttaaagcgacccagccccttttcctcctgaacatttagaaatacatttggaacctagcagaggttcaaagctatttccactcagagattgccagcagaatctatttagctaggagaatggaaatggcactggatgcccagcctccacagcctctctctcctcccctgcagtgctccgggctgtgcagaggatcaacaaagctatccggaggggagtggcagctgacactgtgaaggagctgatgtgcccagaagcccagctgcctccagtgtacccctttgcctcggctgtgtaccagcaggaactggcagtgctccagcagcagcagcagggggtaagccctagaagtgagggtccagctctcgggttcccaagcagctggagggatcagagcagtcagtccagagcacccatgagagcactgttaaatgctggcaagtgactaggggtg

SEQ ID NO: 43755 - DNA, 849 bp, Bovine  19866880973068
  misc_feature (1)..(1): n is a, c, g, or t
nctccgcagtctttgcgaaggctgggagcacattttcaggaactgtcttctttcagtcaacgtgagttttctggagaaggggccctgggctaccattcttacagaggttcttaagagctggctcctttccctagggttccttcctgtggaggttaaaactccagccctccgaccgcagcttcacttgagtagaactattctctttctgtcacatctgcccctgagcccgggctatgacagtcaccattcgggggactgtagccccttaccgtcattgcgaggtcctctccgcagaaacatgtgacaaacgcgacttgcgcgcagccatcttcccggaagtgctgtttcgacccttctaggctgtggaaaccatagagatgcacgctagaactgagtctctgtggttcccagagaaactatttcggagaggccggctagccctatggttgccatagaaactccgccccagagcgagcccatttctggagattcgagtggtattctacttattgcctcccagcaggccctgagcagctaagggacttcagtcctacctggctttgttggggttcggagaatagctttgggtccgacattgactagtcccaggcacaaatacgagaaaggaaaaatttaggtgaaagcattgagagtggcctgagaggttcgtggaggcagagaaggaggtagtacctctgaggtgattaataattcaggggatgaatactcagactacagggacagttgtttttttttttttttaaataaaatcctagaggtaagaggtttcaataggttcatcaaacacattttgattcaccactgtgtgccaggacctgttctttggta

SEQ ID NO: 43756 - DNA, 658 bp, Bovine  19866880976706
  misc_feature (1)..(1): n is a, c, g, or t
ncgccgagccctgcatgcggagccctcccaccccatcccccagatagagggaaataaccaaaaaaactaccaaacaacaaaaaccccttacaatagactgagacccagagtcggctcaatgagtggtggtgtgttttagggggaagaggaggcagaggttctgaaaagggtctctgcctccgggctgttcttgtggccacgggcccatggggcagaatacccaggcctgggccccaaacgcccctgtgcacgcgcacgcacactctcccattcttgtgtgagctgcgcctccaaggtgtggaggtgctggcctagcgagcactggggctggaaggctgcctgggaatccggggctgtcggggagggggttgagctggggccccctgtgaagcacagtaggagagagacagagccatgaggagagagctgaggaggggccgaggggctggggcagggggtgagttgggccccctcccttccccagcgttttctctaagatatacagtgcaatagctccctgtccctcagctgacaccagcccagcaaagctggccacgaagtgcagggcgaaccgggagagggaggtggctccacaggagacgcctcaggcaccctggggtccttgcatccagggactagagtgagtgaggggactcgc

SEQ ID NO: 43757 - DNA, 855 bp, Bovine  19866881003821
  misc_feature (1)..(1): n is a, c, g, or t
ntgctagcacaaagtcagatgacagcagaatctgtgttttgttcgctattgtcccagcacctagattagtatctggcacgtgagtaggtactcaaacattagcaatgaaagattaaataaatggagggaaggggaatgactgtgaacccaaccattcccagaagaaacacaggtcagggaactgcaaaaagacccagagaccgggcctgggcccagaaacaggacatcatgcagaaggctagcctccgagcacaagaacttggggtcttggctacactctctccatcacccatcccctccctcagcatgctgctacacctttcttaccgctgagcgttctccctgtccacctcggccaggcccgtggcggggttcaccagactgctccagaagccactagcatccttggcttccagagcccagttgatcaggaccacggctgagagcatctccacagccacaaagagctcctcctgggccagctcctgcaacacagggagggctgagtctccacgggctggtgaagggcttgggggcccagctgccctcctgcccccaagcctctcccacatcccagagtctacatctcaaaacccctacggcctaatccactcactaataattaaacttaataatgcttactacgtattcaatgtataagtacttagcgcacactatcacttaatttttctaacaagccaaaaaagtaagtaccattgatatccccatttcacagatgagaccatagttaagtaatataagttaaacctaactgccagacaccagagcccacactcaaccagtgagttctactggtccctacggggcgctaagaactgcactcagccctgggca

SEQ ID NO: 43758 - DNA, 1973 bp, Bovine  19866881036539
  misc_feature (1)..(1): n is a, c, g, or t
nttgcctgagaaatctcaaagtgtgagggaagaggcagttaaagagacattgacctgttgagagaggatgggaggtagacagggagggaggaggagttcagagaaggaggcgcacggtagagacccacagagaactgtcccctagagaatgagaggggagagagcacatccttggagcactgctcccatcctgtggctctttggggaactgcagctagagacaaaaccacgtcctgcaggtctggctcagttacctttgatggtgtgcatgcatacaagtgtgctcagtcatgtctgactctttgggattcgatggactgtagcccaccaggctccttctgtccatgggattatcccagcaagaatactgaatgggttgctattttctcctccaagggatcttccaaacccagggatggaacctgtgtctcatggggctcctgcattggtaggtggattgcttaccactgagccacctgggaagccccatcttcaatggggcctttggccttcacccactgggctagttaccaatcagccaaagccctagcacagccctggtgttgggggacgtgccacaatcccccacccacctccccacccccaggtggcctctggaaagtggtatgtgccccacacgtaggccctggggcagatgaacacagatgagcagtcaagtgcagcatccttgacatcagctccacttattcaccacccctttctccgggtaacctccccccccacccactactgcttgtctcaggtgtcatctcaccagggtgtgagtcggaagcagtccaccccgggccaagtgggtccttatggcatctgtcagcttggccaccagccgctctcgcacagaatctgactccttctggggagagagtggataatggggtagtgggaaaagcctgggcttcaggaccggggaggaaatagaagaggaggaggggaggggcctttgtctcttctcttctctagcccatccccatgcctttgccagcatcctgccaccgcctacccagaaccatggacagaggtgggttcttcctcacaatagtgtcccaggacccagcacactgtgtgcccagtgcacatttggtgggtgaatggatggtggggagagacaggaatattagctggagaaagcatgtcaggagagcaactggagggctattgggaaacagttcgattctgggatggagggtctcaccggactccgggccagcgcttccttatagtacttcagagcctggtcatgctgtcccagtctggctgcagcagcccccagaccctcacaggcctgccactgccccttcacgtcccctggggaagacagtctgagaagtcctcccctggctcccaaccccaccaaccttcccctctagaggtcctcccaccagccccaaggatcctcaggctttgccccaccccaagccgcctgcaagccgctcccctcaccagtgtcccgggcagcctgcagagcatgtaggtagttgtctctggcggccttgtggtctcccagctggctcactgcaaatgccaggctgccaaagctccaaccctgctccctccgctgccccacagagcctggggacagagcccaccccatcctaagagaggacttggcctgctggggcatcagaaccctgccccccaacgaggaagggagggttgccaagagtccttggtgtgcaaccctggcacacctctagaggcaccatgaaggcttgaacccttgaaacccagcctgagtttttggtctgaatgcctccccaggctactctgagccacataaaaacccagggaggcaagcaaggcaggtattaatagcttcatttttatacacgtgcaacctgaagctcagaaagtgaaggtaatgtgctgaaagtcacacaatcatttagaagaagcgctgggctccatttcaggcctccccttccagctaggttcttctctctgcccattgctgc

SEQ ID NO: 43759 - DNA, 1602 bp, Bovine  19866881042403
  misc_feature (1)..(1): n is a, c, g, or t
ntgagagttcttggccggatgcccccgatcttgctgaaggcaggcagctggaggtcatacttagccagttcagaggccatgttgctgagttcctcagctgcaatgataggacaggtgcccttcatcaggccccaaacccccaagaccccacccagactgtggaggttgggggaggagatgggcttacctgtgaatttcaccttcccatatagatcatgtatctgaggagccaatcccagccggaagaggaagagactgggaaagaatggaaggcattggggcctattcattttgacaggctgcctagaataggtttgcaggagatactacgggaatttagagatgaagaccattcagcacctgcccacaactcatcccccatttacagggagataggcaatgtaagtcggcccaaggcaatgctggagcagataagtaagatgctataggaggtctgtggggattgggaaggctttacagagaaggacacattgcagcagcaggtcattggatgggagatgtaggatgcaaagggcatagcaagcagagacccactgagctaaggcatggccacgtgaaaggatgcgggaaatgaagccaggaggagatgacgtggtggacacagaaacaggtcaatcactttctgtgacttagccaactggttgctgatggctggctgtaagcaggactaaacagccgtctctcttcacactgactgtgacagcatgtgaccctcctgatacatcctaatcggacttctctgcaccctagtcacaagctgaagactcttcgctgcctgccctttcccttcacccacagaggtcacacgtaaaggtgccctccagcacacaccacaaatctaaacaaaactaggtagatggaaaacgtcagtctgaggagtgctccccgtggtccaccctccgtccttcctgtgtcggtgtctgttgctgttggctcttggttgcatccacccatggaactcagatgataaagtcatggtctctcacctgagtgcatggatgcagtagaccacccgtggcatgttcttcttgtcataaatgtccgtggtctctgggaagaaggtctggaggggaaaccacccaattactgccactggagacttctaaagcagcaccagatatggaaagaggggctgaggaatgggtcttcctatctgacctgggatgcgtgttcctttgttgcctggggcttctgggtcaatttccccaactctttacagccagcactcatccacatactcagtgtaaaagaaaggcactgggacacactccagctgaggcccagccacagacacacagccaaaccaaacattaacccaacatcagacgagactatcaagtctacaggatgcaggccacatgctccaggagaaataggtgcctccattcatcctacagacacagccagcctctatccctcaccttggactctcaccagaggcggcatgctgggagctggccatgaccccaaaaagggcccagtgagacacacactgccaaggaccacacaggatcaggatgtgccatcactgtgtccaagccagaggtctctaaccagtggggacccctctaagagctaagt

SEQ ID NO: 43760 - DNA, 1501 bp, Bovine  19866881057646
  misc_feature (1)..(1): n is a, c, g, or t
nactgctagcgggaacagctggagctgggagtagcccaggcctagatcgttatagagttgccctagagggcatggccaaggtcactggccagatgctgctgaagctgtactggtgcagcctctgtcccactctcccagggttctcccagcccctcccagccctcagaaaggcctctgcttccacccgatgtctcagagtatcacccggtcagaaatccccccagatcccacacctcagccccaaggcctcacccagcagtccccgctcagtgcttctctcagcaagcctccgactttcctccagcacctgcatgacttcacccgccccatgctgcccgctcttcagcatacaccccgctgcagcccccaatgtcagggctgcagcctggggctgccctgcttgggcataggcccggctcgcttcttgcaggcagtgggctgctagcccaggctgtcccagagctcggtagcaggctcccatttttgcctgggcttgtccctggtcacctagtggctggtagtggcacagggccttgtggtaccaggccaaagcttgaggcaggtcacccagggcatggtaggccaaagccacattgaaacactggtcgccatgacacccgccctgggccgtctcttgaggttgagcacgtaggagcagctcaaggcctctggctgggtccccagtctccacgtaggcagcccccaggttgaaggcacaggcccggagaacaggggtgtctctggtttgtggtgacttggaagccaggaggaaggccctctggaagctggtcaaggcctcatggttccagccagccaatagggccctgtggccagccctggtgaggcttggaatgggtggcctcttgctgaggccactttcttttcttctttttcttcttggagcttgaggacgagagtgagggttcttggggggtatcctcagtgttatagggaagacatagtgctgacaatagggagcagaggggtcagtatgttatctttggtcttccaaaggaccactgtccctctatagcaattcagctctacttctgccctggtgtgaccctcagggtttcaaggatttctctctgccatctcactttgctccacctatcccattggacaccacatcaactctcactccaatgtcctgactaattgctcatcctccaagactcattttaagacaaggagggggcagggcacagtctttaaaaaagtgacttagcctgaggacacaacataaactgattagaaccaactgggtccaagatggcggactcaacttccacttgaccttgagcctcagtatatctcaatgtaacacaccctgggtgccatgatggttctaaggacgaccacaaaatgtcaaaaagtgggtgtggcccaattccttgaaatccccaccccttttccaaaacaactggaatactcctcccaatcattagcctgtgtaatcacctcaatactaacaatacccaccaagagcctatgtaaaaat

SEQ ID NO: 43761 - DNA, 1492 bp, Bovine  19866881146638
  misc_feature (1)..(1): n is a, c, g, or t
ntggaagactgtggaaacagccggcagtgggcagaggtgggtgttgggggcagggcaggagcaggagtcaggagagagcgagaggctgcttaaagggagcgagggagggaggaaggtcctgggattggatgtagtgctgtggcctgcccgagcgggtcacaactactctcatgctctcagctggatggaggcctgcctgaaggaggagctgccttccccggtggagctggaggagagcctccggaacggagtgctgctggccaagctgggccactgtttcgcaccctctgtggttcccttgaagaagatctatgatgcggagcagctgcggtaccaggtggggagcagaggtctctaccctctacattcttcctctcaaactccctcttctcaaagctgttagagtgggatgaccatacaatttattgtccagacctggttactgttgaggatgaaaaggatgctattaatctttgcactagaacaacaggtttcaatgggtatctgccagccaggcaatgtgtatcacccttaacaggcatttgctaggtgggttttgagaggccctaatatgagaacctccaagcaggcttttctacctacagtctacacgcagaggctgtgggctctactaccttgaaggtacttccagggcacgcttccccttccctgtgttctagccagcccagcctgcctctccttcccatcccagctctggactccccttttctcggaagccatactagcttgctaatcccatccctgtgccatccttcccaaatgccccgctggggcatccatacctggtggtttctgtctgtctgtgtgtctccatcctgggggcatgggaaatccatagggcagggtcctctgccctcaccccttgaatcttcaaattccggtctggactctacccatagcaaaccccaagaactgtggaaatagattctcttctctttccttccctttcaggcaactggcttgcatttccgtcacacggacaacatcaacttttggctgtctgcaatagcccacatcggtctgccttcggtaacactgggccttaagattggggttcatctttgctctttaccagtacccccaccatacacatgctttatctccctgggacccttcagtgttcatctccatgtgtctttgaaccttgttacttggtctctgcctctgtttccctgtgggtatgtcaagtgaagggaggtggaggctccctggcccaggatgcattgttcccattagtcagtgaggcccctgtataatgcaggaggtgggccttgtgttgacgggctgtctttccaccagaatttcatagtgtgaagtgaggacgcaccacactcctaggtgacaggcttggaagcctgggccaggaccccagctggacacatgccgtgtgtcctccggctctttgactcccggtctgtctctcacctgtaaaatggggatagtgatccctccctatctaccatacaaggtt

SEQ ID NO: 43762 - DNA, 756 bp, Bovine  19866881161574
  misc_feature (1)..(1): n is a, c, g, or t
ngatgctgacaccctttggggctctggcagctggcttcctggctggggccatctccacactggggtacaagttcgtcacggtacataagcccctgggccctgagcagggcagggcgtcttcacacccttcctcctctccagcaggcctggctgagggggacacacgagactcatgattggtgtcctgtctccagcccatccttgagtccaaactcaaagtccaagacacatgtggtgtgcacaacctccatgggatgccgggggtcctgggagccctcctgggtggccttgtggctgggctggccacccgtgaagcttatggagatgggtgagttctccccaccctcaccccacccccaatccaatggaatcattatccccctgaactaactccctcagtctgttcctccttttgtgggccacaaccacctcctctggtccaacctgcttctttccctcctccccggctcctgctcctgaccaaaaaaaagctgtctattctctctcattcattcatccataccctggaagctgaagaaactggggtgaacaagcctggggactgccttcttggtcctcggtcgagtgcagcagaaggtcgttgaataaatgatttcaacagtgtcattattaaagggtcaagggagagacactgacccttaggatagatttttgcacatcagggctcagggggagatgggaagcaaaagtgaccctcaaactgagccttgaaaggtatgaagggtgttgctggca

SEQ ID NO: 43763 - DNA, 781 bp, Bovine  19866881176174
  misc_feature (1)..(1): n is a, c, g, or t
ngtcacgcgtgggcagtgggggcaccctctgactcttagattgtgcccctagaatgacgtgggtggcgaaaagttgctgcagaagaagtggaccaccttcctaaaggcccagctgctttgcacccagccggaacaacttcccttcaacgttatccgtcacgctgtcctgctggcagacaattcctccaccgatccccaggtctacgcagtctttacctctcagtggtgagcaactaggcgagagcgtgggggttggaagtgggatttggggtcagctccctggcccgccagggagggtaggaactgatgtgagcgaagtacaaactccacacttcacatatgaagacatttgatcatcaccatctcccaggaatttgactcacgcccttaatgtagggctcaatgtagatagggaaaataaagctcagaaaggttcttattagtttatgtcctgcctggttccaaaaaggataggaggcagcttacaaaaggcaaacgttaaaataaaataaacctatgaggaaatggaaataaaaggagaatgagagaacccagggatggagtccgcacattacagatgattatcacttatacagttggggatgctgggacacctgtagctgtgaacttcctagtggtcatagcatagagcgaaacaccatcaacaacataagataaaaataaagtcattgcttggagattgagacttatttgttgtggtctggctcccacagtgttcaggtgtctgctgacaatgtgtcaggtaccaaagatatctttt

SEQ ID NO: 43764 - DNA, 811 bp, Bovine  19866881251631
  misc_feature (1)..(1): n is a, c, g, or t
ncttccctaccttgagcttgacgaaatgatggaatctggcttagatctcaaagacccttgcagaacagaagggcactcagttcttcacatactctgatttctactgggtctgatttactggacaaagagtcaattctaggttaagggttgctaagacaaatatatccctgaaaggggctgcatgttatggtgattagaggcatcaactttgggggagtcaagctatcttggttcaaatccttattccaccatttattaactggaaacacaggcacattacttaacttccctgtaccccatgggtaaaatagagatgatgataatagtacctaactcataagttggtgtgaagattaaattagttcatacaagtagattgctttgaatgatagcccatgctgctttataataaactcaagggcaagaccccgttaggcccattatcccacaggagcctcggaggaggcaagttcagtggaattgctttgcaaataggttggaggcttgtctatgttttaagacaggaagccagcaggctatttccttggccttggtttctgtctcttccacctgactgctccttctggaaacctgatttaaactgtcccactttgaccccaaaagtggcttcttagttccccattagatttaggagttggggccccagcaccagaagatgtctgtcttccctatcaggcacagctggcttacctgaaggacctcagggtaagcagggggagcccatctgcctggtccccaaggactctgagaagaacagagccttgtgccaggtttggggctgtggcaatag

SEQ ID NO: 43765 - DNA, 2878 bp, Bovine  19866881268521
  misc_feature (1)..(1): n is a, c, g, or t
nttgtcttcctctgtctgacttccttagtatgagaatctctaggtccatccatgttgctgcaagtggcattattttattatttatttatggctgagtaggttccattgtatatatgtacacatcttctttatccattcatctgttgatggacatttaggttgcttccatatcttggctatggtaaatagtgctactgtgaacattggggtgcatgtatcttttcagattatagttttctccagatatatgctctggaatgagattgctcggtcatatggtagttctatttttcacttttctctgtactgttcttcatagtgcctgatctagatattctcattcaaactgtggtatgctacccattaatgggttgaaatcaatttaatggttttaacttacttaaaaaaatagtaaatgcaggggacgtgggttcatccttggtcagggaactaagatcctccatgtcgtggggcaactaagtctgcatgctgcaactactacagattccacatgatgcagtgaagaacccatgtggcacaactaagacctgactcagccaaataaattgtaggtcagttgttcagtcgtgtcggactctttgcaaccccatggactgcagcacaccaaacttccctgtccttcactatctcccagagtgtgctcaaactcatgtccattgagtcggtgatgccattcagccatctcattctctgtcgcctccttctcctccttctgtcaatctttcccagcatcaggatcttttttaatgagttgactgttcgcatcaggcggccagagtattggagcttcaacttcagcatcagtccttgccatgaatattcagggttgatttcctttaagattgacgggtttgatctcctttctgtccaagggactctcgagtcttctccagcaccacaattccaaagctttgattcttcagtactcaaccttctttatggtccagctctcacatccatacatgactactggaaaaaccatagttttggctatacagactgtcagcagcaacctgatgtctccgcttttcaatatgctgtctaggtttgtcatagttttctttccaaagagcaagcaccttttcatttcatggctgtagtcactgtccacagtgattggagcccaagaaaataaattctatcactgtttccaccttttccccatctatatgccatgaaatgataggaccagatgttatgatcttagttttatgaatgttgacttttgagagggtaacaggcaggaaggccaggggtctctaaacagaggaaatagacagcaagtgtcagacatattttctctctctcttaagcggcaggacgaaacaaactacaagtgtccagattttttcaccttttctatgcaaatttaaatagggtggccacatgcatctcgaacctccttgcaagcacagaggctcgggctattggcccgcacaccactacgcatgtgtatcaactacaagggtgggtgatggagttgaggctttctattaacaccacagccaaagaggagggtaatactgtgcctctttgtcaagccaaaccctcccccagctttattaatcttcaagcaagttccccaccagccactttgctgaaaatcctgccaacaaagttgcctgcagtattgaccacagcccaaggaatgcctaggactcctagaataggtttattttcctgtggaatgtggagaagacgaaaggagtgttagacctgaatacagagatgaggagaaagtgagaaagcagtgattgagaagagaatttcacattggcttcaactctttgaatggtttttcagagacttctttttttaaaaaaaagtttttattaatatttgtattggggcgtaaccaattaacggttgtgaaagtcctgcagtcaatcctgctggccttccaaagtcacattctctgggaattcctagtcctttgtcattgttgggttccagtgtcctgtcaattgttgttaaacagctagttgcgattttggtggtctcacaggagatgagtgcatgacttggtctcataggagaaggtgagtgccatcttaaatctgtttctagagagacttctttattctgtatgaataaggaagactgtgcagtgatgtatgtcataaaccatcacaatattgttagttatcctccaattaaaaataaagttaaaaaaaggaagactgagcaggaataaggctaaagtgaagcttgaggaattggggttgggcactgaaaaaattttggctaagctattatctaagaaaaaagagaaataatcaaaataattttagaaagagaggggctctgacatttgtggataagtttggacctaccctgcttggaaagaggaaggatacgttatgtttggacatatgtttgtttcatcatcttcatcaaaatgcaatttttgaataagatctgaatgggtttccctctagccttagatagtgatctctccattcacacttaaaatttaagagttatgctcccattagaatggcatcaagaaaacaaagaatgacagttgctgttgaggatgtggtgaaaaaggaacctttatatactgttggtggaaatgtaaattggtccaatcactatggaaagcaataaagagattcctcaaaaagctaaaaataatctgccatgtgacccagcagttccactactgggtatatacccaaaggaaatgaaaacagtattttgaagagagaagtgcactcccatgtttattgcagtgttcccaatagccaagatggcaaatagatggggaagcaatggaaacagtgacagactttattttttagggctccaaaatcactgcagatggtgactgcagccagaaattaaaaggcatttg

SEQ ID NO: 43766 - DNA, 1965 bp, Bovine  19866881386776
  misc_feature (1)..(1): n is a, c, g, or t
nctcccagaactgtggagtcctaggagctctttctgacaataacggttaagagatggcacagccagagagcaactctggagagatggtgcactctctctgggagaacaatatgcatgagaggtttctatggcatttgggggcaatgacagttgactttaagatgctgaaaaaggctcccagctgaggtatgcgtcctttacacgcacagagttcttattagggatgctgacagggagctgagtgaggttctgtgaactctctcttttcacttaacagcatagcaagactaccagacttagaaggaatttcttcagaggcctctaaggcaactagtttgtattcaagaccttcccgggctgagaatggagatgacagtcacaacttatctacaggctagaagaccaagctgatgtttattcaattttgtatagttagaaactggcaatctatgggctgaatttacatgtttttcttagccttcaaaataaaaagtcagtatattttccatagatctacattttcagcttcttttagccaagatgtctcttcagatgtctgcattcccattgccacagctccccgtatcctggtcccttagctgcctggcccctgcaggtgcctgagtgcaccatctctgggttagatgctgtaagggggacttgcctctcccttgactcagacacggcactaccactctcctctcagcagactgctgttccgcagctgattcctcctcaggagggactcctcgctgagagggtgcctaagactgcgtcagctcaggcccctgaggcctcagctcctggaggggcatcagttgggccccgccgtggcctggccttcagtctctcttcttctgtttcttcttttttgctttctgcgcagtgttgactccaggtccatccaagacttcctcctcctgatactgccgtcttttcttcttgcttctcccccttttctgatcactgcacgatctgctttctgcttctctggtcccactatctacgagagcctcttcaacttctttcatcctctgtgttcaagtcttcttcctcatgctgccgcctcttcttgcttctgccacatgggtgagtgtatactctcctctctgcttcctctgtcccaactccactgacagccaccttgcctccctcattatctaagaccgccagctccgccttctcctcttcatggtgctgccccctcctcttctttttcctgaaggaccggtcgacgtgctctctgtttttcaattccccaagcccacctgttcttatggtctcttcctcattttctgtggctgtgccctctctctcatctgtgactctttcttcttgatgccgtcttttcttcttcttgctttttctgatgctctcgtcagtgtgttctgagtacttttctgcactcctttcagttgttgtaggctcttcctcctctttctgcttccttttctttttcttttttttgggggacttgctctcagactgcagttgagggaccccagggtcctggcctttgagccgagccaggaaggcctgctcctgggcctctaagcgagcaagcttagctttcattgtgatcccaagacgggcagccctgaaatagatggggcccaagtcagagggggagaaggcaatggcaacccactccagtactcttgcctggaaaatcccatggacggaggggcctggtgggctgcagtccatggggttgctaggagtcggacacgactgagcaacttcactttattttttcactttcatgcattggagaaggagatggcaacccactccagcgttcttgcctgaagaatcccagggacgggggagcctggtgggctgccgtctatggggtcacacagagtcggacacgactgaggcgacttagcagcagcagtagcagcagcaagtcagagggaggctatcagggaaaagaggccaatctttcccaatcaggcaaaggtt

SEQ ID NO: 43767 - DNA, 1160 bp, Bovine  19866881393894
  misc_feature (1)..(1): n is a, c, g, or t
naaattggacttggagaaacccactagtataagtcatggagaggcagagggcgtcagggagagagagacagccagaaatagaaattcaggctgagaaaggagtgaatgatgaaactcacttgggggagagactgaggaaagggaggtgaggagagcagggggccaggggcgttgtgccttctggttctccagagctggtgatttctctttccctccttcagtgtcactgttatcaaactgggcacttcaaacccataactgctttcatgcccctaggacatttgaggcttaagggaatccgtggacctggtgacccaggacacgcaagtgcacagatgatgctggaccacgctgtgtccaatactgtggacaccaggaatacaagaacccagagtagcctggctggtatctgggccctgggaccctgtaggcacagcttgactggtttcttactgaggctgtgggggctgctggccttccacctgcagggaaaagactcaggaaaggacatgggccctgtcggagttgcaggggcagggtctcctgggcatggctgagtcttttgcatctttctggggcaacatggtaaaggaaatgcatgttgcccattgatggaagggcctcccttgtgttaggtgctgggattacaagcataaaccctgcccccaaggtgctgatggtccccaggggcaggcaggtgggctgtcacacaaccatacttgagggtgatcagttcagtgacagaggggtttatacagctctggggaggccagcctctctggcaccttgccacatgtttccccaactcctcttcgtggttggtactaagattctctgagcctccagagctaacagttagctcatcagtcctctaatgcgaaagtgcaaacgtgctcatgagagagagagtttgagaagctcatctctccgtgccaggggccctatgtgccaggggaacgggcacacacgcccacctccgccacatcacagtgatggggagacctcagggaatctcccacagccagccgaaatccccagtctgggtgatatacaggcgcctgcaggaaactcaggagaaaaacattttctttctgttccatccacctatggcagtggttctcgtggtagaaatttcctgtagaggagggaaggaaagtggg

SEQ ID NO: 43768 - DNA, 949 bp, Bovine  19866881535819
  misc_feature (1)..(1): n is a, c, g, or t
ngcggatgagcccaaaagccctggcagactcccccatgacccgcccgcacccctgcctctggggcacagcccagagagtataaaatggcgctggaggccgggagaagcagactggccaagtccacgcagccgctgacagacacaccatgagaacccccatgctgctcgccctgctggccctggccacactctgcctcgctggccgggcaggtgagtgccccaacccctgccccagatccagcccatgggagctgggagagtaagtgcccgggactcacgctctcctcaccccttccacgggcagtccctgtgacagtctaactagctttctgtagtcttaatccatttgcccccttctctccttgtggaggaagaggagggaagagcaagctgccagaggcaggggagggtggggagggctctagggatgagcaggggtgaactgggctccttttccttgcagatgcaaagcctggtgatgcagagtcgggcaaaggcgcaggtatgaagtgggctggacgggggtatgccccatatctccgagggtgctgcccactcccagcacccgctcttaccccagtcctctcagtcccgttctcccctcctgctccctcccatctggctctcaggaaggccagcctgctcctcatcttatccacccaaactgggagccacctgacccctgcccctgtgctccacagccttcgtgtccaagcaggagggcagcgaggtggtgaagagactcaggcgctacctggaccactggctggggtgagaggaggggcggtgctgggccaaggccctgcatctgcaggatgggctgggaggagcggctgctgtgggggcaccctggagccccaggtcccgtgggaggaggggcgggcactttgcatggaggctgatgcccggtgtgggtgggttctcagagccccagccccctacccagatc

SEQ ID NO: 43769 - DNA, 1393 bp, Bovine  19866881607883
  misc_feature (1)..(1): n is a, c, g, or t
nggagagcccacgtcggagggtgacgggctctccccactcctcctccctgttcccttatgcctcaacacacagcttctcaggccagtgctgaccctgacctccaccttccccttcctccccaggcttctctgcccacaggtcaaggtagcctgtgcgcacctcgctgtcaggcttgttccctccctagatttacccaaccccaaccccagaatccgctccctccccactctcctcattcatagaggaactttctgaactaacattttattgagccctggtgttccaggcagtgttctaaagcacttatgaactaacatttgtaaagcacataagacaatatttggcacagggtgagaactcgatcaacattagctggtgtccctgccttattatttcacttaaaccttgtatctctgaggtaagtttatgattataacaagcttgtaggtgaggaaactgaggcccagagatggtgagtaacatgtgcagggtcagatgccaggatccaaactcagctagtgtggctcaggactagtagccctcagccactctctatgctgccaccgactccgggcattacaggctcaaaaccctgccacatccgtcagctcacttggtttctacccccattccagtggggagatacgaccagggcatgtagtgtcttacatagtgtataaggagagctcagggatgttagggatttgctgtaagtcacatggccactgagcgtcagagcagggaatgcagcctgggttctcagccccccagacctgtgctcttcccacacacaaggtgcccacaggccactctgtgctgtcaactggacctctgcccttcttccccaaggccagatcagaagccccctgcctcccacccccagaagggaccatgtccatcagactggctttcccagggtgcatactgggcacagctctacgcacaggcgatattcttcctgtgcttgtgaccaacccagccagcccaaacctcacctgggcctttcgccttttggccgccatgaggaggagatggtaccgaggggcaacgggaaggctgatatcatccaggctggcagcaggaagcagaagggaggagagggtcttctcagggttgtcctggtccagagcctcattgatgaggctgaccgcaaggatctctgggaaagggagatggaggtgggcggagggcacaggcttatggctaaaggacggggctgtccgagttgggccgtcatccccctgtcctggactccactcacgatcagtctcttcctggacctgggcgttgacctggctcactgcagcctgtaggtcattccagctcaggaaggccccatccactccacatatctgtcgcagcttcaccagagcatcaaagtaccggcagcca

SEQ ID NO: 43770 - DNA, 1499 bp, Bovine  19866880498103
  misc_feature (1)..(1): n is a, c, g, or t
ntgatgtgggcgtgatttggatcctgtgcattggctgtgtcccgtccccatctccaggtcactgctggcccccggcctttatggggatgttaaccatcagcccctcgtgctgtctacctatttacacctctcctgagtcagtactgaccttagagtggcaagagcctgggcattaaaaatcaagcccatatagtccacctgctggcataactaacgtccattaacctcacctgaaaccattcggttcggacaagacggaaaccaagcttcagttcatttacgagagttagccaaagccttccagggcagtgcatgaagcctgcagtgaaccaaagaccatgcaaaggccacagaatttatttctactagaattgtctcctgatctacaaggagctataatggcaaatagcagggccttgaatattttacaagaaaagttttccactcgcagtaactgagctgttcaagctctctctccatcattcttgtctcctttgctcctaaatgttctggctcttgaacacacacacaacttctttgtgtgcacgtgtgtttagatgtttgagaaaaaaatttcaagaagacaaaaataaaaggaatacagcaaacaatcaataactgttagaacaacaacactgactattgctaagcattttatctcatacactttggattttttattttgtaaaataaaaatagaccacattgtgattttctttgaccatcttctcccaatgcagagacatccattagcataaattgcttttatgctataagtgtatatgtatgtatgttatgtatacatgtacatgccacaagtgtatacttctggtccatttattctttaacatacacacaaatgcctattaaaatgtattagtatatgtgtgtatatatatacatattaaagttacatgaacagcatcatgctatactcttctggaagttgctctttctactgtatagtctgttttggagacatatacgtgatatgcacagatctaattaatttttcttgatttccaggataaggtccaggacaagtttgtgtaaaagaaataaaaattgcccattttattaccaagtggtacaagatactagggactccaaattacaatcagcacacagcagtggccttgaaacaagtgtccagctaatatttatcaaattactgtactcaccaagagtgctcatcacgccgtaccctaagcttgacaaactaaaaccacaaaggggcagctaccattaccaaattcacaaatgagtaggaaatgccaatctagcacctggaggaaatgaaagatagcgtaattagatttttaagggtgttgctttgaaggacaaaatcaattcagagctgggaaaggtctctgaacaggtgtaaagaggtcttcttggaagaggcagtcgtggagacaggtagtgaaaagtcagaaaaagttcaaacaccttgagaggctaggaaaggcagaaaggactggggcctgtaaaatagggtt

SEQ ID NO: 43771 - DNA, 1301 bp, Bovine  19866880600059
  misc_feature (1)..(1): n is a, c, g, or t
nctgccacacctgagcacagcctggaagcgtggaggcggacgcattcagtttccaggcactaccactagcagccaaagccggcccctagggcccacgtttgctcacggagacatctccgccaccatgtgaatgaacaggagtcaacaatccaagaacaagaaagcaccctatactagctgctcctttagttataattctctaacttctgttttgaaatttcctatttaaaaatgtgtgtgctaatgacttgataattgtttatggcttttcaatgaagcatgaagggctgacaaagcagatttacaaatgtcaagtacaatgagaattactgtgtcttttttctctaagatgcaattttctattggaatgctttcataagttaaaagcaacaccaagtacatggaagaactaatggcaggccttctggagaggtcatgagacagaagatattctgtacaaaagccccatgacctgcaccctaatccctttcagtatggcagccagggagagagcagtcagtggaggaggaggactctccgtgtcgtcctaggagctctgctctggcctgactcccagcagcttcacttttaaactcttgagaaaccaagaaaacagaaacaggtgaaaagaaaaatggagtacctgaccttactttcagaaacactttctgtgggagcaataacatcattatcatccagtaagtatcctccactttaagctcagcttaaactcagaacaatgccaggtatatctgccacaagaaaactgagaagacatttaaggtactaccttgaatatattttttaagacttaaggcaactaatggaacctccagaatatttgttaccaagttttctgaaaggcagtcaaaatattataactacaaatctagttaacactattacaattagtagtatccactgtagaacagttttttaagaatgactttatgtgctatgtacattttctacctatgagaatatctataaaaagatattcactttttaaatctaagaaaatcagatttttaatgattttaaaatattatcaaagagtaatctggaagaaatactaaactacggtgaaacaataggcaaaactcctcctccaatgtcagaatctcacctgcacagatcctaacgaatgatagcctcaactctggtatgatgatggaaatctcactattacaaaagggtacgcttattgggaagcacagtttacaaattgccctgctattctgagccaaagccagtaatcactggtttctgatctgcaatatgaaaataatggaattctaccc

SEQ ID NO: 43772 - DNA, 1140 bp, Bovine  19866880617655
  misc_feature (1)..(1): n is a, c, g, or t
naatgacgctggtatttcttttcttcttgctttatgggcattggctaatttagcacatttatctgaactttggtttgttaatagagttgccagatttagctggggaaaaaagaaaacaacaggctgctcatttacattttaacttcctataaacaatgtatacttttttacgtgtgctgcaaatatcatatggtacacgcttacactaaacatttattatttatctgaagctcaaatttaacctgtcatcctgtattttatctggcactcttaaatgttaaaaaattttggcacttgtttttaagagatctctagaattggtatattgatattcctttttagagggaaaaaagtctgattgggctctcactagactgtattccttaggagcacaaatgtcaagtagcgcctgaaatgtaggtaatcattaaacgtcttccagttaccctattttgattacttttgtctgtcttcaatcctgggtgcttcagagctcaccactgtgctggctatacaactaactgctggtacagtggaaacttaccgtgttccaggcactgttctaggtattgtgtgtgtgtgtgcgtgtgcgtgtgtgagtcgtgtctgactcttgtgaccccatgcgctgtagccctctaggctcctctgtccatgggattctccaggcaagtctactggagtgggttgccatttcctgctctgggaatcttccctgacccagggatgaacccagatctcctgcactgcaggcagatgctttactgtctgagccatgttttgaatccatccatcctgtcagcgactttatgataaaaatcgtgttttcaccctcatttcacagatgaaaaaacaaaacaaactgagacagaacagaggatgagtgctgggtctgtggcagggctgggtgtgaacccgagtcatctgggtctggaatcaaaatccataactacttttaatattgcctcttgcaggtaatgcttgtaaaaccacataaagagcttctaggaagaatgtctttaaggttttctaagccaaatgtcatctactttcatattaatcatataaaacatcttagtgaccgctgctaaagtagacacctcactacactgtatgctatccttttcttttcttcatgtc

SEQ ID NO: 43773 - DNA, 2072 bp, Bovine  19866880618688
  misc_feature (1)..(1): n is a, c, g, or t
ncaaaaatgtaaaggacacagattcttcaaattcttatcagaacaagggaatttgatctcaacaaatccactttacactttgtgatctacttttcctcctttctgtccattcaaatgacatttctccaagaccaagcctctcaaaagctcactttttaaaatcaaatcttccccaacttccccaaacctcccatgacttactgtgtaactgggcctgcacctgtgaaggagatacaccactcagtatgtgccgggctttgtgtacattagctcagtttacctccaacactctggggaagactattactgtcaccgtttgcagggataatgaaaccgagaccgtgcaggtcataaccggcacaaggtcaaatgaagcaggtgtgagggctggactggagggccctggctgtccctgcggcctgggctcttgaccatcatgcgcccctgcgcgtcccgccccggcccctccgtctccattgagctcggcacacacttgtggaggatgatgaggtttcctgttaggaagccatgccttcagtgcagcagctgccgtcaaacagcccccaagataacctgtgagctctgaatttgtgcaaccagaatgtgtgtatagtcccttaaaataaccttccctttcatgcctgtagggaataatcagattcaacacatagccacttatttcatttttttcttaagttccaattaacagaaaaaaaaaatccttagcagtcaattgcatattatgatattccaaaaatgttttaattacctaagtttgcctagtcataacatacttaatgctttttactcttaaatcaagctaaatatggaatgtagtcctgggaaaaatgagaaattgattgcaaaccattttaatatcctcatgaatctttttatggaaataaaaacaatttcagcgaagctctgagaccttgttcgtgagtgcaaggactccagggatgaggccccagattcaagcatccttagaaaatgaattcagaagcaagaagccaagcaccaaagaagctccatgtgaaaataagtcttgtgaagacaccttgatggtgatgcctaattgaccatccggtctttctctcttaagaacttacagagcaaaccaaagtcattctagtttgcttagaggcaaaactaaaggttcagatctctaattcccagtgtgaactctctcaacatgttgaactggataaagttcatttcgattctctgaaagttaagggtcatgttatgaatccatttagattatatattcaaaacagaaggaaaactaagcaagctctctttgattaccaaatatgcccatggaataaaattatcagtcatttcagccaaaggaaaatcttttcttccatactttttgatggcagttcattacattttacccccaggctactctgtactttctttgccaaaatccattacatgctacacttttataatatgattggtggaaaacaggtaaacgtattgcattttagatatttctcctaagggtttaaacatggtttacactgacatactcactcactcacaaatagctgcctagaagaacacagttctgagggagggaaaggccttgcaggtgtatattataacagatctgagacccaagccgagtgccagtgactacgtgcatgacacactggcaaccaaccgcaatctaagagttcaaagcagcggctgatgtcagaaaacgagggctccaaagtctataattacagctccgaagacaagcgaaactaaaccggtgagtgtcactcactgatgatcgctgcaagacaggcattttttggtgccggtaaagtatcaaattactataactcaggggggtttttggcttgtatcatattctatcttctaatccaagcttaatgataaaagctaaagtagcatattttggtaacacttaaaagtttcagtttaatgaaagatgattacactacaataaaaaatgaatccctacctctttcacctgttcctccagaaaaatgttattttctacaaacaaaagaatattttagaaatcatggaatgctcttaaagggcatttcatt

SEQ ID NO: 43774 - DNA, 1416 bp, Bovine  19866880710775
  misc_feature (1)..(1): n is a, c, g, or t
ntgtttggcaaattttagcagtggtgatatatcgagattttaatttgcttggtgatggatctgttcacacatgaggtatatctggcttgattttgtcgtgatttactactgctggtgatcactttgattcgttagctgatgtctttacagaaattcagaaacagatgattgggattcagcagtgtctccagcatctaattcggtatgcaaggagggcatgtgtcatatttataggaactccgttatgttcatgattgggtgaatattttccctggacaacagcttaaagtttaccagggaaattactatgcattcataccacgtatatgaaggtatgtaattctgagtttaaatttctccccctgcacttgttctttctgaagcatctaagtctttgagaagcaaaacactgaatggctttttctttataaattctcagctctgtttcccagcatcccagtggagggccgtaatggtttaagtgtttggaagccgtgggaagtgaaagtcttcttggcacgtctggagcgggcccagtaggagcctgagtgaggcctgaatgatgctgctgggtgttgggatggagagctggtttattctcctgggtctgcaggccttgttctcactccagggctgtgaacaagatgctaaaacatattgctgatcctttgcctcagggagctgcatcaaggcttaaacttgatttaagcacataacacctggaaatatttttgtcctcttcaccccaggctggatttgaactactgacttagaggtgaagtgttctacagcctagatccaaatccctggagtcaggtaagctccttctcatgcattttttaaaattgtgctgggttcaaaaaagtgatggtaaatgttctggaggaaaaatatggtgatgttgctactggtggcagcgatggcaatattgatggaatatagtctgtccaaagttatcctgtgcattcaaaataaaaagtgtaaatcccccagcacaccatacaccaaaagcaaacaggtgggcacagtctacacgggaggagaccgtgtggctataacttctgcagaagaaacaggcacgtttttctgcagaggcttgtcagcgccgcacttcgtcaatgtgtgttccacggatggtctggttgcctcctctgtagtgatggggcacgctggctcccatccacagtgttcacccatcccttgagttctggagcagacagtgagactgtgtttcacaccggagggcttcttgacttcagcactgcttctgcctccaccacaagggttttattgtcacttctgtctggattcctattttgttcagtcagttgtctgtctttgcagagttcacaagtttcagcgaagattctgagaatgtttttaaacccttcagttaaaatagatcttcaaaaatca

SEQ ID NO: 43775 - DNA, 1682 bp, Bovine  19866880824392
  misc_feature (1)..(1): n is a, c, g, or t
nacggagtaggaagttagattcaaaatgtagttatcccactagtaggtaagagcaaagcttacctagctatttccattctctccttagtgaaagacaagtctgatttcctagaggtcaattatttcttcagatctttgcgggaaggaggcaagacacatgattttcagtactgtgcttagtcactcagtcatgtccaactctttgtgaccccatgggctgtagcccgccaggctcctccatccatggagattctccaggcaagaatactggagtgagttgccatgtcttcttccagaggatctctcaaatccagctctcctgcattgcaggcaaattctttagtctgagccaccagggcagcccaagaatactggagtgggtaacctaacccttctccaggggatcttcctgacccaataatgacatatctaaaaactcctacacagtgactcagcataacctctcataatgacaaccatagaagcaagaatacacaaaccttctttatcctactccattcgtttttgtctttcaaaccctgtaattatctgcctcattgttctttgtacccagtagccattctttcacagtattcagtaaagaaatttatacattcatcctagccaaatccttgacaagaatgtgcttcacataaaattgccagatgattttcaaagaaactaactttaaaagtcacacatttgaaggttgatgtttaggcttcacaaagagaaatcactgaagtaaaatgatgctcaaaaatacttgcaacttacatctatgacaaagataaaaaggattcctggtcagaactactactcgtcaggaatcctgaaagcaatatgagactcaagctgtgaatctgaaaaggaacgtaaagtattaacaagtactagcaatgtaccatcatcattgcctagaaatattttccccttgcttcttaaatatcatccatttttatctggattataacagctcctcttctgtctcccttgttttgctggccagtggaatagatgagtcatctcaccatctgggctggaggaaagagagacgtatggctgaataaagctgaatattatctacataatgatggccctgcagtccaaaatatctctttctcagtgtcctcatctacacttagtttttcttcaaaacaaaattagggggtattctacaaaagcaatttctggctacttcttcccacctctaagtcaacatttccaaacttttggcaatatagactccaggcagcactgacttttcaagggcttggtaatggctgaaaagcctagattaaattaattaagcaaaatattatagcaccatgttttttgaggtgccattcaaaactcttcataacgccattcctcaaaagtaaagtcagcacctgaagagacaaatgtctgtctttgctttgagataagatttaaggttgcacaaatgttgcaggttttcagtttatcatgtatgcctgtctctctgcgtgtgtatgtttatatagtctttgctaaatgccaggatatagtggagaaaaaaaagccgtatatcttgccttcacagagtttacagatgagtgtgatcaaacatacaggctatctgtagaacacacatggatttccaagcatattaagacctgtgtttaaaacactgctgctgctgctgctgctgctaagtcgct

SEQ ID NO: 43776 - DNA, 1978 bp, Bovine  19866880864849
  misc_feature (1)..(1): n is a, c, g, or t
nttcctagaaaacttgcaagagaaggaaaactatacagtgtccaagcttgggtaagcatggatttcctaagcttgcattattcagatggacatgattttcctgccttgtcacttgccaggcattgttgcggcttagtagaaataggtttacattgaaagtaaattcagttgaattaaagacctggatttaaaccctagccctgcctttttaactaggtaattaaaaatttctttacccacttcaaacttactttcttcacatttaaaatagggatattagtccctactttttggggtcacacacattagatcttctaatatatccagcacattgccaaccactttgctgatgcttaataaacattggccgtatctgtagaaatacaatttaagctctcaactggagagttaaattggtcaactcagatttttctgtcctcagctccaccagtccagaaggaatgaggttttctcccactcagtaacacaggccggcaacagcaccatccgggctgggtgttcatcgccatggcaacagccatcgtctccctgcctcctgctcagtgtttctgctcccatttcccctcctcagagccagactcagcctcacagctccccctcagatgtccttttgaaaagaatagacaaactgtagcaaggataaattggacctctctctttttccctcaaagtaagataccactgtggtccaattttaaagcaatgtaacaaaatattgtgtttccattctgataacaacacaagattctcttaattggtggaaatatataagaagtaggcaagacttttgatacttagctctggtggatttttgctctttagagccctaaactgggggtcagtccaattgaagtgactgcaagagcaaagacacagatgtaggagagctattggtgaatctggaggtgtgtggggtagctggtttgttggaggaaaaggctgacacaggtgaggaatagagaatacggctatcgtgctagcttgtggtcaggctgtgatgtaacgggtactgctcatctcactggcctcccaggagacgtcgtctctcattgtcccaaatttctctgtaataatctctatggagtcctacagtccctgtgtctctgtgattctagcatcttcaagtgatccaaacgtgtagaaactcagcagtatttggtcttaagcagtttatcctctatgaccctgcatgcaatggtaatactcgcataaattattcttttagctgacagttgccaacaagcagatatgtctaaattttaatttttacaggaataatatttttgtaaacattaaactgacttttttttttcattcccagaaatcatgtagctatgtagctctgtatttaacagatcaatggacttcaccgtgtcatgggagtttgaaactgagaagtcatttcttggcagtgagtggaaaaccatattttaaaaaattcacagtgagatcatagtgttgaaatccaggctctgttgggggagatggagcgggggaaggtggtttaaatttgccaaaattcccattacaaatcaaatgctaagcctacagaatctggatgactgtattttatcttaagccctactgtagcgaggactgatattcgctataagggacatttcccccttagagagacagggaaagcccttccttttttgagaggaggttgccaagagaagaaagcagaagaaatacaagtcatcagatgtgaatatcgcagcggcctggccccttggggtttaaccgttggagtacgtagcacaaacatgttccagaagagtggcttatcctagggtgtatttcagagcatctccacagctggcatgacactgcatctagccagtgccaggctgggttttagaaatggctgaggaaggtgtctagagggctgagctttggacatcaccccatttcttcatatcctgccgtgtgctatatcgctggcagggatggggga

SEQ ID NO: 43777 - DNA, 1370 bp, Bovine  19866880887077
  misc_feature (1)..(1): n is a, c, g, or t
ntgtttttgtgaagtgctctgttgccaggatacccagggtgaaggtgtcaaaggaagacacgttgaaaggacaagctatggtgaacatcccagaatcagccccttgcatactaatcgttccgatttaccctacgctgttcctgtctgctataggaaagatagaagagcccagtgtctaaataataaactatggggagaacagaaaacatgtattattcaaccgggcaatgcacacttcactctcttctttttcctttcctttaaaatgtagcactaagaccattagagagaaattctggtatttcattaaggcaagtaaggagatgaaatagatttctacactgacaacttcaggaaatttacaacagagtgaaaaggaaaataaaagggtgagaagaattaaagccacttccaacaatagcagaaagactccgtgatcactcattatttaaaaagcgtatactaagcactttgttaacaagcatcttgtaagcaccttccggggacatcgtatactaaataaagccctccttagacttaaactagattcatttgaagtagtagagatgtatggttctatactcaaataaatataaaaaaaagacaaggcaatgctacaagttgagagtaaagagctgagattgtcttggcagtaactcccaaggtcgcagcagacaacagatttattataagcaaataatatggtgtgccaggctcccaaggtggcttggtggtaaaaaatccacctgccaacgaatgagatgtgagttcaatccctgggtcaggaggatcccctggtgcaggaaatggcaacccactccagaattcctgtctggaaattctatggacataggagcctggtgagcgacagtctatggggtcacaaagagttggacacgactgagtaactgagcacgcgtgcaggacttgtcagggggtgggggggaatttgaccctggactctctcagtaatatcatcctggcctcgtgagttcactgtactgttagaaggtcggctggccatgccagatgacacccagactatcacgctaatgcagacaccgcatgtcaataaaaatgttggctcgctacctacattccagatgagaccaaacaggcctgaggacgtgcaggagggctaaccagagggaaaactctagaagttactctactggaataatcaagaaactgagggtgtttaaaccagagaagttcacagtgttggtgaaaatgctattgacacggcagaaatcgccaaaatcaactctaaacgtgtccgtcttggccaaaaattgtccgagctcaaaactggctttgttctctcactgtctgacagagtaagaacttgaatggcacatttcccaaaggaa

SEQ ID NO: 43778 - DNA, 1211 bp, Bovine  19866880918830
  misc_feature (1)..(1): n is a, c, g, or t
ngcattcttgtgatggttaactttatatgccagtttagctagattaccatacttagatacttggtcaaacatattaagatgtttaaggtaccttttacaaaggtaacaacatttgttaacatttaaactttgagtaaagtagatatttaaactactgttaccatttaaactttgagtaaagcagattattctctcaaatgagaatgggcctcatcaaatcagttgaaggctgtaagaagaacaccagggtccctgaggaagaggacattctgccagcaaactgccttcggacctgaactgcaacatcagcaaggattcttcccagctccacagtcatggcagctaatttcttaatctgcctctgtcactgtcaaaccggccatcgctgattttaaagacaaaagtgggccacgaaccaatgaatgtgggcaccttgagaaactgaaaaaggaccaggaccctgagttataacactggtcttgcacaggagagtgatctgtgttaccagagatccctatatggcatggttttcaggaacacattgtagacataaacaagggttgttccaggaagtggaaaggacacgaaccagtgaaatctgaaacacacttgcaaccaaccacaggatctgggttaagacaatttatgattccaagggaacttggggaagaaccctaaatgaaatttaatatattgttccctgagttatttttgtttatgactctataggtggttatttgttttcctcaatcttgttgcaaaaagaactggaagagaaaggaagagcaggaacaatttgaccctcagtgaattctcaataaaatttatatatatgtcccatatatgtacgtattttgtgtatatattggatatatgtattttatgtatcccttatgggttctgtttctctgaaaaaccctataacatcttcctagacttttctacccaaccctgcccttatcccacatcttctgattgagaaaggactagtcccagtcagtgggtccataactcaatagtgaatgcaggtgaaagggatctacaaactataaaatcttgtgaacatgtatgctaacatcattattatcattttagcgttatcattttagacattcgatttgaaacactagatacaaggtctgctcagtattacataatgtgaaaggctggaatctgagagaaggaagagcacacagggcagagtgatactg

SEQ ID NO: 43779 - DNA, 699 bp, Bovine  19866880946652
  misc_feature (1)..(1): n is a, c, g, or t
ntttgcacagttcgtgccccagaaccctccatcccagagcagtcccagagtaagaaatctttaggtgggagaagagaaacaaattaaacatgtcaagcatatcagtgctataacacagaagttcccgaaggacatctgaaaaaatctatgaaacatgcagacaacaggagttttaaaccatactctcaaaacacaaactaagtttgagtaatgctaacctaataaccagcttacaagaattttgtttgtttttaattagcctacgtctgcttcaacagatctaaccacactgtttgcttccaatgttaataacagagaaatacagtttaaagcaggggttggcgaacttctgcaaagagccagacagtaacttaggctttgtgcgctatgctgtttttgtcccaactactcctctctgcccttataacacaaaaacagccagagacgattcgattcacacaggaacaagcgtgaccacgtcgtgaattatttaaccatttaaaaatggaagctccagtctcccattgtggtcctacaacaacaggcggcaggccccactgggctgagttacctgacttccccagagttcaagcccagagccccgggcaaaaggaaggagagcgcttgcccggaacttccgtcactcttgtcccaccccatctccacccccttctttaaaaaggcctagttaggacaaaa

SEQ ID NO: 43780 - DNA, 598 bp, Bovine  19866880974092
  misc_feature (1)..(1): n is a, c, g, or t
nctttcctttaggattgactagcctgagatcaaaccgtaaatcctaaagtgggagctaagattgccacaattagacccacaggaaacagaagagagattgaacgatagcacgtggcagacaaaaaagacagaatatttgtgtaggaaaatgttctttatctttggcggcttagagctacactaagaggcattgctatgtagccaggagcaacaattattctttaaatggggttttcaagttagacaacactattactaacctcaactgaaaaacgagcaggaaaaaccaccgtcccaaaatggattcatacaggatggcgattaaccaactccagccaacagatcagatttcctgctctttgagaaacttaataaaactctaggacttattgattttgctcttcctctagacagaaatatgccaagaatatacacagagaaaataaataatctcgagcttttgtaagcgagctaaagcaaatgtggagttacaggctctcagagtgaacccagggacaggctggttcagcacgcagcaaacaggataaagattcatggccaggtgcttgtcttaacaaagatgaaacacctatcatat

SEQ ID NO: 43781 - DNA, 1993 bp, Bovine  19866881046368
  misc_feature (1)..(1): n is a, c, g, or t
ntttctttggcacatcggtataattagccctttcaagaagagaacaaaactgtgttggaaacctgatttgaaataacaaacacctacgtgcagtgatgcagttttgggggtgggggactgttttttccctcttgcttttccttcctggtaagacatgattttatgcctttattccccattcagtgatcctaatggtcgtggcataaattttgcccggtgggtgaaacaccgcctctctgggtacttcttgttgttttggaggattttcttggaaagaaccaaacctgtggtttccttagagggctgcctggaaagtgaggggtccctgcccagccaggctccagacaagtgtctctgtctcttcttgcccaccccactcagtgactgtgactccctctcccctcaatttgcaatctcttcctgttcaagaaaaagatgctgtaagaaagggctttcagagtcaagagaggtctgtgaggcacctgagaaggctttaggggagagtccttgaaagagttgagctaggactcttaatggtgcttttgaactgtggtgctggagaagactcttgagagtcccttggatgcaaggagatgcaaccagtccatcctaaaggagatcagtcctgggtgttcattggaaggactgatgctgaagatgaaactccaatactttggccccctgatgggaagagctgactcactggaaaagaccctgatgctgggagggattgggggcaggaagagaaggggacgacagaggatgagatggctggatggcatcaccaactcgatggacatgagtttgagtgaactccgggagttggtgatggacagggaagcctggtgtgctgcgattcatggggtcgcaaagagtcagacacaactgagcgactgaactgaatgaactgaactgaagggtttttttggtagaaactgacagcctttcaaagtttacaaggaaatgcaaaggatatagcataaacaaagcttttttttttttaaggaagacttccagtactttattttaaagctacagaaatcaagggtgaggtattggtaaactgagggccacaaagacccatgaaccagaagagttcagaagtgggtccacaaatacacagtaaactgattgtcatttgaggttgaaatttggttgggaaaggatagttttttaataacaaacattgaaatatttaataaaaatggaggcaaattagatatacatgtgttaaaaaaacattcgtctcttaatctcacatcatacataagaaataatgcaaactagatctcagacttatacataaaggctaaaaatgagaggggagatctttgcaataaaggagcaggccaagatggcttaaataataactcatgctctgaatctaataaaaaaaacctcaacacaagacaaaatgaaaattataatacaacttcacttaaatatatagatatatatctacttgaattccgcaagagtaaaatattacaaatatttccattaaaatcagaaacaacacagtgttgtcttctaccatgcctactactgaacatcatagtgtaacttaattcatgcaaagagagaagagaaacgagtaagagataaaaatatttgaaaatagacctaaaaaaaaaaatatttgaaaataaatctgtcataacttctggatgatgcaattaactatacaaaaatcaagcaaagaaaccaaaaaactatcagatttaagaaaagttcactgagaaggtcaaatacaagaacagaaaagtcatttgttctcctatacactagtaataattaattttgaaaatataacgaaagggaccattcataatggcaaaagaaactgaaaagtacataagaacgaatctagcaagggaatgttcaagattccttatggattagaaactataagatatgaatataatggctactgaaagacaggaaaaggagtgggagatggaaatacacaaatttcctattaccctaatcaaat

SEQ ID NO: 43782 - DNA, 1230 bp, Bovine  19866881060120
  misc_feature (1)..(1): n is a, c, g, or t
naaatgaccccctgaattttaggttccagcagtgagtgtggggacttaggaatgctgataatgaatggaagtggagcttgaggttttctcccgagagctcagagggtctgtaaacccgggccttgtggttatttcccaagtttccaaaagcatatttggcaactggtcaaactctcacttcctggctgttcactcgagggtgattatgatgggaagggccaagaggaagcccctggaactgtcccctttctaaaagtagtaaattaatagtgctacaaccctggggaacctttagggattgatatgatcaccaaaggcttgaaagatgcaggggtgatgattcctatcgcattccaataaatctctcctgtttgtgcagaagaaagatgacgtttggagaaaaacagtacattatcataaacttaatcaggttgtgacactaattacaactcctgcctcaaacgttctgtcttctctggagcaaattaacacatcctctggcatccagttatgccgctattgatctggcaaaggctttcttctctgcaccagtgcacgaaggccactcgcggcaaatggaaattctgtattaagcctctgacaaagccagataagagaattacagtgcaaccgtcagggttttcgagcaaaacatgctctcttcgacagacaattcctcttttgagaaatagctcttggaataagtctggatccaagtaaagactgaatgacacagcattcacgcaatggcacggcctgagctgcctgtcacgaactggaagttgctgagttcactgagccacagtgggcatggggcggcatcgctccagaatcgagtggaagtttatgaacgagaccatgttccccgaggctcgaagacggaaaagctgtgtgagcagctggctcagtttcttgtggctcctcctccggcgtctttgttagctctgccttgacccacacgtgcagtccttgatggcattgccccgagatcatccggcttgataaacgcccacaactgggcctaattttgagaggattctttttttttttttttggggggggggacagttgctggagagaatacacgttggaggggttctccaggcaccaacagaacatggacctacatctaggtgctggctggttagcagatttcaggtaccaggggggaggcagagaagccttgggaagggagggaagagggaccagggccatacgaggggaggccag

SEQ ID NO: 43783 - DNA, 2435 bp, Bovine  19866881077991
  misc_feature (1)..(1): n is a, c, g, or t
ngtagctatcaagctacttgaagaatttaaagctatgccccaactcacatagtattagtgttaattgccagccccctaacaagaaaaaaaaaaaaaaaatagcccttaatgttagtgcaattaacattctgatccaggagtagtaagctggctgagagactgagagcaataaattcagtgcagggacatttcctgaatataaaatgacccttagtattgaccctgagatgaaatcaagttgaaaattgattggggaaaaatcagatgggatagttataacatattcatgattttatcgttcagaagaaattagaggccgtttctctcatcactgtatctctaaaacgacagaccccccgaaatagtctcgggctaagcagaggagtgcccaagtaggatgcatggctcatcgcatgtcaacatcagttttctgggcttttggcgcctcatccccagtcttcatcgatggaaaactgtctgcagaaccttggcacaaaaattaccctgtggattccaggagggtgtatagctttttgcagcagtttgggattcctactgaaatcgccttactaacctgacctttaaagtccttgggcgagtggatgagaggatggaggtcaaagaaaggagatgatggaggggcgctcacccattgcttcactgtggcgtgtaagaatacgcaagatctgtcacaaagctgcattctaaaagaagcttcgattccttattagaaactgatcaaccaggttccagagcgctaagggaacgcatgtgttctgaaatcggcagatgggtggaaatcttctagaggtagaagccagagagtgtcatatttgtctttgtatcacctatgcgtgagctacgggaagcactcagagttggtggaaaggaaacctatgggggaggggcccatttttggtaaggttgcctaaaaattcctcacactaattaaataaagagaatttaaaataaagatcaggttggaggtacggtaaaatctttgtcctctgggcttgtatgtctggaaatgcatcttttctgagcaaagggcagaggtgcatcagttaatatatgtttaactggaaatgtcaaagtatcttggaggaaaaaatgtagataatctgtagtcttaagagtctggttattcttttgtgctaacattatttataatgtaagtgagagacatcaccaagactggcctgaaaagtgataggttcaaaaggaagtttataatttgcattgtgtgttgatatgccaactattgtccaaattttcaaccaatataaaatatctttaaagttttcaattgttagatttgttggaaatgaaactgaagctggcaacatagtaatattataccatttttatgagttctacccaaaagattggtacatatctagctacgcatgttattctggaaagctgaaatcatagttaatgggctgtattattacttgacattattgaactcagtgagtaaatttttaattaatgaagctgataaagttacagaaaaatgttatggactccttttttttttttaggtcttaaaaaaatgcttcctggagtccacattctacttaaatggactccctacttcatggaaatgagataaaaaacatttaaaatctgcttgggcatttaagatatcaatggttcgtgaataagaaaaaataaatcacaagcggacactaaaagcatgtctctggttctaacttttttaaaggaaattttatttacacaccctagaatcacgtaatggactcacgcaattcacatgcttgtcttacctctttccaagtgggtttcactgccagatgcaggcccaggggccgccgtggcccacctgcacctctgtgcctcctcccgggggccgcggaggagggagcgatgcccgccacgccggggtcaatgagggcagctgcgtcctgcacggcgaggcgtcaggggcaaagggaggcagaggacggttacgtgggccgcgcttgcgtttgccgatgccgtctccatggtggtgcgtaaggcccaacatggccgaagtaattaaagggtaatttaatacgaaccttgtgaataaatgaagactaaggatggaggtgtgttgagctgactttagacttacagctgtgaaagcaagatgtggtctccatggaatctgatgtttcactacagtagaagtgagacatatcctgattccagctgttgatctgagtttgctaaagggcaggatttatacgtgcagggaagttagcaagccgcactcccgaggatctgtccttcagcctcttgggggtggcagcttagatgccacgttatcttgcaagaccacagactgcagtccaccaggctcctctattcatggggttttatgactctgaaaaaaagaagaaaacaaaccacagaaaaggtggtgaggtccgggatggggagaagga

SEQ ID NO: 43784 - DNA, 1283 bp, Bovine  19866881094197
  misc_feature (1)..(1): n is a, c, g, or t
nccgtaactgctgcgaactgtgcacggtgcctgtggacacactgcctcctgaggaagagatgggcccgactgtggcgggactctccacggaggtactgaccccgccctcctcagggacgcgccaggcacgcacagacgacgccacggctccaagctgctcagattctttggcgatgctaaatgcctctcatatttcagtgcattctggcaggtggcaaggctagaaaatctcacactgtgttacaagtcctgaggcaggaaataagcagtagaaatgcattttccagggcacttgttaagatgtcaataacagttatcctgttttaaccaacaaggtagcatgacagaaagaaaggggaaggtggatgggtgtcctcagataagtacaacaaagaacattttttcccaacaattttcacctttccagaaactagggagatcaataaagcaccaatcaattcttttaagaaaggcaaaataaagtataaaccttaaactccctcttacaagaaaaggagggggtggtgaaaacaagttgagagagaagactttattcagtaagtggtgcggacattgaaatgactggttaactccctataagaaacagttaagcccaaaccaaaataaatcccatacataataaagagttacatttaacacatacagatagagaggagagatatacagacagatgtctagggatgagggcttccctgggggctcggatagtgaaatggccacccataccaggatcctcatctggagaattccatggacaggggagcctggggcctacagtccactaggccacaaagagtcggacacaactgagtgactaacacttttcacttcacaactatggataaatgaaaaaaatatatatttgaatataaaagcagggaaaacaatctgcaagaagagcggatgtaggtatcactgctcaaagcatcaaggcagtatggctccacgacgcttagctaaacagcttaatcaagttcctcctcatccctggaaaatcagcattctagacggaactttccattctagcttgatccatggctcatcctcccttgagattctcccagcatgccctctcccaaggctctctttccctaaatcacttccctctcctgagggtgtggttttcccagttagtgcacttgagtggtactcctattccccagttttgaaaccttcacagaagtttctgtttataactcaggctgttgatagtgcaagaaaagggagtgatgaagagaagagagttggacaccagatacaca

SEQ ID NO: 43785 - DNA, 1589 bp, Bovine  19866881100872
  misc_feature (1)..(1): n is a, c, g, or t
ncagtggtgttttgttcactgcaaatatgcctgggagcacaggctgaatcttcagttgaattttctctttgtctctcctggctagtattattttgttgtttctttctaaccactttcatcttcagaagaggacgtctgaaattcctggttgttctgactgacaaactcagtattatcagtggacctttccactaaaggtgctgaatctacctctccaaacgcatctcttaattcacagttgaaagagggagctgttggtgagagaccagtgtatgcctctgcctctccattttccagctcaaataccgtatcacccagtgctgcctgatagctgccaccttccacaacgcctgcagagagctgaagatggccattatcctctccgtgtctgccgtctggatcgtaagagtcagtatgagccaatgtaactccatgctggacgcctgaagcattacagactcctggagtacactctccctcagagtgactgtgcagatctgtgctgctccctaagggctccctgccttcctcgctatgacgcactgcagcaaaggatggagtgctctcaatggtttggttcaatgctgtatcacaaatgggaatttctgcttcacttttttcaaataaagggtcactgggtacagaagaatgaacttgatccagtggactggaaccttcacagaacaaaagaaaacatatttagaggggctaatttagataacatgaataatgactctttaactaaaaaccataccaattattacctatttgagaatatgagtgaatttctctgactggtgcttctacactccctaacttaaccgggagcggcagactggttaccctatgagttcatttatgccattgtatagcctctcaatatcctctctctcggacatcttctgcaggtttttcacccaaatcctaatacttaaaacgttctaaacaagatatttaaaagacaaactaatgagagacctgagagaagtcacagggtaatcaatctactcttccagttgttggaatgggcaattcaaacttaaaaattattttattacatgcagatttctttaaagtgtttataatagctataagaacggcagatctaacagaaatgagactgtgttatatgtcaattcagaaaattatatctcagtcactagatacataatattaaaatttctatccccaaaatgaactgttataacatatctacaatgagttaacttcagttatgttacagctatgactgaaaaacaacaaaaaagtcaatatattgattctctttgtcatagtttctaagaactatgagacaagagtaaaatgctatataccttacaaattacttccagcacaactatcttttacactaatgtataactagaaaaaataaagacaccaagacctgtcgaaacaaaattttacaaattataaataaagttgtcctgtcatatcacaaaaaggcttctttagcagaatgaccttagctaataattcatattcttgaacataaatgacagaaaaaaaacaaccctagaattatcaagtttgctcaggataaaaagaaactgacattccagtccaaaaat

SEQ ID NO: 43786 - DNA, 798 bp, Bovine  19866881124420
  misc_feature (1)..(1): n is a, c, g, or t
nctgcatgtgaaatcacaaggacttcttgcaggtgctgctgctaaggccctatccctgggatctgacgaacttgctctgaagcacagctgggcctctatccatgtggcctgaacgctgagttcatttcctcaggactgcaattcccaagcttgctctgttctagcgtataccacttgcccagtctccttatgaccatcatgcactggcatgaaatgtttagctgggtttcgagggatcatgggtaactctctcggggtacaggttgtctagaggagagcgcaactaaacgggtgcactaaccgcctgaactaactacggataactacgttagcttgtgttacaaaaggacagtagcagcatctacccaggaaagcaagaacatgttcagtactcaatacaagagccaaaatgatcatacagtgttctaggaataagtgtttacaccaaaatgcttagaatcaagtggaagagaccaggataatatctgtaagacaaagaagaacatgtaatgcatatgctcaattggcatgcagagagattctaataatactggccacagttctttttaaaaaatgagagaggtcaggggttggtgtaaatgaaggaagtttcccaaaggcggtacaacctgaaggccctgagagaggctgaaactttctcaaatgtaaggggatgagaagaatcaatagattttaccctagaagcaattgcctgtttttcttctcatttgcttccttatacggatgccccccattctagaagaatgcacttcactgcacacaccccaccaacagggg

SEQ ID NO: 43787 - DNA, 892 bp, Bovine  19866881143564
  misc_feature (1)..(1): n is a, c, g, or t
ngttgtgaaacctgaagacatttgattggactgtacagaatccataatctttgctttagaaaggaagccacattttttgctctactcacgaggtcatgatggtcaccctgtggctgaatatggatcggtttctctctcatttcccagacagtccataaagatcatcctatttatttaggactcctcattcttttcttacctacatttcgggttacagtgaagattttatctttctttaaaaattgttagtttcatttgtatttgtactataggtgtatgtgccacaaaatgacagttactgcttctttgtcttagaaaaaaatgttgcacacttttttctttaaagtaaatattttcagttctgttttgtgccaggcgttgtgctcggcatcagaatgcagtgggtacagtggtgagtaaacagctgtagtgcctgttctaaatatagtgattcatttagtgatgaagattgggaaaaaatacatgaataaaataggcaaaaatactgtggaagaatcaaaacaataagctgacaagaagtgtgacacgaggaggcctattttagagaggacgcctggagaagaccgggcagaggggcgtctgggaagcggcgaagcgctgtttacagacagggcctgcgcaggacctgggtgaggcgggggagctggctgagggcagggacgagacaaggggtgggctgccatgccggcgcagacggtaaggacccacctgcagcctgggagacctggcttcagacgcctgagcgtctaaaagcagcacagcacaggagaagggtgtggctacgtagaaagcgaagaagaactgaagagcgtcttgatggaagcggaagaggcagagtaaaaagtggtcttaaagctcaacattcagaaaa

SEQ ID NO: 43788 - DNA, 702 bp, Bovine  19866881154918
  misc_feature (1)..(1): n is a, c, g, or t
ncagtagtccattctctaccatgatgcccggttaacactccagatgataaacacacttgtaatgacagtttttttctgttctaaacttgcagttcagaatgcagtgatggagaatggtctgcttctttgcctcatcgattttctggtacagaaaaagatcagtcctcaagcgatgaaagctgggagactctgccagggaaagatgagaatgagcctgaactacagagcgacagcagtggtcccgaagaagagaaccaggagttgtctcttcaggaagggtgtgtaccagtaggatttgtgatttttatgtgcattgcatgaagtgttacgcatcacatgcaaatgttgggtatgctgttaatcacatttgcaagccctatgtaggaccagtagatcctgctgaattttgttatgcttttggttattttccaaagaacaattaacttgaaaatactggtaattacagtgtcttctcttgaagtacagtctgtgtttccattttgctttattaaaagaaaccgtgggcagttaaacgattgttttggttaagtcaggtatgagtgaatcagagccacctgcttctctggagatgctgacgaggtggaagggacggccgtcgggggagtcagtggttgttcctggggacacaggcagttgtaaaagccggaagttttactgttgctgtctgattgcattggatga

SEQ ID NO: 43789 - DNA, 1303 bp, Bovine  19866881196146
  misc_feature (1)..(1): n is a, c, g, or t
nttaaaaattttaagtattttgctctatttctcactcaaatctgagaaagatacgaggcaaatgtttattgccaatgtattaaccaatagctactacgcaaaaagaaaggtcagtctagtattggaaaaataacagaaatgaaaacaaccactgccaaaaagagacagggttgctaagcaacaaaaacaaaagcaaagcactcagtttgcttgttattcatacttgtttttcacttatttacaaaatgttaatgttaaacctaaaaggaaaaatcctccattatacattatatcagttcatttttcaaaatgattaagtaagtgcacgctagacctaggaaagcagagatttctcgagactgacaggaagaaggaagtgtgctggttctctaggagtgaaacatgtctcagtcaactccaaataaaacaaagctgagcactcgatctgaagaagcggttatgctgtggggagaagggagacacttaacgccgttgatctgaatgaaccaggaggacggatgggtaagaacgactgagagtgtgcagccacggggcttccctgaaagcagagggcggcagtgagagagtctaagctccctgggtgtgcgatgctctttcccgcctcatgtctttgctgcgcagctactgcctttacccagcatgaccctagtgacaagcctctctggctcttctttcaagatgccaaatgtcacatttctcattaataacaaataattaagtttttaattttcaaaacttctttctaaagatattaccacattgtatgagatcataaaccactagcataatgggaaaaaactatttaagcactgcaaaaccagactccaatactgatatattccatgtggtcacttaaaatttgtttaactcaacgaagttagtaatctttaatctttacgtattctatttctgatgcaggttatcatgctgtgccagtatttccgtgtcagaatttggcaaggcaagttatataacctgggaaaagtcctaagaatatataattctgtctcatgatgttctaacttttcttctagtatatagtatttccccctcttccagttttactgcaatataattgatatacagtaccatgtaaatctgatgtatatagcatgatgatttgacagagataacattatgaaaccattatctcaacaagtgtagtcaacacccatcatctcaatagatgaaaaattaaagacccagaaaaaaattatttccttgtgatgagaaatcttaagatttaccctcttaacaattttcacatataatgtcagtataa

SEQ ID NO: 43790 - DNA, 1026 bp, Bovine  19866881236673
  misc_feature (1)..(1): n is a, c, g, or t
nttgcccgtaactgtgcgatgcagagcaagtgcgtttccgatgaaactataaaatggcaacagaaaatggggcaaaatgattaaattctcaggaggcttaggagccgatcagatctggtttcaaatttgcttctttcacttaatcgtgaacttgggcaaattagttaccctctctgtgtctgatttcgcttccataaatggcaggaacaaggcctgctccgcagaactctgtaagacaaacgtaatacaacggaggaagagtgtagcaggttatttaacacatccacagcgctcagaacacggaaattctattatttacctttattgttgttaacaaatgtgcttacattttacttggaaagatacagactgaataattaaggacaattctttttaattaggatgttgtgaataagctagaaatttctcagaatgaaatgctggatggtttattgctgatgacttaattataatcttgcctaaggaccatggcctgaaaatgctttctagccacacaattctattttttccatgttttctcagcaataaagaggtcagtcatagtattgacctacttcataagttttttgaagaatgtcaaacttgagtgtcttaaatagtttgaaaaatgcaagtaacatatacattaattatcttttcttctgaggtccaatccaaaactactctggtaagccactgactaaacagtctttgtctatcaggcacttgccaattggaagaacggaaatgcccccaagtagtgttggaatatattttggtgagtttccatggcaacgtatagactgctttagaatgccttaactccataagactcagttctgttacagtcaagataatcaatcacagtattagaccaccttgaagtataagtcaagccaatttccatttttattgagtatattatactttaataatttctcttcatagtacacctttcaccttatgtgaaaacacaaataacttgcttcatcttcaactgccatctcaccacttagtgcacaacca

SEQ ID NO: 43791 - DNA, 808 bp, Bovine  19866881263370
  misc_feature (1)..(1): n is a, c, g, or t
nagaaatgtgagccagaccctcacaaatgtttcctcaatggggtgtctttcctcagcagtttagtattttattcttctttgcgtataactttactatttttagagaattatctctaaatatcctgtgagcaaaagattctggaaggaaagttattatacctgattttttttttttttttttttgcatttgaactgcagaattctgtagcagaataaatattcttgtttgttacaggcaccttatctgcagaaaacagtactacactttcagataaggccactggatgtatcagtgtttaagtcataattatgatgtaaagattaatctctgacttttttgcttagatttttctttgatacagcttcactttactttttcataagttctctaccataaataaacataactactgaaatccttttcctgcataaaagtcctttacttatttattcactcaaatttttgctgcttactctagcagggacagaaagataaagagaacataggctattttctatattaataaactaataatgaaaatgttcataatcaactcttaacagttaaagtacagaactatggcatgctgctgctgctgctaagtcgcttcaatcgtgtccgactctgtgcgaccccatagacggcagcccaccaggcttccccagtccctgggattctccaggcaagaacactgcagtgggttgccatttcctcctccaatgcatgaaagtgaaaagtgaaaggggaagtcgctcagtcatgcccaactcttagcgaccccatggactgcagcctaccaggcttcct

SEQ ID NO: 43792 - DNA, 594 bp, Bovine  19866881270166
  misc_feature (1)..(1): n is a, c, g, or t
ngaggttgctttcttaaataatacaattgcaaacatattgcaaacttacatacattctatatcttgagttcactaggaaaaataacctttaaagttcttacactagctaatttattatacattttatacaggtcagattttatggtatttaaggaaaggctgctataaaatttgcagagcaatgagaagttacagtgtgtcttgtgatgttcagagtaaattgcaggtttggatcgaatttagagcctaaagatacatagcgtttcatcaaaggagtcaaagcagtgcccggtgtctcagatgactttgattctagtagtgaagcagaggtgtaggtttatttcagaaagtacgtactccatcccggtgcccgccctccagtcctggctcgtccctccccctctcattcagttcatcactggcttccgctgcatcagataggggcaaaagcctggagcgctgatgagctgctctgtctgtgggtactcttcagtcctcctaggggatttcttagcagtgttgacactgaccactccattcgccttgaaattctttccttttttggtcttctgtggcccagagctcttctcctgg
